(19) United States
(12) Patent Application Publication
(10) Pub. No.: US 2026/0176601 A1
(43) Pub. Date: Jun. 25, 2026

(54) DNA POLYMERASE VARIANTS

(71) Applicant: Codexis, Inc., Redwood City, CA (US)

(72) Inventors: Ericka Bermudez, Aptos, CA (US); David Elgart, San Mateo, CA (US); Jason Fell, Martinez, CA (US); Michelle Li, Millrbrae, CA (US); Marissa Greene MacAvoy, Emerald Hills, CA (US); Mathew G. Miller, San Carlos, CA (US); Vesna Mitchell, Santa Clara, CA (US); Jovana Nazor, Milpitas, CA (US); Kevin S. Nelson, Geneva, IL (US); Scotty Walker, Gurnee, IL (US); Anthony S. Muerhoff, Kenosha, WI (US); Shouqiang Cheng, Glenview, IL (US); David Christensen, Stickney, IL (US); Alicia Case, Kalamazoo, MI (US); Christopher Marohnic, Oak Creek, WI (US); Nazanin Nahrjou, Mountain View, CA (US)

(21) Appl. No.: 19/127,897

(22) PCT Filed: Nov. 8, 2023
(86) PCT No.: PCT/US23/79158

§ 371 Date: May 7, 2025

Related U.S. Application Data
(60) Provisional application No. 63/383,053, filed on Nov. 9, 2022.

(51) Int. Cl. C12N 9/12; C12Q 1/686; C12Q 1/6869

(52) U.S. Cl. CPC C12N 9/1252; C12Q 1/686; C12Q 1/6869; C07K 2319/00; C12N 2800/22; C12Y 207/07007

(57) ABSTRACT

The present disclosure relates to engineered DNA polymerase polypeptides and compositions thereof, as well as polynucleotides encoding the engineered DNA polymerase polypeptides. The present disclosure also provides methods of using the engineered DNA polymerase polypeptides or compositions thereof for diagnostic and other purposes.

### CROSS-REFERENCE TO RELATED APPLICATIONS

[0001] This application claims the benefit of U.S. Provisional Application No. 63/383,053, filed Nov. 9, 2022, which is incorporated by reference herein.

### REFERENCE TO SEQUENCE LISTING, TABLE OR COMPUTER PROGRAM

[0002] The Sequence Listing concurrently submitted herewith as file name CX9-227WO1_ST26.xml, created on Nov. 8, 2023 with a file size of 4,056,133 bytes, is part of the specification and is incorporated by reference herein.

### TECHNICAL FIELD

[0003] The present disclosure provides engineered DNA polymerase polypeptides and compositions thereof, as well as polynucleotides encoding the engineered DNA polymerase polypeptides. The disclosure also provides methods for use of the recombinant DNA polymerase or compositions thereof for diagnostic, molecular biological tools, and other purposes.

### BACKGROUND

[0004] DNA polymerases are enzymes that synthesize DNA from deoxyribonucleotides. These enzymes are essential for DNA replication. There are various types of DNA polymerases displaying different properties and found in different types of organisms. Polymerases obtained from thermophilic organisms have found wide-ranging uses in various in vitro methods, including but not limited to the polymerase chain reaction (PCR), nucleic sequencing, and other diagnostic, molecular biological, and forensic applications. While there are numerous commercially available thermostable DNA polymerases, such as Taq and Pfu DNA polymerases, a need remains in the art for thermostable enzymes with improved properties, such as enhanced sensitivity, processivity, and/or fidelity.

### SUMMARY

[0005] The present disclosure provides engineered DNA polymerase polypeptides and compositions thereof, as well as polynucleotides encoding the engineered DNA polymerase polypeptides. The present disclosure also provides methods of using the engineered DNA polymerase polypeptides and compositions thereof for diagnostic and other purposes.

[0006] In one aspect, the present disclosure provides engineered DNA polymerases, or a functional fragment thereof, comprising an amino acid sequence having at least 80%, 85%, 86%, 87%, 88%, 89%, 90%, 91%, 92%, 93%, 94%, 95%, 96%, 97%, 98%, 99%, or more sequence identity to a reference sequence corresponding to residues 12 to 844 of SEQ ID NO: 2, 220, 226, 272, 328, 546, 710, or 1208, or to a reference sequence corresponding to SEQ ID NO: 2, 220, 226, 272, 328, 546, 710, or 1208, wherein the amino acid sequence comprises one or more mutations relative to the reference sequence corresponding to residues 12 to 844 of SEQ ID NO: 2, 220, 226, 272, 328, 546, 710, or 1208, or relative to the reference sequence corresponding to SEQ ID NO: 2, 220, 226, 272, 328, 546, 710, or 1208.

[0007] In some embodiments, the engineered DNA polymerase comprises an amino acid sequence having at least 80%, 85%, 86%, 87%, 88%, 89%, 90%, 91%, 92%, 93%, 94%, 95%, 96%, 97%, 98%, 99%, or more sequence identity to the reference sequence corresponding to residues 12 to 844 of SEQ ID NO: 2, or to the reference sequence corresponding to SEQ ID NO: 2, wherein the amino acid sequence comprises one or more mutations relative to the reference sequence corresponding to residues 12 to 844 of SEQ ID NO: 2, or relative to the reference sequence corresponding to SEQ ID NO: 2.

[0008] In some embodiments, the engineered DNA polymerase comprises an amino acid sequence having at least 80%, 85%, 86%, 87%, 88%, 89%, 90%, 91%, 92%, 93%, 94%, 95%, 96%, 97%, 98%, 99%, or more sequence identity to the reference sequence corresponding to residues 12 to 844 of SEQ ID NO: 220, 226, 272, 328, 546, 710, or 1208, or to the reference sequence corresponding to SEQ ID NO: 220, 226, 272, 328, 546, 710, or 1208, wherein the amino acid sequence comprises one or more mutations relative to the reference sequence corresponding to residues 12 to 844 of SEQ ID NO: 2, or relative to the reference sequence corresponding to SEQ ID NO: 2.

[0009] In some embodiments, the engineered DNA polymerase comprises an amino acid sequence having at least 80%, 85%, 86%, 87%, 88%, 89%, 90%, 91%, 92%, 93%, 94%, 95%, 96%, 97%, 98%, 99% or more sequence identity to a reference sequence corresponding to residues 12 to 844 of an even numbered SEQ ID NO. of SEQ ID NOs: 4-1378, or to the reference sequence corresponding to an even numbered SEQ ID NO. of SEQ ID NOs: 4-1378, wherein the amino acid sequence comprises one or more mutations relative to the reference sequence corresponding to residues 12 to 844 of SEQ ID NO: 2, or relative to the reference sequence corresponding to SEQ ID NO: 2.

[0010] In some embodiments, the amino acid sequence of the engineered DNA polymerase comprises at least a mutation at amino acid position 2, 3, 21, 39, 51, 59, 66, 68, 72, 73, 78, 79, 87, 124, 147, 178, 181, 185, 199, 216, 224, 233, 239, 241, 251, 257, 262, 271, 275, 288, 291, 303, 316, 317, 327, 328, 336, 338, 341, 342, 351, 356, 359, 362, 365, 368, 370, 371, 372, 373, 374, 376, 377, 378, 379, 380, 381, 382, 388, 390, 392, 393, 395, 396, 398, 399, 402, 403, 404, 409, 410, 412, 413, 416, 417, 418, 420, 425, 426, 427, 429, 430, 431, 432, 434, 435, 437, 438, 442, 443, 447, 448, 449, 450, 451, 453, 453, 454, 457, 461, 465, 466, 469, 473, 474, 475, 477, 478, 479, 482, 483, 488, 490, 503, 508, 514, 515, 516, 526, 527, 528, 529, 536, 541, 542, 544, 545, 550, 554, 557, 558, 559, 562, 569, 575, 577, 578, 579, 589, 594, 601, 603, 604, 612, 613, 641, 644, 651, 656, 660, 662, 663, 664, 667, 671, 677, 685, 687, 691, 691, 694, 697, 698, 699, 701, 702, 704, 706, 707, 708, 713, 714, 715, 716, 718, 721, 723, 724, 725, 728, 731, 732, 735, 740, 742, 743, 745, 747, 748, 749, 753, 758, 760, 762, 768, 769, 770, 787, 792, 798, 804, 807, 808, 809, 812, 815, 820, 824, 825, or 831, or combinations thereof, wherein the positions are relative to the reference sequence corresponding to SEQ ID NO: 2.

[0011] In some embodiments, the amino acid sequence of the engineered DNA polymerase comprises at least a mutation at amino acid position 478, 515, 526, 527, or 528, or combinations thereof, wherein the positions are relative to the reference sequence corresponding to SEQ ID NO: 2.

[0012] In some embodiments, the amino acid sequence of the engineered DNA polymerase comprises at least a mutation at amino acid position 402, 478, 515, 526, 527, 528, 559, 604, 660, or 760, or combinations thereof, wherein the positions are relative to SEQ ID NO: 2.

[0013] In some embodiments, the amino acid sequence of the engineered DNA polymerase comprises at least a mutation at amino acid position 478, 515, 526, 527, 528, 559, or 760, or combinations thereof, wherein the positions are relative to SEQ ID NO: 2.

[0014] In some embodiments, the amino acid sequence of the engineered DNA polymerase comprises at least a mutation at amino acid position 147, 257, 291, 395, 402, 474, 475, 478, 514, 515, 526, 527, 528, 536, 559, 604, 660, 662, 687, 745, or 760, or combinations thereof, wherein the positions are relative to the reference sequence corresponding to SEQ ID NO: 2.

[0015] In some embodiments, the amino acid sequence of the engineered DNA polymerase comprises at least a mutation or mutation set at amino acid position(s) 541/554/557, 516/541/550/554/557, 478/514/526/527, 478/516/526/527/529/541, 288/478/514/516/541/557, 288/478/516/541/550/554/557, 550/554/557, 478, 399, 514/516, 399/516/526/528/529/554/557, 478/516/541, 478/541, 288/399/514/554/557, 478/514/554/557, 288/478/526/550/554, 478/541/550/557, 541, 288/514/526/541, 554/557, 399/478, 288/514/554/557, 478/514/516/526/527/529/557, 399/541/550/554, 516/529/541/554/557, 478/541/554/557, 288/478/526/528/529/554/557, 288/514/516/529/541, 478/514/516/541, 478/514/557, 399/541/557, 399/541, 288/399/516/527/541/557, 288/478/514/541, 288/514/516, 664/698, 399/478/516/541, 399/528/550, 399/478/514/541/557, 288/478/514/516, 224/664, 478/526/527/528, 288/478/514/516/541/550/554, 478/514/541/554, 478/516, 478/514/516/541/554/557, 288/399/478/516/541, 288/478/514/554/557, 288/478/516, 288/399/516/554/557, 550/554, 288/550/554, 288/399/478/516/550/554, 399/514/541/550/554, 288/478/514/554, 199, 288/399/529/541, 399/478/554, 516/528/541/554/557, 39/199/698, 399/478/526/528/529, 288/399/514/541/550/554, 288/541, 288/478/514/550/554/557, 288/399/478/516, 526/529/554/557, 288/478/557, 288/478/514/550/554, 478/541/550/554, 516/526/528, 288/526/528/550/554/557, 199/664/698, 514/526/528/529/550/557, 288, 399/554/557, 288/554/557, 399/514/541, 288/478/514/527/554/557, 399/478/516/541/554, 87/541/554, 288/550/554/557, 527/529/541, 528/529/554, 478/554/557, 478/514/516/541/550/554/557, 199/216/644/664, 396/478/514/554/557/694, 241/644/663/664, 399/478/554/557, 288/399/550, 288/516/526/527/528/557, 399/526/527/528/529, 288/478/526, 399/478/514/516/526/527/528/529/541, 288/399/478/514/554/557, 288/399/514/516/528, 478/554, 399/514/516, 514, 399/550/554, 288/478/514/528/541/554, 478/514/516/554, 478/514/541, 288/541/554/557, 698, or 478/514/526/527/528, wherein the positions are relative to the reference sequence corresponding to SEQ ID NO: 2.

[0016] In some embodiments, the amino acid sequence of the engineered DNA polymerase comprises at least a mutation or mutation set at amino acid position(s) of the mutation or mutation set provided in Tables 4.1, 5.1, 5.2, 6.1, 6.2, 7.1, 7.2, 8.1, 8.2, 9.1, 9.2, 9.3, 10.1, 10.2, 11.1, and 11.2, wherein the positions are relative to the reference sequence of SEQ ID NO: 2. In some embodiments, the amino acid sequence of the engineered DNA polymerase comprises at least a mutation or mutation set provided in Tables 4.1, 5.1, 5.2, 6.1, 6.2, 7.1, 7.2, 8.1, 8.2, 9.1, 9.2, 9.3, 10.1, 10.2, 11.1, and 11.2, wherein the amino acid positions are relative to the reference sequence corresponding to SEQ ID NO: 2.

[0017] In some embodiments, the engineered DNA polymerase comprises an amino acid sequence having at least 80%, 85%, 86%, 87%, 88%, 89%, 90%, 91%, 92%, 93%, 94%, 95%, 96%, 97%, 98%, 99%, or more sequence identity to the reference sequence corresponding to residues 12 to 844 of SEQ ID NO: 220, 226, 272, 328, 546, 710, or 1208, or to the reference sequence corresponding to SEQ ID NO: 220, 226, 272, 328, 546, 710, or 1208, wherein the amino acid sequence comprises one or more mutations relative to the reference sequence corresponding to residues 12 to 844 of SEQ ID NO: 220, 226, 272, 328, 546, 710, or 1208, or relative to the reference sequence corresponding to SEQ ID NO: 220, 226, 272, 328, 546, 710, or 1208.

[0018] In some embodiments, the engineered DNA polymerase comprises an amino acid sequence having at least 80%, 85%, 86%, 87%, 88%, 89%, 90%, 91%, 92%, 93%, 94%, 95%, 96%, 97%, 98%, 99%, or more sequence identity to a reference sequence corresponding to residues 12 to 844 of an even numbered SEQ ID NO. of SEQ ID NOs: 4-1378, or to a reference sequence corresponding to an even numbered SEQ ID NO. of SEQ ID NOs: 2-1378, wherein the amino acid sequence comprises one or more mutations relative to the reference sequence corresponding to residues 12 to 844 of SEQ ID NO: 220, 226, 272, 328, 546, 710, or 1208, or relative to the reference sequence corresponding to SEQ ID NO: 220, 226, 272, 328, 546, 710, or 1208.

[0019] In some embodiments, the amino acid sequence of the engineered DNA polymerase comprises at least a mutation at amino acid position 2, 3, 21, 39, 51, 59, 66, 68, 72, 73, 78, 79, 87, 124, 147, 178, 181, 185, 199, 216, 224, 233, 239, 241, 251, 257, 262, 271, 275, 288, 291, 303, 316, 317, 327, 328, 336, 338, 341, 342, 351, 356, 359, 362, 365, 368, 370, 371, 372, 373, 374, 376, 377, 378, 379, 380, 381, 382, 388, 390, 392, 393, 395, 396, 398, 399, 402, 403, 404, 409, 410, 412, 413, 416, 417, 418, 420, 425, 426, 427, 429, 430, 431, 432, 434, 435, 437, 438, 442, 443, 447, 448, 449, 450, 451, 453, 453, 454, 457, 461, 465, 466, 469, 473, 474, 475, 477, 478, 479, 482, 483, 488, 490, 503, 508, 514, 515, 516, 526, 527, 528, 529, 536, 541, 542, 544, 545, 550, 554, 557, 558, 559, 562, 569, 575, 577, 578, 579, 589, 594, 601, 603, 604, 612, 613, 641, 644, 651, 656, 660, 662, 663, 664, 667, 671, 677, 685, 687, 691, 691, 694, 697, 698, 699, 701, 702, 704, 706, 707, 708, 713, 714, 715, 716, 718, 721, 723, 724, 725, 728, 731, 732, 735, 740, 742, 743, 745, 747, 748, 749, 753, 758, 760, 762, 768, 769, 770, 787, 792, 798, 804, 807, 808, 809, 812, 815, 820, 824, 825, or 831, or combinations thereof, wherein the positions are relative to the reference sequence corresponding to SEQ ID NO: 220, 226, 272, 328, 546, 710, or 1208.

[0020] In some embodiments, the engineered DNA polymerase comprises an amino acid sequence having at least 80%, 85%, 86%, 87%, 88%, 89%, 90%, 91%, 92%, 93%, 94%, 95%, 96%, 97%, 98%, 99%, or more sequence identity to the reference sequence corresponding to residues 12 to 844 of SEQ ID NO: 220, or to the reference sequence corresponding to SEQ ID NO: 220, wherein the amino acid sequence comprises one or more mutations relative to the reference sequence corresponding to residues 12 to 844 of SEQ ID NO: 220, or relative to the reference sequence corresponding to SEQ ID NO: 220.

[0021] In some embodiments, the engineered DNA polymerase comprises an amino acid sequence having at least 80%, 85%, 86%, 87%, 88%, 89%, 90%, 91%, 92%, 93%, 94%, 95%, 96%, 97%, 98%, 99%, or more sequence identity to the reference sequence corresponding to residues 12 to 844 of an even-numbered SEQ ID NO of SEQ ID NOs: 222-268, or to the reference sequence corresponding to an even-numbered SEQ ID NO of SEQ ID NOs: 222-268, wherein the amino acid sequence comprises one or more mutations relative to the reference sequence corresponding to residues 12 to 844 of SEQ ID NO: 220, or relative to the reference sequence corresponding to SEQ ID NO: 220.

[0022] In some embodiments, the amino acid sequence of the engineered DNA polymerase comprises at least a mutation or mutation set at amino acid position(s) 515, 594, 559, 760, 541, 753, 402, 398, 758, 399, 575, 257/758, 558, 601, 762, 589, or 544, wherein the positions are relative to the reference sequence corresponding to SEQ ID NO: 220.

[0023] In some embodiments, the engineered DNA polymerase comprises an amino acid sequence having at least 80%, 85%, 86%, 87%, 88%, 89%, 90%, 91%, 92%, 93%, 94%, 95%, 96%, 97%, 98%, 99%, or more sequence identity to the reference sequence corresponding to residues 12 to 844 of SEQ ID NO: 226, or to the reference sequence corresponding to SEQ ID NO: 226, wherein the amino acid sequence comprises one or more mutations relative to the reference sequence corresponding to residues 12 to 844 of SEQ ID NO: 226, or relative to the reference sequence corresponding to SEQ ID NO: 226.

[0024] In some embodiments, the engineered DNA polymerase comprises an amino acid sequence having at least 80%, 85%, 86%, 87%, 88%, 89%, 90%, 91%, 92%, 93%, 94%, 95%, 96%, 97%, 98%, 99%, or more sequence identity to the reference sequence corresponding to residues 12 to 844 of an even-numbered SEQ ID NO of SEQ ID NOs: 270-320, or to the reference sequence corresponding to SEQ ID NO: 270-320, wherein the amino acid sequence comprises one or more mutations relative to the reference sequence corresponding to residues 12 to 844 of SEQ ID NO: 226, or relative to the reference sequence corresponding to SEQ ID NO: 226.

[0025] In some embodiments, the amino acid sequence of the engineered DNA polymerase comprises at least a mutation or mutation set at amino acid position(s) 515/760, 514/515/760, 478/515/760, 660, 178, 402/515, 377/515, 515, 514/515, 402, 503, 239, 73, 528/541, 59, 515/575, 3/515/559, 377/515/528/541/554/557, 402/514/515/541/559, 514/515/541/559, 514/515/559, 515/559, 515/541/559, 377/515/559, 402/515/559, or 515/541/557, wherein the positions are relative to the reference sequence corresponding to SEQ ID NO: 226.

[0026] In some embodiments, the engineered DNA polymerase comprises an amino acid sequence having at least 80%, 85%, 86%, 87%, 88%, 89%, 90%, 91%, 92%, 93%, 94%, 95%, 96%, 97%, 98%, 99%, or more sequence identity to the reference sequence corresponding to residues 12 to 844 of SEQ ID NO: 272, or to the reference sequence corresponding to SEQ ID NO: 272, wherein the amino acid sequence comprises one or more mutations relative to the reference sequence corresponding to residues 12 to 844 of SEQ ID NO: 272, or relative to the reference sequence corresponding to SEQ ID NO: 272.

[0027] In some embodiments, the engineered DNA polymerase comprises an amino acid sequence having at least 80%, 85%, 86%, 87%, 88%, 89%, 90%, 91%, 92%, 93%, 94%, 95%, 96%, 97%, 98%, 99%, or more sequence identity to the reference sequence corresponding to residues 12 to 844 of an even-numbered SEQ ID NO. of SEQ ID NOs: 322-534, or to the reference sequence corresponding to an even-numbered SEQ ID NO. of SEQ ID NOs: 322-534, wherein the amino acid sequence comprises one or more mutations relative to the reference sequence corresponding to residues 12 to 844 of SEQ ID NO: 272, or relative to the reference sequence corresponding to SEQ ID NO: 272.

[0028] In some embodiments, the amino acid sequence of the engineered DNA polymerase comprises an at least a mutation or mutation set at amino acid position(s) 402/528/541/660, 257/604/660, 178/257/402/404/528/557/660, 402/604/660, 257/402/541/660, 377/402/541/660, 257/377/402/660, 483/660, 257/402, 257, 257/377, 178/660, 257/377/402, 660, 178/257/377/402/403/483/604/660, 377, 178/402/403/528/541/660, 377/601/660, 178/377, 377/490/660, 402/403/483/554/557, 178/257/377/558/660, 257/402/403/483/660, 178/554/557/558/660, 554/557/660, 178/483/541/545/554/557/604/660, 792, 402/403/483/604/660, 178, 474, 257/377/541/604, 743, 396, 479, 377/403/541/604, 475, 178/257/403/528, 448, 577, 395, 769, 691, 677, 704, 377/541/575/604/660, 178/257/601/604, 685, 377/604/660, 749, 482, 291, 579, 178/541/550/604, 477, 178/257, 257/402/490/528/541/660, 328, 740, 368, 721/745, 578, 687, 541/601/604, 257/528, 257/528/554, 768, 770, 257/377/483/541, 542, 257/402/403, 257/403/541, 604, 402/604, 257/316/541/575/604, 327, 403/541/604/660, 257/377/403/483/541/601/604, or 402/528/541/601, wherein the positions are relative to the reference sequence corresponding to SEQ ID NO: 272.

[0029] In some embodiments, the engineered DNA polymerase comprises an amino acid sequence having at least 80%, 85%, 86%, 87%, 88%, 89%, 90%, 91%, 92%, 93%, 94%, 95%, 96%, 97%, 98%, 99%, or more sequence identity to the reference sequence corresponding to residues 12 to 844 of SEQ ID NO: 328, or to the reference sequence corresponding to SEQ ID NO: 328, wherein the amino acid sequence comprises one or more mutations relative to the reference sequence corresponding to residues 12 to 844 of SEQ ID NO: 328, or relative to the reference sequence corresponding to SEQ ID NO: 328.

[0030] In some embodiments, the engineered DNA polymerase comprises an amino acid sequence having at least 80%, 85%, 86%, 87%, 88%, 89%, 90%, 91%, 92%, 93%, 94%, 95%, 96%, 97%, 98%, 99%, or more sequence identity to the reference sequence corresponding to residues 12 to 844 of an even-numbered SEQ ID NO. of SEQ ID NOs: 536-674, or to the reference sequence corresponding to an even-numbered SEQ ID NO of SEQ ID NOs: 536-674, wherein the amino acid sequence comprises one or more mutations relative to the reference sequence corresponding to residues 12 to 844 of SEQ ID NO: 328, or relative to the reference sequence corresponding to SEQ ID NO: 328.

[0031] In some embodiments, the amino acid sequence of the engineered DNA polymerase comprises at least a mutation or mutation set at amino acid position(s) 79, 257/474, 677, 562, 178/395/745, 291/395/687/745, 257/395/677, 303/338, 474/475, 359, 474/475/677/704, 395/687, 671, 233, 699, 379, 257/792, 257/395, 21, 257/448/474/475, 713, 641, 442, 656, 475/704, 742, 667, 257/448, 257/316/395/482/687/745, 804, 704, 178/257/395/482/579/687/745, 257/579, 257/291/395/475/541/687, 257/768, 812, 475, 662, 536, 748, 808, 291/316/395/687, 613, 257/291/316, 257/291/579, 257/316/541/745, 351, 257/316/395/745, 185, 257/316/687, 291/316/475/687/745, 257/291/395/740/745, 450, 473, 124, 430, 413, 66, or 365, wherein the positions are relative to the reference sequence corresponding to SEQ ID NO: 328.

[0032] In some embodiments, the engineered DNA polymerase comprises an amino acid sequence having at least 80%, 85%, 86%, 87%, 88%, 89%, 90%, 91%, 92%, 93%, 94%, 95%, 96%, 97%, 98%, 99%, or more sequence identity to the reference sequence corresponding to residues 12 to 844 of SEQ ID NO: 546, or to the reference sequence corresponding to SEQ ID NO: 546, wherein the amino acid sequence comprises one or more mutations relative to the reference sequence corresponding to residues 12 to 844 of SEQ ID NO: 546, or relative to the reference sequence corresponding to SEQ ID NO: 546.

[0033] In some embodiments, the engineered DNA polymerase comprises an amino acid sequence having at least 80%, 85%, 86%, 87%, 88%, 89%, 90%, 91%, 92%, 93%, 94%, 95%, 96%, 97%, 98%, 99%, or more sequence identity to the reference sequence corresponding to residues 12 to 844 of an even-numbered SEQ ID NO. of SEQ ID NOs: 676-1190, or to the reference sequence corresponding to an even-numbered SEQ ID NO. of SEQ ID NOs: 676-1190, wherein the amino acid sequence comprises one or more mutations relative to the reference sequence corresponding to residues 12 to 844 of SEQ ID NO: 546, or relative to the reference sequence corresponding to SEQ ID NO: 546.

[0034] In some embodiments, the amino acid sequence of the engineered DNA polymerase comprises at least a mutation or mutation set at amino acid position(s) 438, 697, 457, 716, 79/474/536/699, 536, 392, 708, 431, 395/474/536/699, 453, 427, 79/395/699, 378, 370, 706, 257/395/474/475/536/662, 474/536/562, 257/395/474/536, 79/257/395/474/475/536/562, 79/395/536/699, 372, 257/395/792, 390, 79/474/536/699/792, 409, 443, 448, 381, 707, 416, 474/475/662, 79/395/474/475/536/792, 474/475/536/662, 382, 257/474/536/562/662, 257/395/474/475/792, 79/474/662/699, 725, 447, 79/257/699, 701, 257/474/475/536/562/662, 702, 342/716, 233/562/713, 704, 474/475/536/562/662, 454, 327/427, 257/316/474/536/792, 417, 425, 536/562, 714, 233, 303/613, 21/79/303/562/613, 79/562, 435, 257/536/699/792, 79/536, 453/667, 79/303/338/613/804/812, 79/257/395/536/662/792, 79/338/562, 79/233/303/662, 79/662/699, 79/395/475/662, 79/536/562/699, 536/662, 21/79/338/641/699, 662, 21/79/442/699, 79/303/662, 79/178/257/662/699, 79/257/536/562/662, 562/699, 359/613/742/808/812, 21/79/338/379/562/662/804/812, 731, 21/79/359/442/662, 79/338/359/562, 21/613/662/742, 21/79/303/662/699/742/808, 21/79/338/442/613/699, 79/303/338/562/613/662, 303/338/562/699/808/812, 79/257, 257/662/792, 79/536/699, 79/359/713/742/808, 21/359/442/808/812, 79/257/475/536/662, 21/79/338, 79/713, 79/562/641, 373, 79/178/257/316/536/662, 21/233/338/562/662, 257/316/536, 21/79/303/442/662, 21/79/233/303/338/379/562/713, 338/442/699, 426, 21/338/359/808/812, 79/178/233/442/562/812, 79/474/536/662/699, 21/79/338/379/662, 721, 21/79/233/338/613/641, 374, 338/359/379, 461, 451, 715, 79/303/338/641/713, 393, 79/257/474/536/699, 79, 437, 257/536/562/662, 21/79/379/442/562/662, 362, 410, 338/812, 21/662/808/812, 21/303/338, 418, 338/442, 449, 379/641, 316/536/562, 257/536/792, 21/79/442/613, 257/536/662/792, 257/474/529/536/662, 412, 79/257/536/662/699, 257/316/475/536/792, 388, 380/454, 21/79/233/303/613/699/809, 724, 21/79/338/613, 79/178/536/792, 449/747, 21/79/379/613/713, 79/316/536/662/699, 376, 21/562/662, 79/257/262/536/562/699, 718, 395/475/536/562/662/699, 79/233/338/359/379/442/562/613/812, 371, 316/475/562/662/792, 79/257/316/792, 728, 79/233/338, 432, 79/178/257/316/395/536/662/699, 79/303/713, 233/379/442/562/613/662/713, 21/742, 732, 79/257/395/562/662/699, 21/233/338/379/442/562/613/662/812, 429, 562/699, 2/374, 723, 434, 420, or 699, wherein the positions are relative to the reference sequence corresponding to SEQ ID NO: 546.

[0035] In some embodiments, the engineered DNA polymerase comprises an amino acid sequence having at least 80%, 85%, 86%, 87%, 88%, 89%, 90%, 91%, 92%, 93%, 94%, 95%, 96%, 97%, 98%, 99%, or more sequence identity to the reference sequence corresponding to residues 12 to 844 of SEQ ID NO: 710, or to the reference sequence corresponding to SEQ ID NO: 710, wherein the amino acid sequence comprises one or more mutations relative to the reference sequence corresponding to residues 12 to 844 of SEQ ID NO: 710, or relative to the reference sequence corresponding to SEQ ID NO: 710.

[0036] In some embodiments, the engineered DNA polymerase comprises an amino acid sequence having at least 80%, 85%, 86%, 87%, 88%, 89%, 90%, 91%, 92%, 93%, 94%, 95%, 96%, 97%, 98%, 99%, or more sequence identity to the reference sequence corresponding to residues 12 to 844 of an even-numbered SEQ ID NO. of SEQ ID NOs: 1192-1326, or to the reference sequence corresponding to an even-numbered SEQ ID NO. of SEQ ID NOs: 1192-1326, wherein the amino acid sequence comprises one or more mutations relative to the reference sequence corresponding to residues 12 to 844 of SEQ ID NO: 710, or relative to the reference sequence corresponding to SEQ ID NO: 710.

[0037] In some embodiments, the amino acid sequence of the engineered DNA polymerase comprises at least a mutation or mutation set at amino acid position(s) 68, 78, 466, 807, 612, 147, 356, 488, 603, 271, 508, 787, 412/417/427, 251, 697, 562, 79/434/562, 820, 275, 378/381/697, 469, 412/417/697, 798, 79/388, 651, 825, 51, 370, 745, 815, 465, 317, 569, 341, 824, 18, 181, 735, or 336, wherein the positions are relative to the reference sequence corresponding to SEQ ID NO: 710.

[0038] In some embodiments, the engineered DNA polymerase comprises an amino acid sequence having at least 80%, 85%, 86%, 87%, 88%, 89%, 90%, 91%, 92%, 93%, 94%, 95%, 96%, 97%, 98%, 99%, or more sequence identity to the reference sequence corresponding to residues 12 to 844 of SEQ ID NO: 1208, or to the reference sequence corresponding to SEQ ID NO: 1208, wherein the amino acid sequence comprises one or more mutations relative to the reference sequence corresponding to residues 12 to 844 of SEQ ID NO: 1208, or relative to the reference sequence corresponding to SEQ ID NO: 1208.

[0039] In some embodiments, the engineered DNA polymerase comprises an amino acid sequence having at least 80%, 85%, 86%, 87%, 88%, 89%, 90%, 91%, 92%, 93%, 94%, 95%, 96%, 97%, 98%, 99%, or more sequence identity to the reference sequence corresponding to residues 12 to 844 of an even-numbered SEQ ID NO. of SEQ ID NOs: 1328-1378, or to the reference sequence corresponding to an even-numbered SEQ ID NO. of SEQ ID NOs: 1328-1378, wherein the amino acid sequence comprises one or more mutations relative to the reference sequence corresponding to residues 12 to 844 of SEQ ID NO: 1208, or relative to the reference sequence corresponding to SEQ ID NO: 1208.

[0040] In some embodiments, the amino acid sequence of the engineered DNA polymerase comprises at least a mutation or mutation set at amino acid position(s) 68/251/603/612/798, 68/603, 68/78/370, 370, 251/798, 68/370/603/612, 51/370/412/603/612, 412/603/798, 251/370/412/612, 370/798, 78/251, 251, 68/370/508/798, 251/370/508, 78/508, 78/370/697/798, 51/251, 68/370/508/603/697, 78/251/370/697/798, 78/603/798/831, 370/412/508/612, 72/508/798, 51/251/412/798, 51/251/370/508/603/798, 68/78/251/370/603/612/697, or 51/68/251/370/603, wherein the positions are relative to the reference sequence corresponding to SEQ ID NO: 1208.

[0041] In some embodiments, the amino acid sequence of the engineered DNA polymerase comprises at least one mutation provided in Table 4.1, 5.1, 5.2, 6.1, 6.2, 7.1, 7.2, 8.1, 8.2, 9.1, 9.2, 9.3, 10.1, 10.2, 11.1, and 11.2, wherein the position of the mutation is relative to the reference sequence of SEQ ID NO: 2, 220, 226, 272, 328, 546, 710, or 1208, as provided in the corresponding Tables.

[0042] In some embodiments, the amino acid sequence of the engineered DNA polymerase comprises at least a mutation or mutation set provided in Table 4.1, 5.1, 5.2, 6.1, 6.2, 7.1, 7.2, 8.1, 8.2, 9.1, 9.2, 9.3, 10.1, 10.2, 11.1, and 11.2, wherein the position(s) of the mutation or mutation set is relative to the reference sequence of SEQ ID NO: 2, 220, 226, 272, 328, 546, 710, or 1208, as provided in the corresponding Tables.

[0043] In some embodiments, the engineered DNA polymerase comprises an amino acid sequence having at least 80%, 85%, 86%, 87%, 88%, 89%, 90%, 91%, 92%, 93%, 94%, 95%, 96%, 97%, 98%, 99% or more sequence identity to a sequence corresponding to residues 12 to 844 of an even numbered SEQ ID NO. of SEQ ID NOs: 4-1378, or to the sequence corresponding to an even numbered SEQ ID NO. of SEQ ID NOs: 2-1378.

[0044] In some embodiments, the engineered DNA polymerase comprises an amino acid sequence comprising residues 12 to 844 of an even numbered SEQ ID NO. of SEQ ID NOs: 4-1378, or an amino acid sequence comprising an even numbered SEQ ID NO. of SEQ ID NOs: 2-1378.

[0045] In some embodiments, the engineered DNA polymerase comprises the amino acid sequence comprising residues 12 to 844 of SEQ ID NO: 220, 226, 272, 328, 546, 710, or 1208, or the amino acid sequence comprising SEQ ID NO: 2, 220, 226, 272, 328, 546, 710, or 1208.

[0046] In some embodiments, the engineered DNA polymerase is characterized by at least one improved property as compared to a reference DNA polymerase. In some embodiments, the improved property of the engineered DNA polymerase is selected from increased activity, increased stability, increased thermostability, increased processivity, increased fidelity, increased product yield, and increased resistance or tolerance to inhibitor, or any combinations thereof compared to a reference DNA polymerase having a sequence corresponding to SEQ ID NO: 2, 220, 226, 272, 328, 546, 710, or 1208. In some embodiments, the improved property of the engineered DNA polymerase is in comparison to the reference DNA polymerase having the sequence corresponding to residues 12 to 844 of SEQ ID NO: 2 and/or to the reference DNA polymerase having the sequence corresponding to SEQ ID NO: 2.

[0047] In some further embodiments, the engineered DNA polymerase is purified. In some embodiments, the engineered DNA polymerase is provided in solution, or is immobilized on a substrate, such as on solid substrates or membranes or particles.

[0048] In another aspect, the present disclosure provides a recombinant polynucleotide comprising a polynucleotide sequence encoding an engineered DNA polymerases disclosed herein. In some embodiments, the recombinant polynucleotide comprises a polynucleotide sequence encoding at least one engineered DNA polymerase comprising an amino acid sequence having at least 80%, 85%, 86%, 87%, 88%, 89%, 90%, 91%, 92%, 93%, 94%, 95%, 96%, 97%, 98%, 99%, or more sequence identity to a reference sequence corresponding to residues 12 to 844 of SEQ ID NO: 2, 220, 226, 272, 328, 546, 710, or 1208, or to a reference sequence corresponding to SEQ ID NO: 2, 220, 226, 272, 328, 546, 710, or 1208, wherein the amino acid sequence comprises one or more mutations relative to the reference sequence corresponding to residues 12 to 844 of SEQ ID NO: 2, 220, 226, 272, 328, 546, 710, or 1208, or relative to the reference sequence corresponding to SEQ ID NO: 2, 220, 226, 272, 328, 546, 710, or 1208.

[0049] In some embodiments, the recombinant polynucleotide comprises a polynucleotide sequence having at least 75%, 80%, 85%, 90%, 91%, 92%, 93%, 94%, 95%, 96%, 97%, 98%, 99%, or more sequence identity to a reference polynucleotide sequence corresponding to nucleotide residues 34 to 2532 of an odd numbered SEQ ID NO. of SEQ ID NOs: 1-1377, or to a reference polynucleotide sequence corresponding to an odd numbered SEQ ID NO. of SEQ ID NOs: 1-1377, wherein the recombinant polynucleotide encodes a DNA polymerase.

[0050] In some embodiments, the recombinant polynucleotide comprises a polynucleotide sequence having at least 75%, 80%, 85%, 90%, 91%, 92%, 93%, 94%, 95%, 96%, 97%, 98%, 99%, or more sequence identity to a reference sequence corresponding to nucleotide residues 34 to 2532 of SEQ ID NO: 1, 219, 225, 271, 327, 545, 709, or 1207, or to a reference polynucleotide sequence corresponding to SEQ ID NO: 1, 219, 225, 271, 327, 545, 709, or 1207, wherein the recombinant polynucleotide encodes a DNA polymerase.

[0051] In some embodiments, the polynucleotide sequence of the recombinant polynucleotide is codon-optimized. In some embodiments, the polynucleotide sequence is codon-optimized for expression in a bacterial cell, fungal cell, or mammalian cell.

[0052] In some embodiments, the recombinant polynucleotide comprises a polynucleotide sequence comprising nucleotide residues 34 to 2532 of SEQ ID NO: 1, 219, 225, 271, 327, 545, 709, or 1207, or a polynucleotide sequence comprising SEQ ID NO: 1, 219, 225, 271, 327, 545, 709, or 1207.

[0053] In some embodiments, the recombinant polynucleotide comprises a polynucleotide sequence comprising nucleotide residues 34 to 2532 of an odd-numbered SEQ ID NO. of SEQ ID NOs: 1-1377, or a polynucleotide sequence comprising an odd numbered SEQ ID NO. of SEQ ID NOs: 1-1377.

[0054] In some embodiments, the recombinant polynucleotide is operably linked to a control sequence. In some embodiments, the control sequence comprises a promoter, particularly a heterologous promoter.

[0055] In a further aspect, the present disclosure provides expression vectors comprising at least one recombinant polynucleotide provided herein encoding an engineered DNA polymerase. In another aspect, the present disclosure also provides host cells transformed with at least one expression vector provided herein.

[0056] In another aspect, the present disclosure provides methods of producing an engineered DNA polymerase polypeptide, the method comprising culturing a host cell described herein under suitable culture conditions such that at least one engineered DNA polymerase is produced. In some embodiments, the methods further comprise recovering the engineered DNA polymerase from the culture and/or host cells. In some embodiments, the methods further comprise the step of purifying the engineered DNA polymerase.

[0057] In another aspect, the present disclosure provides compositions comprising at least one engineered DNA polymerase disclosed herein. In some embodiments, the composition comprises at least a buffer. In some embodiments, the composition further comprises one or more DNA polymerase substrates, for example, nucleotide substrates and oligonucleotide primer substrate. In another embodiment, the composition comprises a DNA template, particularly a heterologous DNA template.

[0058] In a further aspect, the present disclosure provides use of the engineered DNA polymerase in methods of preparing a complementary DNA copy of a target DNA, whole or in part. In some embodiments, the present disclosure provides a method of preparing a complementary DNA of a target DNA, whole or in part, comprising contacting a target DNA with an engineered DNA polymerase described herein in presence of appropriate substrates under conditions suitable for DNA polymerase mediated production of a DNA complementary to the target DNA.

[0059] In some embodiments, the engineered DNA polymerase is used to detect a target DNA, the method comprising contacting a sample suspected of containing a target DNA with an engineered DNA polymerase of the present disclosure in presence of appropriate substrates under conditions suitable for DNA polymerase mediated production of a DNA complementary to the target DNA, whole or in part, and detecting presence of the complementary DNA. In some embodiments, the sample is a biological sample. In some embodiments, the sample is an environmental sample. In some embodiments, detecting the complementary DNA is by amplifying the complementary DNA, such as by polymerase chain reaction (PCR), including, among others, qPCR (e.g., TaqMan®), Hot-start PCR, touchdown PCR, asymmetric PCR, multiplex PCR, long or long range PCR, assembly PCR, and inverse PCR; or by isothermal amplification reactions, including, among others, LAMP, whole genome amplification (WGA), and multiple displacement amplification. In some embodiments, the engineered DNA polymerase can be used with a reverse transcriptase to detect a target RNA, such as by RT-PCR.

[0060] In a further aspect, the present disclosure also provides a kit comprising at least one engineered DNA polymerase disclosed herein. In some embodiments, the kit further comprises one or more of a buffer, nucleotide substrate, and/or oligonucleotide primer substrate. In some embodiments, the kit comprises a template DNA, particularly a control DNA template.

### DETAILED DESCRIPTION

[0061] The present disclosure provides engineered DNA polymerase polypeptides and compositions thereof, as well as polynucleotides encoding the engineered DNA polymerase polypeptides. The disclosure also provides methods of using of the engineered DNA polymerase polypeptides and compositions thereof for diagnostic and other purposes. In some embodiments, the engineered DNA polymerase polypeptides display, among others, enhanced or increased i) thermal stability, ii) polymerization activity, iii) high replication fidelity, iv) high processivity, or v) inhibitor tolerance or resistance, or any combinations of i), ii), iii), iv) and/or v), particularly under conditions involving low concentrations of DNA input, high-throughput analysis, and/or sequencing reaction conditions. In some embodiments, the engineered DNA polymerases are particularly applicable to polymerase chain reaction.

[0062] In some embodiments, the engineered DNA polymerases find use in diagnostic and research applications using minute amounts of DNA or RNA from samples, including cell-free DNA and cell-free RNA, circulating tumor DNA, DNA isolated from circulating tumor cells, circulating fetal DNA, synthetic DNA, DNA isolated from forensic samples, DNA isolated from virally infected cells, fine-needle aspirates, or single cells isolated by FACS (fluorescence activated cell sorting), laser-capture microscopy, or microfluidic devices.

### Abbreviations and Definitions

[0063] Unless defined otherwise, all technical and scientific terms used herein generally have the same meaning as commonly understood by one of ordinary skill in the art to which this invention pertains. Generally, the nomenclature used herein and the laboratory procedures of cell culture, molecular genetics, microbiology, organic chemistry, analytical chemistry and nucleic acid chemistry described below are those well-known and commonly employed in the art. Such techniques are known and described in numerous texts and reference works well known to those of skill in the art. Standard techniques, or modifications thereof, are used for chemical syntheses and chemical analyses.

[0064] Although any suitable methods and materials similar or equivalent to those described herein find use in the practice of the present invention, exemplary methods and materials are described herein. It is to be understood that the present invention is not limited to the particular methodology, protocols, and reagents described, as these may vary, depending upon the context they are used by those of skill in the art. Accordingly, the terms defined immediately below are more fully described by reference to the application as a whole.

[0065] As used herein, the singular “a”, “an,” and “the” include the plural references, unless the context clearly indicates otherwise.

[0066] As used herein, the term “comprising” and its cognates are used in their inclusive sense (i.e., equivalent to the term “including” and its corresponding cognates).

[0067] It is also to be understood that where description of embodiments use the term “comprising” and its cognates, the embodiments can also be described using language “consisting essentially of” or “consisting of”

[0068] Moreover, numeric ranges are inclusive of the numbers defining the range. Thus, every numerical range disclosed herein is intended to encompass every narrower numerical range that falls within such broader numerical range, as if such narrower numerical ranges were all expressly written herein. It is also intended that every maximum (or minimum) numerical limitation disclosed herein includes every lower (or higher) numerical limitation, as if such lower (or higher) numerical limitations were expressly written herein.

[0069] As used herein, the term “about” means an acceptable error for a particular value. In some instances “about” means within 0.05%, 0.5%, 1.0%, or 2.0%, of a given value range. In some instances, “about” means within 1, 2, 3, or 4 standard deviations of a given value.

[0070] Furthermore, the headings provided herein are not limitations of the various aspects or embodiments of the invention which can be had by reference to the application as a whole. Accordingly, the terms defined immediately below are more fully defined by reference to the application as a whole.

[0071] “EC” number refers to the Enzyme Nomenclature of the Nomenclature Committee of the International Union of Biochemistry and Molecular Biology (NC-IUBMB). The IUBMB biochemical classification is a numerical classification system for enzymes based on the chemical reactions they catalyze.

[0072] “ATCC” refers to the American Type Culture Collection whose biorepository collection includes genes and strains.

[0073] “NCBI” refers to National Center for Biological Information and the sequence databases provided therein.

[0074] “Protein,” “polypeptide,” and “peptide” are used interchangeably to denote a polymer of at least two amino acids covalently linked by an amide bond, regardless of length or post-translational modification (e.g., glycosylation or phosphorylation).

[0075] “Amino acids” are referred to herein by either their commonly known three-letter symbols or by the one-letter symbols recommended by IUPAC-IUB Biochemical Nomenclature Commission. Nucleotides, likewise, may be referred to by their commonly accepted single letter codes. The abbreviations used for the genetically encoded amino acids are conventional and are as follows: alanine (Ala or A), arginine (Arg or R), asparagine (Asn or N), aspartate (Asp or D), cysteine (Cys or C), glutamate (Glu or E), glutamine (Gln or Q), glycine (Gly or G), histidine (His or H), isoleucine (Ile or I), leucine (Leu or L), lysine (Lys or K), methionine (Met or M), phenylalanine (Phe or F), proline (Pro or P), serine (Ser or S), threonine (Thr or T), tryptophan (Trp or W), tyrosine (Tyr or Y), and valine (Val or V). When the three-letter abbreviations are used, unless specifically preceded by an “L” or a “D” or clear from the context in which the abbreviation is used, the amino acid may be in either the L- or D-configuration about α-carbon (Ca). For example, whereas “Ala” designates alanine without specifying the configuration about the α-carbon, “D-Ala” and “L-Ala” designate D-alanine and L-alanine, respectively. When the one-letter abbreviations are used, upper case letters designate amino acids in the L-configuration about the α-carbon and lower case letters designate amino acids in the D-configuration about the α-carbon. For example, “A” designates L-alanine and “a” designates D-alanine. When polypeptide sequences are presented as a string of one-letter or three-letter abbreviations (or mixtures thereof), the sequences are presented in the amino (N) to carboxy (C) direction in accordance with common convention.

[0076] “Fusion protein,” and “chimeric protein” and “chimera” refer to hybrid proteins created through the joining of two or more polynucleotides that originally encode separate proteins. In some embodiments, fusion proteins are created by recombinant technology (e.g., molecular biology techniques known in the art).

[0077] “Polymerase” refers to a class of enzymes that polymerize nucleoside triphosphates. In some embodiments, polymerases use a template nucleic acid strand to synthesize a complementary nucleic acid strand. The template strand and synthesized nucleic acid strand can independently be either DNA or RNA. Polymerases known in the art include but are not limited to DNA polymerases (e.g., E. coli DNA poll, T. aquaticus DNA polymerase (Taq)), DNA-dependent RNA polymerases, and reverse transcriptases. As used herein, the polymerase is a polypeptide or protein containing sufficient amino acids to carry out a desired enzymatic function of the polymerase. In some embodiments, the polymerase does not contain all of the amino acids found in the native enzyme, but only those which are sufficient to allow the polymerase to carry out a desired catalytic activity, including but not limited to 5′-3′ polymerization, 5′-3′ exonuclease, and 3′-5′ exonuclease activities. In some embodiments, the polymerase includes a DNA polymerase in classification EC 2.7.7.7.

[0078] “DNA polymerase activity,” “synthetic activity,” and “polymerase activity” are used interchangeably herein, and refer to the ability of an enzyme to synthesize new DNA strands by the incorporation of deoxynucleoside triphosphates or analogs thereof.

[0079] “Polynucleotide” is used herein to denote a polymer comprising at least two nucleotides where the nucleotides are either deoxyribonucleotides or ribonucleotides or mixtures of deoxyribonucleotides and ribonucleotides. In some embodiments, the abbreviations used for the genetically encoding nucleosides are conventional and are as follows: adenosine (A); guanosine (G); cytidine (C); thymidine (T); and uridine (U). Unless specifically delineated, the abbreviated nucleosides may be either ribonucleosides or 2′-deoxyribonucleosides. The nucleosides may be specified as being either ribonucleosides or 2′-deoxyribonucleosides on an individual basis or on an aggregate basis. When nucleic acid sequences are presented as a string of one-letter abbreviations, the sequences are presented in the 5′ to 3′ direction in accordance with common convention, and the phosphates are not indicated. The term “DNA” refers to deoxyribonucleic acid. The term “RNA” refers to ribonucleic acid.

[0080] “Duplex” and “ds” refer to a double-stranded nucleic acid (e.g., DNA or RNA) molecule comprised of two single-stranded polynucleotides that are complementary in their sequence (e.g., A pairs to T or U, C pairs to G), arranged in an antiparallel 5′ to 3′ orientation, and held together by hydrogen bonds between the nucleobases (e.g., adenine [A], guanine [G], cytosine [C], thymine [T] and uridine [U]).

[0081] “Engineered,” “recombinant,” “non-naturally occurring,” and “variant,” when used with reference to a cell, a polynucleotide or a polypeptide refer to a material or a material corresponding to the natural or native form of the material that has been modified in a manner that would not otherwise exist in nature or is identical thereto but produced or derived from synthetic materials and/or by manipulation using recombinant techniques.

[0082] “Wild-type” and “naturally-occurring” refer to the form found in nature. For example, a wild-type polypeptide or polynucleotide sequence is a sequence present in an organism that can be isolated from a source in nature and which has not been intentionally modified by human manipulation.

[0083] “Coding sequence” refers to that part of a nucleic acid (e.g., a gene) that encodes an amino acid sequence of a protein.

[0084] “Percent (%) sequence identity” refers to comparisons among polynucleotides and polypeptides, and are determined by comparing two optimally aligned sequences over a comparison window, wherein the portion of the polynucleotide or polypeptide sequence in the comparison window may comprise additions or deletions (i.e., gaps) as compared to the reference sequence for optimal alignment of the two sequences. The percentage may be calculated by determining the number of positions at which the identical nucleic acid base or amino acid residue occurs in both sequences to yield the number of matched positions, dividing the number of matched positions by the total number of positions in the window of comparison and multiplying the result by 100 to yield the percentage of sequence identity. Alternatively, the percentage may be calculated by determining the number of positions at which either the identical nucleic acid base or amino acid residue occurs in both sequences or a nucleic acid base or amino acid residue is aligned with a gap to yield the number of matched positions, dividing the number of matched positions by the total number of positions in the window of comparison and multiplying the result by 100 to yield the percentage of sequence identity. Those of skill in the art appreciate that there are many established algorithms available to align two sequences. Optimal alignment of sequences for comparison can be conducted, e.g., by the local homology algorithm of Smith and Waterman (Smith and Waterman, Adv. Appl. Math., 1981, 2:482), by the homology alignment algorithm of Needleman and Wunsch (Needleman and Wunsch, J. Mol. Biol., 1970, 48:443), by the search for similarity method of Pearson and Lipman (Pearson and Lipman, Proc. Natl. Acad. Sci. USA, 1988, 85:2444), by computerized implementations of these algorithms (e.g., GAP, BESTFIT, FASTA, and TFASTA in the GCG Wisconsin Software Package), or by visual inspection, as known in the art. Examples of algorithms that are suitable for determining percent sequence identity and sequence similarity include, but are not limited to the BLAST and BLAST 2.0 algorithms (see, e.g., Altschul et al., J. Mol. Biol., 1990, 215: 403-410; and Altschul et al., Nucleic Acids Res., 1977, 3389-3402). Software for performing BLAST analyses is publicly available through the National Center for Biotechnology Information website. This algorithm involves first identifying high scoring sequence pairs (HSPs) by identifying short words of length “W” in the query sequence, which either match or satisfy some positive-valued threshold score “T,” when aligned with a word of the same length in a database sequence. T is referred to as the neighborhood word score threshold (see Altschul et al, supra). These initial neighborhood word hits act as seeds for initiating searches to find longer HSPs containing them. The word hits are then extended in both directions along each sequence for as far as the cumulative alignment score can be increased. Cumulative scores are calculated using, for nucleotide sequences, the parameters “M” (reward score for a pair of matching residues; always >0) and “N” (penalty score for mismatching residues; always <0). For amino acid sequences, a scoring matrix is used to calculate the cumulative score. Extension of the word hits in each direction are halted when: the cumulative alignment score falls off by the quantity “X” from its maximum achieved value; the cumulative score goes to zero or below, due to the accumulation of one or more negative-scoring residue alignments; or the end of either sequence is reached. The BLAST algorithm parameters W, T, and X determine the sensitivity and speed of the alignment. The BLASTN program (for nucleotide sequences) uses as defaults a wordlength (W) of 11, an expectation (E) of 10, M=5, N=−4, and a comparison of both strands. For amino acid sequences, the BLASTP program can use as defaults a wordlength (W) of 3, an expectation (E) of 10, and the BLOSUM62 scoring matrix (see, e.g., Henikoff and Henikoff, Proc. Natl. Acad. Sci. USA, 1989, 89:10915). Exemplary determination of sequence alignment and % sequence identity can employ the BESTFIT or GAP programs in the GCG Wisconsin Software package (Accelrys, Madison WI), using default parameters provided.

[0085] “Reference sequence” refers to a defined sequence used as a basis for a sequence comparison. A reference sequence may be a subset of a larger sequence, for example, a segment of a full-length gene or polypeptide sequence. Generally, a reference sequence is at least 20 nucleotide or amino acid residues in length, at least 25 residues in length, at least 50 residues in length, at least 100 residues in length or the full length of the nucleic acid or polypeptide. Since two polynucleotides or polypeptides may each (1) comprise a sequence (i.e., a portion of the complete sequence) that is similar between the two sequences, and (2) may further comprise a sequence that is divergent between the two sequences, sequence comparisons between two (or more) polynucleotides or polypeptide are typically performed by comparing sequences of the two polynucleotides or polypeptides over a “comparison window” to identify and compare local regions of sequence similarity. In some embodiments, a “reference sequence” can be based on a primary amino acid sequence, where the reference sequence is a sequence that can have one or more changes in the primary sequence. For instance, the phrase “a reference sequence corresponding to SEQ ID NO: 2, having a leucine at the residue corresponding to X478” (or “a reference sequence corresponding to SEQ ID NO: 2, having a leucine at the residue corresponding to position 478”) refers to a reference sequence in which the corresponding residue at position X478 in SEQ ID NO: 2 (e.g., a methionine), has been changed to leucine.

[0086] “Comparison window” refers to a conceptual segment of at least about 20 contiguous nucleotide positions or amino acids residues wherein a sequence may be compared to a reference sequence of at least 20 contiguous nucleotides or amino acids and wherein the portion of the sequence in the comparison window may comprise additions or deletions (i.e., gaps) of 20 percent or less as compared to the reference sequence (which does not comprise additions or deletions) for optimal alignment of the two sequences. The comparison window can be longer than 20 contiguous residues, and includes, optionally 30, 40, 50, 100, or longer windows.

[0087] “Corresponding to”, “reference to,” and “relative to” when used in the context of the numbering of a given amino acid or polynucleotide sequence refer to the numbering of the residues of a specified reference sequence when the given amino acid or polynucleotide sequence is compared to the reference sequence. In other words, the residue number or residue position of a given polymer is designated with respect to the reference sequence rather than by the actual numerical position of the residue within the given amino acid or polynucleotide sequence. For example, a given amino acid sequence, such as that of an engineered DNA polymerase, can be aligned to a reference sequence by introducing gaps to optimize residue matches between the two sequences. In these cases, although the gaps are present, the numbering of the residue in the given amino acid or polynucleotide sequence is made with respect to the reference sequence to which it has been aligned. In some embodiments, the sequence is tagged (e.g., with a histidine tag).

[0088] “Mutation” refers to the alteration of a nucleic acid sequence. In some embodiments, mutations result in changes to the encoded polypeptide sequence (i.e., as compared to the original sequence without the mutation). In some embodiments, the mutation comprises a substitution, such that a different amino acid is produced. In some alternative embodiments, the mutation comprises an addition, such that an amino acid is added (e.g., insertion) to the original polypeptide sequence. In some further embodiments, the mutation comprises a deletion, such that an amino acid is deleted from the original polypeptide sequence. Any number of mutations may be present in a given sequence.

[0089] “Amino acid difference” and “residue difference” refer to a difference in the amino acid residue at a position of a polypeptide sequence relative to the amino acid residue at a corresponding position in a reference sequence. The positions of amino acid differences generally are referred to herein as “Xn,” where n refers to the corresponding position in the reference sequence upon which the residue difference is based. For example, a “residue difference at position X478 as compared to SEQ ID NO: 2” (or a “residue difference at position 478 as compared to SEQ ID NO: 2”) refers to a difference of the amino acid residue at the polypeptide position corresponding to position 478 of SEQ ID NO: 2. Thus, if the reference polypeptide of SEQ ID NO: 2 has a methionine at position 478, then a “residue difference at position X478 as compared to SEQ ID NO: 2” refers to an amino acid substitution of any residue other than methionine at the position of the polypeptide corresponding to position 478 of SEQ ID NO: 2. In some instances herein, the specific amino acid residue difference at a position is indicated as “XnY” where “Xn” specified the corresponding residue and position of the reference polypeptide (as described above), and “Y” is the single letter identifier of the amino acid found in the engineered polypeptide (i.e., the different residue than in the reference polypeptide). In some instances (e.g., in the Tables in the Examples), the present disclosure also provides specific amino acid differences denoted by the conventional notation “AnB”, where A is the single letter identifier of the residue in the reference sequence, “n” is the number of the residue position in the reference sequence, and B is the single letter identifier of the residue substitution in the sequence of the engineered polypeptide. In some embodiments, the “substitution” comprises the deletion of an amino acid, and can be denoted by “−” symbol.

[0090] In some embodiments, the phrase “an amino acid residue nB” denotes the presence of the amino residue in the engineered polypeptide at the defined amino acid position, which may or may not be a substitution in context of a reference polypeptide or amino acid sequence.

[0091] In some instances, a polypeptide of the present disclosure can include one or more amino acid residue differences relative to a reference sequence, which is indicated by a list of the specified positions where residue differences are present relative to the reference sequence. In some embodiments, where more than one amino acid can be used in a specific residue position of a polypeptide, the various amino acid residues that can be used are separated by a “/” (e.g., X478L/X478I, X478L/I, or 478L/I). The present disclosure includes engineered polypeptide sequences comprising one or more amino acid differences that include either/or both conservative and non-conservative amino acid substitutions, as well as insertions and deletions of amino acids in the sequence.

[0092] “Amino acid substitution set” and “substitution set” refers to a group of amino acid substitutions within a polypeptide sequence. In some embodiments, substitution sets comprise 2, 3, 4, 5, 6, 7, 8, 9, 10, 11, 12, 13, 14, 15, or more amino acid substitutions. In some embodiments, a substitution set refers to the set of amino acid substitutions that is present in any of the variant DNA polymerase polypeptides listed in any of the Tables in the Examples. In these substitution sets, the individual substitutions are separated by a semicolon (“;”; e.g., M478L;R516K;E541D) or slash (“/”; e.g., M478L/R516K/E541D or 478L/516K/541D). In some embodiments, the phrase “mutation set” is used.

[0093] “Conservative amino acid substitution” refers to a substitution of a residue with a different residue having a similar side chain, and thus typically involves substitution of the amino acid in the polypeptide with amino acids within the same or similar defined class of amino acids. By way of example and not limitation, an amino acid with an aliphatic side chain may be substituted with another aliphatic amino acid (e.g., alanine, valine, leucine, and isoleucine); an amino acid with hydroxyl side chain is substituted with another amino acid with a hydroxyl side chain (e.g., serine and threonine); an amino acids having aromatic side chains is substituted with another amino acid having an aromatic side chain (e.g., phenylalanine, tyrosine, tryptophan, and histidine); an amino acid with a basic side chain is substituted with another amino acid with a basis side chain (e.g., lysine and arginine); an amino acid with an acidic side chain is substituted with another amino acid with an acidic side chain (e.g., aspartic acid or glutamic acid); and a hydrophobic or hydrophilic amino acid is replaced with another hydrophobic or hydrophilic amino acid, respectively.

[0094] “Non-conservative substitution” refers to substitution of an amino acid in the polypeptide with an amino acid with significantly differing side chain properties. Non-conservative substitutions may use amino acids between, rather than within, the defined groups and affect: (a) the structure of the peptide backbone in the area of the substitution (e.g., proline for glycine); (b) the charge or hydrophobicity; and/or (c) the bulk of the side chain. By way of example and not limitation, exemplary non-conservative substitutions include an acidic amino acid substituted with a basic or aliphatic amino acid; an aromatic amino acid substituted with a small amino acid; and a hydrophilic amino acid substituted with a hydrophobic amino acid.

[0095] “Deletion” refers to modification to the polypeptide by removal of one or more amino acids from the reference polypeptide. Deletions can comprise removal of 1 or more amino acids, 2 or more amino acids, 5 or more amino acids, 10 or more amino acids, 15 or more amino acids, or 20 or more amino acids, up to 10% of the total number of amino acids, or up to 20% of the total number of amino acids making up the reference enzyme while retaining enzymatic activity and/or retaining the improved properties of an engineered polymerase enzyme. Deletions can be directed to the internal portions and/or terminal portions of the polypeptide. In various embodiments, the deletion can comprise a continuous segment or can be discontinuous. As noted above, in some embodiments, deletions are indicated by “−”, and may be present in a substitution or substitution set.

[0096] “Insertion” refers to modification to the polypeptide by addition of one or more amino acids from the reference polypeptide. Insertions can be in the internal portions of the polypeptide, or to the carboxy or amino terminus. Insertions as used herein include fusion proteins as is known in the art. The insertion can be a contiguous segment of amino acids or separated by one or more of the amino acids in the naturally occurring polypeptide.

[0097] “Combinations” or “combination” in the context of any list of mutations (e.g., substitutions), or amino acid positions of the mutations, refers to any combination of the listed mutations and/or amino acid positions. In some embodiments, “combinations” or “combination” refers to at least 2, 3, 4, 5, 6, 7, 8, 9, 10, 15, 20, or more of the listed mutations and/or amino acid positions.

[0098] “Functional fragment” and “biologically active fragment” are used interchangeably herein, to refer to a polypeptide that has an amino-terminal and/or carboxy-terminal deletion(s) and/or internal deletions, but where the remaining amino acid sequence is identical to the corresponding positions in the sequence to which it is being compared (e.g., a full length engineered DNA polymerase of the present invention) and that retains substantially all of the activity of the full-length polypeptide.

[0099] “Isolated polypeptide” refers to a polypeptide which is substantially separated from other contaminants that naturally accompany it (e.g., protein, lipids, and polynucleotides). The term embraces polypeptides which have been removed or purified from their naturally-occurring environment or expression system (e.g., host cell or in vitro synthesis). The recombinant DNA polymerase polypeptides may be present within a cell, present in the cellular medium, or prepared in various forms, such as lysates or isolated preparations. As such, in some embodiments, the recombinant DNA polymerase polypeptides provided herein are isolated polypeptides.

[0100] “Substantially pure polypeptide” or “purified polypeptide” refers to a composition in which the polypeptide species is the predominant species present (i.e., on a molar or weight basis it is more abundant than any other individual macromolecular species in the composition), and is generally a substantially purified composition when the object species comprises at least about 50 percent of the macromolecular species present by mole or % weight. Generally, a substantially pure DNA polymerase composition will comprise about 60% or more, about 70% or more, about 80% or more, about 90% or more, about 95% or more, and about 98% or more of all macromolecular species by mole or % weight present in the composition. In some embodiments, the object species is purified to essential homogeneity (i.e., contaminant species cannot be detected in the composition by conventional detection methods) wherein the composition consists essentially of a single macromolecular species. Solvent species, small molecules (<500 Daltons), and elemental ion species are not considered macromolecular species. In some embodiments, the isolated recombinant DNA polymerase polypeptides are substantially pure polypeptide compositions.

[0101] “Improved enzyme property” refers to an engineered DNA polymerase polypeptide that exhibits an improvement in any enzyme property as compared to a reference DNA polymerase polypeptide, such as a wild-type DNA polymerase polypeptide (e.g., the DNA polymerase polypeptide sequence of SEQ ID NO: 2) or another engineered DNA polymerase polypeptide. Improved properties include but are not limited to such properties as increased protein expression, increased thermoactivity, increased thermostability, increased stability, increased enzymatic activity, increased substrate specificity and/or affinity, increased specific activity, increased resistance to substrate and/or end-product inhibition, increased chemical stability, improved chemoselectivity, improved solvent stability, increased solubility, increased fidelity, increased processivity, increased inhibitor resistance or tolerance, and altered temperature profile.

[0102] “Increased enzymatic activity” and “enhanced catalytic activity” refer to an improved property of the engineered DNA polymerase polypeptides, which can be represented by an increase in specific activity (e.g., product produced/time/weight protein) and/or an increase in percent conversion of the substrate to the product (e.g., percent conversion of starting amount of substrate to product in a specified time period using a specified amount of DNA polymerase) as compared to the reference DNA polymerase enzyme (e.g., wild-type DNA polymerase and/or another engineered DNA polymerase). Exemplary methods to determine enzyme activity are provided in the Examples. Any property relating to enzyme activity may be affected, including the classical enzyme properties of Kₘ, Vₘₐₓ or k_{cat}, changes of which can lead to increased enzymatic activity. Improvements in enzyme activity can be from about 1.1 fold the enzymatic activity of the corresponding wild-type enzyme, to as much as 2-fold, 5-fold, 10-fold, 20-fold, 25-fold, 50-fold, 75-fold, 100-fold, 150-fold, 200-fold or more enzymatic activity than the naturally occurring DNA polymerase or another engineered DNA polymerase from which the DNA polymerase polypeptides were derived.

[0103] “Hybridization stringency” relates to hybridization conditions, such as washing conditions, in the hybridization of nucleic acids. Generally, hybridization reactions are performed under conditions of lower stringency, followed by washes of varying but higher stringency (see, e.g., Sambrook et al., Molecular Cloning: A Laboratory Manual, Cold Spring Harbor Laboratory Press, New York, 2001; Ausubel et al., Current Protocols in Molecular Biology, John Wiley & Sons, 2003). The term “moderately stringent hybridization” refers to conditions that permit target-DNA to bind a complementary nucleic acid that has about 60% identity, preferably about 75% identity, about 85% identity to the target DNA, with greater than about 90% identity to target-polynucleotide. Exemplary moderately stringent conditions are conditions equivalent to hybridization in 50% formamide, 5×Denhart's solution, 5×SSPE, 0.2% SDS at 42° C., followed by washing in 0.2×SSPE, 0.2% SDS, at 42° C. “High stringency hybridization” refers generally to conditions that are about 10° C. or less from the thermal melting temperature T, as determined under the solution condition for a defined polynucleotide sequence. In some embodiments, a high stringency condition refers to conditions that permit hybridization of only those nucleic acid sequences that form stable hybrids in 0.018M NaCl at 65° C. (i.e., if a hybrid is not stable in 0.018M NaCl at 65° C., it will not be stable under high stringency conditions, as contemplated herein). High stringency conditions can be provided, for example, by hybridization in conditions equivalent to 50% formamide, 5×Denhart's solution, 5×SSPE, 0.2% SDS at 42° C., followed by washing in 0.1×SSPE, and 0.1% SDS at 65° C. Another high stringency condition comprises hybridizing in conditions equivalent to hybridizing in 5×SSC containing 0.1% (w:v) SDS at 65° C. and washing in 0.1×SSC containing 0.1% SDS at 65° C. Other high stringency hybridization conditions, as well as moderately stringent conditions, are described in the references cited above.

[0104] “Codon optimized” refers to changes in the codons of the polynucleotide encoding a protein to those preferentially used in a particular organism such that the encoded protein is more efficiently expressed in that organism. Although the genetic code is degenerate, in that most amino acids are represented by several codons, called “synonyms” or “synonymous” codons, it is well known that codon usage by particular organisms is nonrandom and biased towards particular codon triplets. This codon usage bias may be higher in reference to a given gene, genes of common function or ancestral origin, highly expressed proteins versus low copy number proteins, and the aggregate protein coding regions of an organism's genome. In some embodiments, the polynucleotides encoding the DNA polymerase enzymes are codon optimized for optimal production from the host organism selected for expression.

[0105] “Control sequence” refers herein to include all components that are necessary or advantageous for the expression of a polynucleotide and/or polypeptide of the present disclosure. Each control sequence may be native or foreign to the nucleic acid sequence encoding the polypeptide. Such control sequences include, but are not limited to, leaders, polyadenylation sequences, propeptide sequences, promoter sequences, signal peptide sequences, initiation sequences, and transcription terminators. In some embodiments, at a minimum, the control sequences include a promoter, and transcriptional and translational stop signals. In some embodiments, the control sequences are provided with linkers for the purpose of introducing specific restriction sites facilitating ligation of the control sequences with the coding region of the nucleic acid sequence encoding a polypeptide.

[0106] “Operably linked” refers to a configuration in which a control sequence is appropriately placed (i.e., in a functional relationship) at a position relative to a polynucleotide of interest such that the control sequence directs or regulates the expression of the polynucleotide, and where appropriate the encoded polypeptide of interest.

[0107] “Promoter” or “promoter sequence” refers to a nucleic acid sequence that is recognized by a host cell for expression of a polynucleotide of interest, such as a coding sequence. The promoter sequence contains transcriptional control sequences that mediate the expression of a polynucleotide of interest. The promoter may be any nucleic acid sequence which shows transcriptional activity in the host cell of choice including mutant, truncated, and hybrid promoters, and may be obtained from genes encoding extracellular or intracellular polypeptides either homologous or heterologous to the host cell.

[0108] “Suitable reaction conditions” or “suitable conditions” refers to those conditions in the enzymatic conversion reaction solution (e.g., ranges of enzyme loading, substrate loading, temperature, pH, buffers, co-solvents, etc.) under which a DNA polymerase polypeptide of the present disclosure is capable of converting a substrate to the desired product compound. Exemplary “suitable reaction conditions” are provided herein (see, the Examples).

[0109] “Product” in the context of an enzymatic conversion process refers to the compound or molecule resulting from the action of the DNA polymerase polypeptide on the substrate.

[0110] “Culturing” refers to the growing of a population of cells, e.g., microbial cells, under suitable conditions using any suitable medium (e.g., liquid, gel, or solid).

[0111] “Vector” is a polynucleotide construct for introducing a polynucleotide sequence into a cell. In some embodiments, the vector is an expression vector that is operably linked to a suitable control sequence capable of effecting the expression in a suitable host of a polynucleotide of interest, and where appropriate, an encoded polypeptide. In some embodiments, an “expression vector” has a promoter sequence operably linked to the DNA sequence (e.g., transgene) to drive expression in a host cell, and in some embodiments, also comprises a transcription terminator sequence.

[0112] “Expression” includes any step involved in the production of the polypeptide including, but not limited to, transcription, post-transcriptional modification, translation, and post-translational modification. In some embodiments, the term also encompasses secretion of the polypeptide from a cell.

[0113] “Produces” refers to the production of proteins and/or other compounds by cells. It is intended that the term encompass any step involved in the production of polypeptides including, but not limited to, transcription, post-transcriptional modification, translation, and post-translational modification. In some embodiments, the term also encompasses secretion of the polypeptide from a cell.

[0114] “Heterologous” or “recombinant” refers to the relationship between two or more nucleic acid or polypeptide sequences (e.g., a promoter sequence, signal peptide, terminator sequence, etc.) that are derived from different sources and are not associated in nature.

[0115] “Host cell” and “host strain” refer to suitable hosts for expression vectors comprising DNA provided herein (e.g., a polynucleotide sequences encoding at least one DNA polymerase variant). In some embodiments, the host cells are prokaryotic or eukaryotic cells that have been transformed or transfected with vectors constructed using recombinant DNA techniques as known in the art.

[0116] “Analogue” means a polypeptide having more than 70% sequence identity but less than 100% sequence identity (e.g., more than 75%, 78%, 80%, 83%, 85%, 88%, 90%, 91%, 92%, 93%, 94%, 95%, 96%, 97%, 98%, 99% sequence identity) with a reference polypeptide. In some embodiments, analogues include non-naturally occurring amino acid residues including, but not limited, to homoarginine, ornithine and norvaline, as well as naturally occurring amino acids. In some embodiments, analogues also include one or more D-amino acid residues and non-peptide linkages between two or more amino acid residues.

[0117] “Effective amount” means an amount sufficient to produce the desired result. One of general skill in the art may determine what the effective amount by using routine experimentation.

[0118] “Cell-free DNA” or “cfDNA” refers to DNA circulating freely in the bloodstream and is not contained by or associated with cells. In some embodiments, cell-free DNA comprises DNA originally derived and released from normal somatic or germ line cells, cancer cells, fetal cells, microbial cells, or viruses.

[0119] “Cell-free RNA” or “cfRNA” refers to RNA circulating freely in the bloodstream and is not contained by or associated with cells. In some embodiments, cell free RNA comprises RNA originally derived and released from normal somatic or germ line cells, cancer cells, fetal cells, microbial cells, or viruses.

[0120] “Amplification” refers to nucleic acid replication. In some embodiments, the term refers to replication of specific template nucleic acid.

[0121] “Polymerase chain reaction” and “PCR” refer to methods of generating multiple copies of a nucleic acid template of interest in presence of nucleic acid primers by repeated cycles of denaturation, annealing, and primer extension with a polymerase, such as described in “PCR: Methods and Protocols” Methods in Molecular Biology,” Springer Protocols (2017) and “Quantitative Real-Time PCR: Methods and Protocols,” Methods in Molecular Biology, Springer Protocols (2014), hereby incorporated by reference. The sequence of denaturation, annealing and extension constitute a “cycle,” The steps of denaturing, primer annealing, and polymerase extension can be repeated (i.e., multiple cycles are used), to amplify a nucleic acid template. In some embodiments, the process of annealing and extension occur in one step, sometimes referred to as 2-step PCR. Accordingly, as used herein, the term “PCR” includes many variations of the method, including, among others, qPCR, Hot-start PCR, touchdown PCR, asymmetric PCR, multiplex PCR, long or long range PCR, assembly PCR, and inverse PCR.

[0122] “Target” when used in reference to a method employing a DNA polymerase, refers to the region of nucleic acid for preparation of a complementary DNA. The “target” is sorted out from other nucleic acids present in the methods using a DNA polymerase. In some embodiments, a “segment” is a region of nucleic acid within the target sequence.

[0123] “Target DNA” when used in context of a DNA polymerase refers to the DNA, all or a portion thereof, that is the object for preparation of a complementary DNA copy. The target DNA can be the whole of the DNA sequence or a portion thereof, such as a segment of the DNA sequence.

[0124] “Target RNA” refers to the RNA, all or a portion thereof, that is the object for preparation of a complementary DNA copy. The target RNA can be the whole of the RNA sequence or a portion thereof, such as a segment of the RNA sequence.

[0125] “Sample template” refers to nucleic acid originating from a sample which is analyzed for the presence of target nucleic acid. In contrast, “background template” refers to nucleic acid other than sample template that may or may not be present within a sample. Background template may be inadvertently included in the sample, it may result from carryover, or may be due to the presence of nucleic acid contaminants from which the target nucleic acid is purified. For example, in some embodiments, nucleic acids from organisms other than those to be detected may be present as background in a test sample. However, it is not intended that the present invention be limited to any specific nucleic acid samples or templates.

[0126] “Amplifiable nucleic acid” is used in reference to nucleic acids which may be amplified by any amplification method, including but not limited to PCR. In most embodiments, amplifiable nucleic acids comprise sample templates.

[0127] “PCR product”, “PCR fragment,” and “amplification product” refer to the resultant compounds obtained after two or more cycles of PCR amplification (or other amplification method, as indicated by the context), typically comprising the steps of denaturation, annealing, and extension. The terms encompass the situation wherein there has been amplification of one or more segments of one or more target sequences.

[0128] “Amplification reagents” and “PCR reagents” refer to those reagents (e.g., deoxyribonucleotide triphosphates, buffer, etc.), needed for amplification except for the primers, nucleic acid template, and the amplification enzyme. Typically, amplification reagents, along with other reaction components are placed and contained in a reaction vessel (e.g., test tube, microwell, etc.). It is not intended that the present invention be limited to any specific amplification reagents, as any suitable reagents find use in the present invention.

[0129] “Primer” refers to an oligonucleotide (i.e., a sequence of nucleotides), whether occurring naturally or produced synthetically, recombinantly, or by amplification, which is capable of acting as a point of initiation of nucleic acid synthesis, when placed under conditions in which synthesis of a primer extension product that is complementary to a nucleic acid strand is induced (i.e., in the presence of nucleotides and an inducing agent such as DNA polymerase, and at a suitable temperature and pH). In some embodiments, primers are single-stranded, but in some embodiments, primers are double-stranded. In some embodiments, the primers are of sufficient length to prime the synthesis of extension products in the presence of a nucleic acid polymerase. The exact primer length depends upon many factors, as known to those skilled in the art.

[0130] “Probe” refers to an oligonucleotide (i.e., a sequence of nucleotides), whether occurring naturally or produced synthetically, recombinantly, or by amplification, which is capable of hybridizing to another oligonucleotide of interest. Probes find use in the detection, identification, and/or isolation of particular gene sequences of interest. In some embodiments, probes are labeled with a “reporter molecule” (also referred to as a “label”) that aids in the detection of the probe in a suitable detection system (e.g., fluorescent, radioactive, luminescent, enzymatic, and other systems). It is not intended that the present invention be limited to any particular detection system or label. Primers, deoxyribonucleotides, and deoxyribonucleosides may contain labels. Indeed, it is not intended that the labeled composition of the present invention be limited to any particular component. Illustrative labels include, but are not limited to ³²p, ³⁵S, and fluorescent molecules (e.g., fluorescent dyes, including but not limited to green fluorescent protein).

[0131] “Fidelity,” when used in reference to a polymerase is intended to refer to the accuracy of template-directed incorporation of complementary bases in a synthesized DNA strand relative to the template strand. Typically, fidelity is measured based on the frequency of incorporation of incorrect bases in the newly synthesized nucleic acid strand. The incorporation of incorrect bases can result in point mutations, insertions, or deletions. Fidelity can be calculated according to any method known in the art (see, e.g., Tindall and Kunkel, Biochem., 1988, 27:6008-6013; and Barnes, Gene, 1992, 112:29-35). A polymerase or polymerase variant can exhibit either high fidelity or low fidelity. As used herein, “high fidelity” refers to polymerases with a frequency of accurate base incorporation that exceeds a predetermined value. As used herein, the term “low fidelity” refers to polymerases with a frequency of accurate base incorporation that is lower than a predetermined value. In some embodiments, the predetermined value is a desired frequency of accurate base incorporation or the fidelity of a known polymerase (i.e., a reference polymerase).

[0132] “Altered fidelity” refers to the fidelity of a polymerase variant that differs from the fidelity of the parent polymerase from which the polymerase variant was derived or a reference polymerase. In some embodiments, the altered fidelity is higher than the fidelity of the parent or reference polymerase, while in some other embodiments, the altered fidelity is lower than the fidelity of the parent or reference polymerase. Altered fidelity can be determined by assaying the parent and variant polymerases and comparing their activities using any suitable assay known in the art.

[0133] “Processivity” refers to the ability of a nucleic acid modifying enzyme, such as a DNA polymerase, to remain bound to the template or substrate and perform multiple modification reactions. Processivity is generally measured by the number of catalytic events that take place per binding event.

[0134] “Altered processivity” refers to the processivity of polymerase, or variants thereof, that differ from the processivity of the parent polymerase from which the variant was derived or a reference polymerase. In some embodiments, the altered processivity is higher than the processivity of the parent or reference enzyme, while in some other embodiments, the altered processivity is lower than the processivity of the parent or reference enzyme. Altered processivity can be determined by assaying the parent/reference and variant enzymes and comparing their activities using any suitable assay known in the art.

[0135] “Subject” encompasses mammals such as humans, non-human primates, livestock, companion animals, and laboratory animals (e.g., rodents and lagamorphs). It is intended that the term encompass females as well as males.

[0136] “Patient” means any subject that is being assessed for, treated for, or is experiencing disease. In some embodiments, a “sample” for reaction with a DNA polymerase is obtained from a patient.

[0137] “Sample” as used herein refers to a material or substance for reaction with a nucleic acid polymerase, for example, such as for detecting presence of a target nucleic acid or preparing a DNA copy of a target nucleic acid for sequencing or generation of cDNA libraries. In some embodiments, the sample is a “biological sample,” which refers to sample of biological tissue or fluid. Such samples are typically from humans, but include tissues isolated from non-human primates, or rodents, e.g., mice, and rats, and includes sections of tissues such as biopsy and autopsy samples, frozen sections taken for histological purposes, blood, plasma, serum, sputum, stool, tears, mucus, hair, skin, etc. A “biological sample” also refers to a cell or population of cells or a quantity of tissue or fluid from organisms. In some embodiments, the biological sample has been removed from an animal, but the term “biological sample” can also refer to cells or tissue analyzed in vivo, i.e., without removal from the animal, including cell cultures. Typically, a “biological sample” will contain cells from the animal or of organisms, but the term can also refer to non-cellular biological material, such as non-cellular fractions of blood, saliva, or urine. Numerous types of biological samples can be used with the enzymes, compositions, and method in the present disclosure, including, but not limited to, a tissue biopsy, a blood sample, a buccal scrape, a saliva sample, or a nipple discharge. As used herein, a “tissue biopsy” refers to an amount of tissue removed from an animal, preferably a human, for diagnostic analysis. In a patient with cancer, tissue may be removed from a tumor, allowing the analysis of cells within the tumor. “Tissue biopsy” can refer to any type of biopsy, such as needle biopsy, fine needle biopsy, surgical biopsy, etc. In some embodiments, a sample can be from environmental sources, by way of example and not limitation, water (e.g., ocean, river, refuse/sewer, etc.), soil, air, vents, or surfaces (e.g., floors, machinery, counters, etc.).

### Engineered DNA Polymerase Polypeptides

[0138] In one aspect, the present disclosure provides DNA polymerases, including engineered DNA polymerase polypeptide variants. In some embodiments, the DNA polymerase and engineered DNA polymerase polypeptide variants are useful in performing polymerase reactions, including preparing a complementary DNA of a target DNA target/template. In some embodiments, the engineered DNA polymerase variants of the present disclosure find use in the efficient creation of complementary DNA from DNA templates, whole or in part, such as in sequencing (e.g., NGS sequencing), amplification (e.g., PCR), and diagnostic methods, such as for detecting a target nucleic acid. These engineered DNA polymerase variants can be used in solution, as well as in immobilized embodiments. In some embodiments, the engineered DNA polymerase can be prepared and used as non-fusion polypeptides or as fusion polypeptides.

[0139] In some embodiments herein, when a particular DNA polymerase variant (i.e., an engineered DNA polymerase polypeptide) is referred to by reference to modification of particular amino acid residues in the sequence of a wild-type DNA polymerase or reference DNA polymerase polypeptide, it is to be understood that variants of another DNA polymerase modified in the equivalent position(s) (as determined from the optional amino acid sequence alignment between the respective amino acid sequences) are encompassed herein. For example, for a substitution at specified amino acid position(s) numbered in reference to SEQ ID: 2, an equivalent amino acid position(s) can be readily ascertained for another sequence, such as a reference sequence of SEQ ID NO: 220, 226, 272, 328, 546, 710, or 1208.

[0140] In some embodiments, the engineered DNA polymerase comprises an amino acid sequence having at least 80%, 85%, 86%, 87%, 88%, 89%, 90%, 91%, 92%, 93%, 94%, 95%, 96%, 97%, 98%, 99%, or more sequence identity to a reference sequence corresponding to residues 12 to 844 of SEQ ID NO: 2, 220, 226, 272, 328, 546, 710, or 1208, or to a reference sequence corresponding to SEQ ID NO: 2, 220, 226, 272, 328, 546, 710, or 1208, wherein the amino acid sequence comprises one or more mutations relative to the reference sequence corresponding to residues 12 to 844 of SEQ ID NO: 2, 220, 226, 272, 328, 546, 710, or 1208, or relative to the reference sequence corresponding to SEQ ID NO: 2, 220, 226, 272, 328, 546, 710, or 1208.

[0141] In some embodiments, the engineered DNA polymerase comprises an amino acid sequence having at least 80%, 85%, 86%, 87%, 88%, 89%, 90%, 91%, 92%, 93%, 94%, 95%, 96%, 97%, 98%, 99%, or more sequence identity to the reference sequence corresponding to residues 12 to 844 of SEQ ID NO: 2, or to the reference sequence corresponding to SEQ ID NO: 2, wherein the amino acid sequence comprises one or more mutations relative to the reference sequence corresponding to residues 12 to 844 of SEQ ID NO: 2, or relative to the reference sequence corresponding to SEQ ID NO: 2.

[0142] In some embodiments, the engineered DNA polymerase comprises an amino acid sequence having at least 80% or more sequence identity to the reference sequence corresponding to residues 12 to 844 of SEQ ID NO: 2, or to the reference sequence corresponding to SEQ ID NO: 2, wherein the amino acid sequence comprises one or more mutations relative to the reference sequence corresponding to residues 12 to 844 of SEQ ID NO: 2 or relative to the reference sequence corresponding to SEQ ID NO: 2.

[0143] In some embodiments, the engineered DNA polymerase comprises an amino acid sequence having at least 80%, 85%, 86%, 87%, 88%, 89%, 90%, 91%, 92%, 93%, 94%, 95%, 96%, 97%, 98%, 99%, or more sequence identity to the reference sequence corresponding to residues 12 to 844 of SEQ ID NO: 220, 226, 272, 328, 546, 710, or 1208, or to the reference sequence corresponding to SEQ ID NO: 220, 226, 272, 328, 546, 710, or 1208, wherein the amino acid sequence comprises one or more mutations relative to the reference sequence corresponding to residues 12 to 844 of SEQ ID NO: 2, or relative to the reference sequence corresponding to SEQ ID NO: 2.

[0144] In some embodiments, the engineered DNA polymerase comprises an amino acid sequence having at least 80%, 85%, 86%, 87%, 88%, 89%, 90%, 91%, 92%, 93%, 94%, 95%, 96%, 97%, 98%, 99% or more sequence identity to a reference sequence corresponding to residues 12 to 844 of an even numbered SEQ ID NO. of SEQ ID NOs: 4-1378, or to a reference sequence corresponding to an even numbered SEQ ID NO. of SEQ ID NOs: 4-1378, wherein the amino acid sequence comprises one or more mutations relative to the reference sequence corresponding to residues 12 to 844 of SEQ ID NO: 2, or relative to the reference sequence corresponding to SEQ ID NO: 2.

[0145] In some embodiments, the amino acid sequence of the engineered DNA polymerase comprises at least a mutation at amino acid position 2, 3, 21, 39, 51, 59, 66, 68, 72, 73, 78, 79, 87, 124, 147, 178, 181, 185, 199, 216, 224, 233, 239, 241, 251, 257, 262, 271, 275, 288, 291, 303, 316, 317, 327, 328, 336, 338, 341, 342, 351, 356, 359, 362, 365, 368, 370, 371, 372, 373, 374, 376, 377, 378, 379, 380, 381, 382, 388, 390, 392, 393, 395, 396, 398, 399, 402, 403, 404, 409, 410, 412, 413, 416, 417, 418, 420, 425, 426, 427, 429, 430, 431, 432, 434, 435, 437, 438, 442, 443, 447, 448, 449, 450, 451, 453, 453, 454, 457, 461, 465, 466, 469, 473, 474, 475, 477, 478, 479, 482, 483, 488, 490, 503, 508, 514, 515, 516, 526, 527, 528, 529, 536, 541, 542, 544, 545, 550, 554, 557, 558, 559, 562, 569, 575, 577, 578, 579, 589, 594, 601, 603, 604, 612, 613, 641, 644, 651, 656, 660, 662, 663, 664, 667, 671, 677, 685, 687, 691, 691, 694, 697, 698, 699, 701, 702, 704, 706, 707, 708, 713, 714, 715, 716, 718, 721, 723, 724, 725, 728, 731, 732, 735, 740, 742, 743, 745, 747, 748, 749, 753, 758, 760, 762, 768, 769, 770, 787, 792, 798, 804, 807, 808, 809, 812, 815, 820, 824, 825, or 831, or combinations thereof, wherein the positions are relative to the reference sequence corresponding to SEQ ID NO: 2.

[0146] In some embodiments, the amino acid sequence of the engineered DNA polymerase comprises at least a mutation 2-, 3N, 21A/G/N, 39F, 51T, 59K, 66R, 68E/G/I/K/Q/R/T, 72A, 73I, 78N/S/T/V, 79A/M/R/T, 87V, 124A, 147A/H/M/Q, 178L, 181Q/R, 185T, 199P, 216K, 224L, 233H/K/L, 239V, 241E, 251A/I/L, 257V, 262N, 271G, 275A/T, 288R, 291L, 303T, 316G, 317R, 327E/L, 328L/V, 336E, 338V, 341H/T/Y, 342G, 351H, 356I/S, 359G/V, 362M/P/S, 365T, 368H, 370G/SN, 371L, 372V/Y, 373G/T, 374S/V/Y, 376F/S, 377C, 378C/F/L/S, 379G, 380I, 381E/K, 382C/S, 388C/M/P/V, 390S/T, 392A/C/S/T/V, 393G/R/S/W, 395G/H/S, 396F/L/P/R/S, 398G/Q, 399G/T, 402R/Y, 403I, 404T, 409S, 410V/W, 412M/Q/R/V, 413T, 416S, 417R/W, 418K, 420V, 425T, 426T, 427D/F/H/I/L/R/T/Y, 429F, 430G, 431G/L/R/V, 432T, 434N, 435K/P, 437N/P/S, 438F/S, 442G, 443A, 447R/S/W, 448C/I/T/V, 449A/G/L/V, 450V, 451L, 453L/S, 454D/F/G/L/W, 457N/R/W/Y, 461L/Q/S, 465Y, 466Y, 469T/V, 473N, 474A/C/G, 475A/S/V/Y, 477V, 478I/L, 479L, 482S, 483D, 488W, 490W, 503R, 508K, 514I, 515H/T, 516K, 526S, 527A, 528A/S, 529S/V, 536V, 541D/G/N/S, 542R, 544M, 545L, 550C/T, 554G/N, 557I, 558G/L/T, 559R, 562K, 569M/Q, 575W, 577S, 578A, 579L/Q, 589G, 594A, 601T, 603M/R, 604H, 612D, 613H/R, 641A, 644Q, 651Q, 656Q/S, 660V, 662S, 663E, 664A, 667S/T/W, 671W, 677L, 685R, 687A, 691S/W, 694D, 697A/I/L/V, 698E, 699V, 701M, 702S/V, 704L/V, 706I/S/V, 707W, 708L, 713G, 714I, 715H/L, 716E/L, 718F/Q, 721A/M/N, 723Y, 724F/L, 725V, 728S, 731I/T, 732L/Q, 735L, 740S/V, 742K, 743H/V, 745S/T/V, 747S, 748G, 749M, 753A, 758G, 760T/W/Y, 762A, 768S, 769Q, 770E, 787M/N, 792F/Y, 798I, 804R, 807M, 808W/Y, 809K, 812R/S, 815L/R/S/T, 820E/S/T, 824M, 825E, or 831G, or combinations thereof, wherein the positions are relative to the reference sequence corresponding to SEQ ID NO: 2.

[0147] In some embodiments, the amino acid sequence of the engineered DNA polymerase comprises at least a mutation H2-, H3N, P21A/G/N, Y39F, V51T, R59K, K66R, D68E/G/I/K/Q/R/T, V72A, V73I, A78N/S/T/V, K79A/M/R/T, A87V, P124A, C147A/H/M/Q, V178L, K181Q/R, P185T, R199P, R216K, V224L, R233H/K/L, L239V, R241E, R251A/I/L, A257V, D262N, A271G, R275A/T, E288R, F291L, G303T, E316G, G317R, K327E/L, E328L/V, A336E, A338V, A341H/T/Y, E342G, P351H, A356I/S, K359G/V, R362M/P/S, L365T, D368H, A370G/SN, V371L, L372V/Y, A373G/T, L374S/V/Y, E376F/S, G377C, V378C/F/L/S, A379G, L380I, D381E/K, P382C/S, L388C/M/P/V, A390S/T, L392A/C/S/T/V, L393G/R/S/W, P395G/H/S, A396F/L/P/R/S, T398G/Q, N399G/T, G402R/Y, V403I, A404T, G409S, E410V/W, T412M/Q/R/V, E413T, A416S, E417R/W, R418K, L420V, L425T, F426T, Q427D/F/H/I/L/R/T/Y, L429F, F430G, P431G/L/R/V, R432T, S434N, E435K/P, L437N/P/S, L438F/S, Q442G, E443A, P447R/S/W, L448C/I/T/V, S449A/G/L/V, R450V, V451L, A453LS, H454D/F/G/L/W, A457N/R/W/Y, R461L/Q/S, P465Y, L466Y, A469T/V, E473N, L474A/C/G, E475A/S/V/Y, E477V, M478I/L, E479L, E482S, G483D, L488W, G490W, K503R, E508K, V514I, G515H/T, R516K, A526S, Q527A, G528A/S, A529S/V, A536V, E541D/G/N/S, L542R, L544M, Q545L, S550C/T, S554G/N, L557I, D558G/L/T, P559R, R562K, G569M/Q, F575W, Q577S, T578A, A579L/Q, D589G, N594A, L601T, Q603M/R, R604H, E612D, E613H/R, R641A, R644Q, T651Q, W656Q/S, L660V, P662S, A663E, L664A, P667S/T/W, R671W, N677L, S685R, H687A, Q691S/W, G694D, Y697A/I/L/V, K698E, E699V, E701M, A702S/V, I704L/V, R706I/S/V, Y707W, F708L, K713G, V714I, R715H/L, A716E/L, I718F/Q, T721A/M/N, E723Y, E724F/L, G725V, R728S, V731I/T, E732L/Q, F735L, Y740S/V, P742K, D743H/V, A745S/T/V, R747S, V748G, R749M, E753A, M758G, F760T/W/Y, M762A, A768S, A769Q, D770E, G787M/N, L792F/Y, L798I, E804R, A807M, E808W/Y, E809K, A812R/S, K815L/R/S/T, N820E/S/T, L824M, D825E, or E831G, or combinations thereof, wherein the positions are relative to the reference sequence corresponding to SEQ ID NO: 2.

[0148] In some embodiments, the amino acid sequence of the engineered DNA polymerase comprises at least a mutation at amino acid position 147, 257, 291, 395, 402, 474, 475, 478, 514, 515, 526, 527, 528, 536, 559, 604, 660, 662, 687, 745, or 760, or combinations thereof, wherein the positions are relative to the reference sequence corresponding to SEQ ID NO: 2. In some embodiments, the amino acid sequence of the engineered DNA polymerase comprises at least a mutation 147A/H/M/Q, 257V, 291L, 395G/H/S, 402R/Y, 474A/C/G, 475A/S/V/Y, 478I/L, 514I, 515H/T, 526S, 527A, 528A/S, 536V, 559R, 604H, 660V, 662S, 687A, 745S/TN, or 760T/W/Y, or combinations thereof, wherein the positions are relative to the reference sequence corresponding to SEQ ID NO: 2. In some embodiments, the amino acid sequence of the engineered DNA polymerase comprises at least a mutation 147H, 257V, 291L, 395H/S, 402R, 474A, 475A, 478L, 514I, 515T, 526S, 527A, 528A, 536V, 559R, 604H, 660V, 662S, 687A, 745T, or 760W, or combinations thereof, wherein the positions are relative to the reference sequence corresponding to SEQ ID NO: 2. In some embodiments, the amino acid sequence of the engineered DNA polymerase comprises at least a mutation C147H, A257V, F291L, P395H/S, G402R, L474A, E475A, M478L, V514I, G515T, A526S, Q527A, G528A, A536V, P559R, R604H, L660V, P662S, H687A, A745T, or F760W, or combinations thereof, wherein the positions are relative to the reference sequence corresponding to SEQ ID NO: 2.

[0149] In some embodiments, the amino acid sequence of the engineered DNA polymerase comprises at least a mutation at amino acid position 559, wherein the position is relative to the reference sequence corresponding to SEQ ID NO: 2. In some embodiments, the amino acid sequence of the engineered DNA polymerase comprises at least a substitution 559R, wherein the position is relative to the reference sequence corresponding to SEQ ID NO: 2. In some embodiments, the amino acid sequence of the engineered DNA polymerase comprises at least a substitution P559R, wherein the position is relative to the reference sequence corresponding to SEQ ID NO: 2.

[0150] In some embodiments, the amino acid sequence of the engineered DNA polymerase comprises at least a mutation at amino acid position 514, 515, or 760, or combinations thereof, wherein the positions are relative to the reference sequence corresponding to SEQ ID NO: 2. In some embodiments, the amino acid sequence of the engineered DNA polymerase comprises at least a mutation 514I, 515T, or 760W, or combinations thereof, wherein the positions are relative to the reference sequence corresponding to SEQ ID NO: 2. In some embodiments, the amino acid sequence of the engineered DNA polymerase comprises at least a mutation V514I, G515T, or F760W, or combinations thereof, wherein the positions are relative to the reference sequence corresponding to SEQ ID NO: 2.

[0151] In some embodiments, the amino acid sequence of the engineered DNA polymerase comprises at least a mutation at amino acid position 402, 604, or 660, or combinations thereof, wherein the positions are relative to the reference sequence corresponding to SEQ ID NO: 2. In some embodiments, the amino acid sequence of the engineered DNA polymerase comprises at least a mutation 402R, 604H, or 660V, or combinations thereof, wherein the positions are relative to the reference sequence corresponding to SEQ ID NO: 2. In some embodiments, the amino acid sequence of the engineered DNA polymerase comprises at least a mutation G402R, R604H, or L660V, or combinations thereof, wherein the positions are relative to the reference sequence corresponding to SEQ ID NO: 2.

[0152] In some embodiments, the amino acid sequence of the engineered DNA polymerase comprises at least a mutation at amino acid position 291, 395, 687, or 745, or combinations thereof, wherein the positions are relative to the reference sequence corresponding to SEQ ID NO: 2. In some embodiments, the amino acid sequence of the engineered DNA polymerase comprises at least a mutation 291L, 395H, 687A, or 745T, or combinations thereof, wherein the positions are relative to the reference sequence corresponding to SEQ ID NO: 2. In some embodiments, the amino acid sequence of the engineered DNA polymerase comprises at least a mutation F291L, P395H, H687A, or A745T, or combinations thereof, wherein the positions are relative to the reference sequence corresponding to SEQ ID NO: 2.

[0153] In some embodiments, the amino acid sequence of the engineered DNA polymerase comprises at least a mutation at amino acid position 257, 395, 474, 475, 536, or 662, or combinations thereof, wherein the positions are relative to the reference sequence corresponding to SEQ ID NO: 2. In some embodiments, the amino acid sequence of the engineered DNA polymerase comprises at least a mutation 257V, 395S, 474A, 475A, 536V, or 662S, or combinations thereof, wherein the positions are relative to the reference sequence corresponding to SEQ ID NO: 2. In some embodiments, the amino acid sequence of the engineered DNA polymerase comprises at least a mutation A257V, H395S, L474A, E475A, A536V, or P662S, or combinations thereof, wherein the positions are relative to the reference sequence corresponding to SEQ ID NO: 2.

[0154] In some embodiments, the amino acid sequence of the engineered DNA polymerase comprises at least a mutation at amino acid position 478, 515, 526, 527, or 528, or combinations thereof, wherein the positions are relative to the reference sequence corresponding to SEQ ID NO: 2. In some embodiments, the amino acid sequence of the engineered DNA polymerase comprises at least a mutation 478L, 515T, 526S, 527A, or 528A, or combinations thereof, wherein the positions are relative to the reference sequence corresponding to SEQ ID NO: 2. In some embodiments, the amino acid sequence of the engineered DNA polymerase comprises at least a mutation M478L, G515T, A526S, Q527A, or V528A, or combinations thereof, wherein the positions are relative to the reference sequence corresponding to SEQ ID NO: 2.

[0155] In some embodiments, the amino acid sequence of the engineered DNA polymerase comprises at least a mutation at amino acid position 402, 478, 515, 526, 527, 528, 559, 604, 660, or 760, or combinations thereof, wherein the positions are relative to SEQ ID NO: 2. In some embodiments, the amino acid sequence of the engineered DNA polymerase comprises mutations in at least 2, 3, 4, 5, 6, 7, 8, 9, or all of the amino acid positions 402, 478, 515, 526, 527, 528, 559, 604, 660, and 760. In some embodiments, the amino acid sequence of the engineered DNA polymerase comprises at least a mutation 402R, 478L, 515T, 526S, 527A, 528A, 559R, 604H, 660V, or 760W, or combinations thereof, wherein the positions are relative to SEQ ID NO: 2. In some embodiments, the amino acid sequence of the engineered DNA polymerase comprises at least 2, 3, 4, 5, 6, 7, 8, 9, or all of mutations 402R, 478L, 515T, 526S, 527A, 528A, 559R, 604H, 660V, or 760W.

[0156] In some embodiments, the amino acid sequence of the engineered DNA polymerase comprises at least a mutation G402R, M478L, G515T, A526S, Q527A, G528A, P559R, R604H, L660V, or F760W, or combinations thereof, wherein the positions are relative to SEQ ID NO: 2. In some embodiments, the amino acid sequence of the engineered DNA polymerase comprises at least 2, 3, 4, 5, 6, 7, 8, 9, or all of mutations G402R, M478L, G515T, A526S, Q527A, G528A, P559R, R604H, L660V, or F760W.

[0157] In some embodiments, the amino acid sequence of the engineered DNA polymerase comprises at least a mutation at amino acid position 478, 515, 526, 527, 528, 559, or 760, or combinations thereof, wherein the positions are relative to SEQ ID NO: 2. In some embodiments, the amino acid sequence of the engineered DNA polymerase comprises mutations in at least 2, 3, 4, 5, 6 or all of the amino acid positions 478, 515, 526, 527, 528, 559, and 760. In some embodiments, the amino acid sequence of the engineered DNA polymerase comprises at least a mutation 478L, 515T, 526S, 527A, 528A, 559R, or 760W, or combinations thereof, wherein the positions are relative to SEQ ID NO: 2. In some embodiments, the amino acid sequence of the engineered DNA polymerase comprises at least 2, 3, 4, 5, 6 or all of mutations 478L, 515T, 526S, 527A, 528A, 559R, and 760W. In some embodiments, the amino acid sequence of the engineered DNA polymerase comprises at least a mutation M478L, G515T, A526S, Q527A, G528A, P559R, or F760W, or combinations thereof, wherein the positions are relative to SEQ ID NO: 2. In some embodiments, the amino acid sequence of the engineered DNA polymerase comprises at least 2, 3, 4, 5, 6 or all of mutations M478L, G515T, A526S, Q527A, G528A, P559R, and F760W.

[0158] In some embodiments, the amino acid sequence of the engineered DNA polymerases comprises a mutation at each of amino acid positions 478, 515, 526, 527, 528, 559, and 760, wherein the positions are relative to SEQ ID NO: 2. In some embodiments, the amino acid sequence of the engineered DNA polymerase comprises each of mutations 478L, 515T, 526S, 527A, 528A, 559R, and 760W, wherein the positions are relative to SEQ ID NO: 2. In some embodiments, the amino acid sequence of the engineered DNA polymerase comprises each of mutations M478L, G515T, A526S, Q527A, G528A, P559R, and F760W, wherein the positions are relative to SEQ ID NO: 2.

[0159] In some embodiments, the amino acid sequence of the engineered DNA polymerase comprises a mutation at each of amino acid positions 402, 478, 515, 526, 527, 528, 559, 604, 660, and 760, wherein the positions are relative to SEQ ID NO: 2. In some embodiments, the amino acid sequence of the engineered DNA polymerase comprises each of mutations 402R, 478L, 515T, 526S, 527A, 528A, 559R, 604H, 660V, and 760W, wherein the positions are relative to SEQ ID NO: 2. In some embodiments, the amino acid sequence of the engineered DNA polymerase comprises each of mutations G402R, M478L, G515T, A526S, 527A, 528A, 559R, 604H, 660V, and 760W, wherein the positions are relative to SEQ ID NO: 2.

[0160] In some embodiments, the amino acid sequence of the engineered DNA polymerase comprises a mutation at each of amino acid positions 147, 257, 291, 395, 402, 474, 475, 478, 515, 526, 527, 528, 536, 559, 604, 660, 662, 687, 745, and 760, wherein the positions are relative to SEQ ID NO: 2. In some embodiments, the amino acid sequence of the engineered DNA polymerase comprises each of mutations 147H, 257V, 291L, 395S, 402R, 474A, 475A, 478L, 515T, 526S, 527A, 528A, 536V, 559R, 604H, 660V, 662S, 687A, 745T, and 760W, wherein the positions are relative to SEQ ID NO: 2. In some embodiments, the amino acid sequence of the engineered DNA polymerase comprises each of mutations C147H, A257V, F291L, P395H/S, G402R, L474A, E475A, M478L, G515T, A526S, Q527A, G528A, A536V, P559R, R604H, L660V, P662S, H687A, A745T, and F760W, wherein the positions are relative to SEQ ID NO: 2.

[0161] In some embodiments, the amino acid sequence of the engineered DNA polymerase comprises at least a mutation at amino acid position 147, wherein the position is relative to the reference sequence corresponding to SEQ ID NO: 2. In some embodiments, the amino acid sequence of the engineered DNA polymerase comprises at least a mutation 147H, wherein the position is relative to the reference sequence corresponding to SEQ ID NO: 2. In some embodiments, the amino acid sequence of the engineered DNA polymerase comprises at least a mutation C147H, wherein the position is relative to the reference sequence corresponding to SEQ ID NO: 2.

[0162] In some embodiments, the amino acid sequence of the engineered DNA polymerase comprises at least a mutation or mutation set at amino acid position(s) 541/554/557, 516/541/550/554/557, 478/514/526/527, 478/516/526/527/529/541, 288/478/514/516/541/557, 288/478/516/541/550/554/557, 550/554/557, 478, 399, 514/516, 399/516/526/528/529/554/557, 478/516/541, 478/541, 288/399/514/554/557, 478/514/554/557, 288/478/526/550/554, 478/541/550/557, 541, 288/514/526/541, 554/557, 399/478, 288/514/554/557, 478/514/516/526/527/529/557, 399/541/550/554, 516/529/541/554/557, 478/541/554/557, 288/478/526/528/529/554/557, 288/514/516/529/541, 478/514/516/541, 478/514/557, 399/541/557, 399/541, 288/399/516/527/541/557, 288/478/514/541, 288/514/516, 664/698, 399/478/516/541, 399/528/550, 399/478/514/541/557, 288/478/514/516, 224/664, 478/526/527/528, 288/478/514/516/541/550/554, 478/514/541/554, 478/516, 478/514/516/541/554/557, 288/399/478/516/541, 288/478/514/554/557, 288/478/516, 288/399/516/554/557, 550/554, 288/550/554, 288/399/478/516/550/554, 399/514/541/550/554, 288/478/514/554, 199, 288/399/529/541, 399/478/554, 516/528/541/554/557, 39/199/698, 399/478/526/528/529, 288/399/514/541/550/554, 288/541, 288/478/514/550/554/557, 288/399/478/516, 526/529/554/557, 288/478/557, 288/478/514/550/554, 478/541/550/554, 516/526/528, 288/526/528/550/554/557, 199/664/698, 514/526/528/529/550/557, 288, 399/554/557, 288/554/557, 399/514/541, 288/478/514/527/554/557, 399/478/516/541/554, 87/541/554, 288/550/554/557, 527/529/541, 528/529/554, 478/554/557, 478/514/516/541/550/554/557, 199/216/644/664, 396/478/514/554/557/694, 241/644/663/664, 399/478/554/557, 288/399/550, 288/516/526/527/528/557, 399/526/527/528/529, 288/478/526, 399/478/514/516/526/527/528/529/541, 288/399/478/514/554/557, 288/399/514/516/528, 478/554, 399/514/516, 514, 399/550/554, 288/478/514/528/541/554, 478/514/516/554, 478/514/541, 288/541/554/557, 698, or 478/514/526/527/528, wherein the positions are relative to the reference sequence corresponding to SEQ ID NO: 2. In some embodiments, amino acid sequence of the engineered DNA polymerase comprises at least a mutation or mutation set 541D/554G/557I, 516K/541D/550T/554N/557I, 478L/514I/526S/527A, 478L/516K/526S/527A/529V/541D, 288R/478I/514I/516K/541D/557I, 288R/478L/516K/541D/550T/554G/557I, 550T/554N/557I, 478L, 399T, 514I/516K, 399T/516K/526S/528A/529V/554N/557I, 478L/516K/541D, 478I/541D, 288R/399T/514I/554G/557I, 478L/514I/554N/557I, 288R/478L/526S/550T/554N, 478L/541D/550T/557I, 541D, 288R/514I/526S/541D, 554N/557I, 399T/478L, 288R/514I/554N/557I, 478L/514I/516K/526S/527A/529V/557I, 399T/541D/550T/554N, 516K/529V/541D/554G/557I, 478I/541D/554G/557I, 288R/478L/526S/528S/529V/554N/557I, 288R/514I/516K/529V/541D, 478I/514I/516K/541D, 478L/514I/557I, 399T/541D/557I, 399T/541D, 288R/399T/516K/527A/541D/557I, 288R/478I/514I/541D, 288R/514I/516K, 664A/698E, 399T/478L/516K/541D, 399T/528A/550T, 399T/478I/514I/541D/557I, 288R/478L/514I/516K, 224L/664A, 478L/526S/527A/528S, 288R/478L/514I/516K/541D/550T/554N, 478L/514I/541D/554N, 478L/516K, 478L/514I/516K/541D/554N/557I, 288R/399T/478L/516K/541D, 288R/478L/514I/554N/557I, 288R/478I/516K, 288R/399T/516K/554G/557I, 550T/554G, 288R/550T/554N, 288R/399T/478L/516K/550T/554N, 399T/514I/541D/550T/554G, 288R/478L/514I/554N, 199P, 288R/399T/529V/541D, 399T/478L/554N, 516K/528A/541D/554N/557I, 39F/199P/698E, 399T/478L/526S/528S/529V, 288R/399T/514I/541D/550T/554N, 288R/541D, 288R/478I/514I/550T/554N/557I, 288R/399T/478L/516K, 550T/554N, 526S/529V/554G/557I, 288R/478I/557I, 288R/478L/514I/550T/554N, 478L/541D/550T/554N, 516K/526S/528S, 288R/526S/528S/550T/554N/557I, 199P/664A/698E, 514I/526S/528S/529V/550T/557I, 288R, 399T/554N/557I, 288R/554G/557I, 399T/514I/541D, 288R/478L/514I/527A/554N/557I, 399T/478I/516K/541D/554N, 87V/541D/554N, 288R/550T/554N/557I, 527A/529V/541D, 528S/529V/554N, 478L/554G/557I, 478L/514I/516K/541D/550T/554G/557I, 199P/216K/644Q/664A, 396S/478I/514I/554G/557I/694D, 478I, 241E/644Q/663E/664A, 399T/478I/554N/557I, 288R/399T/550T, 288R/516K/526S/527A/528A/557I, 399T/526S/527A/528S/529V, 288R/478L/526S, 399T/478L/514I/516K/526S/527A/528S/529V/541D, 288R/399T/478I/514I/554G/557I, 288R/399T/514I/516K/528S, 478L/554N, 399T/514I/516K, 514I, 399T/550T/554N, 478I/516K, 288R/478L/514I/528A/541D/554N, 478I/514I/516K/554N, 478L/514I/541D, 288R/541D/554N/557I, 698E, or 478L/514I/526S/527A/528A, wherein the positions are relative to the reference sequence corresponding to SEQ ID NO: 2. In some embodiments, the amino acid sequence of the engineered DNA polymerase comprises at least a mutation or mutation set E541D/S554G/L557I, R516K/E541D/S550T/S554N/L557I, M478L/V514I/A526S/Q527A, M478L/R516K/A526S/Q527A/A529V/E541D, E288R/M478I/V514I/R516K/E541D/L557I, E288R/M478L/R516K/E541D/S550T/S554G/L557I, S550T/S554N/L557I, M478L, N399T, V514I/R516K, N399T/R516K/A526S/G528A/A529V/S554N/L557I, M478L/R516K/E541D, M478I/E541D, E288R/N399T/V514I/S554G/L557I, M478L/V514I/S554N/L557I, E288R/M478L/A526S/S550T/S554N, M478L/E541D/S550T/L557I, E541D, E288R/V514I/A526S/E541D, S554N/L557I, N399T/M478L, E288R/V514I/S554N/L557I, M478L/V514I/R516K/A526S/Q527A/A529V/L557I, N399T/E541D/S550T/S554N, R516K/A529V/E541D/S554G/L557I, M478I/E541D/S554G/L557I, E288R/M478L/A526S/G528S/A529V/S554N/L557I, E288R/V514I/R516K/A529V/E541D, M478I/V514I/R516K/E541D, M478L/V514I/L557I, N399T/E541D/L557I, N399T/E541D, E288R/N399T/R516K/Q527A/E541D/L557I, E288R/M478I/V514I/E541D, E288R/V514I/R516K, L664A/K698E, N399T/M478L/R516K/E541D, N399T/G528A/S550T, N399T/M478I/V514I/E541D/L557I, E288R/M478L/V514I/R516K, V224L/L664A, M478L/A526S/Q527A/G528S, E288R/M478L/V514I/R516K/E541D/S550T/S554N, M478L/V514I/E541D/S554N, M478L/R516K, M478L/V514I/R516K/E541D/S554N/L557I, E288R/N399T/M478L/R516K/E541D, E288R/M478L/V514I/S554N/L557I, E288R/M478I/R516K, E288R/N399T/R516K/S554G/L557I, S550T/S554G, E288R/S550T/S554N, E288R/N399T/M478L/R516K/S550T/S554N, N399T/V514I/E541D/S550T/S554G, E288R/M478L/V514I/S554N, R199P, E288R/N399T/A529V/E541D, N399T/M478L/S554N, R516K/G528A/E541D/S554N/L557I, Y39F/R199P/K698E, N399T/M478L/A526S/G528S/A529V, E288R/N399T/V514I/E541D/S550T/S554N, E288R/E541D, E288R/M478I/V514I/S550T/S554N/L557I, E288R/N399T/M478L/R516K, S550T/S554N, A526S/A529V/S554G/L557I, E288R/M478I/L557I, E288R/M478L/V514I/S550T/S554N, M478L/E541D/S550T/S554N, R516K/A526S/G528S, E288R/A526S/G528S/S550T/S554N/L557I, R199P/L664A/K698E, V514I/A526S/G528S/A529V/S550T/L557I, E288R, N399T/S554N/L557I, E288R/S554G/L557I, N399T/V514I/E541D, E288R/M478L/V514I/Q527A/S554N/L557I, N399T/M478I/R516K/E541D/S554N, A87V/E541D/S554N, E288R/S550T/S554N/L557I, Q527A/A529V/E541D, G528S/A529V/S554N, M478L/S554G/L557I, M478L/V514I/R516K/E541D/S550T/S554G/L557I, R199P/R216K/R644Q/L664A, A396S/M478I/V514I/S554G/L557I/G694D, M478I, R241E/R644Q/A663E/L664A, N399T/M478I/S554N/L557I, E288R/N399T/S550T, E288R/R516K/A526S/Q527A/G528A/L557I, N399T/A526S/Q527A/G528S/A529V, E288R/M478L/A526S, N399T/M478L/V514I/R516K/A526S/Q527A/G528S/A529V/E541D, E288R/N399T/M478I/V514I/S554G/L557I, E288R/N399T/V514I/R516K/G528S, M478L/S554N, N399T/V514I/R516K, V514I, N399T/S550T/S554N, M478I/R516K, E288R/M478L/V514I/G528A/E541D/S554N, M478I/V514I/R516K/S554N, M478L/V514I/E541D, E288R/E541D/S554N/L557I, K698E, or M478L/V514I/A526S/Q527A/G528A, wherein the positions are relative to the reference sequence corresponding to SEQ ID NO: 2.

[0163] In some embodiments, the amino acid sequence of the engineered DNA polymerase comprises at least a mutation set at amino acid positions 478/514/515/526/527/528, 478/514/526/527/528/594, 478/514/526/527/528/559, 478/514/526/527/528/760, 478/514/526/527/528/541, 478/514/526/527/528/753, 402/478/514/526/527/528, 398/478/514/526/527/528, 478/514/526/527/528/758, 399/478/514/526/527/528, 478/514/526/527/528/575, 257/478/514/526/527/528/758, 478/514/526/527/528/558, 478/514/526/527/528/601, 478/514/526/527/528/762, 478/514/526/527/528/589, or 478/514/526/527/528/544, wherein the positions are relative to the reference sequence corresponding to SEQ ID NO: 2. In some embodiments, the amino acid sequence of the engineered DNA polymerase comprises at least a mutation set 478L/514I/515H/526S/527A/528A, 478L/514I/526S/527A/528A/594A, 478L/514I/526S/527A/528A/559R, 478L/514I/526S/527A/528A/760W, 478L/514I/526S/527A/528A/541S, 478L/514I/526S/527A/528A/541N, 478L/514I/526S/527A/528A/753A, 402R/478L/514I/526S/527A/528A, 478L/514I/526S/527A/528A/760T, 398Q/478L/514I/526S/527A/528A, 478L/514I/526S/527A/528A/758G, 478L/514I/526S/527A/528A/760Y, 399G/478L/514I/526S/527A/528A, 478L/514I/526S/527A/528A/575W, 257V/478L/514I/526S/527A/528A/758G, 478L/514I/526S/527A/528A/558L, 402Y/478L/514I/526S/527A/528A, 478L/514I/526S/527A/528A/558T, 478L/514I/526S/527A/528A/601T, 398G/478L/514I/526S/527A/528A, 478L/514I/526S/527A/528A/762A, 478L/514I/526S/527A/528A/558G, or 478L/514I/526S/527A/528A/589G, or 478L/514I/526S/527A/528A/544M, wherein the positions are relative to the reference sequence corresponding to SEQ ID NO: 2. In some embodiments, the amino acid sequence of the engineered DNA polymerase comprises at least a mutation or mutation set provided in Tables 5.1 and 5.2 relative to the reference sequence corresponding to SEQ ID NO: 2.

[0164] In some embodiments, the amino acid sequence of the engineered DNA polymerase comprises at least a mutation set at amino acid positions 478/514/515/526/527/528/559/760, 478/515/526/527/528/559/760, 514/515/526/527/528/559/760, 478/514/526/527/528/559/660, 178/478/514/526/527/528/559, 402/478/514/515/526/527/528/559, 377/478/514/515/526/527/528/559, 478/514/515/526/527/528/559, 478/515/526/527/528/559, 402/478/514/526/527/528/559, 478/503/514/526/527/528/559, 239/478/514/526/527/528/559, 73/478/514/526/527/528/559, 478/514/526/527/541/559, 59/478/514/526/527/528/559, 478/514/515/526/527/528/559/575, 3/478/514/515/526/527/528, 377/478/514/515/526/527/541/554/557/559, 402/478/515/526/527/528/541, 478/515/526/527/528/541, 478/515/526/527/528, 478/514/515/526/527/528, 478/514/515/526/527/528/541, 377/478/514/515/526/527/528, 402/478/514/515/526/527/528, or 478/514/515/526/527/528/541/557/559, wherein the amino acid positions are relative to the reference sequence corresponding to SEQ ID NO: 2. In some embodiments, the amino acid sequence of the engineered DNA polymerase comprises at least a mutation set 478L/514I/515T/526S/527A/528A/559R/760W, 478L/515T/526S/527A/528A/559R/760W, 514I/515T/526S/527A/528A/559R/760W, 478L/514I/526S/527A/528A/559R/660V, 178L/478L/514I/526S/527A/528A/559R, 402Y/478L/514I/515T/526S/527A/528A/559R, 377C/478L/514I/515T/526S/527A/528A/559R, 478L/514I/515T/526S/527A/528A/559R, 478L/515T/526S/527A/528A/559R, 402Y/478L/514I/526S/527A/528A/559R, 478L/503R/514I/526S/527A/528A/559R, 239V/478L/514I/526S/527A/528A/559R, 73I/478L/514I/526S/527A/528A/559R, 478L/514I/526S/527A/541N/559R, 59K/478L/514I/526S/527A/528A/559R, 478L/514I/515T/526S/527A/528A/559R/575W, 3N/478L/514I/515T/526S/527A/528A, 377C/478L/514I/515H/526S/527A/541N/554N/557I/559R, 402R/478L/515T/526S/527A/528A/541N, 478L/515T/526S/527A/528A/541G, 478L/515T/526S/527A/528A, 478L/514I/515T/526S/527A/528A, 478L/514I/515T/526S/527A/528A/541N, 377C/478L/514I/515T/526S/527A/528A, 402Y/478L/514I/515H/526S/527A/528A, or 478L/514I/515T/526S/527A/528A/541N/557I/559R, wherein the positions are relative to the reference sequence corresponding to SEQ ID NO: 2. In some embodiments, the amino acid sequence of the engineered DNA polymerase comprises at least a mutation set provided in Tables 6.1 and 6.2 relative to the reference sequence corresponding to SEQ ID NO: 2.

[0165] In some embodiments, the amino acid sequence of the engineered DNA polymerase comprises at least a mutation set at amino acid positions 402/478/515/526/527/541/559/660/760, 257/478/515/526/527/528/559/604/660/760, 178/257/402/404/478/515/526/527/557/559/660/760, 402/478/515/526/527/528/559/604/660/760, 257/402/478/515/526/527/528/541/559/660/760, 377/402/478/515/526/527/528/541/559/660/760, 257/377/402/478/515/526/527/528/559/660/760, 478/483/515/526/527/528/559/660/760, 257/402/478/515/526/527/528/559/760, 257/478/515/526/527/528/559/760, 257/377/478/515/526/527/528/559/760, 178/478/515/526/527/528/559/660/760, 257/377/402/478/515/526/527/528/559/760, 478/515/526/527/528/559/660/760, 178/257/377/402/403/478/483/515/526/527/528/559/604/660/760, 377/478/515/526/527/528/559/760, 178/402/403/478/515/526/527/541/559/660/760, 377/478/515/526/527/528/559/601/660/760, 178/377/478/515/526/527/528/559/760, 377/478/490/515/526/527/528/559/660/760, 402/403/478/483/515/526/527/528/554/557/559/760, 178/257/377/478/515/526/527/528/558/559/660/760, 257/402/403/478/483/515/526/527/528/559/660/760, 178/478/515/526/527/528/554/557/558/559/660/760, 478/515/526/527/528/554/557/559/660/760, 178/478/483/515/526/527/528/541/545/554/557/559/604/660/760, 478/515/526/527/528/559/760/792, 402/403/478/483/515/526/527/528/559/604/660/760, 178/478/515/526/527/528/559/760, 474/478/515/526/527/528/559/760, 257/377/478/515/526/527/528/541/559/604/760, 478/515/526/527/528/559/743/760, 396/478/515/526/527/528/559/760, 478/479/515/526/527/528/559/760, 377/403/478/515/526/527/528/541/559/604/760, 475/478/515/526/527/528/559/760, 178/257/403/478/515/526/527/559/760, 448/478/515/526/527/528/559/760, 478/515/526/527/528/559/577/760, 395/478/515/526/527/528/559/760, 478/515/526/527/528/559/760/769, 478/515/526/527/528/559/691/760, 478/515/526/527/528/559/677/760, 478/515/526/527/528/559/704/760, 377/478/515/526/527/528/541/559/575/604/660/760, 178/257/478/515/526/527/528/559/601/604/760, 478/515/526/527/528/559/685/760, 377/478/515/526/527/528/559/604/660/760, 478/515/526/527/528/559/749/760, 478/482/515/526/527/528/559/760, 291/478/515/526/527/528/559/760, 478/515/526/527/528/559/579/760, 178/478/515/526/527/528/541/550/559/604/760, 477/478/515/526/527/528/559/760, 178/257/478/515/526/527/528/559/760, 257/402/478/490/515/526/527/541/559/660/760, 328/478/515/526/527/528/559/760, 478/515/526/527/528/559/740/760, 478/483/515/526/527/528/559/660/760, 257/377/478/515/526/527/528/559/760, 368/478/515/526/527/528/559/760, 478/515/526/527/528/559/760/792, 478/515/526/527/528/559/721/745/760, 478/515/526/527/528/559/578/760, 478/515/526/527/528/559/687/760, 478/515/526/527/528/541/559/601/604/760, 257/478/515/526/527/559/760, 257/478/515/526/527/554/559/760, 478/515/526/527/528/559/760/768, 478/515/526/527/528/559/760/770, 257/377/478/483/515/526/527/528/541/559/760, 478/515/526/527/528/542/559/760, 257/402/403/478/515/526/527/528/559/760, 257/403/478/515/526/527/528/541/559/760, 478/515/526/527/528/559/604/760, 402/478/515/526/527/528/559/604/760, 257/316/478/515/526/527/528/541/559/575/604/760, 327/478/515/526/527/528/559/760, 403/478/515/526/527/528/541/559/604/660/760, 257/377/403/478/483/515/526/527/528/541/559/601/604/760, 478/515/526/527/528/559/760, 402/478/515/526/527/541/559/601/760, or 257/377/478/515/526/527/528/559/760, wherein the positions are relative to the reference sequence corresponding to SEQ ID NO: 2. In some embodiments, the amino acid sequence of the engineered DNA polymerase comprises at least a mutation set 402R/478L/515T/526S/527A/541D/559R/660V/760W, 257V/478L/515T/526S/527A/528A/559R/604H/660V/760W, 178L/257V/402R/404T/478L/515T/526S/527A/557I/559R/660V/760W, 402R/478L/515T/526S/527A/528A/559R/604H/660V/760W, 257V/402Y/478L/515T/526S/527A/528A/541G/559R/660V/760W, 377C/402Y/478L/515T/526S/527A/528A/541N/559R/660V/760W, 257V/377C/402Y/478L/515T/526S/527A/528A/559R/660V/760W, 478L/483D/515T/526S/527A/528A/559R/660V/760W, 257V/402Y/478L/515T/526S/527A/528A/559R/760W, 257V/478L/515T/526S/527A/528A/559R/760W, 257V/377C/478L/515T/526S/527A/528A/559R/760W, 178L/478L/515T/526S/527A/528A/559R/660V/760W, 257V/377C/402Y/478L/515T/526S/527A/528A/559R/760W, 478L/515T/526S/527A/528A/559R/660V/760W, 178L/257V/377C/402R/403I/478L/483D/515T/526S/527A/528A/559R/604H/660V/760W, 377C/478L/515T/526S/527A/528A/559R/760W, 178L/402R/403I/478L/515T/526S/527A/541G/559R/660V/760W, 377C/478L/515T/526S/527A/528A/559R/601T/660V/760W, 178L/377C/478L/515T/526S/527A/528A/559R/760W, 377C/478L/490W/515T/526S/527A/528A/559R/660V/760W, 402R/403I/478L/483D/515T/526S/527A/528A/554N/557I/559R/760W, 178L/257V/377C/478L/515T/526S/527A/528A/558T/559R/660V/760W, 257V/402Y/403I/478L/483D/515T/526S/527A/528A/559R/660V/760W, 178L/478L/515T/526S/527A/528A/554N/557I/558T/559R/660V/760W, 478L/515T/526S/527A/528A/554N/557I/559R/660V/760W, 178L/478L/483D/515T/526S/527A/528A/541N/545L/554N/557I/559R/604H/660V/760W, 478L/515T/526S/527A/528A/559R/760W/792F, 402Y/403I/478L/483D/515T/526S/527A/528A/559R/604H/660V/760W, 178L/478L/515T/526S/527A/528A/559R/760W, 474A/478L/515T/526S/527A/528A/559R/760W, 257V/377C/478L/515T/526S/527A/528A/541D/559R/604H/760W, 478L/515T/526S/527A/528A/559R/743H/760W, 396L/478L/515T/526S/527A/528A/559R/760W, 478L/515T/526S/527A/528A/559R/743V/760W, 396R/478L/515T/526S/527A/528A/559R/760W, 478L/479L/515T/526S/527A/528A/559R/760W, 377C/403I/478L/515T/526S/527A/528A/541D/559R/604H/760W, 475A/478L/515T/526S/527A/528A/559R/760W, 178L/257V/403I/478L/515T/526S/527A/559R/760W, 448I/478L/515T/526S/527A/528A/559R/760W, 478L/515T/526S/527A/528A/559R/577S/760W, 395G/478L/515T/526S/527A/528A/559R/760W, 478L/515T/526S/527A/528A/559R/760W/769Q, 475V/478L/515T/526S/527A/528A/559R/760W, 448C/478L/515T/526S/527A/528A/559R/760W, 478L/515T/526S/527A/528A/559R/691W/760W, 478L/515T/526S/527A/528A/559R/677L/760W, 478L/515T/526S/527A/528A/559R/704L/760W, 377C/478L/515T/526S/527A/528A/541N/559R/575W/604H/660V/760W, 178L/257V/478L/515T/526S/527A/528A/559R/601T/604H/760W, 478L/515T/526S/527A/528A/559R/685R/760W, 377C/478L/515T/526S/527A/528A/559R/604H/660V/760W, 478L/515T/526S/527A/528A/559R/749M/760W, 396F/478L/515T/526S/527A/528A/559R/760W, 395H/478L/515T/526S/527A/528A/559R/760W, 475S/478L/515T/526S/527A/528A/559R/760W, 474C/478L/515T/526S/527A/528A/559R/760W, 478L/482S/515T/526S/527A/528A/559R/760W, 291L/478L/515T/526S/527A/528A/559R/760W, 448V/478L/515T/526S/527A/528A/559R/760W, 478L/515T/526S/527A/528A/559R/579Q/760W, 178L/478L/515T/526S/527A/528A/541G/550C/559R/604H/760W, 477V/478L/515T/526S/527A/528A/559R/760W, 178L/257V/478L/515T/526S/527A/528A/559R/760W, 257V/402R/478L/490W/515T/526S/527A/541G/559R/660V/760W, 328L/478L/515T/526S/527A/528A/559R/760W, 395S/478L/515T/526S/527A/528A/559R/760W, 478L/515T/526S/527A/528A/559R/740V/760W, 478L/483D/515T/526S/527A/528A/559R/660V/760W, 257V/377C/478L/515T/526S/527A/528A/559R/760W, 478L/515T/526S/527A/528A/559R/579L/760W, 368H/478L/515T/526S/527A/528A/559R/760W, 478L/515T/526S/527A/528A/559R/760W/792Y, 478L/515T/526S/527A/528A/559R/721A/745T/760W, 474A/478L/515T/526S/527A/528A/559R/760W, 478L/515T/526S/527A/528A/559R/743H/760W, 478L/515T/526S/527A/528A/559R/578A/760W, 478L/515T/526S/527A/528A/559R/687A/760W, 478L/515T/526S/527A/528A/541D/559R/601T/604H/760W, 328V/478L/515T/526S/527A/528A/559R/760W, 396L/478L/515T/526S/527A/528A/559R/760W, 475Y/478L/515T/526S/527A/528A/559R/760W, 395G/478L/515T/526S/527A/528A/559R/760W, 257V/478L/515T/526S/527A/559R/760W, 257V/478L/515T/526S/527A/554N/559R/760W, 478L/515T/526S/527A/528A/559R/760W/768S, 257V/478L/515T/526S/527A/528A/559R/760W, 257V/478L/515T/526S/527A/528A/559R/760W, 396P/478L/515T/526S/527A/528A/559R/760W, 478L/515T/526S/527A/528A/559R/760W/770E, 257V/377C/478L/483D/515T/526S/527A/528A/541N/559R/760W, 478L/515T/526S/527A/528A/542R/559R/760W, 257V/402Y/403I/478L/515T/526S/527A/528A/559R/760W, 257V/403I/478L/515T/526S/527A/528A/541N/559R/760W, 474G/478L/515T/526S/527A/528A/559R/760W, 478L/515T/526S/527A/528A/559R/604H/760W, 402Y/478L/515T/526S/527A/528A/559R/604H/760W, 478L/515T/526S/527A/528A/559R/691S/760W, 257V/316G/478L/515T/526S/527A/528A/541D/559R/575W/604H/760W, 327L/478L/515T/526S/527A/528A/559R/760W, 478L/515T/526S/527A/528A/559R/704V/760W, 403I/478L/515T/526S/527A/528A/541N/559R/604H/660V/760W, 257V/377C/403I/478L/483D/515T/526S/527A/528A/541D/559R/601T/604H/760W, 478L/515T/526S/527A/528A/559R/740S/760W, 478L/515T/526S/527A/528A/559R/760W, 257V/478L/515T/526S/527A/528A/559R/760W, 402R/478L/515T/526S/527A/541G/559R/601T/760W, 478L/515T/526S/527A/528A/559R/760W, or 257V/377C/478L/515T/526S/527A/528A/559R/760W, wherein the positions are relative to the reference sequence corresponding to SEQ ID NO: 2. In some embodiments, the engineered DNA polymerase comprises an amino acid sequence comprising at least a mutation set provided in Tables 7.1 and 7.2 relative to the reference sequence corresponding to SEQ ID NO: 2.

[0166] In some embodiments, the amino acid sequence of the engineered DNA polymerase comprises at least a mutation set at amino acid positions 79/402/478/515/526/527/528/559/604/660/760, 257/402/474/478/515/526/527/528/559/604/660/760, 402/478/515/526/527/528/559/604/660/677/760, 402/478/515/526/527/528/559/562/604/660/760, 178/395/402/478/515/526/527/528/559/604/660/745/760, 291/395/402/478/515/526/527/528/559/604/660/687/745/760, 257/395/402/478/515/526/527/528/559/604/660/677/760, 303/338/402/478/515/526/527/528/559/604/660/760, 402/474/475/478/515/526/527/528/559/604/660/760, 359/402/478/515/526/527/528/559/604/660/760, 402/474/475/478/515/526/527/528/559/604/660/677/704/760, 395/402/478/515/526/527/528/559/604/660/687/760, 402/478/515/526/527/528/559/604/660/671/760, 233/402/478/515/526/527/528/559/604/660/760, 402/478/515/526/527/528/559/604/660/699/760, 379/402/478/515/526/527/528/559/604/660/760, 257/402/478/515/526/527/528/559/604/660/760/792, 257/395/402/478/515/526/527/528/559/604/660/760, 21/402/478/515/526/527/528/559/604/660/760, 257/402/448/474/E475/478/515/526/527/528/559/604/660/760, 402/478/515/526/527/528/559/604/660/713/760, 402/478/515/526/527/528/559/604/641/660/760, 402/442/478/515/526/527/528/559/604/660/760, 402/478/515/526/527/528/559/604/656/660/760, 402/475/478/515/526/527/528/559/604/660/704/760, 402/478/515/526/527/528/559/604/660/742/760, 402/478/515/526/527/528/559/604/660/667/760, 257/402/448/478/515/526/527/528/559/604/660/760, 257/316/395/402/478/482/515/526/527/528/559/604/660/687/745/760, 402/478/515/526/527/528/559/604/660/760/804, 402/478/515/526/527/528/559/604/660/704/760, 178/257/395/402/478/482/515/526/527/528/559/579/604/660/687/745/760, 257/402/478/515/526/527/528/559/579/604/660/760, 257/291/395/402/475/478/515/526/527/528/541/559/604/660/687/760, 257/402/478/515/526/527/528/559/604/660/760/768, 402/478/515/526/527/528/559/604/660/P667/760, 402/478/515/526/527/528/559/604/660/760/812, 402/475/478/515/526/527/528/559/604/660/760, 402/478/515/526/527/528/559/604/660/662/760, 402/478/515/526/527/528/536/559/604/660/760, 402/478/515/526/527/528/559/604/660/748/760, 402/478/515/526/527/528/559/604/660/760/808, 291/316/395/402/478/515/526/527/528/559/604/660/687/760, 402/478/515/526/527/528/559/604/613/660/760, 257/291/316/402/478/515/526/527/528/559/604/660/760, 257/291/402/478/515/526/527/528/559/579/604/660/760, 257/316/402/478/515/526/527/528/541/559/604/660/745/760, 351/402/478/515/526/527/528/559/604/660/760, 257/316/395/402/478/515/526/527/528/559/604/660/745/760, 185/402/478/515/526/527/528/559/604/660/760, 257/316/402/478/515/526/527/528/559/604/660/687/760, 291/316/402/475/478/515/526/527/528/559/604/660/687/745/760, 257/291/395/402/478/515/526/527/528/559/604/660/740/745/760, 402/450/478/515/526/527/528/559/604/660/760, 402/473/478/515/526/527/528/559/604/660/760, 124/402/478/515/526/527/528/559/604/660/760, 402/430/478/515/526/527/528/559/604/660/760, 402/413/478/515/526/527/528/559/604/660/760, 66/402/478/515/526/527/528/559/604/660/760, or 365/402/478/515/526/527/528/559/604/660/760, wherein the positions are relative to the reference sequence corresponding to SEQ ID NO: 2. In some embodiments, the amino acid sequence of the engineered DNA polymerase comprises at least a mutation set 79A/402R/478L/515T/526S/527A/528A/559R/604H/660V/760W, 257V/402R/474A/478L/515T/526S/527A/528A/559R/604H/660V/760W, 402R/478L/515T/526S/527A/528A/559R/604H/660V/677L/760W, 402R/478L/515T/526S/527A/528A/559R/562K/604H/660V/760W, 178L/395H/402R/478L/515T/526S/527A/528A/559R/604H/660V/745T/760W, 291L/395H/402R/478L/515T/526S/527A/528A/559R/604H/660V/687A/745T/760W, 257V/395H/402R/478L/515T/526S/527A/528A/559R/604H/660V/677L/760W, 303T/338V/402R/478L/515T/526S/527A/528A/559R/604H/660V/760W, 402R/474A/475A/478L/515T/526S/527A/528A/559R/604H/660V/760W, 79R/402R/478L/515T/526S/527A/528A/559R/604H/660V/760W, 359G/402R/478L/515T/526S/527A/528A/559R/604H/660V/760W, 79T/402R/478L/515T/526S/527A/528A/559R/604H/660V/760W, 402R/474A/475S/478L/515T/526S/527A/528A/559R/604H/660V/677L/704V/760W, 79M/402R/478L/515T/526S/527A/528A/559R/604H/660V/760W, 395S/402R/478L/515T/526S/527A/528A/559R/604H/660V/687A/760W, 402R/478L/515T/526S/527A/528A/559R/604H/660V/671W/760W, 233K/402R/478L/515T/526S/527A/528A/559R/604H/660V/760W, 402R/478L/515T/526S/527A/528A/559R/604H/660V/699V/760W, 379G/402R/478L/515T/526S/527A/528A/559R/604H/660V/760W, 257V/402R/478L/515T/526S/527A/528A/559R/604H/660V/760W/792F, 257V/395S/402R/478L/515T/526S/527A/528A/559R/604H/660V/760W, 21A/402R/478L/515T/526S/527A/528A/559R/604H/660V/760W, 257V/402R/L448C/474A/475S/478L/515T/526S/527A/528A/559R/604H/660V/760W, 402R/478L/515T/526S/527A/528A/559R/604H/660V/713G/760W, 402R/478L/515T/526S/527A/528A/559R/604H/641A/660V/760W, 402R/442G/478L/515T/526S/527A/528A/559R/604H/660V/760W, 402R/478L/515T/526S/527A/528A/559R/604H/656S/660V/760W, 402R/475S/478L/515T/526S/527A/528A/559R/604H/660V/704V/760W, 402R/478L/515T/526S/527A/528A/559R/604H/660V/742K/760W, 402R/478L/515T/526S/527A/528A/559R/604H/660V/667W/760W, 21N/402R/478L/515T/526S/527A/528A/559R/604H/660V/760W, 257V/402R/L4481/478L/515T/526S/527A/528A/559R/604H/660V/760W, 257V/316G/395H/402R/478L/482S/515T/526S/527A/528A/559R/604H/660V/687A/745T/760W, 402R/478L/515T/526S/527A/528A/559R/604H/660V/760W/804R, 402R/478L/515T/526S/527A/528A/559R/604H/660V/704V/760W, 178L/257V/395S/402R/478L/482S/515T/526S/527A/528A/559R/579L/604H/660V/687A/745T/760W, 257V/402R/478L/515T/526S/527A/528A/559R/579L/604H/660V/760W, 257V/291L/395S/402R/E475V/478L/515T/526S/527A/528A/541N/559R/604H/660V/687A/760W, 257V/402R/478L/515T/526S/527A/528A/559R/604H/660V/760W/768S, 402R/478L/515T/526S/527A/528A/559R/604H/660V/667S/760W, 402R/478L/515T/526S/527A/528A/559R/604H/660V/760W/812S, 402R/475A/478L/515T/526S/527A/528A/559R/604H/660V/760W, 402R/478L/515T/526S/527A/528A/559R/604H/660V/662S/760W, 402R/478L/515T/526S/527A/528A/536V/559R/604H/660V/760W, 402R/478L/515T/526S/527A/528A/559R/604H/660V/748G/760W, 402R/478L/515T/526S/527A/528A/559R/604H/660V/760W/808W, 291L/316G/395H/402R/478L/515T/526S/527A/528A/559R/604H/660V/687A/760W, 402R/478L/515T/526S/527A/528A/559R/604H/613H/660V/760W, 257V/291L/316G/402R/478L/515T/526S/527A/528A/559R/604H/660V/760W, 257V/291L/402R/478L/515T/526S/527A/528A/559R/579L/604H/660V/760W, 257V/316G/402R/478L/515T/526S/527A/528A/541N/559R/604H/660V/745T/760W, 351H/402R/478L/515T/526S/527A/528A/559R/604H/660V/760W, 257V/316G/395G/402R/478L/515T/526S/527A/528A/559R/604H/660V/745T/760W, 185T/402R/478L/515T/526S/527A/528A/559R/604H/660V/760W, 257V/316G/402R/478L/515T/526S/527A/528A/559R/604H/660V/687A/760W, 402R/478L/515T/526S/527A/528A/559R/604H/660V/760W/808Y, 291L/316G/402R/475V/478L/515T/526S/527A/528A/559R/604H/660V/687A/745T/760W, 257V/291L/395H/402R/478L/515T/526S/527A/528A/559R/604H/660V/740V/745T/760W, 402R/450V/478L/515T/526S/527A/528A/559R/604H/660V/760W, 402R/473N/478L/515T/526S/527A/528A/559R/604H/660V/760W, 21G/402R/478L/515T/526S/527A/528A/559R/604H/660V/760W, 124A/402R/478L/515T/526S/527A/528A/559R/604H/660V/760W, 402R/478L/515T/526S/527A/528A/559R/604H/613R/660V/760W, 402R/478L/515T/526S/527A/528A/559R/604H/656Q/660V/760W, 402R/430G/478L/515T/526S/527A/528A/559R/604H/660V/760W, 402R/413T/478L/515T/526S/527A/528A/559R/604H/660V/760W, 233L/402R/478L/515T/526S/527A/528A/559R/604H/660V/760W, 66R/402R/478L/515T/526S/527A/528A/559R/604H/660V/760W, 365T/402R/478L/515T/526S/527A/528A/559R/604H/660V/760W, or 402R/478L/515T/526S/527A/528A/559R/604H/660V/760W/812R, wherein the positions are relative to the reference sequence corresponding to SEQ ID NO: 2. In some embodiments, the amino acid sequence of the engineered DNA polymerase comprises at least a mutation set provided in Tables 8.1 and 8.2 relative to the reference sequence corresponding to SEQ ID NO: 2.

[0167] In some embodiments, the amino acid sequence of the engineered DNA polymerase comprises at least a mutation set at amino acid positions 291/395/402/438/478/515/526/527/528/559/604/660/687/745/760, 291/395/402/478/515/526/527/528/559/604/660/687/697/745/760, 291/395/402/457/478/515/526/527/528/559/604/660/687/745/760, 291/395/402/478/515/526/527/528/559/604/660/687/716/745/760, 79/291/395/402/474/478/515/526/527/528/536/559/604/660/687/699/745/760, 291/395/402/478/515/526/527/528/536/559/604/660/687/745/760, 291/392/395/402/478/515/526/527/528/559/604/660/687/745/760, 291/395/402/478/515/526/527/528/559/604/660/687/708/745/760, 291/395/402/431/478/515/526/527/528/559/604/660/687/745/760, 291/395/402/474/478/515/526/527/528/536/559/604/660/687/699/745/760, 291/395/402/453/478/515/526/527/528/559/604/660/687/745/760, 291/395/402/427/478/515/526/527/528/559/604/660/687/745/760, 79/291/395/402/478/515/526/527/528/559/604/660/687/699/745/760, 291/378/395/402/478/515/526/527/528/559/604/660/687/745/760, 291/370/395/402/478/515/526/527/528/559/604/660/687/745/760, 291/395/402/478/515/526/527/528/559/604/660/687/706/745/760, 257/291/395/402/474/475/478/515/526/527/528/536/559/604/660/662/687/745/760, 291/395/402/474/478/515/526/527/528/536/559/562/604/660/687/745/760, 257/291/395/402/474/478/515/526/527/528/536/559/604/660/687/745/760, 79/257/291/395/402/474/475/478/515/526/527/528/536/559/562/604/660/687/745/760, 79/291/395/402/478/515/526/527/528/536/559/604/660/687/699/745/760, 291/372/395/402/478/515/526/527/528/559/604/660/687/745/760, 257/291/395/402/478/515/526/527/528/559/604/660/687/745/760/792, 291/390/395/402/478/515/526/527/528/559/604/660/687/745/760, 79/291/395/402/474/478/515/526/527/528/536/559/604/660/687/699/745/760/792, 291/395/402/409/478/515/526/527/528/559/604/660/687/745/760, 291/395/402/443/478/515/526/527/528/559/604/660/687/745/760, 291/395/402/448/478/515/526/527/528/559/604/660/687/745/760, 291/381/395/402/478/515/526/527/528/559/604/660/687/745/760, 291/395/402/478/515/526/527/528/559/604/660/687/707/745/760, 291/395/402/416/478/515/526/527/528/559/604/660/687/745/760, 291/395/402/474/475/478/515/526/527/528/559/604/660/662/687/745/760, 79/291/395/402/474/475/478/515/526/527/528/536/559/604/660/687/745/760/792, 291/395/402/474/475/478/515/526/527/528/536/559/604/660/662/687/745/760, 291/382/395/402/478/515/526/527/528/559/604/660/687/745/760, 257/291/395/402/474/478/515/526/527/528/536/559/562/604/660/662/687/745/760, 257/291/395/402/474/475/478/515/526/527/528/559/604/660/687/745/760/792, 79/291/395/402/474/478/515/526/527/528/559/604/660/662/687/699/745/760, 291/395/402/478/515/526/527/528/559/604/660/687/725/745/760, 291/395/402/447/478/515/526/527/528/559/604/660/687/745/760, 79/257/291/395/402/478/515/526/527/528/559/604/660/687/699/745/760, 291/395/402/478/515/526/527/528/559/604/660/687/701/745/760, 257/291/395/402/474/475/478/515/526/527/528/536/559/562/604/660/662/687/745/760, 291/395/402/478/515/526/527/528/559/604/660/687/702/745/760, 291/342/395/402/478/515/526/527/528/559/604/660/687/716/745/760, 233/291/395/402/478/515/526/527/528/559/562/604/660/687/713/745/760, 291/395/402/478/515/526/527/528/559/604/660/687/704/745/760, 291/395/402/474/475/478/515/526/527/528/536/559/562/604/660/662/687/745/760, 291/395/402/454/478/515/526/527/528/559/604/660/687/745/760, 291/327/395/402/427/478/515/526/527/528/559/604/660/687/745/760, 257/291/316/395/402/474/478/515/526/527/528/536/559/604/660/687/745/760/792, 291/395/402/417/478/515/526/527/528/559/604/660/687/745/760, 291/395/402/425/478/515/526/527/528/559/604/660/687/745/760, 291/395/402/478/515/526/527/528/536/559/562/604/660/687/745/760, 291/395/402/478/515/526/527/528/559/604/660/687/714/745/760, 233/291/395/402/478/515/526/527/528/559/604/660/687/745/760, 291/303/395/402/478/515/526/527/528/559/604/613/660/687/745/760, 21/79/291/303/395/402/478/515/526/527/528/559/562/604/613/660/687/745/760, 79/291/395/402/478/515/526/527/528/559/562/604/660/687/745/760, 291/395/402/435/478/515/526/527/528/559/604/660/687/745/760, 257/291/395/402/478/515/526/527/528/536/559/604/660/687/699/745/760/792, 79/291/395/402/478/515/526/527/528/536/559/604/660/687/745/760, 291/395/402/453/478/515/526/527/528/559/604/660/P667/687/745/760, 79/291/303/338/395/402/478/515/526/527/528/559/604/613/660/687/745/760/804/812, 79/257/291/395/402/478/515/526/527/528/536/559/604/660/662/687/745/760/792, 79/291/338/395/402/478/515/526/527/528/559/562/604/660/687/745/760, 79/233/291/303/395/402/478/515/526/527/528/559/604/660/662/687/745/760, 79/291/395/402/478/515/526/527/528/559/604/660/662/687/699/745/760, 79/291/395/402/475/478/515/526/527/528/559/604/660/662/687/745/760, 79/291/395/402/478/515/526/527/528/536/559/562/604/660/687/699/745/760, 291/395/402/478/515/526/527/528/536/559/604/660/662/687/745/760, 21/79/291/338/395/402/478/515/526/527/528/559/604/641/660/687/699/745/760, 291/395/402/478/515/526/527/528/559/604/660/662/687/745/760, 21/79/291/395/402/442/478/515/526/527/528/559/604/660/687/699/745/760, 79/291/303/395/402/478/515/526/527/528/559/604/660/662/687/745/760, 79/178/257/291/395/402/478/515/526/527/528/559/604/660/662/687/699/745/760, 79/257/291/395/402/478/515/526/527/528/536/559/562/604/660/662/687/745/760, 291/395/402/478/515/526/527/528/559/562/604/660/687/699/745/760, 291/359/395/402/478/515/526/527/528/559/604/613/660/687/742/745/760/808/812, 21/79/291/338/379/395/402/478/515/526/527/528/559/562/604/660/662/687/745/760/804/812, 291/395/402/478/515/526/527/528/559/604/660/687/731/745/760, 21/79/291/359/395/402/442/478/515/526/527/528/559/604/660/662/687/745/760, 79/291/338/359/395/402/478/515/526/527/528/559/562/604/660/687/745/760, 21/291/395/402/478/515/526/527/528/559/604/613/660/662/687/742/745/760, 21/79/291/303/395/402/478/515/526/527/528/559/604/660/662/687/699/742/745/760/808, 21/79/291/338/395/402/442/478/515/526/527/528/559/604/613/660/687/699/745/760, 79/291/303/338/395/402/478/515/526/527/528/559/562/604/613/660/662/687/745/760, 291/303/338/395/402/478/515/526/527/528/559/562/604/660/687/699/745/760/808/812, 79/257/291/395/402/478/515/526/527/528/559/604/660/687/745/760, 257/291/395/402/478/515/526/527/528/559/604/660/662/687/745/760/792, 79/291/359/395/402/478/515/526/527/528/559/604/660/687/713/742/745/760/808, 21/291/359/395/402/442/478/515/526/527/528/559/604/660/687/745/760/808/812, 79/257/291/395/402/475/478/515/526/527/528/536/559/604/660/662/687/745/760, 21/79/291/338/395/402/478/515/526/527/528/559/604/660/687/745/760, 79/291/395/402/478/515/526/527/528/559/604/660/687/713/745/760, 79/291/395/402/478/515/526/527/528/559/562/604/641/660/687/745/760, 291/373/395/402/478/515/526/527/528/559/604/660/687/745/760, 79/178/257/291/316/395/402/478/515/526/527/528/536/559/604/660/662/687/745/760, 21/233/291/338/395/402/478/515/526/527/528/559/562/604/660/662/687/745/760, 257/291/316/395/402/478/515/526/527/528/536/559/604/660/687/745/760, 21/79/291/303/395/402/442/478/515/526/527/528/559/604/660/662/687/745/760, 21/79/233/291/303/338/379/395/402/478/515/526/527/528/559/562/604/660/687/713/745/760, 291/338/395/402/442/478/515/526/527/528/559/604/660/687/699/745/760, 291/395/402/426/478/515/526/527/528/559/604/660/687/745/760, 21/291/338/359/395/402/478/515/526/527/528/559/604/660/687/745/760/808/812, 79/178/233/291/395/402/442/478/515/526/527/528/559/562/604/660/687/745/760/812, 79/291/395/402/474/478/515/526/527/528/536/559/604/660/662/687/699/745/760, 21/79/291/338/379/395/402/478/515/526/527/528/559/604/660/662/687/745/760, 291/395/402/478/515/526/527/528/559/604/660/687/721/745/760, 21/79/233/291/338/395/402/478/515/526/527/528/559/604/613/641/660/687/745/760, 291/374/395/402/478/515/526/527/528/559/604/660/687/745/760, 291/338/359/379/395/402/478/515/526/527/528/559/604/660/687/745/760, 291/395/402/461/478/515/526/527/528/559/604/660/687/745/760, 291/395/402/451/478/515/526/527/528/559/604/660/687/745/760, 291/395/402/478/515/526/527/528/559/604/660/687/715/745/760, 79/291/303/338/395/402/478/515/526/527/528/559/604/641/660/687/713/745/760, 291/393/395/402/478/515/526/527/528/559/604/660/687/745/760, 79/257/291/395/402/474/478/515/526/527/528/536/559/604/660/687/699/745/760, 79/291/395/402/478/515/526/527/528/559/604/660/687/745/760, 291/395/402/437/478/515/526/527/528/559/604/660/687/745/760, 257/291/395/402/478/515/526/527/528/536/559/562/604/660/662/687/745/760, 21/79/291/379/395/402/442/478/515/526/527/528/559/562/604/660/662/687/745/760, 291/362/395/402/478/515/526/527/528/559/604/660/687/745/760, 291/395/402/410/478/515/526/527/528/559/604/660/687/745/760, 291/338/395/402/478/515/526/527/528/559/604/660/687/745/760/812, 21/291/395/402/478/515/526/527/528/559/604/660/662/687/745/760/808/812, 21/291/303/338/395/402/478/515/526/527/528/559/604/660/687/745/760, 291/395/402/418/478/515/526/527/528/559/604/660/687/745/760, 291/338/395/402/442/478/515/526/527/528/559/604/660/687/745/760, 291/395/402/449/478/515/526/527/528/559/604/660/687/745/760, 291/379/395/402/478/515/526/527/528/559/604/641/660/687/745/760, 291/316/395/402/478/515/526/527/528/536/559/562/604/660/687/745/760, 257/291/395/402/478/515/526/527/528/536/559/604/660/687/745/760/792, 21/79/291/395/402/442/478/515/526/527/528/559/604/613/660/687/745/760, 257/291/395/402/478/515/526/527/528/536/559/604/660/662/687/745/760/792, 257/291/395/402/474/478/515/526/527/528/529/536/559/604/660/662/687/745/760, 291/395/402/412/478/515/526/527/528/559/604/660/687/745/760, 79/257/291/395/402/478/515/526/527/528/536/559/604/660/662/687/699/745/760, 257/291/316/395/402/475/478/515/526/527/528/536/559/604/660/687/745/760/792, 291/388/395/402/478/515/526/527/528/559/604/660/687/745/760, 291/380/395/402/454/478/515/526/527/528/559/604/660/687/745/760, 21/79/233/291/303/395/402/478/515/526/527/528/559/604/613/660/687/699/745/760/809, 291/395/402/478/515/526/527/528/559/604/660/687/724/745/760, 21/79/291/338/395/402/478/515/526/527/528/559/604/613/660/687/745/760, 79/178/291/395/402/478/515/526/527/528/536/559/604/660/687/745/760/792, 291/395/402/449/478/515/526/527/528/559/604/660/687/745/747/760, 21/79/291/379/395/402/478/515/526/527/528/559/604/613/660/687/713/745/760, 79/291/316/395/402/478/515/526/527/528/536/559/604/660/662/687/699/745/760, 291/376/395/402/478/515/526/527/528/559/604/660/687/745/760, 21/291/395/402/478/515/526/527/528/559/562/604/660/662/687/745/760, 79/257/262/291/395/402/478/515/526/527/528/536/559/562/604/660/687/699/745/760, 291/395/402/478/515/526/527/528/559/604/660/687/718/745/760, 291/395/402/475/478/515/526/527/528/536/559/562/604/660/662/687/699/745/760, 79/233/291/338/359/379/395/402/442/478/515/526/527/528/559/562/604/613/660/687/745/760/812, 291/371/395/402/478/515/526/527/528/559/604/660/687/745/760, 291/316/395/402/475/478/515/526/527/528/559/562/604/660/662/687/745/760/792, 79/257/291/316/395/402/478/515/526/527/528/559/604/660/687/745/760/792, 291/395/402/478/515/526/527/528/559/604/660/687/728/745/760, 79/233/291/338/395/402/478/515/526/527/528/559/604/660/687/745/760, 291/395/402/432/478/515/526/527/528/559/604/660/687/745/760, 79/178/257/291/316/395/402/478/515/526/527/528/536/559/604/660/662/687/699/745/760, 79/291/303/395/402/478/515/526/527/528/559/604/660/687/713/745/760, 233/291/379/395/402/442/478/515/526/527/528/559/562/604/613/660/662/687/713/745/760, 21/291/395/402/478/515/526/527/528/559/604/660/687/742/745/760, 291/395/402/478/515/526/527/528/559/604/660/687/732/745/760, 79/257/291/395/402/478/515/526/527/528/559/562/604/660/662/687/699/745/760, 21/233/291/338/379/395/402/442/478/515/526/527/528/559/562/604/613/660/662/687/745/760/812, 291/395/402/429/478/515/526/527/528/559/604/660/687/745/760, 2-/291/374/395/402/478/515/526/527/528/559/604/660/687/745/760, 291/395/402/478/515/526/527/528/559/604/660/687/723/745/760, 291/395/402/434/478/515/526/527/528/559/604/660/687/745/760, 291/395/402/420/478/515/526/527/528/559/604/660/687/745/760, or 291/395/402/478/515/526/527/528/559/604/660/687/699/745/760, wherein the amino acid positions are relative to the reference sequence corresponding to SEQ ID NO: 2. In some embodiments, the amino acid sequence of the engineered DNA polymerase comprises at least a mutation set 291L/395H/402R/438F/478L/515T/526S/527A/528A/559R/604H/660V/687A/745T/760W, 291L/395H/402R/478L/515T/526S/527A/528A/559R/604H/660V/687A/697I/745T/760W, 291L/395H/402R/A457W/478L/515T/526S/527A/528A/559R/604H/660V/687A/745T/760W, 291L/395H/402R/478L/515T/526S/527A/528A/559R/604H/660V/687A/716E/745T/760W, 79R/291L/395H/402R/474A/478L/515T/526S/527A/528A/536V/559R/604H/660V/687A/699V/745T/760W, 291L/395H/402R/478L/515T/526S/527A/528A/536V/559R/604H/660V/687A/745T/760W, 291L/392V/395H/402R/478L/515T/526S/527A/528A/559R/604H/660V/687A/745T/760W, 291L/395H/402R/478L/515T/526S/527A/528A/559R/604H/660V/687A/708L/745T/760W, 291L/395H/402R/431G/478L/515T/526S/527A/528A/559R/604H/660V/687A/745T/760W, 291L/395S/402R/474A/478L/515T/526S/527A/528A/536V/559R/604H/660V/687A/699V/745T/760W, 291L/395H/402R/A453S/478L/515T/526S/527A/528A/559R/604H/660V/687A/745T/760W, 291L/395H/402R/478L/515T/526S/527A/528A/559R/604H/660V/687A/697V/745T/760W, 291L/395H/402R/427R/478L/515T/526S/527A/528A/559R/604H/660V/687A/745T/760W, 79R/291L/395S/402R/478L/515T/526S/527A/528A/559R/604H/660V/687A/699V/745T/760W, 291L/378F/395H/402R/478L/515T/526S/527A/528A/559R/604H/660V/687A/745T/760W, 291L/370V/395H/402R/478L/515T/526S/527A/528A/559R/604H/660V/687A/745T/760W, 291L/395H/402R/478L/515T/526S/527A/528A/559R/604H/660V/687A/R706S/745T/760W, 257V/291L/395S/402R/474A/475A/478L/515T/526S/527A/528A/536V/559R/604H/660V/662S/687A/745T/760W, 257V/291L/395S/402R/474A/475A/478L/515T/526S/527A/528A/536V/559R/604H/660V/662S/687A/745T/760W, 291L/395H/402R/474A/478L/515T/526S/527A/528A/536V/559R/562K/604H/660V/687A/745T/760W, 257V/291L/395S/402R/474A/478L/515T/526S/527A/528A/536V/559R/604H/660V/687A/745T/760W, 79R/257V/291L/395S/402R/474A/475A/478L/515T/526S/527A/528A/536V/559R/562K/604H/660V/687A/7 45T/760W, 291L/378S/395H/402R/478L/515T/526S/527A/528A/559R/604H/660V/687A/745T/760W, 79R/291L/395S/402R/478L/515T/526S/527A/528A/536V/559R/604H/660V/687A/699V/745T/760W, 291L/L372V/395H/402R/478L/515T/526S/527A/528A/559R/604H/660V/687A/745T/760W, 257V/291L/395S/402R/478L/515T/526S/527A/528A/559R/604H/660V/687A/745T/760W/792F, 291L/390S/395H/402R/478L/515T/526S/527A/528A/559R/604H/660V/687A/745T/760W, 291L/395H/402R/427L/478L/515T/526S/527A/528A/559R/604H/660V/687A/745T/760W, 79R/291L/395H/402R/474A/478L/515T/526S/527A/528A/536V/559R/604H/660V/687A/699V/745T/760W/792F, 291L/395H/402R/409S/478L/515T/526S/527A/528A/559R/604H/660V/687A/745T/760W, 291L/395H/402R/443A/478L/515T/526S/527A/528A/559R/604H/660V/687A/745T/760W, 291L/395H/402R/448V/478L/515T/526S/527A/528A/559R/604H/660V/687A/745T/760W, 291L/381E/395H/402R/478L/515T/526S/527A/528A/559R/604H/660V/687A/745T/760W, 291L/395H/402R/478L/515T/526S/527A/528A/559R/604H/660V/687A/707W/745T/760W, 291L/381K/395H/402R/478L/515T/526S/527A/528A/559R/604H/660V/687A/745T/760W, 291L/395H/402R/457Y/478L/515T/526S/527A/528A/559R/604H/660V/687A/745T/760W, 291L/395H/402R/416S/478L/515T/526S/527A/528A/559R/604H/660V/687A/745T/760W, 291L/395H/402R/474A/475A/478L/515T/526S/527A/528A/559R/604H/660V/662S/687A/745T/760W, 79R/291L/395S/402R/474A/475A/478L/515T/526S/527A/528A/536V/559R/604H/660V/687A/745T/760W/7 92F, 291L/395H/402R/474A/475A/478L/515T/526S/527A/528A/536V/559R/604H/660V/662S/687A/745T/760W, 291L/382C/395H/402R/478L/515T/526S/527A/528A/559R/604H/660V/687A/745T/760W, 257V/291L/395H/402R/474A/478L/515T/526S/527A/528A/536V/559R/562K/604H/660V/662S/687A/745T/760W, 257V/291L/395S/402R/474A/475A/478L/515T/526S/527A/528A/559R/604H/660V/687A/745T/760W/792F, 79R/291L/395H/402R/474A/478L/515T/526S/527A/528A/559R/604H/660V/662S/687A/699V/745T/760W, 291L/395H/402R/478L/515T/526S/527A/528A/559R/604H/660V/687A/725V/745T/760W, 291L/395H/402R/478L/515T/526S/527A/528A/559R/604H/660V/687A/706I/745T/760W, 291L/395H/402R/447R/478L/515T/526S/527A/528A/559R/604H/660V/687A/745T/760W, 291L/395H/402R/478L/515T/526S/527A/528A/559R/604H/660V/687A/697L/745T/760W, 79R/257V/291L/395H/402R/478L/515T/526S/527A/528A/559R/604H/660V/687A/699V/745T/760W, 291L/395H/402R/478L/515T/526S/527A/528A/559R/604H/660V/687A/701M/745T/760W, 257V/291L/395H/402R/474A/475A/478L/515T/526S/527A/528A/536V/559R/562K/604H/660V/662S/687A/745T/760W, 291L/395H/402R/478L/515T/526S/527A/528A/559R/604H/660V/687A/702V/745T/760W, 291L/342G/395H/402R/478L/515T/526S/527A/528A/559R/604H/660V/687A/716L/745T/760W, 233K/291L/395H/402R/478L/515T/526S/527A/528A/559R/562K/604H/660V/687A/713G/745T/760W, 291L/395H/402R/478L/515T/526S/527A/528A/559R/604H/660V/687A/704V/745T/760W, 291L/395H/402R/474A/475A/478L/515T/526S/527A/528A/536V/559R/562K/604H/660V/662S/687A/745T/760W, 291L/395H/402R/454F/478L/515T/526S/527A/528A/559R/604H/660V/687A/745T/760W, 291L/327E/395H/402R/427T/478L/515T/526S/527A/528A/559R/604H/660V/687A/745T/760W, 257V/291L/316G/395H/402R/474A/478L/515T/526S/527A/528A/536V/559R/604H/660V/687A/745T/760W/792F, 291L/395H/402R/427D/478L/515T/526S/527A/528A/559R/604H/660V/687A/745T/760W, 291L/370G/395H/402R/478L/515T/526S/527A/528A/559R/604H/660V/687A/745T/760W, 291L/395H/402R/417R/478L/515T/526S/527A/528A/559R/604H/660V/687A/745T/760W, 291L/395H/402R/425T/478L/515T/526S/527A/528A/559R/604H/660V/687A/745T/760W, 291L/395H/402R/478L/515T/526S/527A/528A/536V/559R/562K/604H/660V/687A/745T/760W, 291L/395H/402R/478L/515T/526S/527A/528A/559R/604H/660V/687A/714I/745T/760W, 233H/291L/395H/402R/478L/515T/526S/527A/528A/559R/604H/660V/687A/745T/760W, 291L/392T/395H/402R/478L/515T/526S/527A/528A/559R/604H/660V/687A/745T/760W, 291L/303T/395H/402R/478L/515T/526S/527A/528A/559R/604H/613H/660V/687A/745T/760W, 291L/395H/402R/478L/515T/526S/527A/528A/559R/604H/660V/687A/697A/745T/760W, 291L/378L/395H/402R/478L/515T/526S/527A/528A/559R/604H/660V/687A/745T/760W, 291L/395H/402R/427H/478L/515T/526S/527A/528A/559R/604H/660V/687A/745T/760W, 21A/79A/291L/303T/395H/402R/478L/515T/526S/527A/528A/559R/562K/604H/613H/660V/687A/745T/76 OW, 291L/370S/395H/402R/478L/515T/526S/527A/528A/559R/604H/660V/687A/745T/760W, 291L/395H/402R/457N/478L/515T/526S/527A/528A/559R/604H/660V/687A/745T/760W, 79R/291L/395H/402R/478L/515T/526S/527A/528A/559R/562K/604H/660V/687A/745T/760W, 291L/395H/402R/435P/478L/515T/526S/527A/528A/559R/604H/660V/687A/745T/760W, 257V/291L/395H/402R/478L/515T/526S/527A/528A/536V/559R/604H/660V/687A/699V/745T/760W/792F, 79R/291L/395H/402R/478L/515T/526S/527A/528A/536V/559R/604H/660V/687A/745T/760W, 291L/395H/402R/A453S/478L/515T/526S/527A/528A/559R/604H/660V/P667T/687A/745T/760W, 79A/291L/303T/338V/395H/402R/478L/515T/526S/527A/528A/559R/604H/613H/660V/687A/745T/760W/804R/A812S, 79R/257V/291L/395S/402R/478L/515T/526S/527A/528A/536V/559R/604H/660V/662S/687A/745T/760W/7 92F, 79A/291L/A338V/395H/402R/478L/515T/526S/527A/528A/559R/562K/604H/660V/687A/745T/760W, 79R/257V/291L/395H/402R/478L/515T/526S/527A/528A/559R/604H/660V/687A/699V/745T/760W, 79R/233K/291L/303T/395H/402R/478L/515T/526S/527A/528A/559R/604H/660V/662S/687A/745T/760W, 79R/291L/395H/402R/478L/515T/526S/527A/528A/559R/604H/660V/662S/687A/699V/745T/760W, 79R/291L/395S/402R/475A/478L/515T/526S/527A/528A/559R/604H/660V/662S/687A/745T/760W, 291L/395H/402R/478L/515T/526S/527A/528A/559R/604H/660V/687A/704V/745T/760W, 79R/291L/395H/402R/478L/515T/526S/527A/528A/536V/559R/562K/604H/660V/687A/699V/745T/760W, 291L/395H/402R/478L/515T/526S/527A/528A/536V/559R/604H/660V/662S/687A/745T/760W, 21A/79A/291L/338V/395H/402R/478L/515T/526S/527A/528A/559R/604H/R641A/660V/687A/699V/745T/760W, 291L/395H/402R/478L/515T/526S/527A/528A/559R/604H/660V/662S/687A/745T/760W, 21A/79A/291L/395H/402R/442G/478L/515T/526S/527A/528A/559R/604H/660V/687A/699V/745T/760W, 79A/291L/303T/395H/402R/478L/515T/526S/527A/528A/559R/604H/660V/662S/687A/745T/760W, 79R/178L/257V/291L/395H/402R/478L/515T/526S/527A/528A/559R/604H/660V/662S/687A/699V/745T/7 60W, 79R/257V/291L/395H/402R/478L/515T/526S/527A/528A/536V/559R/562K/604H/660V/662S/687A/745T/7 60W, 291L/395H/402R/478L/515T/526S/527A/528A/559R/562K/604H/660V/687A/699V/745T/760W, 291L/359G/395H/402R/478L/515T/526S/527A/528A/559R/604H/613H/660V/687A/742K/745T/760W/808Y/A812S, 21N/79A/291L/338V/A379G/395H/402R/478L/515T/526S/527A/528A/559R/562K/604H/660V/662S/687A/745T/760W/804R/812S, 291L/395H/402R/L448V/478L/515T/526S/527A/528A/559R/604H/660V/687A/745T/760W, 291L/395H/402R/478L/515T/526S/527A/528A/559R/604H/660V/687A/731I/745T/760W, 21N/79R/291L/359G/395H/402R/442G/478L/515T/526S/527A/528A/559R/604H/660V/662S/687A/745T/76 OW, 79A/291L/A338V/359V/395H/402R/478L/515T/526S/527A/528A/559R/562K/604H/660V/687A/745T/760 W, 21N/291L/395H/402R/478L/515T/526S/527A/528A/559R/604H/613H/660V/662S/687A/742K/745T/760W, 21A/79A/291 L/303T/395H/402R/478L/515T/526S/527A/528A/559R/604H/660V/662S/687A/699V/742K/74 5T/760W/808Y, 21A/79A/291L/338V/395H/402R/442G/478L/515T/526S/527A/528A/559R/604H/613H/660V/687A/699V/7 45T/760W, 79A/291L/303T/338V/395H/402R/478L/515T/526S/527A/528A/559R/562K/604H/613H/660V/662S/687A/7 45T/760W, 291L/303T/338V/395H/402R/478L/515T/526S/527A/528A/559R/562K/604H/660V/687A/699V/745T/760W/808W/812S, 79R/257V/291L/395H/402R/478L/515T/526S/527A/528A/559R/604H/660V/687A/745T/760W, 257V/291L/395H/402R/478L/515T/526S/527A/528A/559R/604H/660V/662S/687A/745T/760W/792F, 79R/291L/395H/402R/478L/515T/526S/527A/528A/536V/559R/604H/660V/687A/699V/745T/760W, 79A/291L/359G/395H/402R/478L/515T/526S/527A/528A/559R/604H/660V/687A/713G/742K/745T/760W/808W, 21A/291L/K359G/395H/402R/442G/478L/515T/526S/527A/528A/559R/604H/660V/687A/745T/760W/808 W/812S, 79R/257V/291L/395H/402R/475A/478L/515T/526S/527A/528A/536V/559R/604H/660V/662S/687A/745T/7 60W, 21N/79A/291L/338V/395H/402R/478L/515T/526S/527A/528A/559R/604H/660V/687A/745T/760W, 79A/291L/395H/402R/478L/515T/526S/527A/528A/559R/604H/660V/687A/713G/745T/760W, 291L/395H/402R/457R/478L/515T/526S/527A/528A/559R/604H/660V/687A/745T/760W, 79A/291L/395H/402R/478L/515T/526S/527A/528A/559R/562K/604H/641A/660V/687A/745T/760W, 291L/392C/395H/402R/478L/515T/526S/527A/528A/559R/604H/660V/687A/745T/760W, 291L/373T/395H/402R/478L/515T/526S/527A/528A/559R/604H/660V/687A/745T/760W, 79R/178L/257V/291L/316G/395H/402R/478L/515T/526S/527A/528A/536V/559R/604H/660V/662S/687A/7 45T/760W, 21N/233K/291L/338V/395H/402R/478L/515T/526S/527A/528A/559R/562K/604H/660V/662S/687A/745T/7 60W, 257V/291L/316G/395H/402R/478L/515T/526S/527A/528A/536V/559R/604H/660V/687A/745T/760W, 21N/79R/291L/303T/395H/402R/442G/478L/515T/526S/527A/528A/559R/604H/660V/662S/687A/745T/76 OW, 21N/79R/233K/291L/303T/338V/A379G/395H/402R/478L/515T/526S/527A/528A/559R/562K/604H/660V/687A/713G/745T/760W, 291L/338V/395H/402R/442G/478L/515T/526S/527A/528A/559R/604H/660V/687A/699V/745T/760W, 291L/395H/402R/426T/478L/515T/526S/527A/528A/559R/604H/660V/687A/745T/760W, 21A/291L/338V/359G/395H/402R/478L/515T/526S/527A/528A/559R/604H/660V/687A/745T/760W/808Y/812S, 79A/178L/233K/291L/395H/402R/442G/478L/515T/526S/527A/528A/559R/562K/604H/660V/687A/745T/7 60W/812S, 79R/291L/395H/402R/474A/478L/515T/526S/527A/528A/536V/559R/604H/660V/662S/687A/699V/745T/7 60W, 291L/395H/402R/478L/515T/526S/527A/528A/559R/604H/660V/687A/697I/745T/760W, 291L/390S/395H/402R/478L/515T/526S/527A/528A/559R/604H/660V/687A/745T/760W, 21A/79A/291L/338V/379G/395H/402R/478L/515T/526S/527A/528A/559R/604H/660V/662S/687A/745T/76 OW, 291L/395H/402R/478L/515T/526S/527A/528A/559R/604H/660V/687A/721M/745T/760W, 21A/79A/233K/291L/338V/395H/402R/478L/515T/526S/527A/528A/559R/604H/613H/641A/660V/687A/7 45T/760W, 291L/374V/395H/402R/478L/515T/526S/527A/528A/559R/604H/660V/687A/745T/760W, 291L/338V/359G/379G/395H/402R/478L/515T/526S/527A/528A/559R/604H/660V/687A/745T/760W, 291L/395H/402R/R461L/478L/515T/526S/527A/528A/559R/604H/660V/687A/745T/760W, 291L/395H/402R/V451L/478L/515T/526S/527A/528A/559R/604H/660V/687A/745T/760W, 291L/395H/402R/478L/515T/526S/527A/528A/559R/604H/660V/687A/715L/745T/760W, 79R/291L/303T/338V/395H/402R/478L/515T/526S/527A/528A/559R/604H/641A/660V/687A/713G/745T/7 60W, 291L/393W/395H/402R/478L/515T/526S/527A/528A/559R/604H/660V/687A/745T/760W, 291L/372Y/395H/402R/478L/515T/526S/527A/528A/559R/604H/660V/687A/745T/760W, 79R/257V/291L/395H/402R/474A/478L/515T/526S/527A/528A/536V/559R/604H/660V/687A/699V/745T/7 60W, 79R/257V/291L/395H/402R/474A/478L/515T/526S/527A/528A/536V/559R/604H/660V/687A/699V/745T/7 60W, 291L/395H/402R/431R/478L/515T/526S/527A/528A/559R/604H/660V/687A/745T/760W, 291L/395H/402R/454G/478L/515T/526S/527A/528A/559R/604H/660V/687A/745T/760W, 79R/291L/395H/402R/478L/515T/526S/527A/528A/559R/604H/660V/687A/745T/760W, 291L/395H/402R/437S/478L/515T/526S/527A/528A/559R/604H/660V/687A/745T/760W, 257V/291L/395H/402R/478L/515T/526S/527A/528A/536V/559R/562K/604H/660V/662S/687A/745T/760W, 291L/395H/402R/478L/515T/526S/527A/528A/559R/604H/660V/687AN73I T/745T/760W, 291L/395H/402R/478L/515T/526S/527A/528A/559R/604H/660V/687A/R706V/745T/760W, 291L/395H/402R/448T/478L/515T/526S/527A/528A/559R/604H/660V/687A/745T/760W, 21A/79A/291L/379G/395H/402R/442G/478L/515T/526S/527A/528A/559R/562K/604H/660V/662S/687A/74 5T/760W, 291L/395H/402R/457Y/478L/515T/526S/527A/528A/559R/604H/660V/687A/745T/760W, 291L/362M/395H/402R/478L/515T/526S/527A/528A/559R/604H/660V/687A/745T/760W, 291L/395H/402R/410W/478L/515T/526S/527A/528A/559R/604H/660V/687A/745T/760W, 291L/395H/402R/454D/478L/515T/526S/527A/528A/559R/604H/660V/687A/745T/760W, 291L/338V/395H/402R/478L/515T/526S/527A/528A/559R/604H/660V/687A/745T/760W/812S, 21N/79R/291L/338V/395H/402R/478L/515T/526S/527A/528A/559R/604H/660V/687A/745T/760W, 21A/291L/395H/402R/478L/515T/526S/527A/528A/559R/604H/660V/662S/687A/745T/760W/808Y/812S, 291L/395H/402R/435K/478L/515T/526S/527A/528A/559R/604H/660V/687A/745T/760W, 21A/291L/303T/338V/395H/402R/478L/515T/526S/527A/528A/559R/604H/660V/687A/745T/760W, 291L/378S/395H/402R/478L/515T/526S/527A/528A/559R/604H/660V/687A/745T/760W, 291L/378C/395H/402R/478L/515T/526S/527A/528A/559R/604H/660V/687A/745T/760W, 291L/395H/402R/427L/478L/515T/526S/527A/528A/559R/604H/660V/687A/745T/760W, 291L/395H/402R/418K/478L/515T/526S/527A/528A/559R/604H/660V/687A/745T/760W, 291L/338V/395H/402R/442G/478L/515T/526S/527A/528A/559R/604H/660V/687A/745T/760W, 291L/395H/402R/478L/515T/526S/527A/528A/559R/604H/660V/687A/T721N/745T/760W, 291L/395H/402R/449A/478L/515T/526S/527A/528A/559R/604H/660V/687A/745T/760W, 291L/395H/402R/457W/478L/515T/526S/527A/528A/559R/604H/660V/687A/745T/760W, 291L/395H/402R/449G/478L/515T/526S/527A/528A/559R/604H/660V/687A/745T/760W, 291L/379G/395H/402R/478L/515T/526S/527A/528A/559R/604H/641A/660V/687A/745T/760W, 291L/395H/402R/410V/478L/515T/526S/527A/528A/559R/604H/660V/687A/745T/760W, 291L/395H/402R/431L/478L/515T/526S/527A/528A/559R/604H/660V/687A/745T/760W, 291L/316G/395H/402R/478L/515T/526S/527A/528A/536V/559R/562K/604H/660V/687A/745T/760W, 257V/291L/395H/402R/478L/515T/526S/527A/528A/536V/559R/604H/660V/687A/745T/760W/792F, 21N/79R/291L/395H/402R/442G/478L/515T/526S/527A/528A/559R/604H/613H/660V/687A/745T/760W, 291L/395H/402R/478L/515T/526S/527A/528A/536V/559R/604H/660V/687A/745T/760W, 257V/291L/395H/402R/478L/515T/526S/527A/528A/536V/559R/604H/660V/662S/687A/745T/760W/792F, 291L/395H/402R/431V/478L/515T/526S/527A/528A/559R/604H/660V/687A/745T/760W, 291L/362P/395H/402R/478L/515T/526S/527A/528A/559R/604H/660V/687A/745T/760W, 257V/291L/395H/402R/474A/478L/515T/526S/527A/528A/A529S/536V/559R/604H/660V/662S/687A/745 T/760W, 291L/382S/395H/402R/478L/515T/526S/527A/528A/559R/604H/660V/687A/745T/760W, 291L/395H/402R/412V/478L/515T/526S/527A/528A/559R/604H/660V/687A/745T/760W, 291L/395H/402R/447S/478L/515T/526S/527A/528A/559R/604H/660V/687A/745T/760W, 79R/257V/291L/395H/402R/478L/515T/526S/527A/528A/536V/559R/604H/660V/662S/687A/699V/745T/7 60W, 291L/392T/395H/402R/478L/515T/526S/527A/528A/559R/604H/660V/687A/745T/760W, 291L/395H/402R/461S/478L/515T/526S/527A/528A/559R/604H/660V/687A/745T/760W, 291L/395H/402R/412Q/478L/515T/526S/527A/528A/559R/604H/660V/687A/745T/760W, 257V/291L/316G/395H/402R/475A/478L/515T/526S/527A/528A/536V/559R/604H/660V/687A/745T/760W/792F, 291L/395H/402R/L438S/478L/515T/526S/527A/528A/559R/604H/660V/687A/745T/760W, 291L/388C/395H/402R/478L/515T/526S/527A/528A/559R/604H/660V/687A/745T/760W, 291L/380I/395H/402R/454L/478L/515T/526S/527A/528A/559R/604H/660V/687A/745T/760W, 291L/395H/402R/447R/478L/515T/526S/527A/528A/559R/604H/660V/687A/745T/760W, 21N/79R/233K/291L/303T/395H/402R/478L/515T/526S/527A/528A/559R/604H/613H/660V/687A/699V/74 5T/760W/809K, 291L/395H/402R/478L/515T/526S/527A/528A/559R/604H/660V/687A/724F/745T/760W, 291L/395H/402R/461Q/478L/515T/526S/527A/528A/559R/604H/660V/687A/745T/760W, 21A/79R/291L/338V/395H/402R/478L/515T/526S/527A/528A/559R/604H/613H/660V/687A/745T/760W, 79R/178L/291L/395H/402R/478L/515T/526S/527A/528A/536V/559R/604H/660V/687A/745T/760W/792F, 291L/395H/402R/478L/515T/526S/527A/528A/559R/604H/660V/687A/715H/745T/760W, 291L/390T/395H/402R/478L/515T/526S/527A/528A/559R/604H/660V/687A/745T/760W, 291L/395H/402R/449G/478L/515T/526S/527A/528A/559R/604H/660V/687A/745T/747S/760W, 291L/395H/402R/449V/478L/515T/526S/527A/528A/559R/604H/660V/687A/745T/760W, 291L/374S/395H/402R/478L/515T/526S/527A/528A/559R/604H/660V/687A/745T/760W, 291L/362S/395H/402R/478L/515T/526S/527A/528A/559R/604H/660V/687A/745T/760W, 21A/79R/291L/379G/395H/402R/478L/515T/526S/527A/528A/559R/604H/613H/660V/687A/713G/745T/76 oW, 79R/291L/316G/395H/402R/478L/515T/526S/527A/528A/536V/559R/604H/660V/662S/687A/699V/745T/7 60W, 291L/370S/395H/402R/478L/515T/526S/527A/528A/559R/604H/660V/687A/745T/760W, 291L/395H/402R/417W/478L/515T/526S/527A/528A/559R/604H/660V/687A/745T/760W, 291L/376F/395H/402R/478L/515T/526S/527A/528A/559R/604H/660V/687A/745T/760W, 291L/393R/395H/402R/478L/515T/526S/527A/528A/559R/604H/660V/687A/745T/760W, 21N/291L/395H/402R/478L/515T/526S/527A/528A/559R/562K/604H/660V/662S/687A/745T/760W, 79R/257V/262N/291L/395H/402R/478L/515T/526S/527A/528A/536V/559R/562K/604H/660V/687A/699V/7 45T/760W, 291L/395H/402R/478L/515T/526S/527A/528A/559R/604H/660V/687A/718Q/745T/760W, 291L/395S/402R/475A/478L/515T/526S/527A/528A/536V/559R/562K/604H/660V/662S/687A/699V/745T/760W, 291L/395H/402R/449L/478L/515T/526S/527A/528A/559R/604H/660V/687A/745T/760W, 291L/388M/395H/402R/478L/515T/526S/527A/528A/559R/604H/660V/687A/745T/760W, 79R/233K/291L/338V/359G/379G/395H/402R/442G/478L/515T/526S/527A/528A/559R/562K/604H/613H/6 60V/687A/745T/760W/812S, 233K/291L/395H/402R/478L/515T/526S/527A/528A/559R/604H/660V/687A/745T/760W, 291L/371L/395H/402R/478L/515T/526S/527A/528A/559R/604H/660V/687A/745T/760W, 291L/376S/395H/402R/478L/515T/526S/527A/528A/559R/604H/660V/687A/745T/760W, 291L/316G/395H/402R/475A/478L/515T/526S/527A/528A/559R/562K/604H/660V/662S/687A/745T/760W/792F, 291L/395H/402R/478L/515T/526S/527A/528A/559R/604H/660V/687A/702S/745T/760W, 79R/257V/291L/316G/395H/402R/478L/515T/526S/527A/528A/559R/604H/660V/687A/745T/760W/792F, 291L/373G/395H/402R/478L/515T/526S/527A/528A/559R/604H/660V/687A/745T/760W, 291L/395H/402R/454W/478L/515T/526S/527A/528A/559R/604H/660V/687A/745T/760W, 291L/395H/402R/478L/515T/526S/527A/528A/559R/604H/660V/687A/728S/745T/760W, 291L/395H/402R/447W/478L/515T/526S/527A/528A/559R/604H/660V/687A/745T/760W, 79R/233K/291L/338V/395H/402R/478L/515T/526S/527A/528A/559R/604H/660V/687A/745T/760W, 291L/395H/402R/L437P/478L/515T/526S/527A/528A/559R/604H/660V/687A/745T/760W, 291L/395H/402R/432T/478L/515T/526S/527A/528A/559R/604H/660V/687A/745T/760W, 79R/178L/257V/291L/316G/395S/402R/478L/515T/526S/527A/528A/536V/559R/604H/660V/662S/687A/6 99V/745T/760W, 79R/291L/303T/395H/402R/478L/515T/526S/527A/528A/559R/604H/660V/687A/713G/745T/760W, 291L/395H/402R/478L/515T/526S/527A/528A/559R/604H/660V/687A/718F/745T/760W, 291L/395H/402R/A453L/478L/515T/526S/527A/528A/559R/604H/660V/687A/745T/760W, 291L/395H/402R/427F/478L/515T/526S/527A/528A/559R/604H/660V/687A/745T/760W, 233K/291L/379G/395H/402R/442G/478L/515T/526S/527A/528A/559R/562K/604H/613H/660V/662S/687A/713G/745T/760W, 21A/291L/395H/402R/478L/515T/526S/527A/528A/559R/604H/660V/687A/742K/745T/760W, 291L/395H/402R/478L/515T/526S/527A/528A/559R/604H/660V/687A/732L/745T/760W, 291L/392S/395H/402R/478L/515T/526S/527A/528A/559R/604H/660V/687A/745T/760W, 291L/388P/395H/402R/478L/515T/526S/527A/528A/559R/604H/660V/687A/745T/760W, 291L/393S/395H/402R/478L/515T/526S/527A/528A/559R/604H/660V/687A/745T/760W, 291L/395H/402R/437N/478L/515T/526S/527A/528A/559R/604H/660V/687A/745T/760W, 291L/392A/395H/402R/478L/515T/526S/527A/528A/559R/604H/660V/687A/745T/760W, 291L/393G/395H/402R/478L/515T/526S/527A/528A/559R/604H/660V/687A/745T/760W, 291L/395H/402R/412M/478L/515T/526S/527A/528A/559R/604H/660V/687A/745T/760W, 79R/257V/291L/395S/402R/478L/515T/526S/527A/528A/559R/562K/604H/660V/662S/687A/699V/745T/7 60W, 21A/233K/291L/338V/379G/395H/402R/442G/478L/515T/526S/527A/528A/559R/562K/604H/613H/660V/662S/687A/745T/760W/812S, 291L/395H/402R/427Y/478L/515T/526S/527A/528A/559R/604H/660V/687A/745T/760W, 291L/395H/402R/478L/515T/526S/527A/528A/559R/604H/660V/687A/732Q/745T/760W, 291L/395H/402R/429F/478L/515T/526S/527A/528A/559R/604H/660V/687A/745T/760W, 291L/395H/402R/478L/515T/526S/527A/528A/559R/562K/604H/660V/687A/699V/745T/760W, H2-/291L/L374Y/395H/402R/478L/515T/526S/527A/528A/559R/604H/660V/687A/745T/760W, 291L/395H/402R/478L/515T/526S/527A/528A/559R/604H/660V/687A/723Y/745T/760W, 291L/395H/402R/434N/478L/515T/526S/527A/528A/559R/604H/660V/687A/745T/760W, 291L/388V/395H/402R/478L/515T/526S/527A/528A/559R/604H/660V/687A/745T/760W, 291L/395H/402R/420V/478L/515T/526S/527A/528A/559R/604H/660V/687A/745T/760W, 291L/395H/402R/478L/515T/526S/527A/528A/559R/604H/660V/687A/699V/745T/760W, 291L/395H/402R/427I/478L/515T/526S/527A/528A/559R/604H/660V/687A/745T/760W, or 291L/395H/402R/478L/515T/526S/527A/528A/559R/604H/660V/687A/724L/745T/760W, wherein the positions are relative to the reference sequence corresponding to SEQ ID NO: 2. In some embodiments, the amino acid sequence of the engineered DNA polymerase comprises at least a mutation set provided in Tables 9.1, 9.2, and 9.3 relative to the reference sequence corresponding to SEQ ID NO: 2.

[0168] In some embodiments, the amino acid sequence of the engineered DNA polymerase comprises at least a mutation set at amino acid positions 68/257/291/395/402/474/475/478/515/526/527/528/536/559/604/660/662/687/745/760, 78/257/291/395/402/474/475/478/515/526/527/528/536/559/604/660/662/687/745/760, 257/291/395/402/466/474/475/478/515/526/527/528/536/559/604/660/662/687/745/760, 257/291/395/402/474/475/478/515/526/527/528/536/559/604/660/662/687/745/760/807, 257/291/395/402/474/475/478/515/526/527/528/536/559/604/612/660/662/687/745/760, 147/257/291/395/402/474/475/478/515/526/527/528/536/559/604/660/662/687/745/760, 257/291/356/395/402/474/475/478/515/526/527/528/536/559/604/660/662/687/745/760, 257/291/395/402/474/475/478/488/515/526/527/528/536/559/604/660/662/687/745/760, 257/291/395/402/474/475/478/515/526/527/528/536/559/603/604/660/662/687/745/760, 257/271/291/395/402/474/475/478/515/526/527/528/536/559/604/660/662/687/745/760, 257/291/395/402/474/475/478/508/515/526/527/528/536/559/604/660/662/687/745/760, 257/291/395/402/474/475/478/515/526/527/528/536/559/604/660/662/687/745/760/787N, 257/291/395/402/412/417/427/474/475/478/515/526/527/528/536/559/604/660/662/687/745/760, 251/257/291/395/402/474/475/478/515/526/527/528/536/559/604/660/662/687/745/760, 257/291/395/402/474/475/478/515/526/527/528/536/559/604/660/662/687/697/745/760, 257/291/395/402/474/475/478/515/526/527/528/536/559/562/604/660/662/687/745/760, 79/257/291/395/402/434N/474/475/478/515/526/527/528/536/559/562K/604/660/662/687/745/760, 257/291/395/402/474/475/478/515/526/527/528/536/559/604/660/662/687/745/760/820, 257/275/291/395/402/474/475/478/515/526/527/528/536/559/604/660/662/687/745/760, 257/291/378/381/395/402/474/475/478/515/526/527/528/536/559/604/660/662/687/697/745/760, 257/291/395/402/469/474/475/478/515/526/527/528/536/559/604/660/662/687/745/760, 257/291/395/402/412/417/474/475/478/515/526/527/528/536/559/604/660/662/687/697/745/760, 257/291/395/402/474/475/478/515/526/527/528/536/559/604/660/662/687/745/760/798, 79/257/291/388/395/402/474/475/478/515/526/527/528/536/559/604/660/662/687/745/760, 257/291/395/402/474/475/478/515/526/527/528/536/559/604/651/660/662/687/745/760, 257/291/395/402/474/475/478/515/526/527/528/536/559/604/660/662/687/745/760/825, 51/257/291/395/402/474/475/478/515/526/527/528/536/559/604/660/662/687/745/760, 257/291/370/395/402/474/475/478/515/526/527/528/536/559/604/660/662/687/745/760, 257/291/395/402/474/475/478/515/526/527/528/536/559/604/660/662/687/745/760, 257/291/395/402/474/475/478/515/526/527/528/536/559/604/660/662/687/745/760/815, 257/291/395/402/465/474/475/478/515/526/527/528/536/559/604/660/662/687/745/760, 257/291/317/395/402/474/475/478/515/526/527/528/536/559/604/660/662/687/745/760, 257/291/395/402/474/475/478/515/526/527/528/536/559/569/604/660/662/687/745/760, 257/291/341/395/402/474/475/478/515/526/527/528/536/559/604/660/662/687/745/760, 257/291/395/402/474/475/478/515/526/527/528/536/559/604/660/662/687/745/760/824, 181/257/291/395/402/474/475/478/515/526/527/528/536/559/604/660/662/687/745/760, 257/291/395/402/474/475/478/515/526/527/528/536/559/604/660/662/687/735/745/760, or 257/291/336/395/402/474/475/478/515/526/527/528/536/559/604/660/662/687/745/760, wherein the positions are relative to the reference sequence corresponding to SEQ ID NO: 2. In some embodiments, the amino acid sequence of the engineered DNA polymerase comprises at least a mutation set 68R/257V/291L/395S/402R/474A/475A/478L/515T/526S/527A/528A/536V/559R/604H/660V/662S/687A/7 45T/760W, 78S/257V/291L/395S/402R/474A/475A/478L/515T/526S/527A/528A/536V/559R/604H/660V/662S/687A/7 45T/760W, 68K/257V/291L/395S/402R/474A/475A/478L/515T/526S/527A/528A/536V/559R/604H/660V/662S/687A/7 45T/760W, 257V/291L/395S/402R/466Y/474A/475A/478L/515T/526S/527A/528A/536V/559R/604H/660V/662S/687A/745T/760W, 257V/291L/395S/402R/474A/475A/478L/515T/526S/527A/528A/536V/559R/604H/660V/662S/687A/745T/760W/807M, 257V/291L/395S/402R/474A/475A/478L/515T/526S/527A/528A/536V/559R/604H/612D/660V/662S/687A/745T/760W, 68E/257V/291L/395S/402R/474A/475A/478L/515T/526S/527A/528A/536V/559R/604H/660V/662S/687A/7 45T/760W, 68T/257V/291L/395S/402R/474A/475A/478L/515T/526S/527A/528A/536V/559R/604H/660V/662S/687A/7 45T/760W, 147H/257V/291L/395S/402R/474A/475A/478L/515T/526S/527A/528A/536V/559R/604H/660V/662S/687A/745T/760W, 257V/291L/356S/395S/402R/474A/475A/478L/515T/526S/527A/528A/536V/559R/604H/660V/662S/687A/745T/760W, 257V/291L/395S/402R/474A/475A/478L/488W/515T/526S/527A/528A/536V/559R/604H/660V/662S/687A/745T/760W, 257V/291L/395S/402R/474A/475A/478L/515T/526S/527A/528A/536V/559R/603R/604H/660V/662S/687A/745T/760W, 68I/257V/291L/395S/402R/474A/475A/478L/515T/526S/527A/528A/536V/559R/604H/660V/662S/687A/74 5T/760W, 147Q/257V/291L/395S/402R/474A/475A/478L/515T/526S/527A/528A/536V/559R/604H/660V/662S/687A/745T/760W, 257V/271G/291L/395S/402R/474A/475A/478L/515T/526S/527A/528A/536V/559R/604H/660V/662S/687A/745T/760W, 257V/291L/395S/402R/474A/475A/478L/508K/515T/526S/527A/528A/536V/559R/604H/660V/662S/687A/745T/760W, 257V/291L/395S/402R/474A/475A/478L/515T/526S/527A/528A/536V/559R/604H/660V/662S/687A/745T/760W/787N, 257V/291L/395S/402R/412R/417W/427H/474A/475A/478L/515T/526S/527A/528A/536V/559R/604H/660V/662S/687A/745T/760W, 257V/291L/356I/395S/402R/474A/475A/478L/515T/526S/527A/528A/536V/559R/604H/660V/662S/687A/7 45T/760W, 78T/257V/291L/395S/402R/474A/475A/478L/515T/526S/527A/528A/536V/559R/604H/660V/662S/687A/7 45T/760W, 251I/257V/291L/395S/402R/474A/475A/478L/515T/526S/527A/528A/536V/559R/604H/660V/662S/687A/7 45T/760W, 257V/291L/395S/402R/474A/475A/478L/515T/526S/527A/528A/536V/559R/604H/660V/662S/687A/697I/7 45T/760W, 68G/257V/291L/395S/402R/474A/475A/478L/515T/526S/527A/528A/536V/559R/604H/660V/662S/687A/7 45T/760W, 257V/291L/395S/402R/474A/475A/478L/515T/526S/527A/528A/536V/559R/562K/604H/660V/662S/687A/745T/760W, 79R/257V/291L/395S/402R/434N/474A/475A/478L/515T/526S/527A/528A/536V/559R/562K/604H/660V/6 62S/687A/745T/760W, 257V/291L/395S/402R/474A/475A/478L/515T/526S/527A/528A/536V/559R/604H/660V/662S/687A/745T/760W/820T, 257V/275T/291L/395S/402R/474A/475A/478L/515T/526S/527A/528A/536V/559R/604H/660V/662S/687A/745T/760W, 257V/291L/378F/381E/395S/402R/474A/475A/478L/515T/526S/527A/528A/536V/559R/604H/660V/662S/6 87A/697L/745T/760W, 257V/291L/395S/402R/469V/474A/475A/478L/515T/526S/527A/528A/536V/559R/604H/660V/662S/687A/745T/760W, 257V/291L/395S/402R/474A/475A/478L/515T/526S/527A/528A/536V/559R/604H/660V/662S/687A/745T/760W/820S, 257V/291L/395S/402R/412R/417W/474A/475A/478L/515T/526S/527A/528A/536V/559R/604H/660V/662S/687A/697L/745T/760W, 257V/291L/395S/402R/474A/475A/478L/515T/526S/527A/528A/536V/559R/604H/660V/662S/687A/745T/760W/798I, 79R/257V/291L/388V/395S/402R/474A/475A/478L/515T/526S/527A/528A/536V/559R/604H/660V/662S/6 87A/745T/760W, 257V/291L/395S/402R/469T/474A/475A/478L/515T/526S/527A/528A/536V/559R/604H/660V/662S/687A/745T/760W, 257V/291L/395S/402R/474A/475A/478L/515T/526S/527A/528A/536V/559R/604H/651Q/660V/662S/687A/745T/760W, 257V/291L/395S/402R/474A/475A/478L/515T/526S/527A/528A/536V/559R/604H/660V/662S/687A/745T/760W/825E, 51T/257V/291L/395S/402R/474A/475A/478L/515T/526S/527A/528A/536V/559R/604H/660V/662S/687A/7 45T/760W, 257V/291L/395S/402R/474A/475A/478L/515T/526S/527A/528A/536V/559R/604H/660V/662S/687A/745T/760W/787M, 257V/291L/370V/395S/402R/474A/475A/478L/515T/526S/527A/528A/536V/559R/604H/660V/662S/687A/745T/760W, 257V/291L/395S/402R/474A/475A/478L/515T/526S/527A/528A/536V/559R/604H/660V/662S/687A/745V/760W, 257V/291L/395S/402R/474A/475A/478L/515T/526S/527A/528A/536V/559R/604H/660V/662S/687A/745T/760W/815T, 257V/291L/395S/402R/474A/475A/478L/515T/526S/527A/528A/536V/559R/604H/660V/662S/687A/745S/760W, 257V/291L/395S/402R/465Y/474A/475A/478L/515T/526S/527A/528A/536V/559R/604H/660V/662S/687A/745T/760W, 257V/291L/395S/402R/474A/475A/478L/515T/526S/527A/528A/536V/559R/603M/604H/660V/662S/687A/745T/760W, 78N/257V/291L/395S/402R/474A/475A/478L/515T/526S/527A/528A/536V/559R/604H/660V/662S/687A/7 45T/760W, 257V/291L/317R/395S/402R/474A/475A/478L/515T/526S/527A/528A/536V/559R/604H/660V/662S/687A/745T/760W, 251A/257V/291L/395S/402R/474A/475A/478L/515T/526S/527A/528A/536V/559R/604H/660V/662S/687A/745T/760W, 257V/291L/395S/402R/474A/475A/478L/515T/526S/527A/528A/536V/559R/604H/660V/662S/687A/745T/760W/815R, 68T/257V/291L/395S/402R/474A/475A/478L/515T/526S/527A/528A/536V/559R/604H/660V/662S/687A/7 45T/760W, 257V/291L/395S/402R/474A/475A/478L/515T/526S/527A/528A/536V/559R/569Q/604H/660V/662S/687A/745T/760W, 147A/257V/291L/395S/402R/474A/475A/478L/515T/526S/527A/528A/536V/559R/604H/660V/662S/687A/745T/760W, 257V/291L/341T/395S/402R/474A/475A/478L/515T/526S/527A/528A/536V/559R/604H/660V/662S/687A/745T/760W, 257V/291L/395S/402R/474A/475A/478L/515T/526S/527A/528A/536V/559R/604H/660V/662S/687A/745T/760W/824M, 78V/257V/291L/395S/402R/474A/475A/478L/515T/526S/527A/528A/536V/559R/604H/660V/662S/687A/7 45T/760W, 68Q/257V/291L/395S/402R/474A/475A/478L/515T/526S/527A/528A/536V/559R/604H/660V/662S/687A/7 45T/760W, 251L/257V/291L/395S/402R/474A/475A/478L/515T/526S/527A/528A/536V/559R/604H/660V/662S/687A/745T/760W, 181R/257V/291L/395S/402R/474A/475A/478L/515T/526S/527A/528A/536V/559R/604H/660V/662S/687A/745T/760W, 257V/291L/395S/402R/474A/475A/478L/515T/526S/527A/528A/536V/559R/604H/660V/662S/687A/745T/760W/820E, 181Q/257V/291L/395S/402R/474A/475A/478L/515T/526S/527A/528A/536V/559R/604H/660V/662S/687A/745T/760W, 147M/257V/291L/395S/402R/474A/475A/478L/515T/526S/527A/528A/536V/559R/604H/660V/662S/687A/745T/760W, 257V/275A/291L/395S/402R/474A/475A/478L/515T/526S/527A/528A/536V/559R/604H/660V/662S/687A/745T/760W, 257V/291L/395S/402R/474A/475A/478L/515T/526S/527A/528A/536V/559R/569M/604H/660V/662S/687A/745T/760W, 257V/291L/395S/402R/474A/475A/478L/515T/526S/527A/528A/536V/559R/604H/660V/662S/687A/735L/745T/760W, 257V/291L/341Y/395S/402R/474A/475A/478L/515T/526S/527A/528A/536V/559R/604H/660V/662S/687A/745T/760W, 257V/291L/336E/395S/402R/474A/475A/478L/515T/526S/527A/528A/536V/559R/604H/660V/662S/687A/745T/760W, 257V/291L/341H/395S/402R/474A/475A/478L/515T/526S/527A/528A/536V/559R/604H/660V/662S/687A/745T/760W, 257V/291L/395S/402R/474A/475A/478L/515T/526S/527A/528A/536V/559R/604H/660V/662S/687A/745T/760W/815L, or 257V/291L/395S/402R/474A/475A/478L/515T/526S/527A/528A/536V/559R/604H/660V/662S/687A/745T/760W/815S, wherein the positions are relative to the reference sequence corresponding to SEQ ID NO: 2. In some embodiments, the amino acid sequence of the engineered DNA polymerase comprises at least a mutation set provided in Tables 10.1 and 10.2 relative to the reference sequence corresponding to SEQ ID NO: 2.

[0169] In some embodiments, the amino acid sequence of the engineered DNA polymerase comprises at least a mutation set at amino acid positions 68/147/251/257/291/395/402/474/475/478/515/526/527/528/536/559/603/604/612/660/662/687/745/760/798, 68/147/257/291/395/402/474/475/478/515/526/527/528/536/559/603/604/660/662/687/745/760, 68/78/147/257/291/370/395/402/474/475/478/515/526/527/528/536/559/604/660/662/687/745/760, 147/257/291/370/395/402/474/475/478/515/526/527/528/536/559/604/660/662/687/745/760, 147/251/257/291/395/402/474/475/478/515/526/527/528/536/559/604/660/662/687/745/760/798, 68/147/257/291/370/395/402/474/475/478/515/526/527/528/536/559/603/604/612/660/662/687/745/760, 51/147/257/291/370/395/402/412/474/475/478/515/526/527/528/536/559/603/604/612/660/662/687/745/760, 147/257/291/395/402/412/474/475/478/515/526/527/528/536/559/603/604/660/662/687/745/760/798, 147/251/257/291/370/395/402/412/474/475/478/515/526/527/528/536/559/604/612/660/662/687/745/760, 147/257/291/370/395/402/474/475/478/515/526/527/528/536/559/604/660/662/687/745/760/798, 78/147/251/257/291/395/402/474/475/478/515/526/527/528/536/559/604/660/662/687/745/760, 147/251/257/291/395/402/474/475/478/515/526/527/528/536/559/604/660/662/687/745/760, 68/147/257/291/370/395/402/474/475/478/508/515/526/527/528/536/559/604/660/662/687/745/760/798, 147/251/257/291/370/395/402/474/475/478/508/515/526/527/528/536/559/604/660/662/687/745/760, 78/147/257/291/395/402/474/475/478/508/515/526/527/528/536/559/604/660/662/687/745/760, 78/147/257/291/370/395/402/474/475/478/515/526/527/528/536/559/604/660/662/687/697/745/760/798, 51/147/251/257/291/395/402/474/475/478/515/526/527/528/536/559/604/660/662/687/745/760, 68/147/257/291/370/395/402/474/475/478/508/515/526/527/528/536/559/603/604/660/662/687/697/745/760, 78/147/251/257/291/370/395/402/474/475/478/515/526/527/528/536/559/604/660/662/687/697/745/760/798, 78/147/257/291/395/402/474/475/478/515/526/527/528/536/559/603/604/660/662/687/745/760/798/831, 147/257/291/370/395/402/412/474/475/478/508/515/526/527/528/536/559/604/612/660/662/687/745/760, 72/147/257/291/395/402/474/475/478/508/515/526/527/528/536/559/604/660/662/687/745/760/798, 51/147/251/257/291/395/402/412/474/475/478/515/526/527/528/536/559/604/660/662/687/745/760/798, 51/147/251/257/291/370/395/402/474/475/478/508/515/526/527/528/536/559/603/604/660/662/687/745/760/798, 68/78/147/251/257/291/370/395/402/474/475/478/515/526/527/528/536/559/603/604/612/660/662/687/697/7 45/760, or 51/68/147/251/257/291/370/395/402/474/475/478/515/526/527/528/536/559/603/604/660/662/687/745/760, wherein the positions are relative to the reference sequence corresponding to SEQ ID NO: 2. In some embodiments, the amino acid sequence of the engineered DNA polymerase comprises at least a mutation set 68R/147H/251I/257V/291L/395S/402R/474A/475A/478L/515T/526S/527A/528A/536V/559R/603M/604H/6 12D/660V/662S/687A/745T/760W/798I, 68R/147H/257V/291L/395S/402R/474A/475A/478L/515T/526S/527A/528A/536V/559R/603M/604H/660V/6 62S/687A/745T/760W, 68R/78N/147H/257V/291L/370V/395S/402R/474A/475A/478L/515T/526S/527A/528A/536V/559R/604H/66 OV/662S/687A/745T/760W, 147H/257V/291L/370V/395S/402R/474A/475A/478L/515T/526S/527A/528A/536V/559R/604H/660V/662S/687A/745T/760W, 147H/251I/257V/291L/395S/402R/474A/475A/478L/515T/526S/527A/528A/536V/559R/604H/660V/662S/6 87A/745T/760W/798I, 68G/147H/257V/291L/370V/395S/402R/474A/475A/478L/515T/526S/527A/528A/536V/559R/603M/604H/612D/660V/662S/687A/745T/760W, 51T/147H/257V/291L/370V/395S/402R/412R/474A/475A/478L/515T/526S/527A/528A/536V/559R/603M/6 04H/612D/660V/662S/687A/745T/760W, 147H/257V/291L/395S/402R/412R/474A/475A/478L/515T/526S/527A/528A/536V/559R/603M/604H/660V/662S/687A/745T/760W/798I, 147H/251I/257V/291L/370V/395S/402R/412R/474A/475A/478L/515T/526S/527A/528A/536V/559R/604H/6 12D/660V/662S/687A/745T/760W, 147H/257V/291L/370V/395S/402R/474A/475A/478L/515T/526S/527A/528A/536V/559R/604H/660V/662S/687A/745T/760W/798I, 78N/147H/251I/257V/291L/395S/402R/474A/475A/478L/515T/526S/527A/528A/536V/559R/604H/660V/66 2S/687A/745T/760W, 147H/251I/257V/291L/395S/402R/474A/475A/478L/515T/526S/527A/528A/536V/559R/604H/660V/662S/6 87A/745T/760W, 68R/147H/257V/291L/370V/395S/402R/474A/475A/478L/508K/515T/526S/527A/528A/536V/559R/604H/6 60V/662S/687A/745T/760W/798I, 147H/251I/257V/291L/370V/395S/402R/474A/475A/478L/508K/515T/526S/527A/528A/536V/559R/604H/6 60V/662S/687A/745T/760W, 78N/147H/257V/291L/395S/402R/474A/475A/478L/508K/515T/526S/527A/528A/536V/559R/604H/660V/6 62S/687A/745T/760W, 78N/147H/257V/291L/370V/395S/402R/474A/475A/478L/515T/526S/527A/528A/536V/559R/604H/660V/6 62S/687A/697L/745T/760W/798I, 51T/147H/251I/257V/291L/395S/402R/474A/475A/478L/515T/526S/527A/528A/536V/559R/604H/660V/66 2S/687A/745T/760W, 68G/147H/257V/291L/370V/395S/402R/474A/475A/478L/508K/515T/526S/527A/528A/536V/559R/603M/604H/660V/662S/687A/697L/745T/760W, 78N/147H/251I/257V/291L/370V/395S/402R/474A/475A/478L/515T/526S/527A/528A/536V/559R/604H/66 OV/662S/687A/697L/745T/760W/798I, 78N/147H/257V/291L/395S/402R/474A/475A/478L/515T/526S/527A/528A/536V/559R/603M/604H/660V/662S/687A/745T/760W/798I/831G, 147H/257V/291L/370V/395S/402R/412R/474A/475A/478L/508K/515T/526S/527A/528A/536V/559R/604H/612D/660V/662S/687A/745T/760W, 72A/147H/257V/291L/395S/402R/474A/475A/478L/508K/515T/526S/527A/528A/536V/559R/604H/660V/6 62S/687A/745T/760W/798I, 51T/147H/251I/257V/291L/395S/402R/412R/474A/475A/478L/515T/526S/527A/528A/536V/559R/604H/66 OV/662S/687A/745T/760W/798I, 51T/147H/251I/257V/291L/370V/395S/402R/474A/475A/478L/508K/515T/526S/527A/528A/536V/559R/60 3M/604H/660V/662S/687A/745T/760W/798I, 68G/78N/147H/251I/257V/291L/370V/395S/402R/474A/475A/478L/515T/526S/527A/528A/536V/559R/603 M/604H/612D/660V/662S/687A/697L/745T/760W, or 51T/68T/147H/251I/257V/291L/370V/395S/402R/474A/475A/478L/515T/526S/527A/528A/536V/559R/603 M/604H/660V/662S/687A/745T/760W, wherein the positions are relative to the reference sequence corresponding to SEQ ID NO: 2. In some embodiments, the amino acid sequence of the engineered DNA polymerase comprises at least a mutation set provided in Tables 11.1 and 11.2 relative to the reference sequence corresponding to SEQ ID NO: 2.

[0170] In some embodiments, the engineered DNA polymerase comprises an amino acid sequence having at least 80%, 85%, 86%, 87%, 88%, 89%, 90%, 91%, 92%, 93%, 94%, 95%, 96%, 97%, 98%, 99%, or more sequence identity to the reference sequence corresponding to residues 12 to 844 of an even numbered SEQ ID NO. of SEQ ID NOs: 4-1378, or to the reference sequence corresponding to an even numbered SEQ ID NO. of SEQ ID NOs: 2-1378, wherein the amino acid sequence comprises one or more mutations relative to the reference sequence corresponding to residues 12 to 844 of SEQ ID NO: 220, 226, 272, 328, 546, 710, or 1208, or relative to the reference sequence corresponding to SEQ ID NO: 220, 226, 272, 328, 546, 710, or 1208.

[0171] In some embodiments, the engineered DNA polymerase comprises an amino acid sequence having at least 80%, 85%, 86%, 87%, 88%, 89%, 90%, 91%, 92%, 93%, 94%, 95%, 96%, 97%, 98%, 99%, or more sequence identity to the reference sequence corresponding to residues 12 to 844 of SEQ ID NO: 220, 226, 272, 328, 546, 710, or 1208, or to the reference sequence corresponding to SEQ ID NO: 220, 226, 272, 328, 546, 710, or 1208, wherein the amino acid sequence comprises one or more mutations relative to the reference sequence corresponding to residues 12 to 844 of SEQ ID NO: 220, 226, 272, 328, 546, 710, or 1208, or relative to the reference sequence corresponding to SEQ ID NO: 220, 226, 272, 328, 546, 710, or 1208.

[0172] In some embodiments, the amino acid sequence of the engineered DNA polymerase comprises at least a mutation at amino acid position 2, 3, 21, 39, 51, 59, 66, 68, 72, 73, 78, 79, 87, 124, 147, 178, 181, 185, 199, 216, 224, 233, 239, 241, 251, 257, 262, 271, 275, 288, 291, 303, 316, 317, 327, 328, 336, 338, 341, 342, 351, 356, 359, 362, 365, 368, 370, 371, 372, 373, 374, 376, 377, 378, 379, 380, 381, 382, 388, 390, 392, 393, 395, 396, 398, 399, 402, 403, 404, 409, 410, 412, 413, 416, 417, 418, 420, 425, 426, 427, 429, 430, 431, 432, 434, 435, 437, 438, 442, 443, 447, 448, 449, 450, 451, 453, 454, 457, 461, 465, 466, 469, 473, 474, 475, 477, 478, 479, 482, 483, 488, 490, 503, 508, 514, 515, 516, 526, 527, 528, 529, 536, 541, 542, 544, 545, 550, 554, 557, 558, 559, 562, 569, 575, 577, 578, 579, 589, 594, 601, 603, 604, 612, 613, 641, 644, 651, 656, 660, 662, 663, 664, 667, 671, 677, 685, 687, 691, 694, 697, 698, 699, 701, 702, 704, 706, 707, 708, 713, 714, 715, 716, 718, 721, 723, 724, 725, 728, 731, 732, 735, 740, 742, 743, 745, 747, 748, 749, 753, 758, 760, 762, 768, 769, 770, 787, 792, 798, 804, 807, 808, 809, 812, 815, 820, 824, 825, or 831, or combinations thereof, wherein the positions are relative to the reference sequence corresponding to SEQ ID NO: 220, 226, 272, 328, 546, 710, or 1208.

[0173] In some embodiments, the amino acid sequence of the engineered DNA polymerase comprises at least a mutation or an amino acid residue 2-, 3N, 21A/G/N, 39F, 51T, 59K, 66R, 68E/G/I/K/Q/R/T, 72A, 731, 78N/S/T/V, 79A/M/R/T, 87V, 124A, 147A/H/M/Q, 178L, 181Q/R, 185T, 199P, 216K, 224L, 233H/K/L, 239V, 241E, 251A/I/L, 257V, 262N, 271G, 275A/T, 288R, 291L, 303T, 316G, 317R, 327E/L, 328L/V, 336E, 338V, 341H/T/Y, 342G, 351H, 356I/S, 359G/V, 362M/P/S, 365T, 368H, 370G/SN, 371L, 372V/Y, 373G/T, 374SN/Y, 376F/S, 377C, 378C/F/L/S, 379G, 380I, 381E/K, 382C/S, 388C/M/P/V, 390S/T, 392A/C/S/T/V, 393G/R/S/W, 395G/H/S, 396F/L/P/R/S, 398G/Q, 399G/T, 402R/Y, 403I, 404T, 409S, 410V/W, 412M/Q/R/V, 413T, 416S, 417R/W, 418K, 420V, 425T, 426T, 427D/F/H/I/L/R/T/Y, 429F, 430G, 431G/L/R/V, 432T, 434N, 435K/P, 437N/P/S, 438F/S, 442G, 443A, 447R/S/W, 448C/I/T/V, 449A/G/L/V, 450V, 451L, 453L/S, 454D/F/G/L/W, 457N/R/W/Y, 461L/Q/S, 465Y, 466Y, 469T/V, 473N, 474A/C/G, 475A/S/V/Y, 477V, 478I/L/M, 479L, 482S, 483D, 488W, 490W, 503R, 508K, 514I/V, 515H/T, 516K, 526S, 527A, 528A/G/S, 529S/V, 536V, 541D/G/N/S, 542R, 544M, 545L, 550C/T, 554G/N, 557I, 558G/L/T, 559P/R, 562K, 569M/Q, 575W, 577S, 578A, 579L/Q, 589G, 594A, 601T, 603M/R, 604H, 612D, 613H/R, 641A, 644Q, 651Q, 656Q/S, 660V, 662S, 663E, 664A, 667S/T/W, 671W, 677L, 685R, 687A, 691S/W, 694D, 697A/I/L/V, 698E, 699V, 701M, 702S/V, 704L/V, 706I/S/V, 707W, 708L, 713G, 714I, 715H/L, 716E/L, 718F/Q, 721A/M/N, 723Y, 724F/L, 725V, 728S, 731I/T, 732L/Q, 735L, 740S/V, 742K, 743H/V, 745S/T/V, 747S, 748G, 749M, 753A, 758G, 760T/W/Y, 762A, 768S, 769Q, 770E, 787M/N, 792F/Y, 798I, 804R, 807M, 808W/Y, 809K, 812R/S, 815L/R/S/T, 820E/S/T, 824M, 825E, and 831G, or combinations thereof, wherein the positions are relative to the reference sequence corresponding to SEQ ID NO: 220, 226, 272, 328, 546, 710, or 1208.

[0174] In some embodiments, the engineered DNA polymerase comprises an amino acid sequence having at least 80%, 85%, 86%, 87%, 88%, 89%, 90%, 91%, 92%, 93%, 94%, 95%, 96%, 97%, 98%, 99%, or more sequence identity to the reference sequence corresponding to residues 12 to 844 of SEQ ID NO: 220, or to the reference sequence corresponding to SEQ ID NO: 220, wherein the amino acid sequence comprises one or more mutations relative to the reference sequence corresponding to residues 12 to 844 of SEQ ID NO: 220, or relative to the reference sequence corresponding to SEQ ID NO: 220.

[0175] In some embodiments, the engineered DNA polymerase comprises an amino acid sequence having at least 80%, 85%, 86%, 87%, 88%, 89%, 90%, 91%, 92%, 93%, 94%, 95%, 96%, 97%, 98%, 99%, or more sequence identity to the reference sequence corresponding to residues 12 to 844 of an even-numbered SEQ ID NO of SEQ ID NOs: 222-268, or to the reference sequence corresponding to an even-numbered SEQ ID NO of SEQ ID NOs: 222-268, wherein the amino acid sequence comprises one or more mutations relative to the reference sequence corresponding to residues 12 to 844 of SEQ ID NO: 220, or relative to the reference sequence corresponding to SEQ ID NO: 220.

[0176] In some embodiments, the amino acid sequence of the engineered DNA polymerase comprises at least a mutation or mutation set at amino acid position(s) 515, 594, 559, 760, 541, 753, 402, 398, 758, 399, 575, 257/758, 558, 601, 762, 589, or 544, wherein the positions are relative to the reference sequence corresponding to SEQ ID NO: 220. In some embodiments, the amino acid sequence of the engineered DNA polymerase comprises at least a mutation or mutation set 515H, 594A, 559R, 760W, 541S, 541N, 753A, 402R, 760T, 398Q, 758G, 760Y, 399G, 575W, 257V/758G, 558L, 402Y, 558T, 601T, 398G, 762A, 558G, 589G, or 544M, wherein the positions are relative to the reference sequence corresponding to SEQ ID NO: 220. In some embodiments, the amino acid sequence of the engineered DNA polymerase comprises at least a mutation or mutation set G515H, N594A, P559R, F760W, E541S, E541N, E753A, G402R, F760T, T398Q, M758G, F760Y, N399G, F575W, A257V/M758G, D558L, G402Y, D558T, L601T, T398G, M762A, D558G, D589G, or L544M, wherein the positions are relative to the reference sequence corresponding to SEQ ID NO: 220.

[0177] In some embodiments, the engineered DNA polymerase comprises an amino acid sequence having at least 80%, 85%, 86%, 87%, 88%, 89%, 90%, 91%, 92%, 93%, 94%, 95%, 96%, 97%, 98%, 99%, or more sequence identity to the reference sequence corresponding to residues 12 to 844 of SEQ ID NO: 226, or to the reference sequence corresponding to SEQ ID NO: 226, wherein the amino acid sequence comprises one or more mutations relative to the reference sequence corresponding to residues 12 to 844 of SEQ ID NO: 226, or relative to the reference sequence corresponding to SEQ ID NO: 226.

[0178] In some embodiments, the engineered DNA polymerase comprises an amino acid sequence having at least 80%, 85%, 86%, 87%, 88%, 89%, 90%, 91%, 92%, 93%, 94%, 95%, 96%, 97%, 98%, 99%, or more sequence identity to the reference sequence corresponding to residues 12 to 844 of an even-numbered SEQ ID NO of SEQ ID NOs: 270-320, or to the reference sequence corresponding to SEQ ID NO: 270-320, wherein the amino acid sequence comprises one or more mutations relative to the reference sequence corresponding to residues 12 to 844 of SEQ ID NO: 226, or relative to the reference sequence corresponding to SEQ ID NO: 226.

[0179] In some embodiments, the amino acid sequence of the engineered DNA polymerase comprises at least a mutation or mutation set at amino acid position(s) 515/760, 514/515/760, 478/515/760, 660, 178, 402/515, 377/515, 515, 514/515, 402, 503, 239, 73, 528/541, 59, 515/575, 3/515/559, 377/515/528/541/554/557, 402/514/515/541/559, 514/515/541/559, 514/515/559, 515/559, 515/541/559, 377/515/559, 402/515/559, or 515/541/557, wherein the positions are relative to the reference sequence corresponding to SEQ ID NO: 226. In some embodiments, the amino acid sequence of the engineered DNA polymerase comprises at least a mutation or mutation set 515T/760W, 514V/515T/760W, 478M/515T/760W, 660V, 178L, 402Y/515T, 377C/515T, 515T, 514V/515T, 402Y, 503R, 239V, 73I, 528G/541N, 59K, 515T/575W, 3N/515T/559P, 377C/515H/528G/541N/554N/557I, 402R/514V/515T/541N/559P, 514V/515T/541G/559P, 514V/515T/559P, 515T/559P, 515T/541N/559P, 377C/515T/559P, 402Y/515H/559P, or 515T/541N/557I, wherein the positions are relative to the reference sequence corresponding to SEQ ID NO: 226. In some embodiments, the amino acid sequence of the engineered DNA polymerase comprises at least a mutation or mutation set G515T/F760W, I514V/G515T/F760W, L478M/G515T/F760W, L660V, V178L, G402Y/G515T, G377C/G515T, G515T, I514V/G515T, G402Y, K503R, L239V, V73I, A528G/E541N, R59K, G515T/F575W, H3N/G515T/R559P, G377C/G515H/A528G/E541N/S554N/L557I, G402R/I514V/G515T/E541N/R559P, I514V/G515T/E541G/R559P, I514V/G515T/R559P, G515T/R559P, G515T/E541N/R559P, G377C/G515T/R559P, G402Y/G515H/R559P, or G515T/E541N/L557I, wherein the positions are relative to the reference sequence corresponding to SEQ ID NO: 226.

[0180] In some embodiments, the engineered DNA polymerase comprises an amino acid sequence having at least 80%, 85%, 86%, 87%, 88%, 89%, 90%, 91%, 92%, 93%, 94%, 95%, 96%, 97%, 98%, 99%, or more sequence identity to the reference sequence corresponding to residues 12 to 844 of SEQ ID NO: 272, or to the reference sequence corresponding to SEQ ID NO: 272, wherein the amino acid sequence comprises one or more mutations relative to the reference sequence corresponding to residues 12 to 844 of SEQ ID NO: 272, or relative to the reference sequence corresponding to SEQ ID NO: 272.

[0181] In some embodiments, the engineered DNA polymerase comprises an amino acid sequence having at least 80%, 85%, 86%, 87%, 88%, 89%, 90%, 91%, 92%, 93%, 94%, 95%, 96%, 97%, 98%, 99%, or more sequence identity to the reference sequence corresponding to residues 12 to 844 of an even-numbered SEQ ID NO. of SEQ ID NOs: 322-534, or to the reference sequence corresponding to an even-numbered SEQ ID NO. of SEQ ID NOs: 322-534, wherein the amino acid sequence comprises one or more mutations relative to the reference sequence corresponding to residues 12 to 844 of SEQ ID NO: 272, or relative to the reference sequence corresponding to SEQ ID NO: 272.

[0182] In some embodiments, the amino acid sequence of the engineered DNA polymerase comprises at least a mutation or mutation set at amino acid position(s) 402/528/541/660, 257/604/660, 178/257/402/404/528/557/660, 402/604/660, 257/402/541/660, 377/402/541/660, 257/377/402/660, 483/660, 257/402, 257, 257/377, 178/660, 257/377/402, 660, 178/257/377/402/403/483/604/660, 377, 178/402/403/528/541/660, 377/601/660, 178/377, 377/490/660, 402/403/483/554/557, 178/257/377/558/660, 257/402/403/483/660, 178/554/557/558/660, 554/557/660, 178/483/541/545/554/557/604/660, 792, 402/403/483/604/660, 178, 474, 257/377/541/604, 743, 396, 479, 377/403/541/604, 475, 178/257/403/528, 448, 577, 395, 769, 691, 677, 704, 377/541/575/604/660, 178/257/601/604, 685, 377/604/660, 749, 482, 291, 579, 178/541/550/604, 477, 178/257, 257/402/490/528/541/660, 328, 740, 368, 721/745, 578, 687, 541/601/604, 257/528, 257/528/554, 768, 770, 257/377/483/541, 542, 257/402/403, 257/403/541, 604, 402/604, 257/316/541/575/604, 327, 403/541/604/660, 257/377/403/483/541/601/604, or 402/528/541/601, wherein the positions are relative to the reference sequence corresponding to SEQ ID NO: 272. In some embodiments, the amino acid sequence of the engineered DNA polymerase comprises at least a mutation or mutation set 402R/528G/541D/660V, 257V/604H/660V, 178L/257V/402R/404T/528G/557I/660V, 402R/604H/660V, 257V/402Y/541G/660V, 377C/402Y/541N/660V, 257V/377C/402Y/660V, 483D/660V, 257V/402Y, 257V, 257V/377C, 178L/660V, 257V/377C/402Y, 660V, 178L/257V/377C/402R/403I/483D/604H/660V, 377C, 178L/402R/403I/528G/541G/660V, 377C/601T/660V, 178L/377C, 377C/490W/660V, 402R/403I/483D/554N/557I, 178L/257V/377C/558T/660V, 257V/402Y/403I/483D/660V, 178L/554N/557I/558T/660V, 554N/557I/660V, 178L/483D/541N/545L/554N/557I/604H/660V, 792F, 402Y/403I/483D/604H/660V, 178L, 474A, 257V/377C/541D/604H, 743H, 396L, 743V, 396R, 479L, 377C/403I/541D/604H, 475A, 178L/257V/403I/528G, 4481, 577S, 395G, 769Q, 475V, 448C, 691W, 677L, 704L, 377C/541N/575W/604H/660V, 178L/257V/601T/604H, 685R, 377C/604H/660V, 749M, 396F, 395H, 475S, 474C, 482S, 291L, 448V, 579Q, 178L/541G/550C/604H, 477V, 178L/257V, 257V/402R/490W/528G/541G/660V, 328L, 395S, 740V, 483D/660V, 257V/377C, 579L, 368H, 792Y, 721A/745T, 474A, 743H, 578A, 687A, 541D/601T/604H, 328V, 396L, 475Y, 395G, 257V/528G, 257V/528G/554N, 768S, 257V, 257V, 396P, 770E, 257V/377C/483D/541N, 542R, 257V/402Y/403I, 257V/403I/541N, 474G, 604H, 402Y/604H, 691S, 257V/316G/541D/575W/604H, 327L, 704V, 403I/541N/604H/660V, 257V/377C/403I/483D/541D/601T/604H, 740S, 257V, 402R/528G/541G/601T, or 257V/377C, wherein the positions are relative to the reference sequence corresponding to SEQ ID NO: 272.

[0183] In some embodiments, the amino acid sequence of the engineered DNA polymerase comprises at least a mutation or mutation set G402R/A528G/E541D/L660V, A257V/R604H/L660V, V178L/A257V/G402R/A404T/A528G/L557I/L660V, G402R/R604H/L660V, A257V/G402Y/E541G/L660V, G377C/G402Y/E541N/L660V, A257V/G377C/G402Y/L660V, G483D/L660V, A257V/G402Y, A257V, A257V/G377C, V178L/L660V, A257V/G377C/G402Y, L660V, V178L/A257V/G377C/G402R/V403I/G483D/R604H/L660V, G377C, V178L/G402R/V403I/A528G/E541G/L660V, G377C/L601T/L660V, V178L/G377C, G377C/G490W/L660V, G402R/V403I/G483D/S554N/L557I, V178L/A257V/G377C/D558T/L660V, A257V/G402Y/V403I/G483D/L660V, V178L/S554N/L557I/D558T/L660V, S554N/L557I/L660V, V178L/G483D/E541N/Q545L/S554N/L557I/R604H/L660V, L792F, G402Y/V403I/G483D/R604H/L660V, V178L, L474A, A257V/G377C/E541D/R604H, D743H, A396L, D743V, A396R, E479L, G377C/V403I/E541D/R604H, E475A, V178L/A257V/V403I/A528G, L448I, Q577S, P395G, A769Q, E475V, L448C, Q691W, N677L, I704L, G377C/E541N/F575W/R604H/L660V, V178L/A257V/L601T/R604H, S685R, G377C/R604H/L660V, R749M, A396F, P395H, E475S, L474C, E482S, F291L, L448V, A579Q, V178L/E541G/S550C/R604H, E477V, V178L/A257V, A257V/G402R/G490W/A528G/E541G/L660V, E328L, P395S, Y740V, G483D/L660V, A257V/G377C, A579L, D368H, L792Y, T721A/A745T, L474A, D743H, T578A, H687A, E541D/L601T/R604H, E328V, A396L, E475Y, P395G, A257V/A528G, A257V/A528G/S554N, A768S, A257V, A257V, A396P, D770E, A257V/G377C/G483D/E541N, L542R, A257V/G402Y/V403I, A257V/V403I/E541N, L474G, R604H, G402Y/R604H, Q691S, A257V/E316G/E541D/F575W/R604H, K327L, I704V, V403I/E541N/R604H/L660V, A257V/G377C/V403I/G483D/E541D/L601T/R604H, Y740S, A257V, G402R/A528G/E541G/L601T, or A257V/G377C, wherein the positions are relative to the reference sequence corresponding to SEQ ID NO: 272.

[0184] In some embodiments, the engineered DNA polymerase comprises an amino acid sequence having at least 80%, 85%, 86%, 87%, 88%, 89%, 90%, 91%, 92%, 93%, 94%, 95%, 96%, 97%, 98%, 99%, or more sequence identity to the reference sequence corresponding to residues 12 to 844 of SEQ ID NO: 328, or to the reference sequence corresponding to SEQ ID NO: 328, wherein the amino acid sequence comprises one or more mutations relative to the reference sequence corresponding to residues 12 to 844 of SEQ ID NO: 328, or relative to the reference sequence corresponding to SEQ ID NO: 328.

[0185] In some embodiments, the engineered DNA polymerase comprises an amino acid sequence having at least 80%, 85%, 86%, 87%, 88%, 89%, 90%, 91%, 92%, 93%, 94%, 95%, 96%, 97%, 98%, 99%, or more sequence identity to the reference sequence corresponding to residues 12 to 844 of an even-numbered SEQ ID NO. of SEQ ID NOs: 536-674, or to the reference sequence corresponding to an even-numbered SEQ ID NO of SEQ ID NOs: 536-674, wherein the amino acid sequence comprises one or more mutations relative to the reference sequence corresponding to residues 12 to 844 of SEQ ID NO: 328, or relative to the reference sequence corresponding to SEQ ID NO: 328.

[0186] In some embodiments, the amino acid sequence of the engineered DNA polymerase comprises at least a mutation or mutation set at amino acid position(s) 79, 257/474, 677, 562, 178/395/745, 291/395/687/745, 257/395/677, 303/338, 474/475, 359, 474/475/677/704, 395/687, 671, 233, 699, 379, 257/792, 257/395, 21, 257/448/474/475, 713, 641, 442, 656, 475/704, 742, 667, 257/448, 257/316/395/482/687/745, 804, 704, 178/257/395/482/579/687/745, 257/579, 257/291/395/475/541/687, 257/768, 812, 475, 662, 536, 748, 808, 291/316/395/687, 613, 257/291/316, 257/291/579, 257/316/541/745, 351, 257/316/395/745, 185, 257/316/687, 291/316/475/687/745, 257/291/395/740/745, 450, 473, 124, 430, 413, 66, or 365, wherein the positions are relative to the reference sequence corresponding to SEQ ID NO: 328. In some embodiments, the amino acid sequence of the engineered DNA polymerase comprises at least a mutation or mutation set 79A, 257V/474A, 677L, 562K, 178L/395H/745T, 291L/395H/687A/745T, 257V/395H/677L, 303T/338V, 474A/475A, 79R, 359G, 79T, 474A/475S/677L/704V, 79M, 395S/687A, 671W, 233K, 699V, 379G, 257V/792F, 257V/395S, 21A, 257V/448C/474A/475S, 713G, 641A, 442G, 656S, 475S/704V, 742K, 667W, 21N, 257V/448I, 257V/316G/395H/482S/687A/745T, 804R, 704V, 178L/257V/395S/482S/579L/687A/745T, 257V/579L, 257V/291L/395S/475V/541N/687A, 257V/768S, 667S, 812S, 475A, 662S, 536V, 748G, 808W, 291L/316G/395H/687A, 613H, 257V/291L/316G, 257V/291L/579L, 257V/316G/541N/745T, 351H, 257V/316G/395G/745T, 185T, 257V/316G/687A, 808Y, 291L/316G/475V/687A/745T, 257V/291L/395H/740V/745T, 450V, 473N, 21G, 124A, 613R, 656Q, 430G, 413T, 233L, 66R, 365T, or 812R, wherein the positions are relative to the reference sequence corresponding to SEQ ID NO: 328. In some embodiments, the amino acid sequence of the engineered DNA polymerase comprises at least a mutation or mutation set K79A, A257V/L474A, N677L, R562K, V178L/P395H/A745T, F291L/P395H/H687A/A745T, A257V/P395H/N677L, G303T/A338V, L474A/E475A, K79R, K359G, K79T, L474A/E475S/N677L/I704V, K79M, P395S/H687A, R671W, R233K, E699V, A379G, A257V/L792F, A257V/P395S, P21A, A257V/L448C/L474A/E475S, K713G, R641A, Q442G, W656S, E475S/I704V, P742K, P667W, P21N, A257V/L448I, A257V/E316G/P395H/E482S/H687A/A745T, E804R, I704V, V178L/A257V/P395S/E482S/A579L/H687A/A745T, A257V/A579L, A257V/F291L/P395S/E475V/E541N/H687A, A257V/A768S, P667S, A812S, E475A, P662S, A536V, V748G, E808W, F291L/E316G/P395H/H687A, E613H, A257V/F291L/E316G, A257V/F291L/A579L, A257V/E316G/E541N/A745T, P351H, A257V/E316G/P395G/A745T, P185T, A257V/E316G/H687A, E808Y, F291L/E316G/E475V/H687A/A745T, A257V/F291L/P395H/Y740V/A745T, R450V, E473N, P21G, P124A, E613R, W656Q, F430G, E413T, R233L, K66R, L365T, or A812R, wherein the positions are relative to the reference sequence corresponding to SEQ ID NO: 328.

[0187] In some embodiments, the engineered DNA polymerase comprises an amino acid sequence having at least 80%, 85%, 86%, 87%, 88%, 89%, 90%, 91%, 92%, 93%, 94%, 95%, 96%, 97%, 98%, 99%, or more sequence identity to the reference sequence corresponding to residues 12 to 844 of SEQ ID NO: 546, or to the reference sequence corresponding to SEQ ID NO: 546, wherein the amino acid sequence comprises one or more mutations relative to the reference sequence corresponding to residues 12 to 844 of SEQ ID NO: 546, or relative to the reference sequence corresponding to SEQ ID NO: 546.

[0188] In some embodiments, the engineered DNA polymerase comprises an amino acid sequence having at least 80%, 85%, 86%, 87%, 88%, 89%, 90%, 91%, 92%, 93%, 94%, 95%, 96%, 97%, 98%, 99%, or more sequence identity to the reference sequence corresponding to residues 12 to 844 of an even-numbered SEQ ID NO. of SEQ ID NOs: 676-1190, or to the reference sequence corresponding to an even-numbered SEQ ID NO. of SEQ ID NOs: 676-1190, wherein the amino acid sequence comprises one or more mutations relative to the reference sequence corresponding to residues 12 to 844 of SEQ ID NO: 546, or relative to the reference sequence corresponding to SEQ ID NO: 546.

[0189] In some embodiments, the amino acid sequence of the engineered DNA polymerase comprises at least a mutation or mutation set at amino acid position(s) 438, 697, 457, 716, 79/474/536/699, 536, 392, 708, 431, 395/474/536/699, 453, 427, 79/395/699, 378, 370, 706, 257/395/474/475/536/662, 474/536/562, 257/395/474/536, 79/257/395/474/475/536/562, 79/395/536/699, 372, 257/395/792, 390, 79/474/536/699/792, 409, 443, 448, 381, 707, 416, 474/475/662, 79/395/474/475/536/792, 474/475/536/662, 382, 257/474/536/562/662, 257/395/474/475/792, 79/474/662/699, 725, 447, 79/257/699, 701, 257/474/475/536/562/662, 702, 342/716, 233/562/713, 704, 474/475/536/562/662, 454, 327/427, 257/316/474/536/792, 417, 425, 536/562, 714, 233, 303/613, 21/79/303/562/613, 79/562,435, 257/536/699/792, 79/536,453/667, 79/303/338/613/804/812, 79/257/395/536/662/792, 79/338/562, 79/233/303/662, 79/662/699, 79/395/475/662, 79/536/562/699, 536/662, 21/79/338/641/699, 662, 21/79/442/699, 79/303/662, 79/178/257/662/699, 79/257/536/562/662, 562/699, 359/613/742/808/812, 21/79/338/379/562/662/804/812, 731, 21/79/359/442/662, 79/338/359/562, 21/613/662/742, 21/79/303/662/699/742/808, 21/79/338/442/613/699, 79/303/338/562/613/662, 303/338/562/699/808/812, 79/257,257/662/792, 79/536/699, 79/359/713/742/808, 21/359/442/808/812, 79/257/475/536/662, 21/79/338, 79/713, 79/562/641, 373, 79/178/257/316/536/662, 21/233/338/562/662, 257/316/536, 21/79/303/442/662, 21/79/233/303/338/379/562/713, 338/442/699, 426, 21/338/359/808/812, 79/178/233/442/562/812, 79/474/536/662/699, 21/79/338/379/662, 721, 21/79/233/338/613/641, 374, 338/359/379, 461, 451, 715, 79/303/338/641/713, 393, 79/257/474/536/699, 79, 437, 257/536/562/662, 21/79/379/442/562/662, 362, 410, 338/812, 21/662/808/812, 21/303/338, 418, 338/442, 449, 379/641, 316/536/562, 257/536/792, 21/79/442/613, 257/536/662/792, 257/474/529/536/662, 412, 79/257/536/662/699, 257/316/475/536/792, 388, 380/454, 21/79/233/303/613/699/809, 724, 21/79/338/613, 79/178/536/792, 449/747, 21/79/379/613/713, 79/316/536/662/699, 376, 21/562/662, 79/257/262/536/562/699, 718, 395/475/536/562/662/699, 79/233/338/359/379/442/562/613/812, 371, 316/475/562/662/792, 79/257/316/792, 728, 79/233/338, 432, 79/178/257/316/395/536/662/699, 79/303/713, 233/379/442/562/613/662/713, 21/742,732, 79/257/395/562/662/699, 21/233/338/379/442/562/613/662/812, 429, 562/699, 2/374,723, 434, 420, or 699, wherein the positions are relative to the reference sequence corresponding to SEQ ID NO: 546. In some embodiments, the amino acid sequence of the engineered DNA polymerase comprises at least a mutation or mutation set 438F, 6971, 457W, 716E, 79R/474A/536V/699V, 536V, 392V, 708L, 431G, 395S/474A/536V/699V, 453S, 697V, 427R, 79R/395S/699V, 378F, 370V, 706S, 257V/395S/474A/475A/536V/662S, 474A/536V/562K, 257V/395S/474A/536V, 79R/257V/395S/474A/475A/536V/562K, 378S, 79R/395S/536V/699V, 372V, 257V/395S/792F, 390S, 427L, 79R/474A/536V/699V/792F, 409S, 443A, 448V, 381E, 707W, 381K, 457Y, 416S, 474A/475A/662S, 79R/395S/474A/475A/536V/792F, 474A/475A/536V/662S, 382C, 257V/474A/536V/562K/662S, 257V/395S/474A/475A/792F, 79R/474A/662S/699V, 725V, 706I, 447R, 697L, 79R/257V/699V, 701M, 257V/474A/475A/536V/562K/662S, 702V, 342G/716L, 233K/562K/713G, 704V, 474A/475A/536V/562K/662S, 454F, 327E/427T, 257V/316G/474A/536V/792F, 427D, 370G, 417R, 425T, 536V/562K, 714I, 233H, 392T, 303T/613H, 697A, 378L, 427H, 21A/79A/303T/562K/613H, 370S, 457N, 79R/562K, 435P, 257V/536V/699V/792F, 79R/536V, 453S/667T, 79A/303T/338V/613H/804R/812S, 79R/257V/395S/536V/662S/792F, 79A/338V/562K, 79R/257V/699V, 79R/233K/303T/662S, 79R/662S/699V, 79R/395S/475A/662S, 704V, 79R/536V/562K/699V, 536V/662S, 21A/79A/338V/641A/699V, 662S, 21A/79A/442G/699V, 79A/303T/662S, 79R/178L/257V/662S/699V, 79R/257V/536V/562K/662S, 562K/699V, 359G/613H/742K/808Y/812S, 21N/79A/338V/379G/562K/662S/804R/812S, 448V, 731I, 21N/79R/359G/442G/662S, 79A/338V/359V/562K, 21N/613H/662S/742K, 21A/79A/303T/662S/699V/742K/808Y, 21A/79A/338V/442G/613H/699V, 79A/303T/338V/562K/613H/662S, 303T/338V/562K/699V/808W/812S, 79R/257V, 257V/662S/792F, 79R/536V/699V, 79A/359G/713G/742K/808W, 21A/359G/442G/808W/812S, 79R/257V/475A/536V/662S, 21N/79A/338V, 79A/713G, 457R, 79A/562K/641A, 392C, 373T, 79R/178L/257V/316G/536V/662S, 21N/233K/338V/562K/662S, 257V/316G/536V, 21N/79R/303T/442G/662S, 21N/79R/233K/303T/338V/379G/562K/713G, 338V/442G/699V, 426T, 21A/338V/359G/808Y/812S, 79A/178L/233K/442G/562K/812S, 79R/474A/536V/662S/699V, 6971, 390S, 21A/79A/338V/379G/662S, 721M, 21A/79A/233K/338V/613H/641A, 374V, 338V/359G/379G, 461L, 451L, 715L, 79R/303T/338V/641A/713G, 393W, 372Y, 79R/257V/474A/536V/699V, 431R, 454G, 79R, 437S, 257V/536V/562K/662S, 731T, 706V, 448T, 21A/79A/379G/442G/562K/662S, 457Y, 362M, 410W, 454D, 338V/812S, 21N/79R/338V, 21A/662S/808Y/812S, 435K, 21A/303T/338V, 378S, 378C, 427L, 418K, 338V/442G, 721N, 449A, 457W, 449G, 379G/641A, 410V, 431L, 316G/536V/562K, 257V/536V/792F, 21N/79R/442G/613H, 536V, 257V/536V/662S/792F, 431V, 362P, 257V/474A/529S/536V/662S, 382S, 412V, 447S, 79R/257V/536V/662S/699V, 392T, 461S, 412Q, 257V/316G/475A/536V/792F, 438S, 388C, 380I/454L, 447R, 21N/79R/233K/303T/613H/699V/809K, 724F, 461Q, 21A/79R/338V/613H, 79R/178L/536V/792F, 715H, 390T, 449G/747S, 449V, 374S, 362S, 21A/79R/379G/613H/713G, 79R/316G/536V/662S/699V, 370S, 417W, 376F, 393R, 21N/562K/662S, 79R/257V/262N/536V/562K/699V, 718Q, 395S/475A/536V/562K/662S/699V, 449L, 388M, 79R/233K/338V/359G/379G/442G/562K/613H/812S, 233K, 371L, 376S, 316G/475A/562K/662S/792F, 702S, 79R/257V/316G/792F, 373G, 454W, 728S, 447W, 79R/233K/338V, 437P, 432T, 79R/178L/257V/316G/395S/536V/662S/699V, 79R/303T/713G, 718F, 453L, 427F, 233K/379G/442G/562K/613H/662S/713G, 21A/742K, 732L, 392S, 388P, 393S, 437N, 392A, 393G, 412M, 79R/257V/395S/562K/662S/699V, 21A/233K/338V/379G/442G/562K/613H/662S/812S, 427Y, 732Q, 429F, 562K/699V, 2-/374Y, 723Y, 434N, 388V, 420V, 699V, 4271, or 724L, wherein the positions are relative to the reference sequence corresponding to SEQ ID NO: 546. In some embodiments, the amino acid sequence of the engineered DNA polymerase comprises at least a mutation or mutation set L438F, Y697I, A457W, A716E, K79R/L474A/A536V/E699V, A536V, L392V, F708L, P431G, H395S/L474A/A536V/E699V, A453S, Y697V, Q427R, K79R/H395S/E699V, V378F, A370V, R706S, A257V/H395S/L474A/E475A/A536V/P662S, L474A/A536V/R562K, A257V/H395S/L474A/A536V, K79R/A257V/H395S/L474A/E475A/A536V/R562K, V378S, K79R/H395S/A536V/E699V, L372V, A257V/H395S/L792F, A390S, Q427L, K79R/L474A/A536V/E699V/L792F, G409S, E443A, L448V, D381E, Y707W, D381K, A457Y, A416S, L474A/E475A/P662S, K79R/H395S/L474A/E475A/A536V/L792F, L474A/E475A/A536V/P662S, P382C, A257V/L474A/A536V/R562K/P662S, A257V/H395S/L474A/E475A/L792F, K79R/L474A/P662S/E699V, G725V, R706I, P447R, Y697L, K79R/A257V/E699V, E701M, A257V/L474A/E475A/A536V/R562K/P662S, A702V, E342G/A716L, R233K/R562K/K713G, I704V, L474A/E475A/A536V/R562K/P662S, H454F, K327E/Q427T, A257V/E316G/L474A/A536V/L792F, Q427D, A370G, E417R, L425T, A536V/R562K, V714I, R233H, L392T, G303T/E613H, Y697A, V378L, Q427H, P21A/K79A/G303T/R562K/E613H, A370S, A457N, K79R/R562K, E435P, A257V/A536V/E699V/L792F, K79R/A536V, A453S/P667T, K79A/G303T/A338V/E613H/E804R/A812S, K79R/A257V/H395S/A536V/P662S/L792F, K79A/A338V/R562K, K79R/A257V/E699V, K79R/R233K/G303T/P662S, K79R/P662S/E699V, K79R/H395S/E475A/P662S, I704V, K79R/A536V/R562K/E699V, A536V/P662S, P21A/K79A/A338V/R641A/E699V, P662S, P21A/K79A/Q442G/E699V, K79A/G303T/P662S, K79R/V178L/A257V/P662S/E699V, K79R/A257V/A536V/R562K/P662S, R562K/E699V, K359G/E613H/P742K/E808Y/A812S, P21N/K79A/A338V/A379G/R562K/P662S/E804R/A812S, L448V, V731I, P21N/K79R/K359G/Q442G/P662S, K79A/A338V/K359V/R562K, P21N/E613H/P662S/P742K, P21A/K79A/G303T/P662S/E699V/P742K/E808Y, P21A/K79A/A338V/Q442G/E613H/E699V, K79A/G303T/A338V/R562K/E613H/P662S, G303T/A338V/R562K/E699V/E808W/A812S, K79R/A257V, A257V/P662S/L792F, K79R/A536V/E699V, K79A/K359G/K713G/P742K/E808W, P21A/K359G/Q442G/E808W/A812S, K79R/A257V/E475A/A536V/P662S, P21N/K79A/A338V, K79A/K713G, A457R, K79A/R562K/R641A, L392C, A373T, K79R/V178L/A257V/E316G/A536V/P662S, P21N/R233K/A338V/R562K/P662S, A257V/E316G/A536V, P21N/K79R/G303T/Q442G/P662S, P21N/K79R/R233K/G303T/A338V/A379G/R562K/K713G, A338V/Q442G/E699V, F426T, P21A/A338V/K359G/E808Y/A812S, K79A/V178L/R233K/Q442G/R562K/A812S, K79R/L474A/A536V/P662S/E699V, Y697I, A390S, P21A/K79A/A338V/A379G/P662S, T721M, P21A/K79A/R233K/A338V/E613H/R641A, L374V, A338V/K359G/A379G, R461L, V451L, R715L, K79R/G303T/A338V/R641A/K713G, L393W, L372Y, K79R/A257V/L474A/A536V/E699V, P431R, H454G, K79R, L437S, A257V/A536V/R562K/P662S, V731T, R706V, L448T, P21A/K79A/A379G/Q442G/R562K/P662S, A457Y, R362M, E410W, H454D, A338V/A812S, P21N/K79R/A338V, P21A/P662S/E808Y/A812S, E435K, P21A/G303T/A338V, V378S, V378C, Q427L, R418K, A338V/Q442G, T721N, S449A, A457W, S449G, A379G/R641A, E410V, P431L, E316G/A536V/R562K, A257V/A536V/L792F, P21N/K79R/Q442G/E613H, A536V, A257V/A536V/P662S/L792F, P431V, R362P, A257V/L474A/A529S/A536V/P662S, P382S, T412V, P447S, K79R/A257V/A536V/P662S/E699V, L392T, R461S, T412Q, A257V/E316G/E475A/A536V/L792F, L438S, L388C, L380I/H454L, P447R, P21N/K79R/R233K/G303T/E613H/E699V/E809K, E724F, R461Q, P21A/K79R/A338V/E613H, K79R/V178L/A536V/L792F, R715H, A390T, S449G/R747S, S449V, L374S, R362S, P21A/K79R/A379G/E613H/K713G, K79R/E316G/A536V/P662S/E699V, A370S, E417W, E376F, L393R, P21N/R562K/P662S, K79R/A257V/D262N/A536V/R562K/E699V, I718Q, H395S/E475A/A536V/R562K/P662S/E699V, S449L, L388M, K79R/R233K/A338V/K359G/A379G/Q442G/R562K/E613H/A812S, R233K, V371L, E376S, E316G/E475A/R562K/P662S/L792F, A702S, K79R/A257V/E316G/L792F, A373G, H454W, R728S, P447W, K79R/R233K/A338V, L437P, R432T, K79R/V178L/A257V/E316G/H395S/A536V/P662S/E699V, K79R/G303T/K713G, 1718F, A453L, Q427F, R233K/A379G/Q442G/R562K/E613H/P662S/K713G, P21A/P742K, E732L, L392S, L388P, L393S, L437N, L392A, L393G, T412M, K79R/A257V/H395S/R562K/P662S/E699V, P21A/R233K/A338V/A379G/Q442G/R562K/E613H/P662S/A812S, Q427Y, E732Q, L429F, R562K/E699V, H2-/L374Y, E723Y, S434N, L388V, L420V, E699V, Q427I, or E724L, wherein the positions are relative to the reference sequence corresponding to SEQ ID NO: 546.

[0190] In some embodiments, the engineered DNA polymerase comprises an amino acid sequence having at least 80%, 85%, 86%, 87%, 88%, 89%, 90%, 91%, 92%, 93%, 94%, 95%, 96%, 97%, 98%, 99%, or more sequence identity to the reference sequence corresponding to residues 12 to 844 of SEQ ID NO: 710, or to the reference sequence corresponding to SEQ ID NO: 710, wherein the amino acid sequence comprises one or more mutations relative to the reference sequence corresponding to residues 12 to 844 of SEQ ID NO: 710, or relative to the reference sequence corresponding to SEQ ID NO: 710.

[0191] In some embodiments, the engineered DNA polymerase comprises an amino acid sequence having at least 80%, 85%, 86%, 87%, 88%, 89%, 90%, 91%, 92%, 93%, 94%, 95%, 96%, 97%, 98%, 99%, or more sequence identity to the reference sequence corresponding to residues 12 to 844 of an even-numbered SEQ ID NO. of SEQ ID NOs: 1192-1326, or to the reference sequence corresponding to an even-numbered SEQ ID NO. of SEQ ID NOs: 1192-1326, wherein the amino acid sequence comprises one or more mutations relative to the reference sequence corresponding to residues 12 to 844 of SEQ ID NO: 710, or relative to the reference sequence corresponding to SEQ ID NO: 710.

[0192] In some embodiments, the amino acid sequence of the engineered DNA polymerase comprises at least a mutation or mutation set at amino acid position(s) 68, 78, 466, 807, 612, 147, 356, 488, 603, 271, 508, 787, 412/417/427, 251, 697, 562, 79/434/562, 820, 275, 378/381/697, 469, 412/417/697, 798, 79/388,651, 825, 51, 370, 745, 815, 465, 317, 569, 341, 824, 18, 181, 735, or 336, wherein the positions are relative to the reference sequence corresponding to SEQ ID NO: 710. In some embodiments, the amino acid sequence of the engineered DNA polymerase comprises at least a mutation or mutation set 68R, 78S, 68K, 466Y, 807M, 612D, 68E, 68T, 147H, 356S, 488W, 603R, 681, 147Q, 271G, 508K, 787N, 412R/417W/427H, 356I, 78T, 251I, 6971, 68G, 562K, 79R/434N/562K, 820T, 275T, 378F/381E/697L, 469V, 820S, 412R/417W/697L, 798I, 79R/388V, 469T, 651Q, 825E, 51T, 787M, 370V, 745V, 815T, 745S, 465Y, 603M, 78N, 317R, 251A, 815R, 68T, 569Q, 147A, 341T, 824M, 78V, 68Q, 251L, 181R, 820E, 181Q, 147M, 275A, 569M, 735L, 341Y, 336E, 341H, 815L, or 815S, wherein the positions are relative to the reference sequence corresponding to SEQ ID NO: 710. In some embodiments, the amino acid sequence of the engineered DNA polymerase comprises at least a mutation or mutation set D68R, A78S, D68K, L466Y, A807M, E612D, D68E, D68T, C147H, A356S, L488W, Q603R, D681, C147Q, A271G, E508K, G787N, T412R/E417W/Q427H, A356I, A78T, R251I, Y6971, D68G, R562K, K79R/S434N/R562K, N820T, R275T, V378F/D381E/Y697L, A469V, N820S, T412R/E417W/Y697L, L798I, K79R/L388V, A469T, T651Q, D825E, VSIT, G787M, A370V, T745V, K815T, T745S, P465Y, Q603M, A78N, G317R, R251A, K815R, D68T, G569Q, C147A, A341T, L824M, A78V, D68Q, R251L, K181R, N820E, K181Q, C147M, R275A, G569M, F735L, A341Y, A336E, A341H, K815L, or K815S, wherein the positions are relative to the reference sequence corresponding to SEQ ID NO: 710.

[0193] In some embodiments, the engineered DNA polymerase comprises an amino acid sequence having at least 80%, 85%, 86%, 87%, 88%, 89%, 90%, 91%, 92%, 93%, 94%, 95%, 96%, 97%, 98%, 99%, or more sequence identity to the reference sequence corresponding to residues 12 to 844 of SEQ ID NO: 1208, or to the reference sequence corresponding to SEQ ID NO: 1208, wherein the amino acid sequence comprises one or more mutations relative to the reference sequence corresponding to residues 12 to 844 of SEQ ID NO: 1208, or relative to the reference sequence corresponding to SEQ ID NO: 1208.

[0194] In some embodiments, the engineered DNA polymerase comprises an amino acid sequence having at least 80%, 85%, 86%, 87%, 88%, 89%, 90%, 91%, 92%, 93%, 94%, 95%, 96%, 97%, 98%, 99%, or more sequence identity to the reference sequence corresponding to residues 12 to 844 of an even-numbered SEQ ID NO. of SEQ ID NOs: 1328-1378, or to the reference sequence corresponding to an even-numbered SEQ ID NO. of SEQ ID NOs: 1328-1378, wherein the amino acid sequence comprises one or more mutations relative to the reference sequence corresponding to residues 12 to 844 of SEQ ID NO: 1208, or relative to the reference sequence corresponding to SEQ ID NO: 1208.

[0195] In some embodiments, the amino acid sequence of the engineered DNA polymerase comprises at least a mutation or mutation set at amino acid position(s) 68/251/603/612/798, 68/603, 68/78/370, 370, 251/798, 68/370/603/612, 51/370/412/603/612, 412/603/798, 251/370/412/612, 370/798, 78/251,251, 68/370/508/798, 251/370/508, 78/508, 78/370/697/798, 51/251, 68/370/508/603/697, 78/251/370/697/798, 78/603/798/831, 370/412/508/612, 72/508/798, 51/251/412/798, 51/251/370/508/603/798, 68/78/251/370/603/612/697, or 51/68/251/370/603, wherein the positions are relative to the reference sequence corresponding to SEQ ID NO: 1208. In some embodiments, the amino acid sequence of the engineered DNA polymerase comprises at least a mutation or mutation set 68R/251I/603M/612D/798I, 68R/603M, 68R/78N/370V, 370V, 251I/798I, 68G/370V/603M/612D, 51T/370V/412R/603M/612D, 412R/603M/798I, 251I/370V/412R/612D, 370V/798I, 78N/251I, 251I, 68R/370V/508K/798I, 251I/370V/508K, 78N/508K, 78N/370V/697L/798I, 51T/251I, 68G/370V/508K/603M/697L, 78N/251I/370V/697L/798I, 78N/603M/798I/831G, 370V/412R/508K/612D, 72A/508K/798I, 51T/251I/412R/798I, 51T/251I/370V/508K/603M/798I, 68G/78N/251I/370V/603M/612D/697L, or 51T/68T/251I/370V/603M, wherein the positions are relative to the reference sequence corresponding to SEQ ID NO: 1208. In some embodiments, the amino acid sequence of the engineered DNA polymerase comprises at least a mutation or mutation set D68R/R251I/Q603M/E612D/L798I, D68R/Q603M, D68R/A78N/A370V, A370V, R251I/L798I, D68G/A370V/Q603M/E612D, V51T/A370V/T412R/Q603M/E612D, T412R/Q603M/L798I, R251I/A370V/T412R/E612D, A370V/L798I, A78N/R251I, R251I, D68R/A370V/E508K/L798I, R251I/A370V/E508K, A78N/E508K, A78N/A370V/Y697L/L798I, V51T/R251I, D68G/A370V/E508K/Q603M/Y697L, A78N/R251I/A370V/Y697L/L798I, A78N/Q603M/L798I/E831G, A370V/T412R/E508K/E612D, V72A/E508K/L798I, V51T/R251I/T412R/L798I, V51T/R251I/A370V/E508K/Q603M/L798I, D68G/A78N/R251I/A370V/Q603M/E612D/Y697L, or V51T/D68T/R251I/A370V/Q603M, wherein the positions are relative to the reference sequence corresponding to SEQ ID NO: 1208.

[0196] In some embodiments, the amino acid sequence of the engineered DNA polymerase comprises at least one mutation provided in Tables 4.1, 5.1, 5.2, 6.1, 6.2, 7.1, 7.2, 8.1, 8.2, 9.1, 9.2, 9.3, 10.1, 10.2, 11.1, and 11.2, relative to the reference sequence of SEQ ID NO: 2, 220, 226, 272, 328, 546, 710, or 1208.

[0197] In some embodiments, the amino acid sequence of the engineered DNA polymerase comprises at least a mutation or mutation set as provided in Tables 4.1, 5.1, 5.2, 6.1, 6.2, 7.1, 7.2, 8.1, 8.2, 9.1, 9.2, 9.3, 10.1, 10.2, 11.1, and 11.2, relative to the reference sequence corresponding to SEQ ID NO: 2, 220, 226, 272, 328, 546, 710, or 1208.

[0198] In some embodiments, the engineered DNA polymerase comprises an amino acid sequence having least 80%, 85%, 86%, 87%, 88%, 89%, 90%, 91%, 92%, 93%, 94%, 95%, 96%, 97%, 98%, 99% or more sequence identity to an amino acid sequence comprising a mutation or mutation set as provided in Tables 4.1, 5.1, 5.2, 6.1, 6.2, 7.1, 7.2, 8.1, 8.2, 9.1, 9.2, 9.3, 10.1, 10.2, 11.1, and 11.2.

[0199] In some embodiments, the engineered DNA polymerase comprises an amino acid sequence having least 80%, 85%, 86%, 87%, 88%, 89%, 90%, 91%, 92%, 93%, 94%, 95%, 96%, 97%, 98%, 99% or more sequence identity to the sequence comprising residues 12 to 844 of an engineered DNA polymerase set forth in Tables 4.1, 5.1, 5.2, 6.1, 6.2, 7.1, 7.2, 8.1, 8.2, 9.1, 9.2, 9.3, 10.1, 10.2, 11.1, and 11.2, or to the sequence comprising an engineered DNA polymerase set forth in Tables 4.1, 5.1, 5.2, 6.1, 6.2, 7.1, 7.2, 8.1, 8.2, 9.1, 9.2, 9.3, 10.1, 10.2, 11.1, and 11.2.

[0200] In some embodiments, the engineered DNA polymerase comprises an amino acid sequence having at least 80%, 85%, 86%, 87%, 88%, 89%, 90%, 91%, 92%, 93%, 94%, 95%, 96%, 97%, 98%, 99% or more sequence identity to the sequence corresponding to residues 12 to 844 of an even numbered SEQ ID NO. of SEQ ID NOs: 4-1378, or to the sequence corresponding to an even numbered SEQ ID NO. of SEQ ID NOs: 2-1378.

[0201] In some embodiments, the engineered DNA polymerase comprises an amino acid sequence comprising residues 12 to 844 of an even numbered SEQ ID NO. of SEQ ID NOs: 4-1378, or an amino acid sequence comprising an even numbered SEQ ID NO. of SEQ ID NOs: 2-1378. In some embodiments, the amino acid sequence of the engineered DNA polymerase optionally includes 1, 2, 3, 4, 5, 6, 7, 8, 9, or up to 10 substitutions, insertions, and/or deletions. In some embodiments, the amino acid sequence of the engineered DNA polymerase optionally includes 1, 2, 3, 4, 5, 6, 7, 8, 9, or up to 10 substitutions. In some embodiments, the amino acid sequence of the engineered DNA polymerase optionally includes 1, 2, 3, 4, or 5 substitutions, insertions, and/or deletions. In some embodiments, the amino acid sequence of the engineered DNA polymerase optionally includes 1, 2, 3, 4, or 5 substitutions. In some embodiments, the substitutions comprises non-conservative and/or conservative substitutions. In some embodiments, the substitutions comprises conservative substitutions. In some embodiments, the substitutions comprises non-conservative substitutions. In some embodiments, guidance on non-conservative and conservative substitutions are provided by the variants disclosed herein.

[0202] In some embodiments, the engineered DNA polymerase comprises an amino acid sequence comprising residues 12 to 844 of an even numbered SEQ ID NO. of SEQ ID NOs: 4-220, 222-268, 270-320, 322-538, 540-674, 676-1190, 1192-1326, or 1328-1378, or the amino acid sequence comprising an even numbered SEQ ID NO. of SEQ ID NOs: 2-220, 222-268, 270-320, 322-538, 540-674, 676-1190, 1192-1326, and 1328-1378. In some embodiments, the amino acid sequence of the engineered DNA polymerase optionally includes 1, 2, 3, 4, 5, 6, 7, 8, 9, or up to 10 substitutions, insertions, and/or deletions. In some embodiments, the amino acid sequence of the engineered DNA polymerase includes 1, 2, 3, 4, 5, 6, 7, 8, 9, or up to 10 substitutions. In some embodiments, the amino acid sequence of the engineered DNA polymerase optionally includes 1, 2, 3, 4, or 5 substitutions, insertions, and/or deletions. In some embodiments, the amino acid sequence of the engineered DNA polymerase optionally includes 1, 2, 3, 4, or 5 substitutions. In some embodiments, the substitutions comprises non-conservative or conservative substitutions. In some embodiments, the substitutions comprises conservative substitutions. In some embodiments, the substitutions comprises non-conservative substitutions.

[0203] In some embodiments, the engineered DNA polymerase comprises an amino acid sequence comprising residues 12 to 844 of SEQ ID NO: 220, 226, 272, 328, 546, 710, or 1208, or an amino acid sequence comprising SEQ ID NO: 2, 220, 226, 272, 328, 546, 710, or 1208. In some embodiments, the amino acid sequence of the engineered DNA polymerase optionally includes 1, 2, 3, 4, 5, 6, 7, 8, 9, or up to 10 substitutions, insertions, and/or deletions. In some embodiments, the amino acid sequence of the engineered DNA polymerase includes 1, 2, 3, 4, 5, 6, 7, 8, 9, or up to 10 substitutions. In some embodiments, the amino acid sequence of the engineered DNA polymerase optionally includes 1, 2, 3, 4, or 5 substitutions, insertions, and/or deletions. In some embodiments, the amino acid sequence of the engineered DNA polymerase optionally includes 1, 2, 3, 4, or 5 substitutions. In some embodiments, the engineered DNA polymerase includes 1, 2, 3, or 4 substitutions in the amino acid sequence.

[0204] In some embodiments, the engineered DNA polymerase is provided as a fusion protein. In some embodiments, the engineered DNA polymerase described herein can be fused to a variety of polypeptide sequences, such as, by way of example and not limitation, polypeptide tags that can be used for detection and/or purification. In some embodiments, the fusion protein of the engineered DNA polymerase comprises a glycine-histidine or histidine-tag (His-tag). In some embodiments, the fusion protein of the engineered DNA polymerase comprises an epitope tag, such as c-myc, FLAG, V5, or hemagglutinin (HA). In some embodiments, the fusion protein of the engineered DNA polymerase comprises a GST, SUMO, Strep, MBP, or GFP tag. In some embodiments, the fusion is to the amino (N-) terminus of engineered DNA polymerase polypeptide. In some embodiments, the fusion is to the carboxy (C-) terminus of the engineered DNA polymerase polypeptide.

[0205] In some embodiments, the engineered DNA polymerase of the present disclosure has DNA polymerase activity. In some embodiments, the engineered DNA polymerase has at least one improved or enhanced property as compared to a reference DNA polymerase.

[0206] In some embodiments, the engineered DNA polymerase has increased activity as compared to the reference DNA polymerase. In some embodiments, the engineered DNA polymerase has at least about 1.1-fold, 1.2-fold, 1.3-fold, 1.4-fold, 1.5, 2-fold, 3-fold, 4-fold, 5-fold, 10-fold, 15-fold, or 20- or more increase in activity than the reference DNA polymerase.

[0207] In some embodiments, the engineered DNA polymerase has increased stability as compared to the reference DNA polymerase. In some embodiments, the engineered DNA polymerase has increased thermostability as compared to the reference DNA polymerase.

[0208] In some embodiments, the engineered DNA polymerase has increased processivity as compared to the reference DNA polymerase. In some embodiments, the engineered DNA polymerase has increased fidelity as compared to the reference DNA polymerase.

[0209] In some embodiments, the engineered DNA polymerase has increased input DNA template sensitivity as compared to the reference DNA polymerase. In some embodiments, the engineered DNA polymerase has increased product yield, for example in a PCR reaction, as compared to the reference DNA polymerase. In some embodiments, the engineered DNA polymerase has increased product yield with about 25, about 50, about 100, about 150, about 200, about 250, about 300, about 350, about 400, about 450, or about 500 copies of input target DNA as compared to the reference DNA polymerase (e.g., as provided in the Examples).

[0210] In some embodiments, the engineered DNA polymerase has increased resistance or tolerance to inhibitor(s), for example guanidine isothiocyanate (GITC), as compared to the reference DNA polymerase.

[0211] In some embodiments, the reference DNA polymerase comprises a sequence corresponding to residues 12 to 844 of SEQ ID NO: 2 or a sequence corresponding to SEQ ID NO: 2, 220, 226, 272, 328, 546, 710, or 1208. In some embodiments, the reference DNA polymerase has an amino acid sequence corresponding to residues 12 to 844 of SEQ ID NO: 2 or the amino acid sequence corresponding to SEQ ID NO: 2.

[0212] In some embodiments, the engineered DNA polymerase has one or more improved properties selected from i) increased activity, ii) increased stability, iii) increased thermostability, iv) increased processivity, v) increased fidelity, vi) increased input DNA template sensitivity, vii) increased product yield, and viii) increased resistance or tolerance to inhibitor(s), or any combination of i), ii), iii), vi), v), vi), vii), and viii) as compared to a reference DNA polymerase. In some embodiments, the reference DNA polymerase has the amino acid sequence corresponding to residues 12 to 844 of SEQ ID NO: 2, or the amino acid sequence corresponding to SEQ ID NO: 2, 220, 226, 272, 328, 546, 710, or 1208. In some embodiments, the reference DNA polymerase has the amino acid sequence corresponding to residues 12 to 844 of SEQ ID NO: 2 or the amino acid sequence corresponding to SEQ ID NO: 2. In some embodiments, specific improvements in DNA polymerase properties are provided in the Examples.

[0213] In some embodiments, the engineered DNA polymerase polypeptide described herein is an isolated composition. In some embodiments, the engineered DNA polymerase polypeptide is purified, as further discussed herein.

[0214] In some embodiments, the present disclosure further provides functional fragments or biologically active fragments of engineered DNA polymerase polypeptides described herein. Thus, for each and every embodiment herein of an engineered DNA polymerase, a functional fragment or biologically active fragment of the engineered DNA polymerase is provided herewith. In some embodiments, a functional fragment or biologically active fragments of an engineered DNA polymerase comprises at least about 90%, at least about 95%, at least about 96%, at least about 97%, at least about 98%, or at least about 99% of the activity of the DNA polymerase polypeptide from which it was derived (i.e., the parent DNA polymerase). In some embodiments, functional fragments or biologically active fragments comprise at least 90%, 91%, 92%, 93%, 94%, 95%, 96%, 97%, 98%, or 99% of the parent sequence of the DNA polymerase. In some embodiments, the functional fragment will be truncated by less than 5, less than 10, less than 15, less than 10, less than 2S, less than 30, less than 35, less than 40, less than 45, less than 50 amino acids, less than 55 amino acids, less than 60 amino acids, less than 65 amino acids, or less than 70 amino acids.

[0215] In some embodiments, the functional fragments or biologically active fragments of the engineered DNA polymerase polypeptide described herein include at least a mutation or mutation set in the amino acid sequence of the engineered DNA polymerase described herein. Accordingly, in some embodiments, the functional fragments or biologically active fragments of the engineered DNA polymerase display the enhanced or improved property associated with the mutation or mutation set in the parent DNA polymerase.

### Polynucleotides Encoding Engineered Polypeptides, Expression Vectors and Host Cells

[0216] In another aspect, the present disclosure provides recombinant polynucleotides encoding the engineered DNA polymerases described herein. In some embodiments, the recombinant polynucleotides are operatively linked to one or more heterologous regulatory sequences that control gene expression to create a recombinant polynucleotide construct capable of expressing the DNA polymerase. In some embodiments, an expression construct containing at least one heterologous polynucleotide encoding the engineered DNA polymerase polypeptide(s) is introduced into appropriate host cells to express the corresponding DNA polymerase polypeptide(s).

[0217] As will be apparent to the skilled artisan, availability of a protein sequence and the knowledge of the codons corresponding to the various amino acids provide a description of all the polynucleotides capable of encoding the subject polypeptides. The degeneracy of the genetic code, where the same amino acids are encoded by alternative or synonymous codons, allows an extremely large number of nucleic acids to be made, all of which encode an engineered DNA polymerase of the present disclosure. Thus, the present disclosure provides methods and compositions for the production of each and every possible variation of polynucleotides that could be made that encode the engineered DNA polymerase polypeptides described herein by selecting combinations based on the possible codon choices, and all such polynucleotide variations are to be considered specifically disclosed for any engineered DNA polymerase polypeptide described herein, including the amino acid sequences presented in the Examples (e.g., in Tables 4.1, 5.1, 5.2, 6.1, 6.2, 7.1, 7.2, 8.1, 8.2, 9.1, 9.2, 9.3, 10.1, 10.2, 11.1, and 11.2) and in the Sequence Listing.

[0218] In some embodiments, the codons are preferably optimized for utilization by the chosen host cell for protein production. In some embodiments, preferred codons in bacteria are used for expression in bacteria. In some embodiments, preferred codons in fungal cells are used for expression in fungi. In some embodiments, preferred codons in mammalian cells are used for expression in mammalian cells. In some embodiments, codon optimized polynucleotides encoding an engineered DNA polymerase polypeptide described herein contain preferred codons at about 40%, 50%, 60%, 70%, 80%, 90%, or greater than 90% of the codon positions in the full length coding region.

[0219] In some embodiments, the recombinant polynucleotide comprises a polynucleotide sequence encoding an engineered DNA polymerase comprising an amino acid sequence having at least 80%, 85%, 86%, 87%, 88%, 89%, 90%, 91%, 92%, 93%, 94%, 95%, 96%, 97%, 98%, 99% or more sequence identity to a reference sequence corresponding to residues 12 to 844 of SEQ ID NO: 2, 220, 226, 272, 328, 546, 710, or 1208, or to a reference sequence corresponding to SEQ ID NO: 2, 220, 226, 272, 328, 546, 710, or 1208, wherein the amino acid sequence comprises one or more mutations relative to the reference sequence corresponding to residues 12 to 844 of SEQ ID NO: 2, 220, 226, 272, 328, 546, 710, or 1208, or relative to a reference sequence corresponding to SEQ ID NO: 2, 220, 226, 272, 328, 546, 710, or 1208.

[0220] As described above, in some embodiments, the recombinant polynucleotide comprises a polynucleotide sequence encoding an engineered DNA polymerase comprising an amino acid sequence having at least 80%, 85%, 86%, 87%, 88%, 89%, 90%, 91%, 92%, 93%, 94%, 95%, 96%, 97%, 98%, 99%, or more sequence identity to the reference sequence corresponding to residues 12 to 844 of SEQ ID NO: 2, or to the reference sequence corresponding to SEQ ID NO: 2, wherein the amino acid sequence comprises one or more mutations relative to the reference sequence corresponding to residues 12 to 844 of SEQ ID NO: 2, or relative to the reference sequence corresponding to SEQ ID NO: 2.

[0221] In some embodiments, the recombinant polynucleotide comprises a polynucleotide sequence encoding an engineered DNA polymerase comprising an amino acid sequence having at least 80%, 85%, 86%, 87%, 88%, 89%, 90%, 91%, 92%, 93%, 94%, 95%, 96%, 97%, 98%, 99%, or more sequence identity to the reference sequence corresponding to residues 12 to 844 of SEQ ID NO: 220, 226, 272, 328, 546, 710, or 1208, or to the reference sequence corresponding to SEQ ID NO: 220, 226, 272, 328, 546, 710, or 1208, wherein the amino acid sequence comprises one or more mutations relative to the reference sequence corresponding to residues 12 to 844 of SEQ ID NO: 2, or relative to the reference sequence corresponding to SEQ ID NO: 2.

[0222] In some embodiments, the recombinant polynucleotide comprises a polynucleotide sequence encoding an engineered DNA polymerase comprising an amino acid sequence having at least 80%, 85%, 86%, 87%, 88%, 89%, 90%, 91%, 92%, 93%, 94%, 95%, 96%, 97%, 98%, 99% or more sequence identity to the sequence corresponding to residues 12 to 844 of an even numbered SEQ ID NO. of SEQ ID NOs: 4-1378, or to the sequence corresponding to an even numbered SEQ ID NO. of SEQ ID NOs: 2-1378, wherein the amino acid sequence comprises one or more mutations relative to the reference sequence corresponding to residues 12 to 844 of SEQ ID NO: 2 or relative to the reference sequence corresponding to SEQ ID NO: 2.

[0223] In some embodiments, the recombinant polynucleotide comprises a polynucleotide sequence encoding an engineered DNA polymerase comprising an amino acid sequence comprising at least a mutation at amino acid position 2, 3, 21, 39, 51, 59, 66, 68, 72, 73, 78, 79, 87, 124, 147, 178, 181, 185, 199, 216, 224, 233, 239, 241, 251, 257, 262, 271, 275, 288, 291, 303, 316, 317, 327, 328, 336, 338, 341, 342, 351, 356, 359, 362, 365, 368, 370, 371, 372, 373, 374, 376, 377, 378, 379, 380, 381, 382, 388, 390, 392, 393, 395, 396, 398, 399, 402, 403, 404, 409, 410, 412, 413, 416, 417, 418, 420, 425, 426, 427, 429, 430, 431, 432, 434, 435, 437, 438, 442, 443, 447, 448, 449, 450, 451, 453, 454, 457, 461, 465, 466, 469, 473, 474, 475, 477, 478, 479, 482, 483, 488, 490, 503, 508, 514, 515, 516, 526, 527, 528, 529, 536, 541, 542, 544, 545, 550, 554, 557, 558, 559, 562, 569, 575, 577, 578, 579, 589, 594, 601, 603, 604, 612, 613, 641, 644, 651, 656, 660, 662, 663, 664, 667, 671, 677, 685, 687, 691, 694, 697, 698, 699, 701, 702, 704, 706, 707, 708, 713, 714, 715, 716, 718, 721, 723, 724, 725, 728, 731, 732, 735, 740, 742, 743, 745, 747, 748, 749, 753, 758, 760, 762, 768, 769, 770, 787, 792, 798, 804, 807, 808, 809, 812, 815, 820, 824, 825, or 831, or combinations thereof, wherein the positions are relative to the reference sequence corresponding to SEQ ID NO: 2.

[0224] In some embodiments, the recombinant polynucleotide comprises a polynucleotide sequence encoding the engineered DNA polymerase comprising an amino acid sequence comprising at least a mutation at amino acid position 147, 257, 291, 395, 402, 474, 475, 478, 514, 515, 526, 527, 528, 536, 559, 604, 660, 662, 687, 745, or 760, or combinations thereof, wherein the positions are relative to the reference sequence corresponding to SEQ ID NO: 2.

[0225] In some embodiments, the recombinant polynucleotide comprises a polynucleotide sequence encoding the engineered DNA polymerase comprising an amino acid sequence comprising at least a mutation at amino acid position 478, 515, 526, 527, or 528, or combinations thereof, wherein the positions are relative to the reference sequence corresponding to SEQ ID NO: 2.

[0226] In some embodiments, the recombinant polynucleotide comprises a polynucleotide sequence encoding the engineered DNA polymerase comprising an amino acid sequence comprising at least a mutation at amino acid position 402, 478, 515, 526, 527, 528, 559, 604, 660, or 760, or combinations thereof, wherein the positions are relative to SEQ ID NO: 2.

[0227] In some embodiments, the recombinant polynucleotide comprises a polynucleotide sequence encoding the engineered DNA polymerase comprising an amino acid sequence comprising at least a mutation at amino acid position 478, 515, 526, 527, 528, 559, or 760, or combinations thereof, wherein the positions are relative to SEQ ID NO: 2.

[0228] In some embodiments, the recombinant polynucleotide comprises a polynucleotide sequence encoding the engineered DNA polymerase comprising an amino acid sequence comprising at least a mutation or mutation set at amino acid position(s) 541/554/557, 516/541/550/554/557, 478/514/526/527, 478/516/526/527/529/541, 288/478/514/516/541/557, 288/478/516/541/550/554/557, 550/554/557, 478, 399, 514/516, 399/516/526/528/529/554/557, 478/516/541, 478/541, 288/399/514/554/557, 478/514/554/557, 288/478/526/550/554, 478/541/550/557, 541, 288/514/526/541, 554/557, 399/478, 288/514/554/557, 478/514/516/526/527/529/557, 399/541/550/554, 516/529/541/554/557, 478/541/554/557, 288/478/526/528/529/554/557, 288/514/516/529/541, 478/514/516/541, 478/514/557, 399/541/557, 399/541, 288/399/516/527/541/557, 288/478/514/541, 288/514/516, 664/698, 399/478/516/541, 399/528/550, 399/478/514/541/557, 288/478/514/516, 224/664, 478/526/527/528, 288/478/514/516/541/550/554, 478/514/541/554, 478/516, 478/514/516/541/554/557, 288/399/478/516/541, 288/478/514/554/557, 288/478/516, 288/399/516/554/557, 550/554, 288/550/554, 288/399/478/516/550/554, 399/514/541/550/554, 288/478/514/554, 199, 288/399/529/541, 399/478/554, 516/528/541/554/557, 39/199/698, 399/478/526/528/529, 288/399/514/541/550/554, 288/541, 288/478/514/550/554/557, 288/399/478/516, 526/529/554/557, 288/478/557, 288/478/514/550/554, 478/541/550/554, 516/526/528, 288/526/528/550/554/557, 199/664/698, 514/526/528/529/550/557, 288, 399/554/557, 288/554/557, 399/514/541, 288/478/514/527/554/557, 399/478/516/541/554, 87/541/554, 288/550/554/557, 527/529/541, 528/529/554, 478/554/557, 478/514/516/541/550/554/557, 199/216/644/664, 396/478/514/554/557/694, 241/644/663/664, 399/478/554/557, 288/399/550, 288/516/526/527/528/557, 399/526/527/528/529, 288/478/526, 399/478/514/516/526/527/528/529/541, 288/399/478/514/554/557, 288/399/514/516/528, 478/554, 399/514/516, 514, 399/550/554, 288/478/514/528/541/554, 478/514/516/554, 478/514/541, 288/541/554/557, 698, or 478/514/526/527/528, wherein the positions are relative to the reference sequence corresponding to SEQ ID NO: 2.

[0229] In some embodiments, the recombinant polynucleotide comprises a polynucleotide sequence encoding the engineered DNA polymerase comprising an amino acid sequence comprising at least a mutation set at amino acid position 478/514/515/526/527/528, 478/514/526/527/528/594, 478/514/526/527/528/559, 478/514/526/527/528/760, 478/514/526/527/528/541, 478/514/526/527/528/753, 402/478/514/526/527/528, 398/478/514/526/527/528, 478/514/526/527/528/758, 399/478/514/526/527/528, 478/514/526/527/528/575, 257/478/514/526/527/528/758, 478/514/526/527/528/558, 478/514/526/527/528/601, 478/514/526/527/528/762, 478/514/526/527/528/589, or 478/514/526/527/528/544, wherein the positions are relative to the reference sequence corresponding to SEQ ID NO: 2.

[0230] In some embodiments, the recombinant polynucleotide comprises a polynucleotide sequence encoding the engineered DNA polymerase comprising an amino acid sequence comprising at least a mutation or mutation set provided in Tables 6.1 and 6.2, wherein the positions are relative to the reference sequence corresponding to SEQ ID NO: 2.

[0231] In some embodiments, the recombinant polynucleotide comprises a polynucleotide sequence encoding the engineered DNA polymerase comprising an amino acid sequence comprising at least a mutation or mutation set provided in Tables 7.1 and 7.2, wherein the positions are relative to the reference sequence corresponding to SEQ ID NO: 2.

[0232] In some embodiments, the recombinant polynucleotide comprises a polynucleotide sequence encoding the engineered DNA polymerase comprising an amino acid sequence comprising at least a mutation or mutation set provided in Tables 8.1 and 8.2, wherein the positions are relative to the reference sequence corresponding to SEQ ID NO: 2.

[0233] In some embodiments, the recombinant polynucleotide comprises a polynucleotide sequence encoding the engineered DNA polymerase comprising an amino acid sequence comprising at least a mutation or mutation set provided in Tables 9.1, 9.2, and 9.3, wherein the positions are relative to the reference sequence corresponding to SEQ ID NO: 2.

[0234] In some embodiments, the recombinant polynucleotide comprises a polynucleotide sequence encoding the engineered DNA polymerase comprising an amino acid sequence comprising at least a mutation or mutation set provided in Tables 10.1 and 10.2, wherein the positions are relative to the reference sequence corresponding to SEQ ID NO: 2.

[0235] In some embodiments, the recombinant polynucleotide comprises a polynucleotide sequence encoding the engineered DNA polymerase comprising an amino acid sequence comprising at least a mutation or mutation set provided in Tables 11.1 and 11.2, wherein the positions are relative to the reference sequence corresponding to SEQ ID NO: 2.

[0236] In some embodiments, the recombinant polynucleotide comprises a polynucleotide sequence encoding the engineered DNA polymerase comprising an amino acid sequence having at least 80%, 85%, 86%, 87%, 88%, 89%, 90%, 91%, 92%, 93%, 94%, 95%, 96%, 97%, 98%, 99%, or more sequence identity to the reference sequence corresponding to residues 12 to 844 of SEQ ID NO: 220, 226, 272, 328, 546, 710, or 1208, or to the reference sequence corresponding to SEQ ID NO: 220, 226, 272, 328, 546, 710, or 1208, wherein the amino acid sequence comprises one or more mutations relative to the reference sequence corresponding to residues 12 to 844 of SEQ ID NO: 220, 226, 272, 328, 546, 710, or 1208, or relative to the reference sequence corresponding to SEQ ID NO: 220, 226, 272, 328, 546, 710, or 1208.

[0237] In some embodiments, the recombinant polynucleotide comprises a polynucleotide sequence encoding the engineered DNA polymerase comprising an amino acid sequence having at least 80%, 85%, 86%, 87%, 88%, 89%, 90%, 91%, 92%, 93%, 94%, 95%, 96%, 97%, 98%, 99%, or more sequence identity to a reference sequence corresponding to residues 12 to 844 of an even numbered SEQ ID NO. of SEQ ID NOs: 4-1378, or to a reference sequence corresponding to an even numbered SEQ ID NO. of SEQ ID NOs: 2-1378, wherein the amino acid sequence comprises one or more mutations relative to the reference sequence corresponding to residues 12 to 844 of SEQ ID NO: 220, 226, 272, 328, 546, 710, or 1208, or relative to the reference sequence corresponding to SEQ ID NO: 220, 226, 272, 328, 546, 710, or 1208.

[0238] In some embodiments, the recombinant polynucleotide comprises a polynucleotide sequence encoding the engineered DNA polymerase comprising an amino acid sequence comprising at least a mutation at amino acid position 2, 3, 21, 39, 51, 59, 66, 68, 72, 73, 78, 79, 87, 124, 147, 178, 181, 185, 199, 216, 224, 233, 239, 241, 251, 257, 262, 271, 275, 288, 291, 303, 316, 317, 327, 328, 336, 338, 341, 342, 351, 356, 359, 362, 365, 368, 370, 371, 372, 373, 374, 376, 377, 378, 379, 380, 381, 382, 388, 390, 392, 393, 395, 396, 398, 399, 402, 403, 404, 409, 410, 412, 413, 416, 417, 418, 420, 425, 426, 427, 429, 430, 431, 432, 434, 435, 437, 438, 442, 443, 447, 448, 449, 450, 451, 453, 454, 457, 461, 465, 466, 469, 473, 474, 475, 477, 478, 479, 482, 483, 488, 490, 503, 508, 514, 515, 516, 526, 527, 528, 529, 536, 541, 542, 544, 545, 550, 554, 557, 558, 559, 562, 569, 575, 577, 578, 579, 589, 594, 601, 603, 604, 612, 613, 641, 644, 651, 656, 660, 662, 663, 664, 667, 671, 677, 685, 687, 691, 694, 697, 698, 699, 701, 702, 704, 706, 707, 708, 713, 714, 715, 716, 718, 721, 723, 724, 725, 728, 731, 732, 735, 740, 742, 743, 745, 747, 748, 749, 753, 758, 760, 762, 768, 769, 770, 787, 792, 798, 804, 807, 808, 809, 812, 815, 820, 824, 825, or 831, or combinations thereof, wherein the positions are relative to the reference sequence of SEQ ID NO: 220, 226, 272, 328, 546, 710, or 1208.

[0239] In some embodiments, the recombinant polynucleotide comprises a polynucleotide sequence encoding the engineered DNA polymerase comprising an amino acid sequence having at least 80%, 85%, 86%, 87%, 88%, 89%, 90%, 91%, 92%, 93%, 94%, 95%, 96%, 97%, 98%, 99%, or more sequence identity to the reference sequence corresponding to residues 12 to 844 of SEQ ID NO: 220, or to the reference sequence corresponding to SEQ ID NO: 220, wherein the amino acid sequence comprises one or more mutations relative to the reference sequence corresponding to residues 12 to 844 of SEQ ID NO: 220, or relative to the reference sequence corresponding to SEQ ID NO: 220.

[0240] In some embodiments, the recombinant polynucleotide comprises a polynucleotide sequence encoding the engineered DNA polymerase comprising an amino acid sequence having at least 80%, 85%, 86%, 87%, 88%, 89%, 90%, 91%, 92%, 93%, 94%, 95%, 96%, 97%, 98%, 99%, or more sequence identity to the reference sequence corresponding to residues 12 to 844 of an even-numbered SEQ ID NO of SEQ ID NOs: 222-268, or to the reference sequence corresponding to an even-numbered SEQ ID NO of SEQ ID NOs: 222-268, wherein the amino acid sequence comprises one or more mutations relative to the reference sequence corresponding to residues 12 to 844 of SEQ ID NO: 220, or relative to the reference sequence corresponding to SEQ ID NO: 220.

[0241] In some embodiments, the recombinant polynucleotide comprises a polynucleotide sequence encoding the engineered DNA polymerase comprising an amino acid sequence comprising at least a mutation or mutation set at amino acid position(s) 515, 594, 559, 760, 541, 753, 402, 398, 758, 399, 575, 257/758, 558, 601, 762, 589, or 544, wherein the positions are relative to the reference sequence corresponding to SEQ ID NO: 220.

[0242] In some embodiments, the recombinant polynucleotide comprises a polynucleotide sequence encoding the engineered DNA polymerase comprising an amino acid sequence having at least 80%, 85%, 86%, 87%, 88%, 89%, 90%, 91%, 92%, 93%, 94%, 95%, 96%, 97%, 98%, 99%, or more sequence identity to the reference sequence corresponding to residues 12 to 844 of SEQ ID NO: 226, or to the reference sequence corresponding to SEQ ID NO: 226, wherein the amino acid sequence comprises one or more mutations relative to the reference sequence corresponding to residues 12 to 844 of SEQ ID NO: 226, or relative to the reference sequence corresponding to SEQ ID NO: 226.

[0243] In some embodiments, the recombinant polynucleotide comprises a polynucleotide sequence encoding the engineered DNA polymerase comprising an amino acid sequence having at least 80%, 85%, 86%, 87%, 88%, 89%, 90%, 91%, 92%, 93%, 94%, 95%, 96%, 97%, 98%, 99%, or more sequence identity to the reference sequence corresponding to residues 12 to 844 of an even-numbered SEQ ID NO of SEQ ID NOs: 270-320, or to the reference sequence corresponding to SEQ ID NO: 270-320, wherein the amino acid sequence comprises one or more mutations relative to the reference sequence corresponding to residues 12 to 844 of SEQ ID NO: 226, or relative to the reference sequence corresponding to SEQ ID NO: 226.

[0244] In some embodiments, the recombinant polynucleotide comprises a polynucleotide sequence encoding the engineered DNA polymerase comprising an amino acid sequence comprising at least a mutation or mutation set at amino acid position(s) 515/760, 514/515/760, 478/515/760, 660, 178, 402/515, 377/515, 515, 514/515, 402, 503, 239, 73, 528/541, 59, 515/575, 3/515/559, 377/515/528/541/554/557, 402/514/515/541/559, 514/515/541/559, 514/515/559, 515/559, 515/541/559, 377/515/559, 402/515/559, or 515/541/557, wherein the positions are relative to the reference sequence corresponding to SEQ ID NO: 226.

[0245] In some embodiments, the recombinant polynucleotide comprises a polynucleotide sequence encoding the engineered DNA polymerase comprising an amino acid sequence having at least, 80%, 85%, 86%, 87%, 88%, 89%, 90%, 91%, 92%, 93%, 94%, 95%, 96%, 97%, 98%, 99%, or more sequence identity to the reference sequence corresponding to residues 12 to 844 of SEQ ID NO: 272, or to the reference sequence corresponding to SEQ ID NO: 272, wherein the amino acid sequence comprises one or more mutations relative to the reference sequence corresponding to residues 12 to 844 of SEQ ID NO: 272, or relative to the reference sequence corresponding to SEQ ID NO: 272.

[0246] In some embodiments, the recombinant polynucleotide comprises a polynucleotide sequence encoding the engineered DNA polymerase comprising an amino acid sequence having at least 80%, 85%, 86%, 87%, 88%, 89%, 90%, 91%, 92%, 93%, 94%, 95%, 96%, 97%, 98%, 99%, or more sequence identity to the reference sequence corresponding to residues 12 to 844 of an even-numbered SEQ ID NO. of SEQ ID NOs: 322-534, or to the reference sequence corresponding to an even-numbered SEQ ID NO. of SEQ ID NOs: 322-534, wherein the amino acid sequence comprises one or more mutations relative to the reference sequence corresponding to residues 12 to 844 of SEQ ID NO: 272, or relative to the reference sequence corresponding to SEQ ID NO: 272.

[0247] In some embodiments, the recombinant polynucleotide comprises a polynucleotide sequence encoding the engineered DNA polymerase comprising an amino acid sequence comprising at least a mutation or mutation set at amino acid position(s) 402/528/541/660, 257/604/660, 178/257/402/404/528/557/660, 402/604/660, 257/402/541/660, 377/402/541/660, 257/377/402/660, 483/660, 257/402, 257, 257/377, 178/660, 257/377/402, 660, 178/257/377/402/403/483/604/660, 377, 178/402/403/528/541/660, 377/601/660, 178/377, 377/490/660, 402/403/483/554/557, 178/257/377/558/660, 257/402/403/483/660, 178/554/557/558/660, 554/557/660, 178/483/541/545/554/557/604/660, 792, 402/403/483/604/660, 178, 474, 257/377/541/604, 743, 396, 479, 377/403/541/604, 475, 178/257/403/528, 448, 577, 395, 769, 691, 677, 704, 377/541/575/604/660, 178/257/601/604, 685, 377/604/660, 749, 482, 291, 579, 178/541/550/604, 477, 178/257, 257/402/490/528/541/660, 328, 740, 368, 721/745, 578, 687, 541/601/604, 257/528, 257/528/554, 768, 770, 257/377/483/541, 542, 257/402/403, 257/403/541, 604, 402/604, 257/316/541/575/604, 327, 403/541/604/660, 257/377/403/483/541/601/604, or 402/528/541/601, wherein the positions are relative to the reference sequence corresponding to SEQ ID NO: 272.

[0248] In some embodiments, the recombinant polynucleotide comprises a polynucleotide sequence encoding the engineered DNA polymerase comprising an amino acid sequence having at least 80%, 85%, 86%, 87%, 88%, 89%, 90%, 91%, 92%, 93%, 94%, 95%, 96%, 97%, 98%, 99%, or more sequence identity to the reference sequence corresponding to residues 12 to 844 of SEQ ID NO: 328, or to the reference sequence corresponding to SEQ ID NO: 328, wherein the amino acid sequence comprises one or more mutations relative to the reference sequence corresponding to residues 12 to 844 of SEQ ID NO: 328, or relative to the reference sequence corresponding to SEQ ID NO: 328.

[0249] In some embodiments, the recombinant polynucleotide comprises a polynucleotide sequence encoding the engineered DNA polymerase comprising an amino acid sequence having at least 80%, 85%, 86%, 87%, 88%, 89%, 90%, 91%, 92%, 93%, 94%, 95%, 96%, 97%, 98%, 99%, or more sequence identity to the reference sequence corresponding to residues 12 to 844 of an even-numbered SEQ ID NO. of SEQ ID NOs: 536-674, or to the reference sequence corresponding to an even-numbered SEQ ID NO of SEQ ID NOs: 536-674, wherein the amino acid sequence comprises one or more mutations relative to the reference sequence corresponding to residues 12 to 844 of SEQ ID NO: 328, or relative to the reference sequence corresponding to SEQ ID NO: 328.

[0250] In some embodiments, the recombinant polynucleotide comprises a polynucleotide sequence encoding the engineered DNA polymerase comprising an amino acid sequence comprising at least a mutation or mutation set at amino acid position(s) 475/704, 79, 257/474, 677, 562, 178/395/745, 291/395/687/745, 257/395/677, 303/338, 474/475, 359, 474/475/677/704, 395/687, 671, 233, 699, 379, 257/792, 257/395, 21, 257/448/474/475, 713, 641, 442, 656, 475/704, 742, 667, 257/448, 257/316/395/482/687/745, 804, 704, 178/257/395/482/579/687/745, 257/579, 257/291/395/475/541/687, 257/768, 812, 475, 662, 536, 748, 808, 291/316/395/687, 613, 257/291/316, 257/291/579, 257/316/541/745, 351, 257/316/395/745, 185, 257/316/687, 291/316/475/687/745, 257/291/395/740/745, 450, 473, 124, 430, 413, 66, or 365, wherein the positions are relative to the reference sequence corresponding to SEQ ID NO: 328.

[0251] In some embodiments, the recombinant polynucleotide comprises a polynucleotide sequence encoding the engineered DNA polymerase comprising an amino acid sequence having at least 80%, 85%, 86%, 87%, 88%, 89%, 90%, 91%, 92%, 93%, 94%, 95%, 96%, 97%, 98%, 99%, or more sequence identity to the reference sequence corresponding to residues 12 to 844 of SEQ ID NO: 546, or to the reference sequence corresponding to SEQ ID NO: 546, wherein the amino acid sequence comprises one or more mutations relative to the reference sequence corresponding to residues 12 to 844 of SEQ ID NO: 546, or relative to the reference sequence corresponding to SEQ ID NO: 546.

[0252] In some embodiments, the recombinant polynucleotide comprises a polynucleotide sequence encoding the engineered DNA polymerase comprising an amino acid sequence having at least 80%, 85%, 86%, 87%, 88%, 89%, 90%, 91%, 92%, 93%, 94%, 95%, 96%, 97%, 98%, 99%, or more sequence identity to the reference sequence corresponding to residues 12 to 844 of an even-numbered SEQ ID NO. of SEQ ID NOs: 676-1190, or to the reference sequence corresponding to an even-numbered SEQ ID NO. of SEQ ID NOs: 676-1190, wherein the amino acid sequence comprises one or more mutations relative to the reference sequence corresponding to residues 12 to 844 of SEQ ID NO: 546, or relative to the reference sequence corresponding to SEQ ID NO: 546.

[0253] In some embodiments, the recombinant polynucleotide comprises a polynucleotide sequence encoding the engineered DNA polymerase comprising an amino acid sequence comprising at least a mutation or mutation set at amino acid position(s) 438, 697, 457, 716, 79/474/536/699, 536, 392, 708, 431, 395/474/536/699, 453, 427, 79/395/699, 378, 370, 706, 257/395/474/475/536/662, 474/536/562, 257/395/474/536, 79/257/395/474/475/536/562, 79/395/536/699, 372, 257/395/792, 390, 79/474/536/699/792, 409, 443, 448, 381, 707, 416, 474/475/662, 79/395/474/475/536/792, 474/475/536/662, 382, 257/474/536/562/662, 257/395/474/475/792, 79/474/662/699, 725, 447, 79/257/699, 701, 257/474/475/536/562/662, 702, 342/716, 233/562/713, 704, 474/475/536/562/662, 454, 327/427, 257/316/474/536/792, 417, 425, 536/562, 714, 233, 303/613, 21/79/303/562/613, 79/562, 435, 257/536/699/792, 79/536, 453/667, 79/303/338/613/804/812, 79/257/395/536/662/792, 79/338/562, 79/233/303/662, 79/662/699, 79/395/475/662, 79/536/562/699, 536/662, 21/79/338/641/699, 662, 21/79/442/699, 79/303/662, 79/178/257/662/699, 79/257/536/562/662, 562/699, 359/613/742/808/812, 21/79/338/379/562/662/804/812, 731, 21/79/359/442/662, 79/338/359/562, 21/613/662/742, 21/79/303/662/699/742/808, 21/79/338/442/613/699, 79/303/338/562/613/662, 303/338/562/699/808/812, 79/257, 257/662/792, 79/536/699, 79/359/713/742/808, 21/359/442/808/812, 79/257/475/536/662, 21/79/338, 79/713, 79/562/641, 373, 79/178/257/316/536/662, 21/233/338/562/662, 257/316/536, 21/79/303/442/662, 21/79/233/303/338/379/562/713, 338/442/699, 426, 21/338/359/808/812, 79/178/233/442/562/812, 79/474/536/662/699, 21/79/338/379/662, 721, 21/79/233/338/613/641, 374, 338/359/379, 461, 451, 715, 79/303/338/641/713, 393, 79/257/474/536/699, 79, 437, 257/536/562/662, 21/79/379/442/562/662, 362, 410, 338/812, 21/662/808/812, 21/303/338, 418, 338/442, 449, 379/641, 316/536/562, 257/536/792, 21/79/442/613, 257/536/662/792, 257/474/529/536/662, 412, 79/257/536/662/699, 257/316/475/536/792, 388, 380/454, 21/79/233/303/613/699/809, 724, 21/79/338/613, 79/178/536/792, 449/747, 21/79/379/613/713, 79/316/536/662/699, 376, 21/562/662, 79/257/262/536/562/699, 718, 395/475/536/562/662/699, 79/233/338/359/379/442/562/613/812, 371, 316/475/562/662/792, 79/257/316/792, 728, 79/233/338, 432, 79/178/257/316/395/536/662/699, 79/303/713, 233/379/442/562/613/662/713, 21/742, 732, 79/257/395/562/662/699, 21/233/338/379/442/562/613/662/812, 429, 562/699, 2/374, 723, 434, 420, or 699, wherein the positions are relative to the reference sequence corresponding to SEQ ID NO: 546.

[0254] In some embodiments, the recombinant polynucleotide comprises a polynucleotide sequence encoding the engineered DNA polymerase comprising an amino acid sequence having at least 80%, 85%, 86%, 87%, 88%, 89%, 90%, 91%, 92%, 93%, 94%, 95% 96%, 97%, 98%, 99%, or more sequence identity to the reference sequence corresponding to residues 12 to 844 of SEQ ID NO: 710, or to the reference sequence corresponding to SEQ ID NO: 710, wherein the amino acid sequence comprises one or more mutations relative to the reference sequence corresponding to residues 12 to 844 of SEQ ID NO: 710, or relative to the reference sequence corresponding to SEQ ID NO: 710.

[0255] In some embodiments, the recombinant polynucleotide comprises a polynucleotide sequence encoding the engineered DNA polymerase comprising an amino acid sequence having at least 80%, 85%, 86%, 87%, 88%, 89%, 90%, 91%, 92%, 93%, 94%, 95%, 96%, 97%, 98%, 99%, or more sequence identity to the reference sequence corresponding to residues 12 to 844 of an even-numbered SEQ ID NO. of SEQ ID NOs: 1192-1326, or to the reference sequence corresponding to an even-numbered SEQ ID NO. of SEQ ID NOs: 1192-1326, wherein the amino acid sequence comprises one or more mutations relative to the reference sequence corresponding to residues 12 to 844 of SEQ ID NO: 710, or relative to the reference sequence corresponding to SEQ ID NO: 710.

[0256] In some embodiments, the recombinant polynucleotide comprises a polynucleotide sequence encoding the engineered DNA polymerase comprising an amino acid sequence comprising at least a mutation or mutation set at amino acid position(s) 68, 78, 466, 807, 612, 147, 356, 488, 603, 271, 508, 787, 412/417/427, 251, 697, 562, 79/434/562, 820, 275, 378/381/697, 469, 412/417/697, 798, 79/388,651, 825, 51, 370, 745, 815, 465, 317, 569, 341, 824, 18, 181, 735, or 336, wherein the positions are relative to the reference sequence corresponding to SEQ ID NO: 710.

[0257] In some embodiments, the recombinant polynucleotide comprises a polynucleotide sequence encoding the engineered DNA polymerase comprising an amino acid sequence having at least 80%, 85%, 86%, 87%, 88%, 89%, 90%, 91%, 92%, 93%, 94%, 95%, 96%, 97%, 98%, 99%, or more sequence identity to the reference sequence corresponding to residues 12 to 844 of SEQ ID NO: 1208, or to the reference sequence corresponding to SEQ ID NO: 1208, wherein the amino acid sequence comprises one or more mutations relative to the reference sequence corresponding to residues 12 to 844 of SEQ ID NO: 1208, or relative to the reference sequence corresponding to SEQ ID NO: 1208.

[0258] In some embodiments, the recombinant polynucleotide comprises a polynucleotide sequence encoding an engineered DNA polymerase comprising an amino acid sequence having at least 80%, 85%, 86%, 87%, 88%, 89%, 90%, 91%, 92%, 93%, 94%, 95%, 96%, 97%, 98%, 99%, or more sequence identity to the reference sequence corresponding to residues 12 to 844 of an even-numbered SEQ ID NO. of SEQ ID NOs: 1328-1378, or to the reference sequence corresponding to an even-numbered SEQ ID NO. of SEQ ID NOs: 1328-1378, wherein the amino acid sequence comprises one or more mutations relative to the reference sequence corresponding to residues 12 to 844 of SEQ ID NO: 1208, or relative to the reference sequence corresponding to SEQ ID NO: 1208.

[0259] In some embodiments, the recombinant polynucleotide comprises a polynucleotide sequence encoding the engineered DNA polymerase comprising an amino acid sequence comprising at least a mutation or mutation set at amino acid position(s) 68/251/603/612/798, 68/603, 68/78/370, 370, 251/798, 68/370/603/612, 51/370/412/603/612, 412/603/798, 251/370/412/612, 370/798, 78/251, 251, 68/370/508/798, 251/370/508, 78/508, 78/370/697/798, 51/251, 68/370/508/603/697, 78/251/370/697/798, 78/603/798/831, 370/412/508/612, 72/508/798, 51/251/412/798, 51/251/370/508/603/798, 68/78/251/370/603/612/697, or 51/68/251/370/603, wherein the positions are relative to the reference sequence corresponding to SEQ ID NO: 1208.

[0260] In some embodiments, for each of the foregoing embodiments of recombinant polynucleotides, the specific amino acid mutation described herein for each of the mutation or mutation set can be used for the encoded engineered DNA polymerase polypeptide.

[0261] In some embodiments, the recombinant polynucleotide comprises a polynucleotide sequence encoding the engineered DNA polymerase comprising an amino acid sequence comprising at least one mutation provided in Tables 4.1, 5.1, 5.2, 6.1, 6.2, 7.1, 7.2, 8.1, 8.2, 9.1, 9.2, 9.3, 10.1, 10.2, 11.1, and 11.2, wherein the amino acid positions are relative to the reference sequence of SEQ ID NO: 2, 220, 226, 272, 328, 546, 710, or 1208.

[0262] In some embodiments, the recombinant polynucleotide comprises a polynucleotide sequence encoding the engineered DNA polymerase comprising an amino acid sequence comprising at least a mutation or mutation set as provided in Tables 4.1, 5.1, 5.2, 6.1, 6.2, 7.1, 7.2, 8.1, 8.2, 9.1, 9.2, 9.3, 10.1, 10.2, 11.1, and 11.2, wherein the amino acid positions are relative to the reference sequence corresponding to SEQ ID NO: 2, 220, 226, 272, 328, 546, 710, or 1208.

[0263] In some embodiments, the recombinant polynucleotide comprises a polynucleotide sequence encoding the engineered DNA polymerase comprising an amino acid sequence having least 80%, 85%, 86%, 87%, 88%, 89%, 90%, 91%, 92%, 93%, 94%, 95% 96%, 97%, 98%, 99% or more sequence identity to an amino acid sequence comprising a mutation or mutation set as provided in Tables 4.1, 5.1, 5.2, 6.1, 6.2, 7.1, 7.2, 8.1, 8.2, 9.1, 9.2, 9.3, 10.1, 10.2, 11.1, and 11.2.

[0264] In some embodiments, the recombinant polynucleotide comprises a polynucleotide sequence encoding the engineered DNA polymerase comprising an amino acid sequence having least 80%, 85%, 86%, 87%, 88%, 89%, 90%, 91%, 92%, 93%, 94%, 95%, 96%, 97%, 98%, 99% or more sequence identity to the sequence comprising residues 12 to 844 of an engineered DNA polymerase set forth in Tables 4.1, 5.1, 5.2, 6.1, 6.2, 7.1, 7.2, 8.1, 8.2, 9.1, 9.2, 9.3, 10.1, 10.2, 11.1, and 11.2, or to the sequence comprising an engineered DNA polymerase set forth in Tables 4.1, 5.1, 5.2, 6.1, 6.2, 7.1, 7.2, 8.1, 8.2, 9.1, 9.2, 9.3, 10.1, 10.2, 11.1, and 11.2.

[0265] In some embodiments, the recombinant polynucleotide comprising a polynucleotide sequence encoding the engineered DNA polymerase comprising an amino acid sequence having at least 80%, 85%, 86%, 87%, 88%, 89%, 90%, 91%, 92%, 93%, 94%, 95%, 96%, 97%, 98%, 99% or more sequence identity to the sequence corresponding to residues 12 to 844 of an even numbered SEQ ID NO. of SEQ ID NOs: 4-1378, or to the sequence corresponding to an even numbered SEQ ID NO. of SEQ ID NOs: 2-1378.

[0266] In some embodiments, the recombinant polynucleotide comprising a polynucleotide sequence encoding the engineered DNA polymerase comprising an amino acid sequence comprising residues 12 to 844 of an even numbered SEQ ID NO. of SEQ ID NOs: 4-1378, or an amino acid sequence comprising an even numbered SEQ ID NO. of SEQ ID NOs: 2-1378. In some embodiments, the amino acid sequence of the encoded engineered DNA polymerase optionally includes 1, 2, 3, 4, 5, 6, 7, 8, 9, or up to 10 substitutions in the amino acid sequence. In some embodiments, the encoded engineered DNA polymerase polypeptide optionally includes 1, 2, 3, 4, up to 5 substitutions in the amino acid sequence. In some embodiments, the engineered DNA polymerase polypeptide optionally includes 1, 2, 3, or 4 substitutions in the amino acid sequence. In some embodiments, the substitutions comprises non-conservative or conservative substitutions.

[0267] In some embodiments, the substitutions comprises conservative substitutions. In some embodiments, the substitutions comprises non-conservative substitutions.

[0268] In some embodiments, the recombinant polynucleotide comprises a polynucleotide sequence encoding the engineered DNA polymerase comprising an amino acid sequence comprising residues 12 to 844 of SEQ ID NO: 220, 226, 272, 328, 546, 710, or 1208, or the amino acid sequence comprising SEQ ID NO: 2, 220, 226, 272, 328, 546, 710, or 1208. In some embodiments, the amino acid sequence of the engineered DNA polymerase optionally includes 1, 2, 3, 4, 5, 6, 7, 8, 9, or up to 10 substitutions in the amino acid sequence. In some embodiments, the encoded DNA polymerase optionally includes 1, 2, 3, 4, up to 5 substitutions in the amino acid sequence. In some embodiments, the encoded DNA polymerase optionally includes 1, 2, 3, or 4 substitutions in the amino acid sequence.

[0269] In some embodiments, the recombinant polynucleotide comprises a polynucleotide sequence having at least 75%, 80%, 85%, 90%, 91%, 92%, 93%, 94%, 95%, 96%, 97%, 98%, 99%, or more sequence identity to a reference polynucleotide sequence corresponding to nucleotide residues 34 to 2532 of an odd numbered SEQ ID NO. of SEQ ID NOs: 1-1377, or to a reference polynucleotide sequence corresponding an odd numbered SEQ ID NO. of SEQ ID NOs: 1-1377, wherein the recombinant polynucleotide encodes a DNA polymerase.

[0270] In some embodiments, the recombinant polynucleotide comprises a polynucleotide sequence having at least 75%, 80%, 85%, 90%, 91%, 92%, 93%, 94%, 95%, 96%, 97%, 98%, 99%, or more sequence identity to a reference polynucleotide sequence corresponding to nucleotide residues 34 to 2532 of SEQ ID NO: 1, 219, 225, 271, 327, 545, 709, or 1207, or to a reference polynucleotide sequence corresponding to SEQ ID NO: 1, 219, 225, 271, 327, 545, 709, or 1207, wherein the recombinant polynucleotide encodes a DNA polymerase.

[0271] In some embodiments, the recombinant polynucleotide encoding an engineered DNA polymerase comprises a polynucleotide sequence comprising nucleotide residues 34 to 2532 of an odd numbered SEQ ID NO. of SEQ ID NOs: 1-1377, or a polynucleotide sequence comprising an odd numbered SEQ ID NO. of SEQ ID NOs: 1-1377.

[0272] In some embodiments, the recombinant polynucleotide encoding an engineered DNA polymerase comprises a polynucleotide sequence comprising nucleotide residues 34 to 2532 of SEQ ID NO: 1, 219, 225, 271, 327, 545, 709, or 1207, or a polynucleotide sequence comprising SEQ ID NO: 1, 219, 225, 271, 327, 545, 709, or 1207.

[0273] In some embodiments, the present disclosure provides a recombinant polynucleotide capable of hybridizing under highly stringent conditions to a reference polynucleotide encoding an engineered DNA polymerase polypeptide described herein, e.g., a recombinant polynucleotide provided in Tables 4.1, 5.1, 5.2, 6.1, 6.2, 7.1, 7.2, 8.1, 8.2, 9.1, 9.2, 9.3, 10.1, 10.2, 11.1, and 11.2, or a reverse complement thereof. In some embodiments, the recombinant polynucleotide hybridizes under highly stringent conditions to a reference polynucleotide sequence described herein encoding an engineered DNA polymerase. In some embodiments, the recombinant polynucleotide hybridizes under highly stringent conditions to a reference polynucleotide corresponding to nucleotide residues 34 to 2532 of SEQ ID NO: 1, 219, 225, 271, 327, 545, 709, or 1207, or to the sequence corresponding to SEQ ID NO: 1, 219, 225, 271, 327, 545, 709, or 1207, or a reverse complement thereof. In some embodiments, the recombinant polynucleotide hybridizes under highly stringent conditions to a reference polynucleotide corresponding to nucleotide residues 34 to 2532 of an odd numbered SEQ ID NO. of SEQ ID NOs: 1-1377, or to a reference polynucleotide comprising a sequence corresponding to an odd numbered SEQ ID NO. of SEQ ID NOs: 1-1377, or a reverse complement thereof.

[0274] In some embodiments, the polynucleotide capable of hybridizing under highly stringent conditions encodes a DNA polymerase comprising an amino acid sequence that has one or more residue differences as compared to SEQ ID NO: 2, 220, 226, 272, 328, 546, 710, or 1208, at residue positions selected from any positions as set forth in Tables 4.1, 5.1, 5.2, 6.1, 6.2, 7.1, 7.2, 8.1, 8.2, 9.1, 9.2, 9.3, 10.1, 10.2, 11.1, and 11.2.

[0275] In some embodiments, the polynucleotide that hybridizes under highly stringent conditions comprises a polynucleotide sequence having at least 70%, 75%, 80%, 81%, 82%, 83%, 84%, 85%, 86%, 87%, 88%, 89%, 90%, 91%, 92%, 93%, 94%, 95%, 96%, 97%, 98%, 99% or more sequence identity to a reference sequence corresponding to residues 34 to 2532 of SEQ ID NO: 1, 219, 225, 271, 327, 545, 709, or 1207, or to a reference sequence corresponding to SEQ ID NO: 1, 219, 225, 271, 327, 545, 709, or 1207. In some additional embodiments, the polynucleotide hybridizing under highly stringent conditions comprises a sequence having at least 75%, 80%, 81%, 82%, 83%, 84%, 85%, 86%, 87%, 88%, 89%, 90%, 91%, 92%, 93%, 94%, 95%, 96%, 97%, 98%, 99% or more sequence identity to at least one polynucleotide reference sequence corresponding to residues 34 to 2532 of a polynucleotide sequence provided in Tables 4.1, 5.1, 5.2, 6.1, 6.2, 7.1, 7.2, 8.1, 8.2, 9.1, 9.2, 9.3, 10.1, 10.2, 11.1, and 11.2, or a polynucleotide sequence provided in Tables 4.1, 5.1, 5.2, 6.1, 6.2, 7.1, 7.2, 8.1, 8.2, 9.1, 9.2, 9.3, 10.1, 10.2, 11.1, and 11.2.

[0276] In some embodiments, a recombinant polynucleotide encoding any of the DNA polymerases herein is manipulated in a variety of ways to facilitate expression of the DNA polymerase polypeptide. In some embodiments, the recombinant polynucleotide encoding the DNA polymerase comprises expression vectors where one or more control sequences is present to regulate the expression of the DNA polymerase polynucleotides and/or encoded polypeptides. Manipulation of the isolated polynucleotide prior to its insertion into a vector may be desirable or necessary depending on the expression vector utilized. Techniques for modifying polynucleotides and nucleic acid sequences utilizing recombinant DNA methods are well known in the art. In some embodiments, the control sequences include among others, promoters, leader sequences, polyadenylation sequences, propeptide sequences, signal peptide sequences, and transcription terminators.

[0277] In some embodiments, suitable promoters are selected based on selection of the host cells. For bacterial host cells, suitable promoters for directing transcription of the nucleic acid constructs of the present disclosure, include, but are not limited to promoters obtained from the E. coli lac operon, Streptomyces coelicolor agarase gene (dagA), Bacillus subtilis levansucrase gene (sacB), Bacillus licheniformis alpha-amylase gene (amyL), Bacillus stearothermophilus maltogenic amylase gene (amyM), Bacillus amyloliquefaciens alpha-amylase gene (amyQ), Bacillus licheniformis penicillinase gene (penP), Bacillus subtilis xylA and xylB genes, and prokaryotic beta-lactamase gene (see, e.g., Villa-Kamaroff et al., Proc. Natl Acad. Sci. USA, 1978, 75:3727-3731), as well as the tac promoter (see, e.g., DeBoer et al., Proc. Natl Acad. Sci. USA, 1983, 80:21-25). Exemplary promoters for filamentous fungal host cells, include, but are not limited to promoters obtained from the genes for Aspergillus oryzae TAKA amylase, Rhizomucor miehei aspartic proteinase, Aspergillus niger neutral alpha-amylase, Aspergillus niger acid stable alpha-amylase, Aspergillus niger or Aspergillus awamori μlucoamylase (glaA), Rhizomucor miehei lipase, Aspergillus oryzae alkaline protease, Aspergillus oryzae triose phosphate isomerase, Aspergillus nidulans acetamidase, and Fusarium oxysporum trypsin-like protease (see, e.g., WO 96/00787), as well as the NA2-tpi promoter (a hybrid of the promoters from the genes for Aspergillus niger neutral alpha-amylase and Aspergillus oryzae triose phosphate isomerase), and mutant, truncated, and hybrid promoters thereof. Exemplary yeast cell promoters can be from the genes can be from the genes for Saccharomyces cerevisiae enolase (ENO-1), Saccharomyces cerevisiae galactokinase (GAL1), Saccharomyces cerevisiae alcohol dehydrogenase/glyceraldehyde-3-phosphate dehydrogenase (ADH2/GAP), and Saccharomyces cerevisiae 3-phosphoglycerate kinase. Other useful promoters for yeast host cells are known in the art (see, e.g., Romanos et al., Yeast, 1992, 8:423-488).

[0278] In some embodiments, the control sequence is a suitable transcription terminator sequence (i.e., a sequence recognized by a host cell to terminate transcription). In some embodiments, the terminator sequence is operably linked to the 3′ terminus of the nucleic acid sequence encoding the DNA polymerase polypeptide. Any suitable terminator which is functional in the host cell of choice finds use in the present invention. For bacterial expression, the transcription terminators can be a Rho-dependent terminator that rely on a Rho transcription factor, or a Rho-independent, or intrinsic terminator, which does not require a transcription factor. Exemplary transcription terminators for filamentous fungal host cells can be obtained from the genes for Aspergillus oryzae TAKA amylase, Aspergillus niger μlucoamylase, Aspergillus nidulans anthranilate synthase, Aspergillus niger alpha-glucosidase, and Fusarium oxysporum trypsin-like protease. Exemplary terminators for yeast host cells can be obtained from the genes for Saccharomyces cerevisiae enolase, Saccharomyces cerevisiae cytochrome C (CYC1), and Saccharomyces cerevisiae μlyceraldehyde-3-phosphate dehydrogenase. Other useful terminators for yeast host cells are known in the art (see, e.g., Romanos et al., supra).

[0279] In some embodiments, the control sequence is a suitable leader sequence (i.e., a non-translated region of an mRNA that is important for translation by the host cell). In some embodiments, the leader sequence is operably linked to the 5′ terminus of the nucleic acid sequence encoding the DNA polymerase polypeptide. Any suitable leader sequence that is functional in the host cell of choice find use in the present invention. Exemplary leaders for filamentous fungal host cells are obtained from the genes for Aspergillus oryzae TAKA amylase, and Aspergillus nidulans triose phosphate isomerase. Suitable leaders for yeast host cells are obtained from the genes for Saccharomyces cerevisiae enolase (ENO-1), Saccharomyces cerevisiae 3-phosphoglycerate kinase, Saccharomyces cerevisiae alpha-factor, and Saccharomyces cerevisiae alcohol dehydrogenase/glyceraldehyde-3-phosphate dehydrogenase (ADH2/GAP).

[0280] In some embodiments, the control sequence is a polyadenylation sequence (i.e., a sequence operably linked to the 3′ terminus of the nucleic acid sequence and which, when transcribed, is recognized by the host cell as a signal to add polyadenosine residues to transcribed mRNA). Any suitable polyadenylation sequence which is functional in the host cell of choice finds use in the present invention. Exemplary polyadenylation sequences for filamentous fungal host cells include, but are not limited to the genes for Aspergillus oryzae TAKA amylase, Aspergillus niger μlucoamylase, Aspergillus nidulans anthranilate synthase, Fusarium oxysporum trypsin-like protease, and Aspergillus niger alpha-glucosidase. Useful polyadenylation sequences for yeast host cells are known (see, e.g., Guo and Sherman, Mol. Cell. Biol., 1995, 15:5983-5990).

[0281] In some embodiments, the control sequence is also a signal peptide (i.e., a coding region that codes for an amino acid sequence linked to the amino terminus of a polypeptide and directs the encoded polypeptide into the cell's secretory pathway). In some embodiments, the 5′ end of the coding sequence of the nucleic acid sequence inherently contains a signal peptide coding region naturally linked in translation reading frame with the segment of the coding region that encodes the secreted polypeptide. Alternatively, in some embodiments, the 5′ end of the coding sequence contains a signal peptide coding region that is foreign to the coding sequence. Any suitable signal peptide coding region which directs the expressed polypeptide into the secretory pathway of a host cell of choice finds use for expression of the engineered polypeptide(s). Effective signal peptide coding regions for bacterial host cells are the signal peptide coding regions include, but are not limited to those obtained from the genes for Bacillus NCIB 11837 maltogenic amylase, Bacillus stearothermophilus alpha-amylase, Bacillus licheniformis subtilisin, Bacillus licheniformis beta-lactamase, Bacillus stearothermophilus neutral proteases (nprT, nprS, nprM), and Bacillus subtilis prsA. Further signal peptides are known in the art (see, e.g., Simonen and Palva, Microbiol. Rev., 1993, 57:109-137). In some embodiments, effective signal peptide coding regions for filamentous fungal host cells include, but are not limited to the signal peptide coding regions obtained from the genes for Aspergillus oryzae TAKA amylase, Aspergillus niger neutral amylase, Aspergillus niger μlucoamylase, Rhizomucor miehei aspartic proteinase, Humicola insolens cellulase, and Humicola lanuginosa lipase. Useful signal peptides for yeast host cells include, but are not limited to those from the genes for Saccharomyces cerevisiae alpha-factor and Saccharomyces cerevisiae invertase.

[0282] In some embodiments, the control sequence is a propeptide coding region that codes for an amino acid sequence positioned at the amino terminus of a polypeptide. The resultant polypeptide is referred to as a “proenzyme,” “propolypeptide,” or “zymogen.” A propolypeptide can be converted to a mature active polypeptide by catalytic or autocatalytic cleavage of the propeptide from the propolypeptide. The propeptide coding region may be obtained from any suitable source, including, but not limited to the genes for Bacillus subtilis alkaline protease (aprE), Bacillus subtilis neutral protease (nprT), Saccharomyces cerevisiae alpha-factor, Rhizomucor miehei aspartic proteinase, and Myceliophthora thermophila lactase (see, e.g., WO 95/33836). Where both signal peptide and propeptide regions are present at the amino terminus of a polypeptide, the propeptide region is positioned next to the amino terminus of a polypeptide and the signal peptide region is positioned next to the amino terminus of the propeptide region.

[0283] In some embodiments, regulatory sequences are also utilized. These sequences facilitate the regulation of the expression of the polypeptide relative to the growth of the host cell. Examples of regulatory systems are those that cause the expression of the gene to be turned on or off in response to a chemical or physical stimulus, including the presence of a regulatory compound. In prokaryotic host cells, suitable regulatory sequences include, but are not limited to the lac, tac, and trp operator systems. In yeast host cells, suitable regulatory systems include, but are not limited to the ADH2 system or GAL1 system. In filamentous fungi, suitable regulatory sequences include, but are not limited to, the TAKA alpha-amylase promoter, Aspergillus niger μlucoamylase promoter, and Aspergillus oryzae μlucoamylase promoter.

[0284] In another aspect, the present disclosure provides a recombinant expression vector comprising a recombinant polynucleotide encoding an engineered DNA polymerase polypeptide, and one or more expression regulating regions, such as a promoter and a terminator, a replication origin, etc., depending on the type of hosts into which they are to be introduced. In some embodiments, the various nucleic acid and control sequences described herein are joined together (i.e., operably linked) to produce recombinant expression vectors which include one or more convenient restriction sites to allow for insertion or substitution of the nucleic acid sequence encoding the DNA polymerase polypeptide at such sites. Alternatively, in some embodiments, the nucleic acid sequence of the present invention is expressed by inserting the nucleic acid sequence or a nucleic acid construct comprising the sequence into an appropriate vector for expression. In some embodiments involving the creation of the expression vector, the coding sequence is located in the vector so that the coding sequence is operably linked with the appropriate control sequences for expression.

[0285] In the embodiments herein, the recombinant expression vector may be any suitable vector (e.g., a plasmid or virus), that can be conveniently subjected to recombinant DNA procedures and bring about the expression of the polynucleotide encoding the DNA polymerase. The choice of the vector typically depends on the compatibility of the vector with the host cell into which the vector is to be introduced. The vectors may be linear or closed circular plasmids.

[0286] In some embodiments, the expression vector is an autonomously replicating vector (i.e., a vector that exists as an extra-chromosomal entity, the replication of which is independent of chromosomal replication, such as a plasmid, an extra-chromosomal element, a minichromosome, or an artificial chromosome). The vector may contain any means for assuring self-replication. In some alternative embodiments, the vector is one in which, when introduced into the host cell, it is integrated into the genome and replicated together with the chromosome(s) into which it has been integrated. Furthermore, in some embodiments, a single vector or plasmid, or two or more vectors or plasmids which together contain the total DNA to be introduced into the genome of the host cell, and/or a transposon is utilized.

[0287] In some embodiments, the expression vector contains one or more selectable markers, which permit easy selection of transformed cells. A “selectable marker” is a gene, the product of which provides for biocide or viral resistance, resistance to heavy metals, prototrophy to auxotrophs, and the like. Examples of bacterial selectable markers include, but are not limited to the dal genes from Bacillus subtilis or Bacillus licheniformis, or markers, which confer antibiotic resistance such as ampicillin, kanamycin, chloramphenicol or tetracycline resistance. Suitable markers for yeast host cells include, but are not limited to ADE2, HIS3, LEU2, LYS2, MET3, TRP1, and URA3. Selectable markers for use in filamentous fungal host cells include, but are not limited to, amdS (acetamidase; e.g., from A. nidulans or A. orzyae), argB (ornithine carbamoyltransferases), bar (phosphinothricin acetyltransferase; e.g., from S. hygroscopicus), hph (hygromycin phosphotransferase), niaD (nitrate reductase), pyrG (orotidine-5′-phosphate decarboxylase; e.g., from A. nidulans or A. orzyae), sC (sulfate adenyltransferase), and trpC (anthranilate synthase), as well as equivalents thereof.

[0288] In another aspect, the present disclosure provides a host cell comprising at least one recombinant polynucleotide encoding at least one engineered DNA polymerase polypeptide of the present invention, the recombinant polynucleotide(s) being operatively linked to one or more control sequences for expression of the engineered DNA polymerase enzyme(s) in the host cell. Host cells suitable for use in expressing the polypeptides encoded by the expression vectors of the present invention are well known in the art and include but are not limited to, bacterial cells, such as E. coli, Vibrio fluvialis, Streptomyces and Salmonella typhimurium cells; fungal cells, such as yeast cells (e.g., Saccharomyces cerevisiae or Pichia pastoris (ATCC Accession No. 201178)); insect cells such as Drosophila S2 and Spodoptera Sf9 cells; animal cells such as CHO, COS, BHK, 293, and Bowes melanoma cells; and plant cells. Exemplary host cells also include various Escherichia coli strains (e.g., W3110 (ΔfhuA) and BL21).

[0289] Accordingly, in another aspect, the present disclosure provides methods of producing the engineered DNA polymerase polypeptides, where the methods comprise culturing a host cell capable of expressing a polynucleotide encoding the engineered DNA polymerase polypeptide under conditions suitable for expression or production of the encoded polypeptide. In some embodiments, the methods further comprise the step(s) of isolating the DNA polymerase polypeptides, such as from the media and/or host cells. In some embodiments, the methods further comprise purifying the DNA polypeptide polypeptides, as described herein. In some embodiments, the host cell produces more than one engineered DNA polymerase polypeptide.

[0290] Appropriate culture media and growth conditions for host cells are well known in the art. It is contemplated that any suitable method for introducing polynucleotides for expression of the DNA polymerase polypeptides into cells will find use in the present invention. Suitable techniques include, but are not limited to, electroporation, biolistic particle bombardment, liposome mediated transfection, calcium chloride transfection, and protoplast fusion.

[0291] The recombinant polypeptides herein (e.g., DNA polymerase enzyme variants) can be produced using any suitable methods known the art. For example, there is a wide variety of different mutagenesis techniques well known to those skilled in the art. In addition, mutagenesis kits are also available from many commercial molecular biology suppliers. Methods are available to make specific substitutions at defined amino acids (site-directed), specific or random mutations in a localized region of the gene (region-specific), or random mutagenesis over the entire gene (e.g., saturation mutagenesis). Numerous suitable methods are known to those in the art to generate enzyme variants, including but not limited to site-directed mutagenesis of single-stranded DNA or double-stranded DNA using PCR, cassette mutagenesis, gene synthesis, error-prone PCR, shuffling, and chemical saturation mutagenesis, or any other suitable method known in the art. Non-limiting examples of methods used for DNA and protein engineering are provided in the following patents: U.S. Pat. Nos. 6,117,679; 6,420,175; 6,376,246; 6,586,182; 7,747,391; 7,747,393; 7,783,428; and 8,383,346. After the variants are produced, they can be screened for any desired property (e.g., high or increased activity, or low or reduced activity, increased thermal activity, increased stability, increased processivity, increased fidelity, increased inhibitor resistance or tolerance, and/or pH stability, etc.).

[0292] In some embodiments, the engineered DNA polymerase polypeptides with the properties disclosed herein can be obtained by subjecting the polynucleotide encoding the naturally occurring or engineered DNA polymerase polypeptide to any suitable mutagenesis and/or directed evolution methods known in the art, for example, as described herein. An exemplary directed evolution technique is mutagenesis and/or DNA shuffling (see, e.g., Stemmer, Proc. Natl. Acad. Sci. USA, 1994, 91:10747-10751; WO 95/22625; WO 97/0078; WO 97/35966; WO 98/27230; WO 00/42651; WO 01/75767 and U.S. Pat. No. 6,537,746). Other directed evolution procedures that can be used include, among others, staggered extension process (StEP), in vitro recombination (see, e.g., Zhao et al., Nat. Biotechnol., 1998, 16:258-261), mutagenic PCR (see, e.g., Caldwell et al., PCR Methods Appl., 1994, 3:5136-5140), and cassette mutagenesis (see, e.g., Black et al., Proc. Natl. Acad. Sci. USA, 1996, 93:3525-3529).

[0293] Mutagenesis and directed evolution methods can be readily applied to DNA polymerase-encoding polynucleotides to generate variant libraries that can be expressed, screened, and assayed. Any suitable mutagenesis and directed evolution methods find use in the present invention and are known in the art (see, e.g., U.S. Pat. Nos. 5,605,793, 5,811,238, 5,830,721, 5,834,252, 5,837,458, 5,928,905, 6,096,548, 6,117,679, 6,132,970, 6,165,793, 6,180,406, 6,251,674, 6,265,201, 6,277,638, 6,287,861, 6,287,862, 6,291,242, 6,297,053, 6,303,344, 6,309,883, 6,319,713, 6,319,714, 6,323,030, 6,326,204, 6,335,160, 6,335,198, 6,344,356, 6,352,859, 6,355,484, 6,358,740, 6,358,742, 6,365,377, 6,365,408, 6,368,861, 6,372,497, 6,337,186, 6,376,246, 6,379,964, 6,387,702, 6,391,552, 6,391,640, 6,395,547, 6,406,855, 6,406,910, 6,413,745, 6,413,774, 6,420,175, 6,423,542, 6,426,224, 6,436,675, 6,444,468, 6,455,253, 6,479,652, 6,482,647, 6,483,011, 6,484,105, 6,489,146, 6,500,617, 6,500,639, 6,506,602, 6,506,603, 6,518,065, 6,519,065, 6,521,453, 6,528,311, 6,537,746, 6,573,098, 6,576,467, 6,579,678, 6,586,182, 6,602,986, 6,605,430, 6,613,514, 6,653,072, 6,686,515, 6,703,240, 6,716,631, 6,825,001, 6,902,922, 6,917,882, 6,946,296, 6,961,664, 6,995,017, 7,024,312, 7,058,515, 7,105,297, 7,148,054, 7,220,566, 7,288,375, 7,384,387, 7,421,347, 7,430,477, 7,462,469, 7,534,564, 7,620,500, 7,620,502, 7,629,170, 7,702,464, 7,747,391, 7,747,393, 7,751,986, 7,776,598, 7,783,428, 7,795,030, 7,853,410, 7,868,138, 7,783,428, 7,873,477, 7,873,499, 7,904,249, 7,957,912, 7,981,614, 8,014,961, 8,029,988, 8,048,674, 8,058,001, 8,076,138, 8,108,150, 8,170,806, 8,224,580, 8,377,681, 8,383,346, 8,457,903, 8,504,498, 8,589,085, 8,762,066, 8,768,871, 9,593,326, 9,665,694, 9,684,771, and all related PCT and non-US counterparts; Ling et al., Anal. Biochem., 1997, 254(2):157-78; Dale et al., Meth. Mol. Biol., 1996, 57:369-74; Smith, Ann. Rev. Genet., 1985, 19:423-462; Botstein et al., Science, 1985, 229:1193-1201; Carter, Biochem. J., 1986, 237:1-7; Kramer et al., Cell, 1984, 38:879-887; Wells et al., Gene, 1985, 34:315-323; Minshull et al., Curr. Op. Chem. Biol., 1999, 3:284-290; Christians et al., Nat. Biotechnol., 1999, 17:259-264; Crameri et al., Nature, 1998, 391:288-291; Crameri, et al., Nat. Biotechnol., 1997, 15:436-438; Zhang et al., Proc. Nat. Acad. Sci. U.S.A., 1997, 94:4504-4509; Crameri et al., Nat. Biotechnol., 1996, 14:315-319; Stemmer, Nature, 1994, 370:389-391; Stemmer, Proc. Nat. Acad. Sci. USA, 1994, 91:10747-10751; EP 3 049 973; WO 95/22625; WO 97/0078; WO 97/35966; WO 98/27230; WO 00/42651; WO 01/75767; WO 2009/152336; and WO 2015/048573, all of which are incorporated herein by reference).

[0294] In some embodiments, the clones expressing the enzyme variants obtained following mutagenesis treatment are screened by subjecting the enzyme preparations to a defined treatment conditions or assay conditions (e.g., temperature, pH, input template concentration, nucleotides, etc.) and measuring the amount of enzyme activity remaining after the treatments or other suitable assay conditions. Clones containing a polynucleotide encoding a DNA polymerase polypeptide are then isolated from the gene, sequenced to identify the nucleotide sequence changes (if any), and used to express the enzyme in a host cell. Measuring enzyme activity from the expression libraries can be performed using any suitable method known in the art and as described in the Examples.

[0295] For engineered polypeptides of known sequence, the polynucleotides encoding the enzyme can be prepared by standard solid-phase methods, according to known synthetic methods. In some embodiments, fragments of up to about 100 bases can be individually synthesized, then joined (e.g., by enzymatic or chemical ligation methods, or polymerase mediated methods) to form any desired continuous sequence. For example, polynucleotides and oligonucleotides disclosed herein can be prepared by chemical synthesis using the classical phosphoramidite method (see, e.g., Beaucage et al., Tet. Lett., 1981, 22:1859-69; and Matthes et al., EMBO J., 1984, 3:801-05), as it is typically practiced in automated synthetic methods. According to the phosphoramidite method, oligonucleotides are synthesized (e.g., in an automatic DNA synthesizer, purified, annealed, ligated and cloned in appropriate vectors).

[0296] In some embodiments, a method for preparing the engineered DNA polymerase polypeptide can comprise: (a) synthesizing a polynucleotide encoding a polypeptide comprising an amino acid sequence selected from the amino acid sequence of any variant as described herein, and (b) expressing the DNA polymerase polypeptide encoded by the polynucleotide. In some embodiments of the method, the amino acid sequence encoded by the polynucleotide can optionally have one or several (e.g., up to 3, 4, 5, or up to 10) amino acid residue deletions, insertions and/or substitutions. In some embodiments, the amino acid sequence has optionally 1-2, 1-3, 1-4, 1-5, 1-6, 1-7, 1-8, 1-9, 1-10, 1-15, 1-20, 1-21, 1-22, 1-23, 1-24, 1-25, 1-30, 1-35, 1-40, 1-45, or 1-50 amino acid residue deletions, insertions and/or substitutions. In some embodiments, the amino acid sequence has optionally 1, 2, 3, 4, 5, 6, 7, 8, 9, 10, 11, 12, 13, 14, 15, 16, 17, 18, 19, 20, 21, 22, 23, 24, 25, 30, 30, 35, 40, 45, or 50 amino acid residue deletions, insertions and/or substitutions. In some embodiments, the amino acid sequence has optionally 1, 2, 3, 4, 5, 6, 7, 8, 9, 10, 11, 12, 13, 14, 15, 16, 18, 20, 21, 22, 23, 24, or 25 amino acid residue deletions, insertions and/or substitutions. In some embodiments, the substitutions are conservative or non-conservative substitutions.

[0297] The expressed engineered DNA polymerase polypeptide can be evaluated for any desired improved property or combination of properties (e.g., activity, fidelity, processivity, stability, thermostability, tolerance to various pH levels, sensitivity with respect to input template, tolerance or resistance to inhibitors, etc.) using any suitable assay known in the art, including but not limited to the assays and conditions described herein.

[0298] In some embodiments, any of the engineered DNA polymerase polypeptides expressed in a host cell are recovered and/or purified from the cells and/or the culture medium using any one or more of the well-known techniques for protein purification, including, among others, lysozyme treatment, sonication, filtration, salting-out, ultra-centrifugation, and chromatography.

[0299] Chromatographic techniques for isolation of the DNA polymerase polypeptides include, among others, reverse phase chromatography, high-performance liquid chromatography, ion-exchange chromatography, hydrophobic-interaction chromatography, size-exclusion chromatography, gel electrophoresis, and affinity chromatography. Conditions for purifying a particular enzyme may depend, in part, on factors such as net charge, hydrophobicity, hydrophilicity, molecular weight, molecular shape, etc., and will be apparent to those having skill in the art. In some embodiments, affinity techniques may be used to isolate the improved DNA polymerase enzymes. For affinity chromatography purification, any antibody that specifically binds a DNA polymerase polypeptide of interest may find use. For the production of antibodies, various host animals, including but not limited to rabbits, mice, rats, etc., are immunized by injection with a DNA polymerase polypeptide, or a fragment thereof. In some embodiments, the DNA polymerase polypeptide or fragment is attached to a suitable carrier, such as BSA, by means of a side chain functional group or linkers attached to a side chain functional group. Where the engineered DNA polymerase includes a fusion polypeptide that allows for affinity purification, such as a His-tag, standard affinity methods for the particular fusion protein can be used.

### Compositions of DNA Polymerases

[0300] In a further aspect, the present disclosure provides compositions of the DNA polymerases disclosed herein. In some embodiments, the composition comprises an isolated or purified engineered DNA polymerase polypeptides that are combined with other components and compounds to provide compositions and formulations comprising the engineered DNA polymerase polypeptide as appropriate for different applications and uses (e.g., diagnostic methods, molecular biology, etc.). In some embodiments, a composition comprises a DNA polymerase comprising a sequence comprising residues 12 to 844 of SEQ ID NO: 2 or a sequence corresponding to SEQ ID NO: 2, and/or at least one engineered DNA polymerase described herein. In some embodiments, the composition further comprises a buffer. In some embodiments, the composition further comprises a substrate, such as nucleotide substrates (e.g., dNTPs, dNTP analogs, and/or modified dNTPs) and/or at least one primer, e.g., complementary to a target nucleic acid. In some embodiments, the composition further comprises a template polynucleotide, particularly a template DNA. In some embodiments, the template polynucleotide comprises a heterologous template DNA.

[0301] In some embodiments, the composition can further comprise a DNA polymerase (e.g., a second DNA polymerase) other than the engineered DNA polymerase described herein. In some embodiments, the second DNA polymerase is a second thermostable DNA polymerase, for example Taq or Pfu polymerase, or a reverse transcriptase, such as those useful in RT-PCR coupled reactions. In some embodiments, the composition includes a probe or indicator, such as a nucleic acid binding dye (e.g., SYBR® Green), for detecting and/or quantitating the amount of product formed, e.g., in a qRT-PCR reaction.

### Uses of Engineered DNA Polymerase Polypeytides and Kits

[0302] In another aspect, the present disclosure provides uses of the engineered DNA polymerases for diagnostic and molecular biological purposes, such as for detecting the presence of a target nucleic acid, nucleic acid sequencing, and direct/indirect amplification of nucleic acids.

[0303] In some embodiments, the engineered DNA polymerase is used in preparing a complementary DNA of a target DNA. In some embodiments, a method of preparing a complementary DNA of a target DNA comprises contacting a target DNA with a DNA polymerase having a sequence comprising residues 12 to 844 of SEQ ID NO: 2, or an amino acid sequence comprising SEQ ID NO: 2, or at least an engineered DNA polymerase described herein in presence of substrates sufficient for producing a complementary DNA under reaction conditions suitable for production of a complementary DNA to all or a portion (i.e., whole or in part) of the target DNA. As discussed herein and known in the art, substrates include nucleotides (e.g., dNTPs) for DNA polymerase activity and/or oligonucleotide primers. Primers can be to a specific sequence of the target nucleic acid, or random primers, such as for generation of DNA libraries.

[0304] In some embodiments, the target DNA is any DNA appropriate to serve as a template for the engineered DNA polymerase, including, but not limited to, genomic DNA, mitochondrial DNA, cell-free DNA (e.g., obtained from blood/serum), bacterial DNA, fungal DNA, or viral DNA.

[0305] In some embodiments, the DNA polymerase of SEQ ID NO: 2 and/or the engineered DNA polymerase described herein is useful in diagnostic applications, e.g., for detecting the presence of a target nucleic acid, including RNA and DNA. In some embodiments, a method for detecting presence of a target DNA comprises reacting a sample suspected of containing a target DNA with a DNA polymerase comprising an amino acid sequence comprising residues 12 to 844 of SEQ ID NO: 2, or an amino acid sequence comprising SEQ ID NO: 2, and/or an engineered DNA polymerase described herein in presence of substrates under conditions suitable for DNA polymerase-mediated production of a DNA complementary to all or a portion (i.e., whole or in part) of the target DNA, and detecting the presence of the complementary DNA. In some embodiments, a target RNA can be detected by using a reverse transcriptase to produce a corresponding target DNA complementary to the target RNA, and using the DNA polymerase described herein to detect the target DNA complementary to the target RNA. In some embodiments, the method is used to detect at least 2S copies, at least 50 copies, at least 100 copies, at least 150 copies, at least 200 copies, at least 250 copies, at least 300 copies, at least 350 copies, at least 400 copies, at least 450 copies, or at least 500 copies of target DNA in the sample.

[0306] In some embodiments, the sample can be any material or substance suspected of containing a target nucleic acid. In some embodiments, the sample is a biological sample, such as biopsy and autopsy samples, frozen sections taken for histological purposes, blood, plasma, serum, sputum, stool, urine, cerebrospinal fluid, tears, mucus, hair, skin, etc. In some embodiments, the biological sample are cells or viruses, such as from a bacterial culture, virus culture, or cell culture. In some embodiments, the sample is an environmental sample, including, among others, water, including samples from ocean, river, refuse/sewer, etc., soil, air, vents, or surfaces, such as floors, machinery, counters, etc.

[0307] In some embodiments for detecting a target DNA, the detection of the complementary DNA product can be effectuated by methods known in the art. In some embodiments, the complementary DNA is detected by amplifying the complementary DNA, such as by polymerase chain reaction (PCR) or isothermal amplification. PCR methods for use with the engineered DNA polymerases include, among others, qPCR (e.g., TaqMan®), Hot-start PCR, touchdown PCR, asymmetric PCR, multiplex PCR, long or long range PCR, assembly PCR, and inverse PCR. Isothermal amplification methods for use with the engineered DNA polymerases include, among others, LAMP, whole genome amplification (WGA), and multiple displacement amplification. In some embodiments for detecting the presence of a target RNA, the reaction with a reverse transcriptase is conducted separately from the amplification reaction with the DNA polymerase. In some embodiments, where the amplification is by PCR, the reverse transcriptase reaction and the PCR is a one-step RT-PCR (i.e., performed in a single reaction simultaneously). In some embodiments, where the amplification is by PCR, the reverse transcriptase reaction and the PCR is a two-step RT-PCR (i.e., performed separately).

[0308] In some embodiments, a method of amplifying a target DNA, comprises contacting a target DNA with a DNA polymerase comprising an amino acid sequence comprising residues 12 to 844 of SEQ ID NO: 2, or an amino acid sequence comprising SEQ ID NO: 2, or an engineered DNA polymerase described herein in presence of substrates under conditions suitable for amplifying the target DNA. In some embodiments, amplifying is by polymerase chain reaction (PCR). In some embodiments, amplifying the DNA is by LAMP.

[0309] In some embodiments, the engineered DNA polymerase is used for sequencing nucleic acids. Various methods for sequencing DNA, particularly NGS sequencing methods, are well known in the art. In some embodiments, a method of sequencing a target DNA comprises contacting a target DNA with a DNA polymerase comprising an amino acid sequence comprising residues 12 to 844 of SEQ ID NO: 2, or an amino acid sequence comprising SEQ ID NO: 2, or an engineered DNA polymerase described herein in presence of substrates appropriate for sequencing under conditions suitable for DNA polymerase mediated extension of a complementary DNA of the target DNA, and determining the sequence of the target DNA.

[0310] In a further aspect, the present disclosure provides a kit comprising a DNA polymerase having an amino acid sequence comprising residues 12 to 844 of SEQ ID NO: 2, or an amino acid sequence comprising SEQ ID NO: 2, or at least one engineered DNA polymerase disclosed herein. In some embodiments, the kit further comprises one or more of a buffer, a nucleotide substrate, and an oligonucleotide primer. In some embodiments, the kit can include multiple (e.g., two or more) oligonucleotide primers, for example to different portions of a target nucleic acid. In some embodiments, the kit comprises a second DNA polymerase, such as Taq or Pfu DNA polymerase or reverse transcriptase, e.g., for coupled RT-PCR reaction. In some embodiments, the kit further comprises a template DNA, for example a control template DNA of defined sequence and/or amount to use as a positive control for detection of a target DNA.

### EXAMPLES

[0311] The following Examples, including experiments and results achieved, are provided for illustrative purposes only and are not to be construed as limiting the present invention.

[0312] In the experimental disclosure below, the following abbreviations where relevant apply: ppm (parts per million); M (molar); mM (millimolar), uM and μM (micromolar); nM (nanomolar); mol (moles); gm and g (gram); mg (milligrams); ug and gg (micrograms); L and 1 (liter); ml and mL (milliliter); cm (centimeters); mm (millimeters); ul, μl, uL, or μL (microliter); um and gm (micrometers); sec (seconds); min(s) (minute(s)); h(s) and hr(s) (hour(s)); Ω (ohm); f (microfarad); U (units); MW (molecular weight); rpm (rotations per minute); rcf (relative centrifugal force); psi and PSI (pounds per square inch); ° C. (degrees Celsius); RT and rt (room temperature); NGS (next-generation sequencing); ds (double stranded); ss (single stranded); CDS (coding sequence); DNA (deoxyribonucleic acid); RNA (ribonucleic acid); E. coli W3110 (commonly used laboratory E. coli strain, available from the Coli Genetic Stock Center [CGSC], New Haven, CT); HTP (high throughput); HPLC (high pressure liquid chromatography); ddH2O (double distilled water); PBS (phosphate buffered saline); BSA (bovine serum albumin); DTT (dithiothreitol); CAM (chloramphenicol); CAT (chloramphenicol acetyltransferase); IPTG (isopropyl β-D-1-thiogalactopyranoside); FIOPC (fold improvements over positive control); LB (Luria-Bertani); TB (Terrific-Broth); SPRI (solid phase reversible immobilization); GITC (guanidine thiocyanate); CDC (Center for Disease Control, USA); RFU (Relative Fluorescence Unit); FAM (5-FAM or 5-Carboxyfluorescein).

### Example 1

### E. coli Expression Hosts Containing Recombinant Polymerase Genes

[0313] The initial polymerase enzyme used to produce the variants of the present invention was SEQ ID NO: 2 cloned into the expression vector pCK110900 (see, FIG. 3 of U.S. patent publication. No. 2006/0195947) operatively linked to the lac promoter under control of the lacl repressor. The expression vector also contains the P15a origin of replication and the chloramphenicol resistance gene. The resulting plasmids were transformed into E. coli W3110, using standard methods known in the art. The transformants were isolated by subjecting the cells to chloramphenicol selection, as known in the art (see, e.g., U.S. Pat. No. 8,383,346 and WO2010/144103).

### Example 2

### Preparation of HTP polymerase—Containing Wet Cell Pellets

[0314] E. coli cells containing recombinant polymerase-encoding genes from monoclonal colonies were inoculated into 180 μl LB containing 1% glucose and 30 μg/mL chloramphenicol (CAM) in the wells of 96-well, shallow-well microtiter plates. The plates were sealed with O₂-permeable seals, and cultures were grown overnight at 30° C., 200 rpm, and 85% humidity. Then, 10 μl of each of the cell cultures were transferred into the wells of 96-well, deep-well plates containing 390 mL TB and 30 μg/mL CAM. The deep-well plates were sealed with O₂-permeable seals and incubated at 30° C., 250 rpm, and 85% humidity until OD600 0.6-0.8 was reached. The cell cultures were then induced by IPTG to a final concentration of 1 mM and incubated overnight under the same conditions as originally used. The cells were then pelleted using centrifugation at 4,000 rpm for 10 min. The supernatants were discarded, and the pellets were frozen at −80° C. prior to lysis.

### Example 3

### Preparation of HTP Polymerase-Containing Cell Lysates

[0315] First, 300 μl buffer containing 50 mM Tris-HCl pH 7.5 and 20 mM NaCl, were added to the cell paste in each well, produced as described in Example 2. The cells were shaken on a bench top shaker to resuspend. Resuspended cells were transferred to a 96 well Hard shell plate and lysed at 80° C. for 60 min. in a thermocycler. The plate was then centrifuged for 30 min at 4,000 rpm and 40° C. The clear supernatants were used in biocatalytic reactions to determine their activity, DNA sensitivity and thermostability levels.

### Example 4

### Improvements Over SEQ ID NO: 2 in qPCR Amplification Activity

[0316] SEQ ID NO: 2 was selected as the parent enzyme after screening wild type enzymes polymerase activity in a PCR assay using beta-lactam fragment in pCK vector (pCK-betalactamase) with primers SeqF1 (CCAATACGCAAACCGCCTC) (SEQ ID NO: 1379) and SeqR1 (CAACGGTGGTATATCCAGTGA) (SEQ ID NO: 1380) as well as activity in EvaEZ™ Fluorometric Polymerase Activity Assay Kit (Biotium, Catalog Number: 29051). Libraries of engineered genes were produced using established techniques (e.g., saturation mutagenesis, recombination of previously identified beneficial mutations). The polypeptides encoded by each gene were produced in HTP as described in Example 2, and the soluble lysate was generated as described in Example 3. Each variant was screened in two different qPCR reactions. A 2S μL reaction that comprised of 450 copies of SARS-CoV2 DNA fragment (Integrated DNA Technologies—IDT; Catalog #>CAT_10006625_2019-nCoV_N_Positive Control), containing the nucleocapsid gene, 500 nM N1 primers, 125 nM probe (CDC EUA assay, Catalog #2019-nCoVEUA-01), 0.2 mM dNTPs, RT buffer (10 mM Tris-HCl, 50 mM KCl, 1.5 mM MgCl₂), 0.63 vol % HTP lysate. qPCR cycling (95° C. 2 min, 95° C. 3 sec, 55° C. 30 sec for 45 cycles) in a CFX384 Touch Deep Well Real-Time PCR detection System (BioRad, USA). A 30 μL reaction that comprised of 500 copies of non-infections HIV RNA as well as Alinity™ Reagents —Polymerase Master Mix (Tris-HCl, Tween-20, Fish Gelatin; primers, probes, and dNTPs; Abbott, USA) (see WO2020132090 and US 20190100812, incorporated herein by reference), Polymerase Activator solution, internal control and 10 vol 0% HTP lysate. Alinity™ qPCR cycling conditions (52° C. 10 min, 95° C. 3 min, 92° C. 40 sec, 50° C. 1 min, 92° C. 30 sec, 60° C. 30 sec, 92° C. 30 sec, 55° C. 20 sec, 34° C. 40 sec for 46 cycles) in a CFX384 Touch Deep Well Real-Time PCR detection System (BioRad).

[0317] Activity relative to SEQ ID NO: 2 (Activity FIOP) was calculated as the Product Conc. (FAM END RFU where RFU is the Relative Fluorescence Units) Relative to SEQ ID NO: 2 and shown in Table 4.1 (see also, CDC 2019-Novel Coronavirus (2019-nCoV) Real-Time RT-PCR Diagnostic Panel, Catalog #2019-nCoVEUA-01).

TABLE 4.1
Pos Control FIOP Increase Activity (FAM END RFU) Relative to SEQ ID NO: 2

| | Amino Acid | Fold |
|---|---|---|
| SEQ ID | Differences | Improvement |
| NO: | (Relative to | (HIV) Relative to |
| (nt/aa) | SEQ ID NO: 2) | SEQ ID NO: 2 |
| 3/4 | E541D/S554G/L557I | +++ |
| 5/6 | R516K/E541D/S550T/S554N/L557I | +++ |
| 7/8 | M478L/V514I/A526S/Q527A | +++ |
| 9/10 | M478L/R516K/A526S/Q527A/A529V/E541D | +++ |
| 11/12 | E288R/M478I/V514I/R516K/E541D/L557I | +++ |
| 13/14 | E288R/M478L/R516K/E541D/S550T/S554G/L557I | +++ |
| 15/16 | S550T/S554N/L557I | +++ |
| 17/18 | M478L | +++ |
| 19/20 | N399T | +++ |
| 21/22 | V514I/R516K | +++ |
| 23/24 | N399T/R516K/A526S/G528A/A529V/S554N/L557I | +++ |
| 25/26 | M478L/R516K/E541D | +++ |
| 27/28 | M478I/E541D | +++ |
| 29/30 | E288R/N399T/V514I/S554G/L557I | +++ |
| 31/32 | M478L/V514I/S554N/L557I | +++ |
| 33/34 | E288R/M478L/A526S/S550T/S554N | +++ |
| 35/36 | M478L/E541D/S550T/L557I | +++ |
| 37/38 | E541D | +++ |
| 39/40 | E288R/V514I/A526S/E541D | +++ |
| 41/42 | S554N/L557I | +++ |
| 43/44 | N399T/M478L | +++ |
| 45/46 | E288R/V514I/S554N/L557I | +++ |
| 47/48 | M478L/V514I/R516K/A526S/Q527A/A529V/L557I | ++ |
| 49/50 | N399T/E541D/S550T/S554N | ++ |
| 51/52 | R516K/A529V/E541D/S554G/L557I | ++ |
| 53/54 | M478I/E541D/S554G/L557I | ++ |
| 55/56 | E288R/M478L/A526S/G528S/A529V/S554N/L557I | ++ |
| 57/58 | E288R/V514I/R516K/A529V/E541D | ++ |
| 59/60 | M478I/V514I/R516K/E541D | ++ |
| 61/62 | M478L/V514I/L557I | ++ |
| 63/64 | N399T/E541D/L557I | ++ |
| 65/66 | N399T/E541D | ++ |
| 67/68 | E288R/N399T/R516K/Q527A/E541D/L557I | ++ |
| 69/70 | E288R/M478I/V514I/E541D | ++ |
| 71/72 | E288R/V514I/R516K | ++ |
| 73/74 | L664A/K698E | ++ |
| 75/76 | N399T/M478L/R516K/E541D | ++ |
| 77/78 | N399T/G528A/S550T | ++ |
| 79/80 | N399T/M478I/V514I/E541D/L557I | ++ |
| 81/82 | E288R/M478L/V514I/R516K | ++ |
| 83/84 | V224L/L664A | ++ |
| 85/86 | M478L/A526S/Q527A/G528S | ++ |
| 87/88 | E288R/M478L/V514I/R516K/E541D/S550T/S554N | ++ |
| 89/90 | M478L/V514I/E541D/S554N | ++ |
| 91/92 | M478L/R516K | ++ |
| 93/94 | M478L/V514I/R516K/E541D/S554N/L557I | ++ |
| 95/96 | E288R/N399T/M478L/R516K/E541D | ++ |
| 97/98 | E288R/M478L/V514I/S554N/L557I | ++ |
| 99/100 | E288R/M478I/R516K | ++ |
| 101/102 | E288R/N399T/R516K/S554G/L557I | ++ |
| 103/104 | S550T/S554G | ++ |
| 105/106 | E288R/S550T/S554N | ++ |
| 107/108 | E288R/N399T/M478L/R516K/S550T/S554N | ++ |
| 109/110 | N399T/V514I/E541D/S550T/S554G | ++ |
| 111/112 | E288R/M478L/V514I/S554N | + |
| 113/114 | R199P | + |
| 115/116 | E288R/N399T/A529V/E541D | + |
| 117/118 | N399T/M478L/S554N | + |
| 119/120 | R516K/G528A/E541D/S554N/L557I | + |
| 121/122 | Y39F/R199P/K698E | + |
| 123/124 | N399T/M478L/A526S/G528S/A529V | + |
| 125/126 | E288R/N399T/V514I/E541D/S550T/S554N | + |
| 127/128 | E288R/E541D | + |
| 129/130 | E288R/M478I/V514I/S550T/S554N/L557I | + |
| 131/132 | E288R/N399T/M478L/R516K | + |
| 133/134 | S550T/S554N | + |
| 135/136 | A526S/A529V/S554G/L557I | + |
| 137/138 | E288R/M478I/L557I | + |
| 139/140 | E288R/M478L/V514I/S550T/S554N | + |
| 141/142 | M478L/E541D/S550T/S554N | + |
| 143/144 | R516K/A526S/G528S | + |
| 145/146 | E288R/A526S/G528S/S550T/S554N/L557I | + |
| 147/148 | R199P/L664A/K698E | + |
| 149/150 | V514I/A526S/G528S/A529V/S550T/L557I | + |
| 151/152 | E288R | + |
| 153/154 | N399T/S554N/L557I | + |
| 155/156 | E288R/S554G/L557I | + |
| 157/158 | N399T/V514I/E541D | + |
| 159/160 | E288R/M478L/V514I/Q527A/S554N/L557I | + |
| 161/162 | N399T/M478I/R516K/E541D/S554N | + |
| 163/164 | A87V/E541D/S554N | + |
| 165/166 | E288R/S550T/S554N/L557I | + |
| 167/168 | Q527A/A529V/E541D | + |
| 169/170 | G528S/A529V/S554N | + |
| 171/172 | M478L/S554G/L557I | + |
| 173/174 | M478L/V514I/R516K/E541D/S550T/S554G/L557I | + |
| 175/176 | R199P/R216K/R644Q/L664A | + |
| 177/178 | A396S/M478I/V514I/S554G/L557I/G694D | + |
| 179/180 | M478I | + |
| 181/182 | R241E/R644Q/A663E/L664A | + |
| 183/184 | N399T/M478I/S554N/L557I | + |
| 185/186 | E288R/N399T/S550T | + |
| 187/188 | E288R/R516K/A526S/Q527A/G528A/L557I | + |
| 189/190 | N399T/A526S/Q527A/G528S/A529V | + |
| 191/192 | E288R/M478L/A526S | + |
| 193/194 | N399T/M478L/V514I/R516K/A526S/Q527A/G528S/A529V/E541D | + |
| 195/196 | E288R/N399T/M478I/V514I/S554G/L557I | + |
| 197/198 | E288R/N399T/V514I/R516K/G528S | + |
| 199/200 | M478L/S554N | + |
| 201/202 | N399T/V514I/R516K | + |
| 203/204 | V514I | + |
| 205/206 | N399T/S550T/S554N | + |
| 207/208 | M478I/R516K | + |
| 209/210 | E288R/M478L/V514I/G528A/E541D/S554N | + |
| 211/212 | M478I/V514I/R516K/S554N | + |
| 213/214 | M478L/V514I/E541D | + |
| 215/216 | E288R/E541D/S554N/L557I | + |
| 217/218 | K698E | + |
| 219/220 | M478L/V514I/A526S/Q527A/G528A | + |

Levels of increased activity were determined relative to the reference polypeptide of SEQ ID NO: 2 and defined as follows: “+” 1.00 to 1.08 (first 50%), “++” >1.08 (next 30%), “+++” >1.15 (top 20%)

### Example 5

### Improvements Over SEQ ID NO: 220 in qPCR Enzyme Activity

[0318] SEQ ID NO: 220 was selected as the parent enzyme for this round of directed evolution. Libraries of engineered genes were produced using established techniques (e.g., saturation mutagenesis, recombination of previously identified beneficial mutations). The polypeptides encoded by each gene were produced in HTP as described in Example 2, and the soluble lysate was generated as described in Example 3. Each variant was screened in three different qPCR reactions. A 2S μL reaction that comprised of 50 copies of SARS-CoV2 DNA fragment (IDT Catalog #>CAT_10006625_2019-nCoV_N_Positive Control), containing the nucleocapsid gene, 500 nM N1 primers, 125 nM probe (CDC EUA assay, Catalog #2019-nCoVEUA-01), 0.2 mM dNTPs, RT buffer (10 mM Tris-HCl, 50 mM KCl, 1.5 mM MgCl₂), 0.016 vol 0% HTP lysate. qPCR cycling (95° C. 2 min, 95° C. 3 sec, 55° C. 30 sec for 45 cycles) in a CFX384 Touch Deep Well Real-Time PCR detection System (BioRad).

### HIV Assay Parameters

[0319] A 30 μL reaction that comprised of 200 copies of non-infections HIV RNA as well as Alinity™ Reagents Polymerase Master Mix (primers, probes, dNTPs; Abbott, USA), Polymerase Activator solution, internal control and 2.5 vol 00 HTP lysate. qPCR cycling (52° C. 10 min, 95° C. 3 min, 92° C. 40 sec, 50° C. 1 min, 92° C. 30 sec, 60° C. 30 sec, 92° C. 30 sec, 55° C. 20 sec, 34° C. 40 sec for 46 cycles) in a CFX384 Touch Deep Well Real-Time PCR detection System (BioRad).

[0320] Increased activity relative to the reference polypeptide of SEQ ID NO: 220 (Activity FIOP) was calculated as the improved FAM END RFU value formed by the variant compared to END RFU value of SEQ ID NO: 220 and shown in Table 5.1.

TABLE 5.1
Pos Control FIOP Increase Activity HIV Assay (FAM END RFU) Relative to SEQ ID NO: 220

| | Amino Acid | Amino Acid | Fold |
|---|---|---|---|
| SEQ ID | Differences | Differences | Improvement |
| NO: | (Relative to | (Relative to | (HIV) Relative to |
| (nt/aa) | SEQ ID NO: 220) | SEQ ID NO: 2) | SEQ ID NO: 220 |
| 249/250 | A257V/M758G | A257V/M478L/V514I/A526S/Q527A/G528A/M758G | +++ |
| 235/236 | G402R | G402R/M478L/V514I/A526S/Q527A/G528A | +++ |
| 251/252 | D558L | M478L/V514I/A526S/Q527A/G528A/D558L | +++ |
| 253/254 | G402Y | G402Y/M478L/V514I/A526S/Q527A/G528A | ++ |
| 255/256 | D558T | M478L/V514I/A526S/Q527A/G528A/D558T | ++ |
| 231/232 | E541N | M478L/V514I/A526S/Q527A/G528A/E541N | ++ |
| 243/244 | F760Y | M478L/V514I/A526S/Q527A/G528A/F760Y | ++ |
| 257/258 | L601T | M478L/V514I/A526S/Q527A/G528A/L601T | ++ |
| 259/260 | T398G | T398G/M478L/V514I/A526S/Q527A/G528A | + |
| 261/262 | M762A | M478L/V514I/A526S/Q527A/G528A/M762A | + |
| 227/228 | F760W | M478L/V514I/A526S/Q527A/G528A/F760W | + |
| 263/264 | D558G | M478L/V514I/A526S/Q527A/G528A/D558G | + |
| 265/266 | D589G | M478L/V514I/A526S/Q527A/G528A/D589G | + |
| 229/230 | E541S | M478L/V514I/A526S/Q527A/G528A/E541S | + |
| 267/268 | L544M | M478L/V514I/A526S/Q527A/G528A/L544M | + |
| 223/224 | N594A | M478L/V514I/A526S/Q527A/G528A/N594A | + |
| 225/226 | P559R | M478L/V514I/A526S/Q527A/G528A/P559R | + |

Levels of increased activity were determined relative to the reference polypeptide of SEQ ID NO: 220 and defined as follows: “+” 1.00 to 1.33 (first 50%), “++” >1.33 (next 30%), “+++” >1.49 (top 20%).

### HPV Assay Parameters

[0321] A 30 μL reaction that comprised of 1× Standard non-infections HPV RNA, Alinity™ Reagents Polymerase Master Mix (primers, probes, dNTPs; Abbott, USA), Polymerase Activator solution and 1.25 vol 0% HTP lysate. Extended qPCR cycling (46° C. 6 min, 97° C. 3.3 min, 97° C. 10 sec, 51.6° C. 1 min, 92° C. 10 sec, 51.6° C. 1 mi, 54.7° C. 40 sec for 42 cycles) in a CFX384 Touch Deep Well Real-Time PCR detection System (BioRad).

[0322] Increased activity relative to the reference polypeptide of SEQ ID NO: 220 (Activity FIOP) was calculated as the improved FAM END RFU value formed by the variant compared to END RFU value of SEQ ID NO: 220 and shown in Table 5.2.

TABLE 5.2
Pos Control FIOP Increase Activity HPV Assay
(FAM END RFU) Relative to SEQ ID NO: 220

| | Amino Acid | Amino Acid | Fold |
|---|---|---|---|
| SEQ ID | Differences | Differences | Improvement |
| NO: | (Relative to | (Relative to | (HPV) Relative to |
| (nt/aa) | SEQ ID NO: 220) | SEQ ID NO: 2) | SEQ ID NO: 220 |
| 221/222 | G515H | M478L/V514I/G515H/A526S/Q527A/G528A | +++ |
| 223/224 | N594A | M478L/V514I/A526S/Q527A/G528A/N594A | +++ |
| 225/226 | P559R | M478L/V514I/A526S/Q527A/G528A/P559R | +++ |
| 227/228 | F760W | M478L/V514I/A526S/Q527A/G528A/F760W | ++ |
| 229/230 | E541S | M478L/V514I/A526S/Q527A/G528A/E541S | ++ |
| 231/232 | E541N | M478L/V514I/A526S/Q527A/G528A/E541N | ++ |
| 233/234 | E753A | M478L/V514I/A526S/Q527A/G528A/E753A | ++ |
| 235/236 | G402R | G402R/M478L/V514I/A526S/Q527A/G528A | + |
| 237/238 | F760T | M478L/V514I/A526S/Q527A/G528A/F760T | + |
| 239/240 | T398Q | T398Q/M478L/V514I/A526S/Q527A/G528A | + |
| 241/242 | M758G | M478L/V514I/A526S/Q527A/G528A/M758G | + |
| 243/244 | F760Y | M478L/V514I/A526S/Q527A/G528A/F760Y | + |
| 245/246 | N399G | N399G/M478L/V514I/A526S/Q527A/G528A | + |
| 247/248 | F575W | M478L/V514I/A526S/Q527A/G528A/F575W | + |

Levels of increased activity were determined relative to the reference polypeptide of SEQ ID NO: 220 and defined as follows: “+” 1.01 to 1.26 (first 50%), “++” >1.26 (next 30%), “+++” >1.33(top 20%).

### Example 6

### Improvements Over SEQ ID NO: 226 in DNA Activity and Stability

[0323] SEQ ID NO: 226 was selected as the parent enzyme for this round of directed evolution. Libraries of engineered genes were produced using established techniques (e.g., saturation mutagenesis, recombination of previously identified beneficial mutations). The polypeptides encoded by each gene were produced in HTP as described in Example 2, and the soluble lysate was generated as described in Example 3. Each variant was screened in three different qPCR reactions. A 2S μL reaction that comprised of 50 copies of SARS-CoV2 DNA fragment (IDT Catalog #>CAT_10006625_2019-nCoV_N_Positive Control), containing the nucleocapsid gene, 500 nM N1 primers, 125 nM probe (CDC EUA assay, Catalog #2019-nCoVEUA-01), 0.2 mM dNTPs, RT buffer (10 mM Tris-HCl, 50 mM KCl, 1.5 mM MgCl₂), 0.06 vol 00 HTP lysate. qPCR cycling (95° C. 2 min, 95° C. 3 sec, 55° C. 30 sec for 45 cycles) in a CFX384 Touch Deep Well Real-Time PCR detection System (BioRad).

### HIV Assay Parameters

[0324] A 15 μL reaction that comprised of 50 copies of non-infections HIV RNA as well as Alinity™ Reagents Polymerase Master Mix (primers, probes, dNTPs; Abbott, USA), Polymerase Activator solution, internal control and 1.25 vol 0% HTP lysate. qPCR cycling (52° C. 10 min, 95° C. 3 min, 92° C. 40 sec, 50° C. 1 min, 92° C. 30 sec, 60° C. 30 sec, 92° C. 30 sec, 55° C. 20 sec, 34° C. 40 sec for 46 cycles) in a CFX384 Touch Deep Well Real-Time PCR detection System (BioRad).

[0325] Enzyme activity relative to SEQ ID NO: 226 (Activity FIOP) was calculated as the improved FAM END RFU value formed by the variant compared to END RFU value of SEQ ID NO: 226 and shown in Table 6.1.

TABLE 6.1
Pos Control FIOP Increase Activity (FAM END RFU) Relative to SEQ ID NO: 226

| | Amino Acid | Amino Acid | Fold |
|---|---|---|---|
| SEQ ID | Differences | Differences | Improvement |
| NO: | (Relative to | (Relative to | (HIV) Relative to |
| (nt/aa) | SEQ ID NO: 226) | SEQ ID NO: 2) | SEQ ID NO: 226 |
| 285/286 | I514V/G515T | M478L/G515T/A526S/Q527A/G528A/P559R | +++ |
| 281/282 | G377C/G515T | G377C/M478L/V514I/G515T/A526S/Q527A/G528A/ | +++ |
| | | P559R | |
| 293/294 | V73I | V73I/M478L/V514I/A526S/Q527A/G528A/P559R | +++ |
| 295/296 | A528G/E541N | M478L/V514I/A526S/Q527A/E541N/P559R | +++ |
| 283/284 | G515T | M478L/V514I/G515T/A526S/Q527A/G528A/P559R | ++ |
| 277/278 | V178L | V178L/M478L/V514I/A526S/Q527A/G528A/P559R | ++ |
| 289/290 | K503R | M478L/K503R/V514I/A526S/Q527A/G528A/P559R | ++ |
| 279/280 | G402Y/G515T | G402Y/M478L/V514I/G515T/A526S/Q527A/G528A/ | ++ |
| | | P559R | |
| 287/288 | G402Y | G402Y/M478L/V514I/A526S/Q527A/G528A/P559R | ++ |
| 291/292 | L239V | L239V/M478L/V514I/A526S/Q527A/G528A/P559R | ++ |
| 301/302 | H3N/G515T/R559P | H3N/M478L/V514I/G515T/A526S/Q527A/G528A | ++ |
| 303/304 | G377C/G515H/A528G/ | G377C/M478L/V514I/G515H/A526S/Q527A/E541N/ | ++ |
| | E541N/S554N/L557I | S554N/L557I/P559R | |
| 305/306 | G402R/I514V/G515T/ | G402R/M478L/G515T/A526S/Q527A/G528A/E541N | + |
| | E541N/R559P | | |
| 307/308 | I514V/G515T/E541G/ | M478L/G515T/A526S/Q527A/G528A/E541G | + |
| | R559P | | |
| 309/310 | I514V/G515T/R559P | M478L/G515T/A526S/Q527A/G528A | + |
| 275/276 | L660V | M478L/V514I/A526S/Q527A/G528A/P559R/L660V | + |
| 311/312 | G515T/R559P | M478L/V514I/G515T/A526S/Q527A/G528A | + |
| 313/314 | G515T/E541N/R559P | M478L/V514I/G515T/A526S/Q527A/G528A/E541N | + |
| 315/316 | G377C/G515T/R559P | G377C/M478L/V514I/G515T/A526S/Q527A/G528A | + |
| 299/300 | G515T/F575W | M478L/V514I/G515T/A526S/Q527A/G528A/P559R/ | + |
| | | F575W | |
| 269/270 | G515T/F760W | M478L/V514I/G515T/A526S/Q527A/G528A/P559R/ | + |
| | | F760W | |
| 317/318 | G402Y/G515H/R559P | G402Y/M478L/V514I/G515H/A526S/Q527A/G528A | + |
| 273/274 | L478M/G515T/F760W | V514I/G515T/A526S/Q527A/G528A/P559R/F760W | + |
| 319/320 | G515T/E541N/L557I | M478L/V514I/G515T/A526S/Q527A/G528A/E541N/ | + |
| | | L557I/P559R | |
| 271/272 | I514V/G515T/F760W | M478L/G515T/A526S/Q527A/G528A/P559R/F760W | + |

Levels of increased activity were determined relative to the reference polypeptide of SEQ ID NO: 226 and defined as follows: “+” 1.00 to 1.25 (first 50%), “++” >1.25 (next 30%), “+++” >1.84 (top 20%).

### HPV Assay Parameters

[0326] A 30 μL reaction that comprised of 1× Standard non-infections HPV RNA, Alinity™ Reagents Polymerase Master Mix (primers, probes, dNTPs; Abbott, USA), Polymerase Activator solution and 1.25 vol 0% HTP lysate. qPCR cycling (46° C. 6 min, 97° C. 3.3 min, 97° C. 3 sec, 51.6° C. 20 sec, 92° C. 3 sec, 51.6° C. 20 sec, 54.7° C. 16 sec for 42 cycles) in a CFX384 Touch Deep Well Real-Time PCR detection System (BioRad).

[0327] Enzyme activity relative to SEQ ID NO: 226 (Activity FnOP) was calculated as the improved FAM END RFU value formed by the variant compared to END RFU value of SEQ ID NO: 226 and shown in Table 6.2.

TABLE 6.2
Pos Control FIOP Increase Activity (FAM END RFU) Relative to SEQ ID NO: 226

| | Amino Acid | Amino Acid | Fold |
|---|---|---|---|
| SEQ ID | Differences | Differences | Improvement |
| NO: | (Relative to | (Relative to | (HPV) Relative to |
| (nt/aa) | SEQ ID NO: 226) | SEQ ID NO: 2) | SEQ ID NO: 226 |
| 269/270 | G515T/F760W | M478L/V514I/G515T/A526S/Q527A/G528A/P559R/ | +++ |
| | | F760W | |
| 271/272 | I514V/G515T/F760W | M478L/G515T/A526S/Q527A/G528A/P559R/F760W | +++ |
| 273/274 | L478M/G515T/F760W | V514I/G515T/A526S/Q527A/G528A/P559R/F760W | +++ |
| 275/276 | L660V | M478L/V514I/A526S/Q527A/G528A/P559R/L660V | ++ |
| 277/278 | V178L | V178L/M478L/V514I/A526S/Q527A/G528A/P559R | ++ |
| 279/280 | G402Y/G515T | G402Y/M478L/V514I/G515T/A526S/Q527A/G528A/ | ++ |
| | | P559R | |
| 281/282 | G377C/G515T | G377C/M478L/V514I/G515T/A526S/Q527A/G528A/ | ++ |
| | | P559R | |
| 283/284 | G515T | M478L/V514I/G515T/A526S/Q527A/G528A/P559R | ++ |
| 285/286 | I514V/G515T | M478L/G515T/A526S/Q527A/G528A/P559R | + |
| 287/288 | G402Y | G402Y/M478L/V514I/A526S/Q527A/G528A/P559R | + |
| 289/290 | K503R | M478L/K503R/V514I/A526S/Q527A/G528A/P559R | + |
| 291/292 | L239V | L239V/M478L/V514I/A526S/Q527A/G528A/P559R | + |
| 293/294 | V73I | V73I/M478L/V514I/A526S/Q527A/G528A/P559R | + |
| 295/296 | A528G/E541N | M478L/V514I/A526S/Q527A/E541N/P559R | + |
| 297/298 | R59K | R59K/M478L/V514I/A526S/Q527A/G528A/P559R | + |
| 299/300 | G515T/F575W | M478L/V514I/G515T/A526S/Q527A/G528A/P559R/ | + |
| | | F575W | |

Levels of increased activity were determined relative to the reference polypeptide of SEQ ID NO: 226 and defined as follows: “+” .02 to 1.54 (first 50%), “++” > 1.54 (next 30%), “+++” > 2.33 (top 20%).

### Example 7

### Improvements Over SEQ ID NO: 272 in Enzyme Activity and Inhibitor Tolerance

[0328] SEQ ID NO: 272 was selected as the parent enzyme for this round of directed evolution. Libraries of engineered genes were produced using established techniques (e.g., saturation mutagenesis, recombination of previously identified beneficial mutations). The polypeptides encoded by each gene were produced in HTP as described in Example 2, and the soluble lysate was generated as described in Example 3. Each variant was screened in two different qPCR reactions.

### HIV Assay Parameters

[0329] A 30 μL reaction that comprised of 2S copies of non-infections HIV RNA as well as Alinity™ Reagents Polymerase Master Mix (primers, probes, dNTPs; Abbott, USA), Polymerase Activator solution, internal control and 2 vol %˜HTP lysate with and without 16 mM guanidinium isothiocyanate (GITC) PCR inhibitor. qPCR cycling (52° C. 10 min, 95° C. 3 min, 92° C. 40 sec, 50° C. 1 min, 92° C. 30 sec, 60° C. 30 sec, 92° C. 30 sec, 55° C. 20 sec, 34° C. 40 sec for 46 cycles) in a CFX384 Touch Deep Well Real-Time PCR detection System (BioRad).

[0330] Polymerase stability and activity relative to SEQ ID NO: 272 (Activity FIOP) was calculated as the improved FAM END RFU value formed by the variant compared to END RFU value of SEQ ID NO: 272 and shown in Table 7.1.

TABLE 7.1
Pos Control FIOP Product (FAM END RFU) Relative to SEQ ID NO: 272

| | Amino Acid | Amino Acid | Fold |
|---|---|---|---|
| SEQ ID | Differences | Differences | Improvement |
| NO: | (Relative to | (Relative to | (HIV) Relative to |
| (nt/aa) | SEQ ID NO: 272) | SEQ ID NO: 2) | SEQ ID NO: 272 |
| 387/388 | D743V | M478L/G515T/A526S/Q527A/G528A/P559R/D743V/ | +++ |
| | | F760W | |
| 455/456 | Y740V | M478L/G515T/A526S/Q527A/G528A/P559R/Y740V/ | +++ |
| | | F760W | |
| 457/458 | G483D/L660V | M478L/G483D/G515T/A526S/Q527A/G528A/P559R/ | +++ |
| | | L660V/F760W | |
| 445/446 | E477V | E477V/M478L/G515T/A526S/Q527A/G528A/P559R/ | +++ |
| | | F760W | |
| 385/386 | A396L | A396L/M478L/G515T/A526S/Q527A/G528A/P559R/ | +++ |
| | | F760W | |
| 459/460 | A257V/G377C | A257V/G377C/M478L/G515T/A526S/Q527A/G528A/ | +++ |
| | | P559R/F760W | |
| 461/462 | A579L | M478L/G515T/A526S/Q527A/G528A/P559R/A579L/ | +++ |
| | | F760W | |
| 463/464 | D368H | D368H/M478L/G515T/A526S/Q527A/G528A/P559R/ | +++ |
| | | F760W | |
| 465/466 | L792Y | M478L/G515T/A526S/Q527A/G528A/P559R/F760W/ | +++ |
| | | L792Y | |
| 411/412 | Q691W | M478L/G515T/A526S/Q527A/G528A/P559R/Q691W/ | +++ |
| | | F760W | |
| 467/468 | T721A/A745T | M478L/G515T/A526S/Q527A/G528A/P559R/T721A/ | +++ |
| | | A745T/F760W | |
| 349/350 | V178L/A257V/G377C/ | V178L/A257V/G377C/G402R/V403I/M478L/G483D/ | +++ |
| | G402R/V403I/ | G515T/A526S/Q527A/G528A/P559R/R604H/ | |
| | G483D/R604H/L660V | L660V/F760W | |
| 347/348 | L660V | M478L/G515T/A526S/Q527A/G528A/P559R/L660V/ | +++ |
| | | F760W | |
| 429/430 | P395H | P395H/M478L/G515T/A526S/Q527A/G528A/P559R/ | +++ |
| | | F760W | |
| 361/362 | G402R/V403I/G483D/ | G402R/V403I/M478L/G483D/G515T/A526S/Q527A/ | +++ |
| | S554N/L557I | G528A/S554N/L557I/P559R/F760W | |
| 389/390 | A396R | A396R/M478L/G515T/A526S/Q527A/G528A/P559R/ | +++ |
| | | F760W | |
| 427/428 | A396F | A396F/M478L/G515T/A526S/Q527A/G528A/P559R/ | +++ |
| | | F760W | |
| 435/436 | E482S | M478L/E482S/G515T/A526S/Q527A/G528A/P559R/ | ++ |
| | | F760W | |
| 469/470 | L474A | L474A/M478L/G515T/A526S/Q527A/G528A/P559R/ | ++ |
| | | F760W | |
| 471/472 | D743H | M478L/G515T/A526S/Q527A/G528A/P559R/D743H/ | ++ |
| | | F760W | |
| 473/474 | T578A | M478L/G515T/A526S/Q527A/G528A/P559R/T578A/ | ++ |
| | | F760W | |
| 395/396 | E475A | E475A/M478L/G515T/A526S/Q527A/G528A/P559R/ | ++ |
| | | F760W | |
| 475/476 | H687A | M478L/G515T/A526S/Q527A/G528A/P559R/H687A/ | ++ |
| | | F760W | |
| 477/478 | E541D/L601T/R604H | M478L/G515T/A526S/Q527A/G528A/E541D/P559R/ | ++ |
| | | L601T/R604H/F760W | |
| 479/480 | E328V | E328V/M478L/G515T/A526S/Q527A/G528A/P559R/ | ++ |
| | | F760W | |
| 481/482 | A396L | A396L/M478L/G515T/A526S/Q527A/G528A/P559R/ | ++ |
| | | F760W | |
| 355/356 | G377C/L601T/L660V | G377C/M478L/G515T/A526S/Q527A/G528A/P559R/ | ++ |
| | | L601T/L660V/F760W | |
| 453/454 | P395S | P395S/M478L/G515T/A526S/Q527A/G528A/P559R/ | ++ |
| | | F760W | |
| 483/484 | E475Y | E475Y/M478L/G515T/A526S/Q527A/G528A/P559R/ | ++ |
| | | F760W | |
| 393/394 | G377C/V403I/E541D/ | G377C/V403I/M478L/G515T/A526S/Q527A/G528A/ | ++ |
| | R604H | E541D/P559R/R604H/F760W | |
| 485/486 | P395G | P395G/M478L/G515T/A526S/Q527A/G528A/P559R/ | ++ |
| | | F760W | |
| 437/438 | F291L | F291L/M478L/G515T/A526S/Q527A/G528A/P559R/ | ++ |
| | | F760W | |
| 377/378 | V178L | V178L/M478L/G515T/A526S/Q527A/G528A/P559R/ | ++ |
| | | F760W | |
| 487/488 | A257V/A528G | A257V/M478L/G515T/A526S/Q527A/P559R/F760W | ++ |
| 489/490 | A257V/A528G/S554N | A257V/M478L/G515T/A526S/Q527A/S554N/P559R/ | ++ |
| | | F760W | |
| 407/408 | E475V | E475V/M478L/G515T/A526S/Q527A/G528A/P559R/ | ++ |
| | | F760W | |
| 491/492 | A768S | M478L/G515T/A526S/Q527A/G528A/P559R/F760W/ | ++ |
| | | A768S | |
| 421/422 | S685R | M478L/G515T/A526S/Q527A/G528A/P559R/S685R/ | ++ |
| | | F760W | |
| 399/400 | L448I | L448I/M478L/G515T/A526S/Q527A/G528A/P559R/ | ++ |
| | | F760W | |
| 341/342 | A257V/G377C | A257V/G377C/M478L/G515T/A526S/Q527A/G528A/ | ++ |
| | | P559R/F760W | |
| 493/494 | A257V | A257V/M478L/G515T/A526S/Q527A/G528A/P559R/ | ++ |
| | | F760W | |
| 495/496 | A257V | A257V/M478L/G515T/A526S/Q527A/G528A/P559R/ | ++ |
| | | F760W | |
| 497/498 | A396P | A396P/M478L/G515T/A526S/Q527A/G528A/P559R/ | ++ |
| | | F760W | |
| 345/346 | A257V/G377C/G402Y | A257V/G377C/G402Y/M478L/G515T/A526S/Q527A/ | + |
| | | G528A/P559R/F760W | |
| 403/404 | P395G | P395G/M478L/G515T/A526S/Q527A/G528A/P559R/ | + |
| | | F760W | |
| 323/324 | A257V/R604H/L660V | A257V/M478L/G515T/A526S/Q527A/G528A/P559R/ | + |
| | | R604H/L660V/F760W | |
| 499/500 | D770E | M478L/G515T/A526S/Q527A/G528A/P559R/F760W/ | + |
| | | D770E | |
| 501/502 | A257V/G377C/G483D/ | A257V/G377C/M478L/G483D/G515T/A526S/Q527A/ | + |
| | E541N | G528A/E541N/P559R/F760W | |
| 503/504 | L542R | M478L/G515T/A526S/Q527A/G528A/L542R/P559R/ | + |
| | | F760W | |
| 331/332 | G377C/G402Y/E541N/ | G377C/G402Y/M478L/G515T/A526S/Q527A/G528A/ | + |
| | L660V | E541N/P559R/L660V/F760W | |
| 505/506 | A257V/G402Y/V403I | A257V/G402Y/V403I/M478L/G515T/A526S/Q527A/ | + |
| | | G528A/P559R/F760W | |
| 327/328 | G402R/R604H/L660V | G402R/M478L/G515T/A526S/Q527A/G528A/P559R/ | + |
| | | R604H/L660V/F760W | |
| 339/340 | A257V | A257V/M478L/G515T/A526S/Q527A/G528A/P559R/ | + |
| | | F760W | |
| 507/508 | A257V/V403I/E541N | A257V/V403I/M478L/G515T/A526S/Q527A/G528A/ | + |
| | | E541N/P559R/F760W | |
| 509/510 | L474G | L474G/M478L/G515T/A526S/Q527A/G528A/P559R/ | + |
| | | F760W | |
| 383/384 | D743H | M478L/G515T/A526S/Q527A/G528A/P559R/D743H/ | + |
| | | F760W | |
| 511/512 | R604H | M478L/G515T/A526S/Q527A/G528A/P559R/R604H/ | + |
| | | F760W | |
| 381/382 | A257V/G377C/E541D/ | A257V/G377C/M478L/G515T/A526S/Q527A/G528A/ | + |
| | R604H | E541D/P559R/R604H/F760W | |
| 397/398 | V178L/A257V/V403I/ | V178L/A257V/V403I/M478L/G515T/A526S/Q527A/ | + |
| | A528G | P559R/F760W | |
| 379/380 | L474A | L474A/M478L/G515T/A526S/Q527A/G528A/P559R/ | + |
| | | F760W | |
| 513/514 | G402Y/R604H | G402Y/M478L/G515T/A526S/Q527A/G528A/P559R/ | + |
| | | R604H/F760W | |
| 515/516 | Q691S | M478L/G515T/A526S/Q527A/G528A/P559R/Q691S/ | + |
| | | F760W | |
| 517/518 | A257V/E316G/E541D/ | A257V/E316G/M478L/G515T/A526S/Q527A/G528A/ | + |
| | F575W/R604H | E541D/P559R/F575W/R604H/F760W | |
| 417/418 | G377C/E541N/F575W/ | G377C/M478L/G515T/A526S/Q527A/G528A/E541N/ | + |
| | R604H/L660V | P559R/F575W/R604H/L660V/F760W | |
| 519/520 | K327L | K327L/M478L/G515T/A526S/Q527A/G528A/P559R/ | + |
| | | F760W | |
| 521/522 | I704V | M478L/G515T/A526S/Q527A/G528A/P559R/I704V/ | + |
| | | F760W | |
| 451/452 | E328L | E328L/M478L/G515T/A526S/Q527A/G528A/P559R/ | + |
| | | F760W | |
| 357/358 | V178L/G377C | V178L/G377C/M478L/G515T/A526S/Q527A/G528A/ | + |
| | | P559R/F760W | |
| 373/374 | L792F | M478L/G515T/A526S/Q527A/G528A/P559R/F760W/ | + |
| | | L792F | |
| 523/524 | V403I/E541N/R604H/ | V403I/M478L/G515T/A526S/Q527A/G528A/E541N/ | + |
| | L660V | P559R/R604H/L660V/F760W | |
| 525/526 | A257V/G377C/V403I/ | A257V/G377C/V403I/M478L/G483D/G515T/A526S/ | + |
| | G483D/E541D/ | Q527A/G528A/E541D/P559R/L601T/R604H/ | |
| | L601T/R604H | F760W | |
| 337/338 | A257V/G402Y | A257V/G402Y/M478L/G515T/A526S/Q527A/G528A/ | + |
| | | P559R/F760W | |
| 363/364 | V178L/A257V/G377C/ | V178L/A257V/G377C/M478L/G515T/A526S/Q527A/ | + |
| | D558T/L660V | G528A/D558T/P559R/L660V/F760W | |
| 441/442 | A579Q | M478L/G515T/A526S/Q527A/G528A/P559R/A579Q/ | + |
| | | F760W | |
| 527/528 | Y740S | M478L/G515T/A526S/Q527A/G528A/P559R/Y740S/ | + |
| | | F760W | |
| 359/360 | G377C/G490W/L660V | G377C/M478L/G490W/G515T/A526S/Q527A/G528A/ | + |
| | | P559R/L660V/F760W | |
| 391/392 | E479L | M478L/E479L/G515T/A526S/Q527A/G528A/P559R/ | + |
| | | F760W | |
| 365/366 | A257V/G402Y/V403I/ | A257V/G402Y/V403I/M478L/G483D/G515T/A526S/ | + |
| | G483D/L660V | Q527A/G528A/P559R/L660V/F760W | |
| 419/420 | V178L/A257V/L601T/ | V178L/A257V/M478L/G515T/A526S/Q527A/G528A/ | + |
| | R604H | P559R/L601T/R604H/F760W | |
| 529/530 | A257V | A257V/M478L/G515T/A526S/Q527A/G528A/P559R/ | + |
| | | F760W | |
| 325/326 | V178L/A257V/G402R/ | V178L/A257V/G402R/A404T/M478L/G515T/A526S/ | + |
| | A404T/A528G/ | Q527A/L557I/P559R/L660V/F760W | |
| | L557I/L660V | | |
| 409/410 | L448C | L448C/M478L/G515T/A526S/Q527A/G528A/P559R/ | + |
| | | F760W | |
| 321/322 | G402R/A528G/E541D/ | G402R/M478L/G515T/A526S/Q527A/E541D/P559R/ | + |
| | L660V | L660V/F760W | |
| 531/532 | G402R/A528G/E541G/ | G402R/M478L/G515T/A526S/Q527A/E541G/P559R/ | + |
| | L601T | L601T/F760W | |
| 533/534 | A257V/G377C | A257V/G377C/M478L/G515T/A526S/Q527A/G528A/ | + |
| | | P559R/F760W | |
| 423/424 | G377C/R604H/L660V | G377C/M478L/G515T/A526S/Q527A/G528A/P559R/ | + |
| | | R604H/L660V/F760W | |

Levels of increased activity were determined relative to the reference polypeptide of SEQ ID NO: 272 and defined as follows: “+” 1.00 to 1.45, “++” > 1.45, “+++” > 1.93.

### HPV Assay Parameters

[0331] A 30 μL reaction that comprised of half of X Standard non-infections HPV RNA, Alinity™ Reagents Polymerase Master Mix (primers, probes, dNTPs; Abbott, USA), Polymerase Activator solution and 0.25 vol 0% HTP lysate. qPCR cycling (46° C. 6 min, 97° C. 3.3 min, 97° C. 3 sec, 51.6° C. 20 sec, 92° C. 3 sec, 51.6° C. 20 sec, 54.7° C. 16 sec for 42 cycles) in a CFX384 Touch Deep Well Real-Time PCR detection System (BioRad).

[0332] Polymerase stability and activity relative to SEQ ID NO: 272 (Activity FROP) was calculated as the improved FAM END RFU value formed by the variant compared to END RFU value of SEQ ID NO: 272 and shown in Table 7.2.

TABLE 7.2
Pos Control FIOP Increase Activity (FAM END RFU) Relative to SEQ ID NO: 272

| | Amino Acid | Amino Acid | Fold |
|---|---|---|---|
| SEQ ID | Differences | Differences | Improvement |
| NO: | (Relative to | (Relative to | (HPV) Relative to |
| (nt/aa) | SEQ ID NO: 272) | SEQ ID NO: 2) | SEQ ID NO: 272 |
| 321/322 | G402R/A528G/E541D/ | G402R/M478L/G515T/A526S/Q527A/E541D/ | +++ |
| | L660V | P559R/L660V/F760W | |
| 323/324 | A257V/R604H/ | A257V/M478L/G515T/A526S/Q527A/G528A/ | +++ |
| | L660V | P559R/R604H/L660V/F760W | |
| 325/326 | V178L/A257V/ | V178L/A257V/G402R/A404T/M478L/G515T/ | +++ |
| | G402R/A404T/A528G/ | A526S/Q527A/L557I/P559R/L660V/F760W | |
| | L557I/L660V | | |
| 327/328 | G402R/R604H/ | G402R/M478L/G515T/A526S/Q527A/G528A/ | +++ |
| | L660V | P559R/R604H/L660V/F760W | |
| 329/330 | A257V/G402Y/ | A257V/G402Y/M478L/G515T/A526S/Q527A/ | +++ |
| | E541G/L660V | G528A/E541G/P559R/L660V/F760W | |
| 331/332 | G377C/G402Y/ | G377C/G402Y/M478L/G515T/A526S/Q527A/ | +++ |
| | E541N/L660V | G528A/E541N/P559R/L660V/F760W | |
| 333/334 | A257V/G377C/ | A257V/G377C/G402Y/M478L/G515T/A526S/ | +++ |
| | G402Y/L660V | Q527A/G528A/P559R/L660V/F760W | |
| 335/336 | G483D/L660V | M478L/G483D/G515T/A526S/Q527A/G528A/ | +++ |
| | | P559R/L660V/F760W | |
| 337/338 | A257V/G402Y | A257V/G402Y/M478L/G515T/A526S/Q527A/ | +++ |
| | | G528A/P559R/F760W | |
| 339/340 | A257V | A257V/M478L/G515T/A526S/Q527A/G528A/ | +++ |
| | | P559R/F760W | |
| 341/342 | A257V/G377C | A257V/G377C/M478L/G515T/A526S/Q527A/ | +++ |
| | | G528A/P559R/F760W | |
| 343/344 | V178L/L660V | V178L/M478L/G515T/A526S/Q527A/G528A/ | +++ |
| | | P559R/L660V/F760W | |
| 345/346 | A257V/G377C/ | A257V/G377C/G402Y/M478L/G515T/A526S/ | +++ |
| | G402Y | Q527A/G528A/P559R/F760W | |
| 347/348 | L660V | M478L/G515T/A526S/Q527A/G528A/P559R/ | ++ |
| | | L660V/F760W | |
| 349/350 | V178L/A257V/ | V178L/A257V/G377C/G402R/V403I/M478L/ | ++ |
| | G377C/G402R/V403I/ | G483D/G515T/A526S/Q527A/G528A/P559R/ | |
| | G483D/R604H/L660V | R604H/L660V/F760W | |
| 351/352 | G377C | G377C/M478L/G515T/A526S/Q527A/G528A/ | ++ |
| | | P559R/F760W | |
| 353/354 | V178L/G402R/V403I/ | V178L/G402R/V403I/M478L/G515T/A526S/ | ++ |
| | A528G/E541G/ | Q527A/E541G/P559R/L660V/F760W | |
| | L660V | | |
| 355/356 | G377C/L601T/L660V | G377C/M478L/G515T/A526S/Q527A/G528A/ | ++ |
| | | P559R/L601T/L660V/F760W | |
| 357/358 | V178L/G377C | V178L/G377C/M478L/G515T/A526S/Q527A/ | ++ |
| | | G528A/P559R/F760W | |
| 359/360 | G377C/G490W/ | G377C/M478L/G490W/G515T/A526S/Q527A/ | ++ |
| | L660V | G528A/P559R/L660V/F760W | |
| 361/362 | G402R/V403I/G483D/ | G402R/V403I/M478L/G483D/G515T/A526S/ | ++ |
| | S554N/L557I | Q527A/G528A/S554N/L557I/P559R/F760W | |
| 363/364 | V178L/A257V/ | V178L/A257V/G377C/M478L/G515T/A526S/ | ++ |
| | G377C/D558T/L660V | Q527A/G528A/D558T/P559R/L660V/F760W | |
| 365/366 | A257V/G402Y/V403I/ | A257V/G402Y/V403I/M478L/G483D/G515T/ | ++ |
| | G483D/L660V | A526S/Q527A/G528A/P559R/L660V/F760W | |
| 367/368 | V178L/S554N/L557I/ | V178L/M478L/G515T/A526S/Q527A/G528A/ | ++ |
| | D558T/L660V | S554N/L557I/D558T/P559R/L660V/F760W | |
| 369/370 | S554N/L557I/L660V | M478L/G515T/A526S/Q527A/G528A/S554N/ | ++ |
| | | L557I/P559R/L660V/F760W | |
| 371/372 | V178L/G483D/E541N/ | V178L/M478L/G483D/G515T/A526S/Q527A/ | ++ |
| | Q545L/S554N/ | G528A/E541N/Q545L/S554N/L557I/P559R/R604H/ | |
| | L557I/R604H/L660V | L660V/F760W | |
| 373/374 | L792F | M478L/G515T/A526S/Q527A/G528A/P559R/ | ++ |
| | | F760W/L792F | |
| 375/376 | G402Y/V403I/G483D/ | G402Y/V403I/M478L/G483D/G515T/A526S/ | ++ |
| | R604H/L660V | Q527A/G528A/P559R/R604H/L660V/F760W | |
| 377/378 | V178L | V178L/M478L/G515T/A526S/Q527A/G528A/ | ++ |
| | | P559R/F760W | |
| 379/380 | L474A | L474A/M478L/G515T/A526S/Q527A/G528A/ | ++ |
| | | P559R/F760W | |
| 381/382 | A257V/G377C/ | A257V/G377C/M478L/G515T/A526S/Q527A/ | ++ |
| | E541D/R604H | G528A/E541D/P559R/R604H/F760W | |
| 383/384 | D743H | M478L/G515T/A526S/Q527A/G528A/P559R/ | ++ |
| | | D743H/F760W | |
| 385/386 | A396L | A396L/M478L/G515T/A526S/Q527A/G528A/ | ++ |
| | | P559R/F760W | |
| 387/388 | D743V | M478L/G515T/A526S/Q527A/G528A/P559R/ | + |
| | | D743V/F760W | |
| 389/390 | A396R | A396R/M478L/G515T/A526S/Q527A/G528A/ | + |
| | | P559R/F760W | |
| 391/392 | E479L | M478L/E479L/G515T/A526S/Q527A/G528A/ | + |
| | | P559R/F760W | |
| 393/394 | G377C/V403I/E541D/ | G377C/V403I/M478L/G515T/A526S/Q527A/ | + |
| | R604H | G528A/E541D/P559R/R604H/F760W | |
| 395/396 | E475A | E475A/M478L/G515T/A526S/Q527A/G528A/ | + |
| | | P559R/F760W | |
| 397/398 | V178L/A257V/ | V178L/A257V/V403I/M478L/G515T/A526S/ | + |
| | V403I/A528G | Q527A/P559R/F760W | |
| 399/400 | L448I | L448I/M478L/G515T/A526S/Q527A/G528A/ | + |
| | | P559R/F760W | |
| 401/402 | Q577S | M478L/G515T/A526S/Q527A/G528A/P559R/ | + |
| | | Q577S/F760W | |
| 403/404 | P395G | P395G/M478L/G515T/A526S/Q527A/G528A/ | + |
| | | P559R/F760W | |
| 405/406 | A769Q | M478L/G515T/A526S/Q527A/G528A/P559R/ | + |
| | | F760W/A769Q | |
| 407/408 | E475V | E475V/M478L/G515T/A526S/Q527A/G528A/ | + |
| | | P559R/F760W | |
| 409/410 | L448C | L448C/M478L/G515T/A526S/Q527A/G528A/ | + |
| | | P559R/F760W | |
| 411/412 | Q691W | M478L/G515T/A526S/Q527A/G528A/P559R/ | + |
| | | Q691W/F760W | |
| 413/414 | N677L | M478L/G515T/A526S/Q527A/G528A/P559R/ | + |
| | | N677L/F760W | |
| 415/416 | I704L | M478L/G515T/A526S/Q527A/G528A/P559R/ | + |
| | | I704L/F760W | |
| 417/418 | G377C/E541N/F575W/ | G377C/M478L/G515T/A526S/Q527A/G528A/ | + |
| | R604H/L660V | E541N/P559R/F575W/R604H/L660V/F760W | |
| 419/420 | V178L/A257V/L601T/ | V178L/A257V/M478L/G515T/A526S/Q527A/ | + |
| | R604H | G528A/P559R/L601T/R604H/F760W | |
| 421/422 | S685R | M478L/G515T/A526S/Q527A/G528A/P559R/ | + |
| | | S685R/F760W | |
| 423/424 | G377C/R604H/ | G377C/M478L/G515T/A526S/Q527A/G528A/ | + |
| | L660V | P559R/R604H/L660V/F760W | |
| 425/426 | R749M | M478L/G515T/A526S/Q527A/G528A/P559R/ | + |
| | | R749M/F760W | |
| 427/428 | A396F | A396F/M478L/G515T/A526S/Q527A/G528A/ | + |
| | | P559R/F760W | |
| 429/430 | P395H | P395H/M478L/G515T/A526S/Q527A/G528A/ | + |
| | | P559R/F760W | |
| 431/432 | E475S | E475S/M478L/G515T/A526S/Q527A/G528A/ | + |
| | | P559R/F760W | |
| 433/434 | L474C | L474C/M478L/G515T/A526S/Q527A/G528A/ | + |
| | | P559R/F760W | |
| 435/436 | E482S | M478L/E482S/G515T/A526S/Q527A/G528A/ | + |
| | | P559R/F760W | |
| 437/438 | F291L | F291L/M478L/G515T/A526S/Q527A/G528A/ | + |
| | | P559R/F760W | |
| 439/440 | L448V | L448V/M478L/G515T/A526S/Q527A/G528A/ | + |
| | | P559R/F760W | |
| 441/442 | A579Q | M478L/G515T/A526S/Q527A/G528A/P559R/ | + |
| | | A579Q/F760W | |
| 443/444 | V178L/E541G/S550C/ | V178L/M478L/G515T/A526S/Q527A/G528A/ | + |
| | R604H | E541G/S550C/P559R/R604H/F760W | |
| 445/446 | E477V | E477V/M478L/G515T/A526S/Q527A/G528A/ | + |
| | | P559R/F760W | |
| 447/448 | V178L/A257V | V178L/A257V/M478L/G515T/A526S/Q527A/ | + |
| | | G528A/P559R/F760W | |
| 449/450 | A257V/G402R/G490W/ | A257V/G402R/M478L/G490W/G515T/A526S/ | + |
| | A528G/E541G/ | Q527A/E541G/P559R/L660V/F760W | |
| | L660V | | |
| 451/452 | E328L | E328L/M478L/G515T/A526S/Q527A/G528A/ | + |
| | | P559R/F760W | |
| 453/454 | P395S | P395S/M478L/G515T/A526S/Q527A/G528A/ | + |
| | | P559R/F760W | |

Levels of increased activity were determined relative to the reference polypeptide of SEQ ID NO: 272 and defined as follows: “+” 1.01 to 1.70, “++” > 1.70, “+++” > 4.76.

### Example 8

### Improvements Over SEQ ID NO: 328 in Enzyme Activity and Inhibitor Tolerance

### HIV Assay Parameters

[0333] A 15 μL reaction that comprised of 25 copies of non-infections HIV RNA as well as Alinity™ Reagents Polymerase Master Mix (primers, probes, dNTPs; Abbott, USA), Polymerase Activator solution, internal control and 1.25 vol 0% HTP lysate with and without (12.5 mM GITC, 0.25% ETOH, 5 ng gDNA) PCR inhibitors. qPCR cycling (52° C. 10 min, 95° C. 3 min, 92° C. 40 sec, 50° C. 1 min, 92° C. 30 sec, 60° C. 30 sec, 92° C. 30 sec, 55° C. 20 sec, 34° C. 40 sec for 46 cycles) in a CFX384 Touch Deep Well Real-Time PCR detection System (BioRad).

[0334] Polymerase stability and activity relative to SEQ ID NO: 328 (FHOP FAM END RFU) was calculated as the improved FAM END RFU value formed by the variant compared to END RFU value of SEQ ID NO: 328 and shown in Table 8.1.

TABLE 8.1
Pos Control FIOP FAM END RFU Relative to SEQ ID NO: 328

| | Amino Acid | Amino Acid | Fold |
|---|---|---|---|
| SEQ ID | Differences | Differences | Improvement |
| NO: | (Relative to | (Relative to | (HIV) Relative to |
| (nt/aa) | SEQ ID NO: 328) | SEQ ID NO: 2) | SEQ ID NO: 328 |
| 589/590 | E475S/I704V | G402R/E475S/M478L/G515T/A526S/Q527A/ | +++ |
| | | G528A/P559R/R604H/L660V/I704V/F760W | |
| 573/574 | A257V/L792F | A257V/G402R/M478L/G515T/A526S/Q527A/ | +++ |
| | | G528A/P559R/R604H/L660V/F760W/L792F | |
| 579/580 | A257V/L448C/L474A/ | A257V/G402R/L448C/L474A/E475S/M478L/ | +++ |
| | E475S | G515T/A526S/Q527A/G528A/P559R/R604H/ | |
| | | L660V/F760W | |
| 543/544 | V178L/P395H/A745T | V178L/P395H/G402R/M478L/G515T/A526S/ | +++ |
| | | Q527A/G528A/P559R/R604H/L660V/A745T/ | |
| | | F760W | |
| 557/558 | K79T | K79T/G402R/M478L/G515T/A526S/Q527A/ | +++ |
| | | G528A/P559R/R604H/L660V/F760W | |
| 575/576 | A257V/P395S | A257V/P395S/G402R/M478L/G515T/A526S/ | +++ |
| | | Q527A/G528A/P559R/R604H/L660V/F760W | |
| 591/592 | P742K | G402R/M478L/G515T/A526S/Q527A/G528A/ | +++ |
| | | P559R/R604H/L660V/P742K/F760W | |
| 593/594 | P667W | G402R/M478L/G515T/A526S/Q527A/G528A/ | +++ |
| | | P559R/R604H/L660V/P667W/F760W | |
| 595/596 | P21N | P21N/G402R/M478L/G515T/A526S/Q527A/ | +++ |
| | | G528A/P559R/R604H/L660V/F760W | |
| 537/538 | A257V/L474A | A257V/G402R/L474A/M478L/G515T/A526S/ | +++ |
| | | Q527A/G528A/P559R/R604H/L660V/F760W | |
| 597/598 | A257V/L448I | A257V/G402R/L448I/M478L/G515T/A526S/ | +++ |
| | | Q527A/G528A/P559R/R604H/L660V/F760W | |
| 599/600 | A257V/E316G/P395H/ | A257V/E316G/P395H/G402R/M478L/E482S/ | +++ |
| | E482S/H687A/A745T | G515T/A526S/Q527A/G528A/P559R/R604H/ | |
| | | L660V/H687A/A745T/F760W | |
| 551/552 | L474A/E475A | G402R/L474A/E475A/M478L/G515T/A526S/ | ++ |
| | | Q527A/G528A/P559R/R604H/L660V/F760W | |
| 601/602 | E804R | G402R/M478L/G515T/A526S/Q527A/G528A/ | ++ |
| | | P559R/R604H/L660V/F760W/E804R | |
| 567/568 | R233K | R233K/G402R/M478L/G515T/A526S/Q527A/ | ++ |
| | | G528A/P559R/R604H/L660V/F760W | |
| 545/546 | F291L/P395H/H687A/ | F291L/P395H/G402R/M478L/G515T/A526S/ | ++ |
| | A745T | Q527A/G528A/P559R/R604H/L660V/H687A/ | |
| | | A745T/F760W | |
| 603/604 | I704V | G402R/M478L/G515T/A526S/Q527A/G528A/ | ++ |
| | | P559R/R604H/L660V/I704V/F760W | |
| 605/606 | V178L/A257V/P395S/ | V178L/A257V/P395S/G402R/M478L/E482S/ | ++ |
| | E482S/A579L/H687A/ | G515T/A526S/Q527A/G528A/P559R/A579L/ | |
| | A745T | R604H/L660V/H687A/A745T/F760W | |
| 607/608 | A257V/A579L | A257V/G402R/M478L/G515T/A526S/Q527A/ | ++ |
| | | G528A/P559R/A579L/R604H/L660V/F760W | |
| 609/610 | A257V/F291L/P395S/ | A257V/F291L/P395S/G402R/E475V/M478L/ | ++ |
| | E475V/E541N/H687A | G515T/A526S/Q527A/G528A/E541N/P559R/ | |
| | | R604H/L660V/H687A/F760W | |
| 611/612 | A257V/A768S | A257V/G402R/M478L/G515T/A526S/Q527A/ | ++ |
| | | G528A/P559R/R604H/L660V/F760W/A768S | |
| 569/570 | E699V | G402R/M478L/G515T/A526S/Q527A/G528A/ | ++ |
| | | P559R/R604H/L660V/E699V/F760W | |
| 553/554 | K79R | K79R/G402R/M478L/G515T/A526S/Q527A/ | ++ |
| | | G528A/P559R/R604H/L660V/F760W | |
| 613/614 | P667S | G402R/M478L/G515T/A526S/Q527A/G528A/ | ++ |
| | | P559R/R604H/L660V/P667S/F760W | |
| 615/616 | A812S | G402R/M478L/G515T/A526S/Q527A/G528A/ | ++ |
| | | P559R/R604H/L660V/F760W/A812S | |
| 617/618 | E475A | G402R/E475A/M478L/G515T/A526S/Q527A/ | ++ |
| | | G528A/P559R/R604H/L660V/F760W | |
| 619/620 | P662S | G402R/M478L/G515T/A526S/Q527A/G528A/ | ++ |
| | | P559R/R604H/L660V/P662S/F760W | |
| 621/622 | A536V | G402R/M478L/G515T/A526S/Q527A/G528A/ | ++ |
| | | A536V/P559R/R604H/L660V/F760W | |
| 623/624 | V748G | G402R/M478L/G515T/A526S/Q527A/G528A/ | ++ |
| | | P559R/R604H/L660V/V748G/F760W | |
| 535/536 | K79A | K79A/G402R/M478L/G515T/A526S/Q527A/ | ++ |
| | | G528A/P559R/R604H/L660V/F760W | |
| 577/578 | P21A | P21A/G402R/M478L/G515T/A526S/Q527A/ | ++ |
| | | G528A/P559R/R604H/L660V/F760W | |
| 581/582 | K713G | G402R/M478L/G515T/A526S/Q527A/G528A/ | + |
| | | P559R/R604H/L660V/K713G/F760W | |
| 625/626 | E808W | G402R/M478L/G515T/A526S/Q527A/G528A/ | + |
| | | P559R/R604H/L660V/F760W/E808W | |
| 627/628 | F291L/E316G/P395H/ | F291L/E316G/P395H/G402R/M478L/G515T/ | + |
| | H687A | A526S/Q527A/G528A/P559R/R604H/L660V/ | |
| | | H687A/F760W | |
| 629/630 | E613H | G402R/M478L/G515T/A526S/Q527A/G528A/ | + |
| | | P559R/R604H/E613H/L660V/F760W | |
| 631/632 | A257V/F291L/E316G | A257V/F291L/E316G/G402R/M478L/G515T/ | + |
| | | A526S/Q527A/G528A/P559R/R604H/L660V/ | |
| | | F760W | |
| 563/564 | P395S/H687A | P395S/G402R/M478L/G515T/A526S/Q527A/ | + |
| | | G528A/P559R/R604H/L660V/H687A/F760W | |
| 633/634 | A257V/F291L/A579L | A257V/F291L/G402R/M478L/G515T/A526S/ | + |
| | | Q527A/G528A/P559R/A579L/R604H/L660V/F760W | |
| 635/636 | A257V/E316G/E541N/ | A257V/E316G/G402R/M478L/G515T/A526S/ | + |
| | A745T | Q527A/G528A/E541N/P559R/R604H/L660V/A745T/ | |
| | | F760W | |
| 637/638 | P351H | P351H/G402R/M478L/G515T/A526S/Q527A/ | + |
| | | G528A/P559R/R604H/L660V/F760W | |
| 639/640 | A257V/E316G/P395G/ | A257V/E316G/P395G/G402R/M478L/G515T/ | + |
| | A745T | A526S/Q527A/G528A/P559R/R604H/L660V/ | |
| | | A745T/F760W | |
| 641/642 | P185T | P185T/G402R/M478L/G515T/A526S/Q527A/ | + |
| | | G528A/P559R/R604H/L660V/F760W | |
| 643/644 | A257V/E316G/H687A | A257V/E316G/G402R/M478L/G515T/A526S/ | + |
| | | Q527A/G528A/P559R/R604H/L660V/H687A/F760W | |
| 583/584 | R641A | G402R/M478L/G515T/A526S/Q527A/G528A/ | + |
| | | P559R/R604H/R641A/L660V/F760W | |
| 645/646 | E808Y | G402R/M478L/G515T/A526S/Q527A/G528A/ | + |
| | | P559R/R604H/L660V/F760W/E808Y | |
| 647/648 | F291L/E316G/E475V/ | F291L/E316G/G402R/E475V/M478L/G515T/ | + |
| | H687A/A745T | A526S/Q527A/G528A/P559R/R604H/L660V/ | |
| | | H687A/A745T/F760W | |
| 649/650 | A257V/F291L/P395H/ | A257V/F291L/P395H/G402R/M478L/G515T/ | + |
| | Y740V/A745T | A526S/Q527A/G528A/P559R/R604H/L660V/ | |
| | | Y740V/A745T/F760W | |
| 651/652 | R450V | G402R/R450V/M478L/G515T/A526S/Q527A/ | + |
| | | G528A/P559R/R604H/L660V/F760W | |
| 653/654 | E473N | G402R/E473N/M478L/G515T/A526S/Q527A/ | + |
| | | G528A/P559R/R604H/L660V/F760W | |
| 655/656 | P21G | P21G/G402R/M478L/G515T/A526S/Q527A/ | + |
| | | G528A/P559R/R604H/L660V/F760W | |
| 657/658 | P124A | P124A/G402R/M478L/G515T/A526S/Q527A/ | + |
| | | G528A/P559R/R604H/L660V/F760W | |
| 541/542 | R562K | G402R/M478L/G515T/A526S/Q527A/G528A/ | + |
| | | P559R/R562K/R604H/L660V/F760W | |
| 561/562 | K79M | K79M/G402R/M478L/G515T/A526S/Q527A/ | + |
| | | G528A/P559R/R604H/L660V/F760W | |
| 659/660 | E613R | G402R/M478L/G515T/A526S/Q527A/G528A/ | + |
| | | P559R/R604H/E613R/L660V/F760W | |
| 661/662 | W656Q | G402R/M478L/G515T/A526S/Q527A/G528A/ | + |
| | | P559R/R604H/W656Q/L660V/F760W | |
| 555/556 | K359G | K359G/G402R/M478L/G515T/A526S/Q527A/ | + |
| | | G528A/P559R/R604H/L660V/F760W | |
| 663/664 | F430G | G402R/F430G/M478L/G515T/A526S/Q527A/ | + |
| | | G528A/P559R/R604H/L660V/F760W | |
| 665/666 | E413T | G402R/E413T/M478L/G515T/A526S/Q527A/ | + |
| | | G528A/P559R/R604H/L660V/F760W | |
| 667/668 | R233L | R233L/G402R/M478L/G515T/A526S/Q527A/ | + |
| | | G528A/P559R/R604H/L660V/F760W | |
| 669/670 | K66R | K66R/G402R/M478L/G515T/A526S/Q527A/ | + |
| | | G528A/P559R/R604H/L660V/F760W | |
| 671/672 | L365T | L365T/G402R/M478L/G515T/A526S/Q527A/ | + |
| | | G528A/P559R/R604H/L660V/F760W | |
| 673/674 | A812R | G402R/M478L/G515T/A526S/Q527A/G528A/ | + |
| | | P559R/R604H/L660V/F760W/A812R | |

Levels of increased activity were determined relative to the reference polypeptide of SEQ ID NO: 328 and defined as follows: “+” 1.01 to 1.38, “++” > 1.38, “+++” > 1.59.

### HPV Assay Parameters

[0335] A 15 μL reaction that comprised of ½ AX Standard non-infections HPV RNA, Alinity™ Reagents Polymerase Master Mix (primers, probes, dNTPs; Abbott, USA), Polymerase Activator solution and 0.5 vol HTP lysate with and without (3.5 mM GITC, 0.75% ETOH, 20 ng gDNA) PCR inhibitors. qPCR cycling (46° C. 6 min, 97° C. 3.3 min, 97° C. 3 sec, 51.6° C. 20 sec, 92° C. 3 sec, 51.6° C. 20 sec, 54.7° C. 16 sec for 42 cycles) in a CFX384 Touch Deep Well Real-Time PCR detection System (BioRad).

[0336] Polymerase stability and activity relative to SEQ ID NO: 328 (F(OP Cal Red610 END RFU) was calculated as the improved Cal Red 610 END RFU value formed by the variant compared to END RFU value of SEQ ID NO: 328 and shown in Table 8.2.

TABLE 8.2
Pos Control FIOP Cal Red 610 END RFU Relative to SEQ ID NO: 328

| | Amino Acid | Amino Acid | Fold |
|---|---|---|---|
| SEQ ID | Differences | Differences | Improvement |
| NO: | (Relative to | (Relative to | (HPV) Relative to |
| (nt/aa) | SEQ ID NO: 328) | SEQ ID NO: 2) | SEQ ID NO: 328 |
| 535/536 | K79A | K79A/G402R/M478L/G515T/A526S/Q527A/ | +++ |
| | | G528A/P559R/R604H/L660V/F760W | |
| 537/538 | A257V/L474A | A257V/G402R/L474A/M478L/G515T/A526S/ | +++ |
| | | Q527A/G528A/P559R/R604H/L660V/F760W | |
| 539/540 | N677L | G402R/M478L/G515T/A526S/Q527A/G528A/ | +++ |
| | | P559R/R604H/L660V/N677L/F760W | |
| 541/542 | R562K | G402R/M478L/G515T/A526S/Q527A/G528A/ | +++ |
| | | P559R/R562K/R604H/L660V/F760W | |
| 543/544 | V178L/P395H/ | V178L/P395H/G402R/M478L/G515T/A526S/ | +++ |
| | A745T | Q527A/G528A/P559R/R604H/L660V/A745T/F760W | |
| 545/546 | F291L/P395H/ | F291L/P395H/G402R/M478L/G515T/A526S/ | +++ |
| | H687A/A745T | Q527A/G528A/P559R/R604H/L660V/H687A/A745T/ | |
| | | F760W | |
| 547/548 | A257V/P395H/ | A257V/P395H/G402R/M478L/G515T/A526S/ | ++ |
| | N677L | Q527A/G528A/P559R/R604H/L660V/N677L/F760W | |
| 549/550 | G303T/A338V | G303T/A338V/G402R/M478L/G515T/A526S/ | ++ |
| | | Q527A/G528A/P559R/R604H/L660V/F760W | |
| 551/552 | L474A/E475A | G402R/L474A/E475A/M478L/G515T/A526S/ | ++ |
| | | Q527A/G528A/P559R/R604H/L660V/F760W | |
| 553/554 | K79R | K79R/G402R/M478L/G515T/A526S/Q527A/ | ++ |
| | | G528A/P559R/R604H/L660V/F760W | |
| 555/556 | K359G | K359G/G402R/M478L/G515T/A526S/Q527A/ | ++ |
| | | G528A/P559R/R604H/L660V/F760W | |
| 557/558 | K79T | K79T/G402R/M478L/G515T/A526S/Q527A/ | ++ |
| | | G528A/P559R/R604H/L660V/F760W | |
| 559/560 | L474A/E475S/ | G402R/L474A/E475S/M478L/G515T/A526S/ | + |
| | N677L/I704V | Q527A/G528A/P559R/R604H/L660V/N677L/I704V/ | |
| | | F760W | |
| 561/562 | K79M | K79M/G402R/M478L/G515T/A526S/Q527A/ | ++ |
| | | G528A/P559R/R604H/L660V/F760W | |
| 563/564 | P395S/H687A | P395S/G402R/M478L/G515T/A526S/Q527A/ | + |
| | | G528A/P559R/R604H/L660V/H687A/F760W | |
| 565/566 | R671W | G402R/M478L/G515T/A526S/Q527A/G528A/ | + |
| | | P559R/R604H/L660V/R671W/F760W | |
| 567/568 | R233K | R233K/G402R/M478L/G515T/A526S/Q527A/ | + |
| | | G528A/P559R/R604H/L660V/F760W | |
| 569/570 | E699V | G402R/M478L/G515T/A526S/Q527A/G528A/ | + |
| | | P559R/R604H/L660V/E699V/F760W | |
| 571/572 | A379G | A379G/G402R/M478L/G515T/A526S/Q527A/ | + |
| | | G528A/P559R/R604H/L660V/F760W | |
| 573/574 | A257V/L792F | A257V/G402R/M478L/G515T/A526S/Q527A/ | + |
| | | G528A/P559R/R604H/L660V/F760W/L792F | |
| 575/576 | A257V/P395S | A257V/P395S/G402R/M478L/G515T/A526S/ | + |
| | | Q527A/G528A/P559R/R604H/L660V/F760W | |
| 577/578 | P21A | P21A/G402R/M478L/G515T/A526S/Q527A/ | + |
| | | G528A/P559R/R604H/L660V/F760W | |
| 579/580 | A257V/L448C/ | A257V/G402R/L448C/L474A/E475S/M478L/G515T/ | + |
| | L474A/E475S | A526S/Q527A/G528A/P559R/R604H/L660V/F760W | |
| 581/582 | K713G | G402R/M478L/G515T/A526S/Q527A/G528A/ | + |
| | | P559R/R604H/L660V/K713G/F760W | |
| 583/584 | R641A | G402R/M478L/G515T/A526S/Q527A/G528A/ | + |
| | | P559R/R604H/R641A/L660V/F760W | |
| 585/586 | Q442G | G402R/Q442G/M478L/G515T/A526S/Q527A/ | + |
| | | G528A/P559R/R604H/L660V/F760W | |
| 587/588 | W656S | G402R/M478L/G515T/A526S/Q527A/G528A/ | + |
| | | P559R/R604H/W656S/L660V/F760W | |

Levels of increased activity were determined relative to the reference polypeptide of SEQ ID NO: 328 and defined as follows: “+” 1.00 to 1.14, “++” > 1.14, “+++” > 1.32.

### Example 9

### Improvements Over SEQ ID NO: 546 in Enzyme Activity and Inhibitor Tolerance

[0337] SEQ ID NO: 546 was selected as the parent enzyme for this round of directed evolution. Libraries of engineered genes were produced using established techniques (e.g., saturation mutagenesis, recombination of previously identified beneficial mutations). The polypeptides encoded by each gene were produced in HTP as described in Example 2, and the soluble lysate was generated as described in Example 3. Each variant was screened in three different qPCR reactions. A 25 μL reaction that comprised of 25 copies of SARS-CoV2 DNA fragment (IDT Catalog #>CAT_10006625_2019-nCoV_N_Positive Control), containing the nucleocapsid gene, 500 nM N1 primers, 125 nM probe (CDC EUA assay, Catalog #2019-nCoVEUA-01), 0.2 mM dNTPs, RT buffer (10 mM Tris-HCl, 50 mM KCl, 1.5 mM MgCl₂), 0.25 vol % HTP lysate. qPCR cycling (95° C. 2 min, 95° C. 3 sec, 55° C. 30 sec for 45 cycles) in a CFX384 Touch Deep Well Real-Time PCR detection System (BioRad).

### HIV Assay Parameters

[0338] A 15 μL reaction that comprised of 25 copies of non-infections HIV RNA as well as Alinity™ Reagents Polymerase Master Mix (primers, probes, dNTPs; Abbott, USA), Polymerase Activator solution, internal control and 2 vol % HTP lysate with and without (16.6 mM GITC, 1.33% ETOH, 13 ng gDNA) PCR inhibitors. qPCR cycling (52° C. 10 min, 95° C. 3 min, 92° C. 40 sec, 50° C. 1 min, 92° C. 30 sec, 60° C. 30 sec, 92° C. 30 sec, 55° C. 20 sec, 34° C. 40 sec for 46 cycles) in a CFX384 Touch Deep Well Real-Time PCR detection System (BioRad).

[0339] Polymerase stability and activity relative to SEQ ID NO: 546 (FIOP FAM END RFU) was calculated as the improved FAM END RFU value formed by the variant compared to END RFU value of SEQ ID NO: 546 and shown in Table 9.1.

TABLE 9.1
Pos Control FIOP FAM END RFU Relative to SEQ ID NO: 546

| | Amino Acid | Amino Acid | Fold |
|---|---|---|---|
| SEQ ID | Differences | Differences | Improvement |
| NO: | (Relative to | (Relative to | (HIV) Relative to |
| (nt/aa) | SEQ ID NO: 546) | SEQ ID NO: 2) | SEQ ID NO: 546 |
| 831/832 | K79A/G303T/A338V/ | K79A/F291L/G303T/A338V/P395H/G402R/M478L/ | +++ |
| | E613H/E804R/ | G515T/A526S/Q527A/G528A/P559R/R604H/ | |
| | A812S | E613H/L660V/H687A/A745T/F760W/E804R/ | |
| | | A812S | |
| 833/834 | K79R/A257V/H395S/ | K79R/A257V/F291L/P395S/G402R/M478L/ | +++ |
| | A536V/P662S/ | G515T/A526S/Q527A/G528A/A536V/P559R/ | |
| | L792F | R604H/L660V/P662S/H687A/A745T/F760W/L792F | |
| 773/774 | A257V/L474A/E475A/ | A257V/F291L/P395H/G402R/L474A/E475A/ | +++ |
| | A536V/R562K/ | M478L/G515T/A526S/Q527A/G528A/A536V/ | |
| | P662S | P559R/R562K/R604H/L660V/P662S/H687A/A745T/ | |
| | | F760W | |
| 835/836 | K79A/A338V/R562K | K79A/F291L/A338V/P395H/G402R/M478L/ | +++ |
| | | G515T/A526S/Q527A/G528A/P559R/R562K/ | |
| | | R604H/L660V/H687A/A745T/F760W | |
| 837/838 | K79R/A257V/E699V | K79R/A257V/F291L/P395H/G402R/M478L/ | +++ |
| | | G515T/A526S/Q527A/G528A/P559R/R604H/ | |
| | | L660V/H687A/E699V/A745T/F760W | |
| 839/840 | K79R/R233K/G303T/ | K79R/R233K/F291L/G303T/P395H/G402R/ | +++ |
| | P662S | M478L/G515T/A526S/Q527A/G528A/P559R/ | |
| | | R604H/L660V/P662S/H687A/A745T/F760W | |
| 841/842 | K79R/P662S/E699V | K79R/F291L/P395H/G402R/M478L/G515T/ | +++ |
| | | A526S/Q527A/G528A/P559R/R604H/L660V/ | |
| | | P662S/H687A/E699V/A745T/F760W | |
| 843/844 | K79R/H395S/E475A/ | K79R/F291L/P395S/G402R/E475A/M478L/ | +++ |
| | P662S | G515T/A526S/Q527A/G528A/P559R/R604H/L660V/ | |
| | | P662S/H687A/A745T/F760W | |
| 755/756 | A257V/L474A/A536V/ | A257V/F291L/P395H/G402R/L474A/M478L/ | +++ |
| | R562K/P662S | G515T/A526S/Q527A/G528A/A536V/P559R/R562K/ | |
| | | R604H/L660V/P662S/H687A/A745T/F760W | |
| 845/846 | I704V | F291L/P395H/G402R/M478L/G515T/A526S/ | +++ |
| | | Q527A/G528A/P559R/R604H/L660V/H687A/ | |
| | | I704V/A745T/F760W | |
| 847/848 | K79R/A536V/R562K/ | K79R/F291L/P395H/G402R/M478L/G515T/ | +++ |
| | E699V | A526S/Q527A/G528A/A536V/P559R/R562K/ | |
| | | R604H/L660V/H687A/E699V/A745T/F760W | |
| 849/850 | A536V/P662S | F291L/P395H/G402R/M478L/G515T/A526S/ | +++ |
| | | Q527A/G528A/A536V/P559R/R604H/L660V/ | |
| | | P662S/H687A/A745T/F760W | |
| 779/780 | R233K/R562K/ | R233K/F291L/P395H/G402R/M478L/G515T/ | +++ |
| | K713G | A526S/Q527A/G528A/P559R/R562K/R604H/ | |
| | | L660V/H687A/K713G/A745T/F760W | |
| 851/852 | P21A/K79A/A338V/ | P21A/K79A/F291L/A338V/P395H/G402R/ | +++ |
| | R641A/E699V | M478L/G515T/A526S/Q527A/G528A/P559R/R604H/ | |
| | | R641A/L660V/H687A/E699V/A745T/F760W | |
| 853/854 | P662S | F291L/P395H/G402R/M478L/G515T/A526S/ | +++ |
| | | Q527A/G528A/P559R/R604H/L660V/P662S/ | |
| | | H687A/A745T/F760W | |
| 815/816 | P21A/K79A/G303T/ | P21A/K79A/F291L/G303T/P395H/G402R/ | +++ |
| | R562K/E613H | M478L/G515T/A526S/Q527A/G528A/P559R/R562K/ | |
| | | R604H/E613H/L660V/H687A/A745T/F760W | |
| 855/856 | P21A/K79A/Q442G/ | P21A/K79A/F291L/P395H/G402R/Q442G/M478L/ | +++ |
| | E699V | G515T/A526S/Q527A/G528A/P559R/R604H/ | |
| | | L660V/H687A/E699V/A745T/F760W | |
| 857/858 | K79A/G303T/P662S | K79A/F291L/G303T/P395H/G402R/M478L/ | +++ |
| | | G515T/A526S/Q527A/G528A/P559R/R604H/L660V/ | |
| | | P662S/H687A/A745T/F760W | |
| 859/860 | K79R/V178L/A257V/ | K79R/V178L/A257V/F291L/P395H/G402R/ | +++ |
| | P662S/E699V | M478L/G515T/A526S/Q527A/G528A/P559R/R604H/ | |
| | | L660V/P662S/H687A/E699V/A745T/F760W | |
| 861/862 | K79R/A257V/A536V/ | K79R/A257V/F291L/P395H/G402R/M478L/ | +++ |
| | R562K/P662S | G515T/A526S/Q527A/G528A/A536V/P559R/R562K/ | |
| | | R604H/L660V/P662S/H687A/A745T/F760W | |
| 863/864 | R562K/E699V | F291L/P395H/G402R/M478L/G515T/A526S/Q527A/ | +++ |
| | | G528A/P559R/R562K/R604H/L660V/H687A/ | |
| | | E699V/A745T/F760W | |
| 865/866 | K359G/E613H/P742K/ | F291L/K359G/P395H/G402R/M478L/G515T/A526S/ | +++ |
| | E808Y/A812S | Q527A/G528A/P559R/R604H/E613H/L660V/ | |
| | | H687A/P742K/A745T/F760W/E808Y/A812S | |
| 867/868 | P21N/K79A/A338V/ | P21N/K79A/F291L/A338V/A379G/P395H/G402R/ | +++ |
| | A379G/R562K/ | M478L/G515T/A526S/Q527A/G528A/P559R/ | |
| | P662S/E804R/A812S | R562K/R604H/L660V/P662S/H687A/A745T/ | |
| | | F760W/E804R/A812S | |
| 869/870 | L448V | F291L/P395H/G402R/L448V/M478L/G515T/ | +++ |
| | | A526S/Q527A/G528A/P559R/R604H/L660V/H687A/ | |
| | | A745T/F760W | |
| 871/872 | V731I | F291L/P395H/G402R/M478L/G515T/A526S/ | +++ |
| | | Q527A/G528A/P559R/R604H/L660V/H687A/V731I/ | |
| | | A745T/F760W | |
| 873/874 | P21N/K79R/K359G/ | P21N/K79R/F291L/K359G/P395H/G402R/Q442G/ | +++ |
| | Q442G/P662S | M478L/G515T/A526S/Q527A/G528A/P559R/ | |
| | | R604H/L660V/P662S/H687A/A745T/F760W | |
| 875/876 | K79A/A338V/K359V/ | K79A/F291L/A338V/K359V/P395H/G402R/ | +++ |
| | R562K | M478L/G515T/A526S/Q527A/G528A/P559R/R562K/ | |
| | | R604H/L660V/H687A/A745T/F760W | |
| 877/878 | P21N/E613H/P662S/ | P21N/F291L/P395H/G402R/M478L/G515T/A526S/ | +++ |
| | P742K | Q527A/G528A/P559R/R604H/E613H/L660V/P662S/ | |
| | | H687A/P742K/A745T/F760W | |
| 879/880 | P21A/K79A/G303T/ | P21A/K79A/F291L/G303T/P395H/G402R/ | +++ |
| | P662S/E699V/P742K/ | M478L/G515T/A526S/Q527A/G528A/P559R/ | |
| | E808Y | R604H/L660V/P662S/H687A/E699V/P742K/A745T/ | |
| | | F760W/E808Y | |
| 881/882 | P21A/K79A/A338V/ | P21A/K79A/F291L/A338V/P395H/G402R/Q442G/ | +++ |
| | Q442G/E613H/E699V | M478L/G515T/A526S/Q527A/G528A/P559R/ | |
| | | R604H/E613H/L660V/H687A/E699V/A745T/F760W | |
| 883/884 | K79A/G303T/A338V/ | K79A/F291L/G303T/A338V/P395H/G402R/M478L/ | +++ |
| | R562K/E613H/ | G515T/A526S/Q527A/G528A/P559R/R562K/R604H/ | |
| | P662S | E613H/L660V/P662S/H687A/A745T/F760W | |
| 885/886 | G303T/A338V/R562K/ | F291L/G303T/A338V/P395H/G402R/M478L/ | +++ |
| | E699V/E808W/ | G515T/A526S/Q527A/G528A/P559R/R562K/ | |
| | A812S | R604H/L660V/H687A/E699V/A745T/F760W/ | |
| | | E808W/A812S | |
| 887/888 | K79R/A257V | K79R/A257V/F291L/P395H/G402R/M478L/ | +++ |
| | | G515T/A526S/Q527A/G528A/P559R/R604H/ | |
| | | L660V/H687A/A745T/F760W | |
| 889/890 | A257V/P662S/L792F | A257V/F291L/P395H/G402R/M478L/G515T/ | +++ |
| | | A526S/Q527A/G528A/P559R/R604H/L660V/ | |
| | | P662S/H687A/A745T/F760W/L792F | |
| 891/892 | K79R/A536V/E699V | K79R/F291L/P395H/G402R/M478L/G515T/ | +++ |
| | | A526S/Q527A/G528A/A536V/P559R/R604H/ | |
| | | L660V/H687A/E699V/A745T/F760W | |
| 893/894 | K79A/K359G/K713G/ | K79A/F291L/K359G/P395H/G402R/M478L/ | +++ |
| | P742K/E808W | G515T/A526S/Q527A/G528A/P559R/R604H/ | |
| | | L660V/H687A/K713G/P742K/A745T/F760W/E808W | |
| 895/896 | P21A/K359G/Q442G/ | P21A/F291L/K359G/P395H/G402R/Q442G/M478L/ | +++ |
| | E808W/A812S | G515T/A526S/Q527A/G528A/P559R/R604H/ | |
| | | L660V/H687A/A745T/F760W/E808W/A812S | |
| 897/898 | K79R/A257V/E475A/ | K79R/A257V/F291L/P395H/G402R/E475A/M478L/ | +++ |
| | A536V/P662S | G515T/A526S/Q527A/G528A/A536V/P559R/ | |
| | | R604H/L660V/P662S/H687A/A745T/F760W | |
| 899/900 | P21N/K79A/A338V | P21N/K79A/F291L/A338V/P395H/G402R/M478L/ | ++ |
| | | G515T/A526S/Q527A/G528A/P559R/R604H/ | |
| | | L660V/H687A/A745T/F760W | |
| 901/902 | K79A/K713G | K79A/F291L/P395H/G402R/M478L/G515T/A526S/ | ++ |
| | | Q527A/G528A/P559R/R604H/L660V/H687A/ | |
| | | K713G/A745T/F760W | |
| 903/904 | A457R | F291L/P395H/G402R/A457R/M478L/G515T/ | ++ |
| | | A526S/Q527A/G528A/P559R/R604H/L660V/ | |
| | | H687A/A745T/F760W | |
| 905/906 | K79A/R562K/R641A | K79A/F291L/P395H/G402R/M478L/G515T/ | ++ |
| | | A526S/Q527A/G528A/P559R/R562K/R604H/ | |
| | | R641A/L660V/H687A/A745T/F760W | |
| 907/908 | L392C | F291L/L392C/P395H/G402R/M478L/G515T/ | ++ |
| | | A526S/Q527A/G528A/P559R/R604H/L660V/H687A/ | |
| | | A745T/F760W | |
| 909/910 | A373T | F291L/A373T/P395H/G402R/M478L/G515T/A526S/ | ++ |
| | | Q527A/G528A/P559R/R604H/L660V/H687A/ | |
| | | A745T/F760W | |
| 911/912 | K79R/V178L/A257V/ | K79R/V178L/A257V/F291L/E316G/P395H/ | ++ |
| | E316G/A536V/P662S | G402R/M478L/G515T/A526S/Q527A/G528A/ | |
| | | A536V/P559R/R604H/L660V/P662S/H687A/A745T/ | |
| | | F760W | |
| 913/914 | P21N/R233K/A338V/ | P21N/R233K/F291L/A338V/P395H/G402R/ | ++ |
| | R562K/P662S | M478L/G515T/A526S/Q527A/G528A/P559R/ | |
| | | R562K/R604H/L660V/P662S/H687A/A745T/F760W | |
| 915/916 | A257V/E316G/A536V | A257V/F291L/E316G/P395H/G402R/M478L/ | ++ |
| | | G515T/A526S/Q527A/G528A/A536V/P559R/ | |
| | | R604H/L660V/H687A/A745T/F760W | |
| 917/918 | P21N/K79R/G303T/ | P21N/K79R/F291L/G303T/P395H/G402R/Q442G/ | ++ |
| | Q442G/P662S | M478L/G515T/A526S/Q527A/G528A/P559R/ | |
| | | R604H/L660V/P662S/H687A/A745T/F760W | |
| 919/920 | P21N/K79R/R233K/ | P21N/K79R/R233K/F291L/G303T/A338V/A379G/ | ++ |
| | G303T/A338V/A379G/ | P395H/G402R/M478L/G515T/A526S/Q527A/ | |
| | R562K/K713G | G528A/P559R/R562K/R604H/L660V/H687A/ | |
| | | K713G/A745T/F760W | |
| 921/922 | A338V/Q442G/E699V | F291L/A338V/P395H/G402R/Q442G/M478L/ | ++ |
| | | G515T/A526S/Q527A/G528A/P559R/R604H/L660V/ | |
| | | H687A/E699V/A745T/F760W | |
| 923/924 | F426T | F291L/P395H/G402R/F426T/M478L/G515T/ | ++ |
| | | A526S/Q527A/G528A/P559R/R604H/L660V/H687A/ | |
| | | A745T/F760W | |
| 925/926 | P21A/A338V/K359G/ | P21A/F291L/A338V/K359G/P395H/G402R/ | ++ |
| | E808Y/A812S | M478L/G515T/A526S/Q527A/G528A/P559R/ | |
| | | R604H/L660V/H687A/A745T/F760W/E808Y/A812S | |
| 927/928 | K79A/V178L/R233K/ | K79A/V178L/R233K/F291L/P395H/G402R/ | ++ |
| | Q442G/R562K/ | Q442G/M478L/G515T/A526S/Q527A/G528A/P559R/ | |
| | A812S | R562K/R604H/L660V/H687A/A745T/F760W/ | |
| | | A812S | |
| 929/930 | K79R/L474A/A536V/ | K79R/F291L/P395H/G402R/L474A/M478L/G515T/ | ++ |
| | P662S/E699V | A526S/Q527A/G528A/A536V/P559R/R604H/ | |
| | | L660V/P662S/H687A/E699V/A745T/F760W | |
| 931/932 | Y697I | F291L/P395H/G402R/M478L/G515T/A526S/ | ++ |
| | | Q527A/G528A/P559R/R604H/L660V/H687A/Y697I/ | |
| | | A745T/F760W | |
| 933/934 | A390S | F291L/A390S/P395H/G402R/M478L/G515T/ | ++ |
| | | A526S/Q527A/G528A/P559R/R604H/L660V/H687A/ | |
| | | A745T/F760W | |
| 935/936 | P21A/K79A/A338V/ | P21A/K79A/F291L/A338V/A379G/P395H/ | ++ |
| | A379G/P662S | G402R/M478L/G515T/A526S/Q527A/G528A/P559R/ | |
| | | R604H/L660V/P662S/H687A/A745T/F760W | |
| 937/938 | T721M | F291L/P395H/G402R/M478L/G515T/A526S/ | ++ |
| | | Q527A/G528A/P559R/R604H/L660V/H687A/T721M/ | |
| | | A745T/F760W | |
| 939/940 | P21A/K79A/R233K/ | P21A/K79A/R233K/F291L/A338V/P395H/G402R/ | ++ |
| | A338V/E613H/R641A | M478L/G515T/A526S/Q527A/G528A/P559R/ | |
| | | R604H/E613H/R641A/L660V/H687A/A745T/F760W | |
| 941/942 | L374V | F291L/L374V/P395H/G402R/M478L/G515T/A526S/ | ++ |
| | | Q527A/G528A/P559R/R604H/L660V/H687A/ | |
| | | A745T/F760W | |
| 943/944 | A338V/K359G/A379G | F291L/A338V/K359G/A379G/P395H/G402R/M478L/ | ++ |
| | | G515T/A526S/Q527A/G528A/P559R/R604H/ | |
| | | L660V/H687A/A745T/F760W | |
| 945/946 | R461L | F291L/P395H/G402R/R461L/M478L/G515T/A526S/ | ++ |
| | | Q527A/G528A/P559R/R604H/L660V/H687A/ | |
| | | A745T/F760W | |
| 947/948 | V451L | F291L/P395H/G402R/V451L/M478L/G515T/A526S/ | ++ |
| | | Q527A/G528A/P559R/R604H/L660V/H687A/ | |
| | | A745T/F760W | |
| 949/950 | R715L | F291L/P395H/G402R/M478L/G515T/A526S/Q527A/ | ++ |
| | | G528A/P559R/R604H/L660V/H687A/R715L/ | |
| | | A745T/F760W | |
| 951/952 | K79R/G303T/A338V/ | K79R/F291L/G303T/A338V/P395H/G402R/M478L/ | ++ |
| | R641A/K713G | G515T/A526S/Q527A/G528A/P559R/R604H/ | |
| | | R641A/L660V/H687A/K713G/A745T/F760W | |
| 953/954 | L393W | F291L/L393W/P395H/G402R/M478L/G515T/ | ++ |
| | | A526S/Q527A/G528A/P559R/R604H/L660V/H687A/ | |
| | | A745T/F760W | |
| 955/956 | L372Y | F291L/L372Y/P395H/G402R/M478L/G515T/ | ++ |
| | | A526S/Q527A/G528A/P559R/R604H/L660V/H687A/ | |
| | | A745T/F760W | |
| 957/958 | K79R/A257V/L474A/ | K79R/A257V/F291L/P395H/G402R/L474A/ | ++ |
| | A536V/E699V | M478L/G515T/A526S/Q527A/G528A/A536V/P559R/ | |
| | | R604H/L660V/H687A/E699V/A745T/F760W | |
| 959/960 | P431R | F291L/P395H/G402R/P431R/M478L/G515T/ | ++ |
| | | A526S/Q527A/G528A/P559R/R604H/L660V/H687A/ | |
| | | A745T/F760W | |
| 961/962 | H454G | F291L/P395H/G402R/H454G/M478L/G515T/ | ++ |
| | | A526S/Q527A/G528A/P559R/R604H/L660V/H687A/ | |
| | | A745T/F760W | |
| 963/964 | K79R | K79R/F291L/P395H/G402R/M478L/G515T/A526S/ | ++ |
| | | Q527A/G528A/P559R/R604H/L660V/H687A/ | |
| | | A745T/F760W | |
| 965/966 | L437S | F291L/P395H/G402R/L437S/M478L/G515T/ | ++ |
| | | A526S/Q527A/G528A/P559R/R604H/L660V/ | |
| | | H687A/A745T/F760W | |
| 967/968 | A257V/A536V/R562K/ | A257V/F291L/P395H/G402R/M478L/G515T/ | ++ |
| | P662S | A526S/Q527A/G528A/A536V/P559R/R562K/ | |
| | | R604H/L660V/P662S/H687A/A745T/F760W | |
| 969/970 | V731T | F291L/P395H/G402R/M478L/G515T/A526S/ | ++ |
| | | Q527A/G528A/P559R/R604H/L660V/H687A/V731T/ | |
| | | A745T/F760W | |
| 971/972 | R706V | F291L/P395H/G402R/M478L/G515T/A526S/ | ++ |
| | | Q527A/G528A/P559R/R604H/L660V/H687A/R706V/ | |
| | | A745T/F760W | |
| 973/974 | L448T | F291L/P395H/G402R/L448T/M478L/G515T/ | ++ |
| | | A526S/Q527A/G528A/P559R/R604H/L660V/H687A/ | |
| | | A745T/F760W | |
| 811/812 | V378L | F291L/V378L/P395H/G402R/M478L/G515T/ | ++ |
| | | A526S/Q527A/G528A/P559R/R604H/L660V/ | |
| | | H687A/A745T/F760W | |
| 975/976 | P21A/K79A/A379G/ | P21A/K79A/F291L/A379G/P395H/G402R/Q442G/ | ++ |
| | Q442G/R562K/P662S | M478L/G515T/A526S/Q527A/G528A/P559R/ | |
| | | R562K/R604H/L660V/P662S/H687A/A745T/F760W | |
| 801/802 | V714I | F291L/P395H/G402R/M478L/G515T/A526S/Q527A/ | ++ |
| | | G528A/P559R/R604H/L660V/H687A/V714I/ | |
| | | A745T/F760W | |
| 977/978 | A457Y | F291L/P395H/G402R/A457Y/M478L/G515T/A526S/ | ++ |
| | | Q527A/G528A/P559R/R604H/L660V/H687A/ | |
| | | A745T/F760W | |
| 979/980 | R362M | F291L/R362M/P395H/G402R/M478L/G515T/A526S/ | ++ |
| | | Q527A/G528A/P559R/R604H/L660V/H687A/ | |
| | | A745T/F760W | |
| 981/982 | E410W | F291L/P395H/G402R/E410W/M478L/G515T/ | ++ |
| | | A526S/Q527A/G528A/P559R/R604H/L660V/ | |
| | | H687A/A745T/F760W | |
| 783/784 | L474A/E475A/ | F291L/P395H/G402R/L474A/E475A/M478L/ | ++ |
| | A536V/R562K/P662S | G515T/A526S/Q527A/G528A/A536V/P559R/R562K/ | |
| | | R604H/L660V/P662S/H687A/A745T/F760W | |
| 983/984 | H454D | F291L/P395H/G402R/H454D/M478L/G515T/ | ++ |
| | | A526S/Q527A/G528A/P559R/R604H/L660V/ | |
| | | H687A/A745T/F760W | |
| 985/986 | A338V/A812S | F291L/A338V/P395H/G402R/M478L/G515T/ | ++ |
| | | A526S/Q527A/G528A/P559R/R604H/L660V/ | |
| | | H687A/A745T/F760W/A812S | |
| 987/988 | P21N/K79R/A338V | P21N/K79R/F291L/A338V/P395H/G402R/ | ++ |
| | | M478L/G515T/A526S/Q527A/G528A/P559R/R604H/ | |
| | | L660V/H687A/A745T/F760W | |
| 989/990 | P21A/P662S/E808Y/ | P21A/F291L/P395H/G402R/M478L/G515T/A526S/ | ++ |
| | A812S | Q527A/G528A/P559R/R604H/L660V/P662S/ | |
| | | H687A/A745T/F760W/E808Y/A812S | |
| 793/794 | A370G | F291L/A370G/P395H/G402R/M478L/G515T/ | ++ |
| | | A526S/Q527A/G528A/P559R/R604H/L660V/H687A/ | |
| | | A745T/F760W | |
| 991/992 | E435K | F291L/P395H/G402R/E435K/M478L/G515T/ | ++ |
| | | A526S/Q527A/G528A/P559R/R604H/L660V/H687A/ | |
| | | A745T/F760W | |
| 993/994 | P21A/G303T/A338V | P21A/F291L/G303T/A338V/P395H/G402R/ | ++ |
| | | M478L/G515T/A526S/Q527A/G528A/P559R/R604H/ | |
| | | L660V/H687A/A745T/F760W | |
| 995/996 | V378S | F291L/V378S/P395H/G402R/M478L/G515T/ | ++ |
| | | A526S/Q527A/G528A/P559R/R604H/L660V/ | |
| | | H687A/A745T/F760W | |
| 997/998 | V378C | F291L/V378C/P395H/G402R/M478L/G515T/ | ++ |
| | | A526S/Q527A/G528A/P559R/R604H/L660V/ | |
| | | H687A/A745T/F760W | |
| 807/808 | G303T/E613H | F291L/G303T/P395H/G402R/M478L/G515T/ | ++ |
| | | A526S/Q527A/G528A/P559R/R604H/E613H/ | |
| | | L660V/H687A/A745T/F760W | |
| 999/1000 | Q427L | F291L/P395H/G402R/Q427L/M478L/G515T/ | ++ |
| | | A526S/Q527A/G528A/P559R/R604H/L660V/ | |
| | | H687A/A745T/F760W | |
| 1001/1002 | R418K | F291L/P395H/G402R/R418K/M478L/G515T/ | ++ |
| | | A526S/Q527A/G528A/P559R/R604H/L660V/ | |
| | | H687A/A745T/F760W | |
| 739/740 | Y707W | F291L/P395H/G402R/M478L/G515T/A526S/ | ++ |
| | | Q527A/G528A/P559R/R604H/L660V/H687A/ | |
| | | Y707W/A745T/F760W | |
| 1003/1004 | A338V/Q442G | F291L/A338V/P395H/G402R/Q442G/M478L/ | ++ |
| | | G515T/A526S/Q527A/G528A/P559R/R604H/ | |
| | | L660V/H687A/A745T/F760W | |
| 1005/1006 | T721N | F291L/P395H/G402R/M478L/G515T/A526S/ | ++ |
| | | Q527A/G528A/P559R/R604H/L660V/H687A/ | |
| | | T721N/A745T/F760W | |
| 1007/1008 | S449A | F291L/P395H/G402R/S449A/M478L/G515T/ | + |
| | | A526S/Q527A/G528A/P559R/R604H/L660V/ | |
| | | H687A/A745T/F760W | |
| 1009/1010 | A457W | F291L/P395H/G402R/A457W/M478L/G515T/ | + |
| | | A526S/Q527A/G528A/P559R/R604H/L660V/ | |
| | | H687A/A745T/F760W | |
| 1011/1012 | S449G | F291L/P395H/G402R/S449G/M478L/G515T/ | + |
| | | A526S/Q527A/G528A/P559R/R604H/L660V/ | |
| | | H687A/A745T/F760W | |
| 1013/1014 | A379G/R641A | F291L/A379G/P395H/G402R/M478L/G515T/ | + |
| | | A526S/Q527A/G528A/P559R/R604H/R641A/ | |
| | | L660V/H687A/A745T/F760W | |
| 751/752 | L474A/E475A/A536V/ | F291L/P395H/G402R/L474A/E475A/M478L/G515T/ | + |
| | P662S | A526S/Q527A/G528A/A536V/P559R/R604H/ | |
| | | L660V/P662S/H687A/A745T/F760W | |
| 1015/1016 | E410V | F291L/P395H/G402R/E410V/M478L/G515T/ | + |
| | | A526S/Q527A/G528A/P559R/R604H/L660V/ | |
| | | H687A/A745T/F760W | |
| 1017/1018 | P431L | F291L/P395H/G402R/P431L/M478L/G515T/ | + |
| | | A526S/Q527A/G528A/P559R/R604H/L660V/ | |
| | | H687A/A745T/F760W | |
| 1019/1020 | E316G/A536V/ | F291L/E316G/P395H/G402R/M478L/G515T/ | + |
| | R562K | A526S/Q527A/G528A/A536V/P559R/R562K/ | |
| | | R604H/L660V/H687A/A745T/F760W | |
| 1021/1022 | A257V/A536V/ | A257V/F291L/P395H/G402R/M478L/G515T/ | + |
| | L792F | A526S/Q527A/G528A/A536V/P559R/R604H/ | |
| | | L660V/H687A/A745T/F760W/L792F | |
| 1023/1024 | P21N/K79R/ | P21N/K79R/F291L/P395H/G402R/Q442G/ | + |
| | Q442G/E613H | M478L/G515T/A526S/Q527A/G528A/P559R/R604H/ | |
| | | E613H/L660V/H687A/A745T/F760W | |
| 1025/1026 | A536V | F291L/P395H/G402R/M478L/G515T/A526S/ | + |
| | | Q527A/G528A/A536V/P559R/R604H/L660V/ | |
| | | H687A/A745T/F760W | |
| 1027/1028 | A257V/A536V/ | A257V/F291L/P395H/G402R/M478L/G515T/ | + |
| | P662S/L792F | A526S/Q527A/G528A/A536V/P559R/R604H/ | |
| | | L660V/P662S/H687A/A745T/F760W/L792F | |
| 715/716 | K79R/A257V/H395S/ | K79R/A257V/F291L/P395S/G402R/L474A/ | + |
| | L474A/E475A/ | E475A/M478L/G515T/A526S/Q527A/G528A/A536V/ | |
| | A536V/R562K | P559R/R562K/R604H/L660V/H687A/A745T/ | |
| | | F760W | |
| 1029/1030 | P431V | F291L/P395H/G402R/P431V/M478L/G515T/A526S/ | + |
| | | Q527A/G528A/P559R/R604H/L660V/H687A/ | |
| | | A745T/F760W | |
| 1031/1032 | R362P | F291L/R362P/P395H/G402R/M478L/G515T/A526S/ | + |
| | | Q527A/G528A/P559R/R604H/L660V/H687A/ | |
| | | A745T/F760W | |
| 1033/1034 | A257V/L474A/A529S/ | A257V/F291L/P395H/G402R/L474A/M478L/G515T/ | + |
| | A536V/P662S | A526S/Q527A/G528A/A529S/A536V/P559R/ | |
| | | R604H/L660V/P662S/H687A/A745T/F760W | |
| 1035/1036 | P382S | F291L/P382S/P395H/G402R/M478L/G515T/A526S/ | + |
| | | Q527A/G528A/P559R/R604H/L660V/H687A/ | |
| | | A745T/F760W | |
| 1037/1038 | T412V | F291L/P395H/G402R/T412V/M478L/G515T/ | + |
| | | A526S/Q527A/G528A/P559R/R604H/L660V/H687A/ | |
| | | A745T/F760W | |
| 1039/1040 | P447S | F291L/P395H/G402R/P447S/M478L/G515T/ | + |
| | | A526S/Q527A/G528A/P559R/R604H/L660V/H687A/ | |
| | | A745T/F760W | |
| 1041/1042 | K79R/A257V/A536V/ | K79R/A257V/F291L/P395H/G402R/M478L/ | + |
| | P662S/E699V | G515T/A526S/Q527A/G528A/A536V/P559R/ | |
| | | R604H/L660V/P662S/H687A/E699V/A745T/F760W | |
| 1043/1044 | L392T | F291L/L392T/P395H/G402R/M478L/G515T/ | + |
| | | A526S/Q527A/G528A/P559R/R604H/L660V/ | |
| | | H687A/A745T/F760W | |
| 1045/1046 | R461S | F291L/P395H/G402R/R461S/M478L/G515T/ | + |
| | | A526S/Q527A/G528A/P559R/R604H/L660V/ | |
| | | H687A/A745T/F760W | |
| 1047/1048 | T412Q | F291L/P395H/G402R/T412Q/M478L/G515T/ | + |
| | | A526S/Q527A/G528A/P559R/R604H/L660V/ | |
| | | H687A/A745T/F760W | |
| 1049/1050 | A257V/E316G/ | A257V/F291L/E316G/P395H/G402R/E475A/ | + |
| | E475A/A536V/L792F | M478L/G515T/A526S/Q527A/G528A/A536V/P559R/ | |
| | | R604H/L660V/H687A/A745T/F760W/L792F | |
| 1051/1052 | L438S | F291L/P395H/G402R/L438S/M478L/G515T/ | + |
| | | A526S/Q527A/G528A/P559R/R604H/L660V/H687A/ | |
| | | A745T/F760W | |
| 1053/1054 | L388C | F291L/L388C/P395H/G402R/M478L/G515T/ | + |
| | | A526S/Q527A/G528A/P559R/R604H/L660V/H687A/ | |
| | | A745T/F760W | |
| 1055/1056 | L380I/H454L | F291L/L380I/P395H/G402R/H454L/M478L/ | + |
| | | G515T/A526S/Q527A/G528A/P559R/R604H/L660V/ | |
| | | H687A/A745T/F760W | |
| 1057/1058 | P447R | F291L/P395H/G402R/P447R/M478L/G515T/ | + |
| | | A526S/Q527A/G528A/P559R/R604H/L660V/H687A/ | |
| | | A745T/F760W | |
| 1059/1060 | P21N/K79R/R233K/ | P21N/K79R/R233K/F291L/G303T/P395H/G402R/ | + |
| | G303T/E613H/E699V/ | M478L/G515T/A526S/Q527A/G528A/P559R/ | |
| | E809K | R604H/E613H/L660V/H687A/E699V/A745T/ | |
| | | F760W/E809K | |
| 827/828 | K79R/A536V | K79R/F291L/P395H/G402R/M478L/G515T/ | + |
| | | A526S/Q527A/G528A/A536V/P559R/R604H/ | |
| | | L660V/H687A/A745T/F760W | |
| 1061/1062 | E724F | F291L/P395H/G402R/M478L/G515T/A526S/ | + |
| | | Q527A/G528A/P559R/R604H/L660V/H687A/E724F/ | |
| | | A745T/F760W | |
| 775/776 | A702V | F291L/P395H/G402R/M478L/G515T/A526S/Q527A/ | + |
| | | G528A/P559R/R604H/L660V/H687A/A702V/ | |
| | | A745T/F760W | |
| 1063/1064 | R461Q | F291L/P395H/G402R/R461Q/M478L/G515T/A526S/ | + |
| | | Q527A/G528A/P559R/R604H/L660V/H687A/ | |
| | | A745T/F760W | |
| 1065/1066 | P21A/K79R/A338V/ | P21A/K79R/F291L/A338V/P395H/G402R/M478L/ | + |
| | E613H | G515T/A526S/Q527A/G528A/P559R/R604H/ | |
| | | E613H/L660V/H687A/A745T/F760W | |
| 1067/1068 | K79R/V178L/A536V/ | K79R/V178L/F291L/P395H/G402R/M478L/G515T/ | + |
| | L792F | A526S/Q527A/G528A/A536V/P559R/R604H/ | |
| | | L660V/H687A/A745T/F760W/L792F | |
| 1069/1070 | R715H | F291L/P395H/G402R/M478L/G515T/A526S/Q527A/ | + |
| | | G528A/P559R/R604H/L660V/H687A/R715H/ | |
| | | A745T/F760W | |
| 1071/1072 | A390T | F291L/A390T/P395H/G402R/M478L/G515T/A526S/ | + |
| | | Q527A/G528A/P559R/R604H/L660V/H687A/ | |
| | | A745T/F760W | |
| 1073/1074 | S449G/R747S | F291L/P395H/G402R/S449G/M478L/G515T/A526S/ | + |
| | | Q527A/G528A/P559R/R604H/L660V/H687A/ | |
| | | A745T/R747S/F760W | |
| 799/800 | A536V/R562K | F291L/P395H/G402R/M478L/G515T/A526S/Q527A/ | + |
| | | G528A/A536V/P559R/R562K/R604H/L660V/ | |
| | | H687A/A745T/F760W | |
| 1075/1076 | S449V | F291L/P395H/G402R/S449V/M478L/G515T/A526S/ | + |
| | | Q527A/G528A/P559R/R604H/L660V/H687A/ | |
| | | A745T/F760W | |
| 709/710 | A257V/H395S/L474A/ | A257V/F291L/P395S/G402R/L474A/E475A/M478L/ | + |
| | E475A/A536V/ | G515T/A526S/Q527A/G528A/A536V/P559R/ | |
| | P662S | R604H/L660V/P662S/H687A/A745T/F760W | |
| 1077/1078 | L374S | F291L/L374S/P395H/G402R/M478L/G515T/A526S/ | + |
| | | Q527A/G528A/P559R/R604H/L660V/H687A/ | |
| | | A745T/F760W | |
| 1079/1080 | R362S | F291L/R362S/P395H/G402R/M478L/G515T/A526S/ | + |
| | | Q527A/G528A/P559R/R604H/L660V/H687A/ | |
| | | A745T/F760W | |
| 1081/1082 | P21A/K79R/A379G/ | P21A/K79R/F291L/A379G/P395H/G402R/M478L/ | + |
| | E613H/K713G | G515T/A526S/Q527A/G528A/P559R/R604H/E613H/ | |
| | | L660V/H687A/K713G/A745T/F760W | |
| 1083/1084 | K79R/E316G/A536V/ | K79R/F291L/E316G/P395H/G402R/M478L/G515T/ | + |
| | P662S/E699V | A526S/Q527A/G528A/A536V/P559R/R604H/ | |
| | | L660V/P662S/H687A/E699V/A745T/F760W | |
| 1085/1086 | A370S | F291L/A370S/P395H/G402R/M478L/G515T/A526S/ | + |
| | | Q527A/G528A/P559R/R604H/L660V/H687A/ | |
| | | A745T/F760W | |
| 1087/1088 | E417W | F291L/P395H/G402R/E417W/M478L/G515T/A526S/ | + |
| | | Q527A/G528A/P559R/R604H/L660V/H687A/ | |
| | | A745T/F760W | |
| 1089/1090 | E376F | F291L/E376F/P395H/G402R/M478L/G515T/A526S/ | + |
| | | Q527A/G528A/P559R/R604H/L660V/H687A/ | |
| | | A745T/F760W | |
| 747/748 | L474A/E475A/P662S | F291L/P395H/G402R/L474A/E475A/M478L/G515T/ | + |
| | | A526S/Q527A/G528A/P559R/R604H/L660V/ | |
| | | P662S/H687A/A745T/F760W | |
| 1091/1092 | L393R | F291L/L393R/P395H/G402R/M478L/G515T/A526S/ | + |
| | | Q527A/G528A/P559R/R604H/L660V/H687A/ | |
| | | A745T/F760W | |
| 1093/1094 | P21N/R562K/P662S | P21N/F291L/P395H/G402R/M478L/G515T/A526S/ | + |
| | | Q527A/G528A/P559R/R562K/R604H/L660V/ | |
| | | P662S/H687A/A745T/F760W | |
| 1095/1096 | K79R/A257V/D262N/ | K79R/A257V/D262N/F291L/P395H/G402R/M478L/ | + |
| | A536V/R562K/E699V | G515T/A526S/Q527A/G528A/A536V/P559R/ | |
| | | R562K/R604H/L660V/H687A/E699V/A745T/ | |
| | | F760W | |
| 1097/1098 | I718Q | F291L/P395H/G402R/M478L/G515T/A526S/Q527A/ | + |
| | | G528A/P559R/R604H/L660V/H687A/I718Q/ | |
| | | A745T/F760W | |
| 1099/1100 | H395S/E475A/A536V/ | F291L/P395S/G402R/E475A/M478L/G515T/A526S/ | + |
| | R562K/P662S/E699V | Q527A/G528A/A536V/P559R/R562K/R604H/ | |
| | | L660V/P662S/H687A/E699V/A745T/F760W | |
| 1101/1102 | S449L | F291L/P395H/G402R/S449L/M478L/G515T/A526S/ | + |
| | | Q527A/G528A/P559R/R604H/L660V/H687A/ | |
| | | A745T/F760W | |
| 1103/1104 | L388M | F291L/L388M/P395H/G402R/M478L/G515T/A526S/ | + |
| | | Q527A/G528A/P559R/R604H/L660V/H687A/ | |
| | | A745T/F760W | |
| 1105/1106 | K79R/R233K/A338V/ | K79R/R233K/F291L/A338V/K359G/A379G/P395H/ | + |
| | K359G/A379G/Q442G/ | G402R/Q442G/M478L/G515T/A526S/Q527A/ | |
| | R562K/E613H/ | G528A/P559R/R562K/R604H/E613H/L660V/ | |
| | A812S | H687A/A745T/F760W/A812S | |
| 1107/1108 | R233K | R233K/F291L/P395H/G402R/M478L/G515T/A526S/ | + |
| | | Q527A/G528A/P559R/R604H/L660V/H687A/ | |
| | | A745T/F760W | |
| 1109/1110 | V371L | F291L/V371L/P395H/G402R/M478L/G515T/A526S/ | + |
| | | Q527A/G528A/P559R/R604H/L660V/H687A/ | |
| | | A745T/F760W | |
| 1111/1112 | E376S | F291L/E376S/P395H/G402R/M478L/G515T/A526S/ | + |
| | | Q527A/G528A/P559R/R604H/L660V/H687A/ | |
| | | A745T/F760W | |
| 1113/1114 | E316G/E475A/R562K/ | F291L/E316G/P395H/G402R/E475A/M478L/G515T/ | + |
| | P662S/L792F | A526S/Q527A/G528A/P559R/R562K/R604H/ | |
| | | L660V/P662S/H687A/A745T/F760W/L792F | |
| 1115/1116 | A702S | F291L/P395H/G402R/M478L/G515T/A526S/Q527A/ | + |
| | | G528A/P559R/R604H/L660V/H687A/A702S/ | |
| | | A745T/F760W | |
| 1117/1118 | K79R/A257V/E316G/ | K79R/A257V/F291L/E316G/P395H/G402R/M478L/ | + |
| | L792F | G515T/A526S/Q527A/G528A/P559R/R604H/ | |
| | | L660V/H687A/A745T/F760W/L792F | |
| 1119/1120 | A373G | F291L/A373G/P395H/G402R/M478L/G515T/A526S/ | + |
| | | Q527A/G528A/P559R/R604H/L660V/H687A/ | |
| | | A745T/F760W | |
| 1121/1122 | H454W | F291L/P395H/G402R/H454W/M478L/G515T/A526S/ | + |
| | | Q527A/G528A/P559R/R604H/L660V/H687A/ | |
| | | A745T/F760W | |
| 1123/1124 | R728S | F291L/P395H/G402R/M478L/G515T/A526S/Q527A/ | + |
| | | G528A/P559R/R604H/L660V/H687A/R728S/ | |
| | | A745T/F760W | |
| 1125/1126 | P447W | F291L/P395H/G402R/P447W/M478L/G515T/A526S/ | + |
| | | Q527A/G528A/P559R/R604H/L660V/H687A/ | |
| | | A745T/F760W | |
| 1127/1128 | K79R/R233K/A338V | K79R/R233K/F291L/A338V/P395H/G402R/M478L/ | + |
| | | G515T/A526S/Q527A/G528A/P559R/R604H/ | |
| | | L660V/H687A/A745T/F760W | |
| 1129/1130 | L437P | F291L/P395H/G402R/L437P/M478L/G515T/A526S/ | + |
| | | Q527A/G528A/P559R/R604H/L660V/H687A/ | |
| | | A745T/F760W | |
| 733/734 | E443A | F291L/P395H/G402R/E443A/M478L/G515T/A526S/ | + |
| | | Q527A/G528A/P559R/R604H/L660V/H687A/ | |
| | | A745T/F760W | |
| 737/738 | D381E | F291L/D381E/P395H/G402R/M478L/G515T/A526S/ | + |
| | | Q527A/G528A/P559R/R604H/L660V/H687A/ | |
| | | A745T/F760W | |
| 1131/1132 | R432T | F291L/P395H/G402R/R432T/M478L/G515T/A526S/ | + |
| | | Q527A/G528A/P559R/R604H/L660V/H687A/ | |
| | | A745T/F760W | |
| 1133/1134 | K79R/V178L/A257V/ | K79R/V178L/A257V/F291L/E316G/P395S/G402R/ | + |
| | E316G/H395S/ | M478L/G515T/A526S/Q527A/G528A/A536V/ | |
| | A536V/P662S/E699V | P559R/R604H/L660V/P662S/H687A/E699V/ | |
| | | A745T/F760W | |
| 789/790 | A257V/E316G/L474A/ | A257V/F291L/E316G/P395H/G402R/L474A/M478L/ | + |
| | A536V/L792F | G515T/A526S/Q527A/G528A/A536V/P559R/ | |
| | | R604H/L660V/H687A/A745T/F760W/L792F | |
| 785/786 | H454F | F291L/P395H/G402R/H454F/M478L/G515T/A526S/ | + |
| | | Q527A/G528A/P559R/R604H/L660V/H687A/ | |
| | | A745T/F760W | |
| 1135/1136 | K79R/G303T/K713G | K79R/F291L/G303T/P395H/G402R/M478L/G515T/ | + |
| | | A526S/Q527A/G528A/P559R/R604H/L660V/ | |
| | | H687A/K713G/A745T/F760W | |
| 711/712 | L474A/A536V/R562K | F291L/P395H/G402R/L474A/M478L/G515T/A526S/ | + |
| | | Q527A/G528A/A536V/P559R/R562K/R604H/ | |
| | | L660V/H687A/A745T/F760W | |
| 1137/1138 | I718F | F291L/P395H/G402R/M478L/G515T/A526S/Q527A/ | + |
| | | G528A/P559R/R604H/L660V/H687A/I718F/ | |
| | | A745T/F760W | |
| 1139/1140 | A453L | F291L/P395H/G402R/A453L/M478L/G515T/A526S/ | + |
| | | Q527A/G528A/P559R/R604H/L660V/H687A/ | |
| | | A745T/F760W | |
| 723/724 | A257V/H395S/L792F | A257V/F291L/P395S/G402R/M478L/G515T/A526S/ | + |
| | | Q527A/G528A/P559R/R604H/L660V/H687A/ | |
| | | A745T/F760W/L792F | |
| 1141/1142 | Q427F | F291L/P395H/G402R/Q427F/M478L/G515T/A526S/ | + |
| | | Q527A/G528A/P559R/R604H/L660V/H687A/ | |
| | | A745T/F760W | |
| 1143/1144 | R233K/A379G/Q442G/ | R233K/F291L/A379G/P395H/G402R/Q442G/M478L/ | + |
| | R562K/E613H/ | G515T/A526S/Q527A/G528A/P559R/R562K/ | |
| | P662S/K713G | R604H/E613H/L660V/P662S/H687A/K713G/ | |
| | | A745T/F760W | |
| 1145/1146 | P21A/P742K | P21A/F291L/P395H/G402R/M478L/G515T/A526S/ | + |
| | | Q527A/G528A/P559R/R604H/L660V/H687A/ | |
| | | P742K/A745T/F760W | |
| 1147/1148 | E732L | F291L/P395H/G402R/M478L/G515T/A526S/Q527A/ | + |
| | | G528A/P559R/R604H/L660V/H687A/E732L/ | |
| | | A745T/F760W | |
| 1149/1150 | L392S | F291L/L392S/P395H/G402R/M478L/G515T/A526S/ | + |
| | | Q527A/G528A/P559R/R604H/L660V/H687A/ | |
| | | A745T/F760W | |
| 1151/1152 | L388P | F291L/L388P/P395H/G402R/M478L/G515T/A526S/ | + |
| | | Q527A/G528A/P559R/R604H/L660V/H687A/ | |
| | | A745T/F760W | |
| 1153/1154 | L393S | F291L/L393S/P395H/G402R/M478L/G515T/A526S/ | + |
| | | Q527A/G528A/P559R/R604H/L660V/H687A/ | |
| | | A745T/F760W | |
| 1155/1156 | L437N | F291L/P395H/G402R/L437N/M478L/G515T/A526S/ | + |
| | | Q527A/G528A/P559R/R604H/L660V/H687A/ | |
| | | A745T/F760W | |
| 1157/1158 | L392A | F291L/L392A/P395H/G402R/M478L/G515T/A526S/ | + |
| | | Q527A/G528A/P559R/R604H/L660V/H687A/ | |
| | | A745T/F760W | |
| 1159/1160 | L393G | F291L/L393G/P395H/G402R/M478L/G515T/A526S/ | + |
| | | Q527A/G528A/P559R/R604H/L660V/H687A/ | |
| | | A745T/F760W | |
| 787/788 | K327E/Q427T | F291L/K327E/P395H/G402R/Q427T/M478L/G515T/ | + |
| | | A526S/Q527A/G528A/P559R/R604H/L660V/ | |
| | | H687A/A745T/F760W | |
| 1161/1162 | T412M | F291L/P395H/G402R/T412M/M478L/G515T/A526S/ | + |
| | | Q527A/G528A/P559R/R604H/L660V/H687A/ | |
| | | A745T/F760W | |
| 1163/1164 | K79R/A257V/H395S/ | K79R/A257V/F291L/P395S/G402R/M478L/G515T/ | + |
| | R562K/P662S/ | A526S/Q527A/G528A/P559R/R562K/R604H/ | |
| | E699V | L660V/P662S/H687A/E699V/A745T/F760W | |
| 1165/1166 | P21A/R233K/A338V/ | P21A/R233K/F291L/A338V/A379G/P395H/ | + |
| | A379G/Q442G/ | G402R/Q442G/M478L/G515T/A526S/Q527A/G528A/ | |
| | R562K/E613H/P662S/ | P559R/R562K/R604H/E613H/L660V/P662S/ | |
| | A812S | H687A/A745T/F760W/A812S | |
| 699/700 | Q427R | F291L/P395H/G402R/Q427R/M478L/G515T/A526S/ | + |
| | | Q527A/G528A/P559R/R604H/L660V/H687A/ | |
| | | A745T/F760W | |
| 1167/1168 | Q427Y | F291L/P395H/G402R/Q427Y/M478L/G515T/A526S/ | + |
| | | Q527A/G528A/P559R/R604H/L660V/H687A/ | |
| | | A745T/F760W | |
| 1169/1170 | E732Q | F291L/P395H/G402R/M478L/G515T/A526S/Q527A/ | + |
| | | G528A/P559R/R604H/L660V/H687A/E732Q/ | |
| | | A745T/F760W | |
| 1171/1172 | L429F | F291L/P395H/G402R/L429F/M478L/G515T/A526S/ | + |
| | | Q527A/G528A/P559R/R604H/L660V/H687A/ | |
| | | A745T/F760W | |

Levels of increased activity were determined relative to the reference polypeptide of SEQ ID NO: 546 and defined as follows: “+” 1.00 to 1.30, “++” > 1.30, “+++” > 1.69.

### HPV Assay Parameters

[0340] A 15 μL reaction that comprised of 1× Standard non-infections HPV RNA, Alinity™ Reagents Polymerase Master Mix (primers, probes, dNTPs; Abbott, USA), Polymerase Activator solution and 0.5 vol HTP lysate with and without (16.4 mM GITC, 0.51% ETOH, 80 ng gDNA) PCR inhibitors. qPCR cycling (46° C. 6 min, 97° C. 3.3 min, 97° C. 3 sec, 51.6° C. 20 sec, 92° C. 3 sec, 51.6° C. 20 sec, 54.7° C. 16 sec for 42 cycles) in a CFX384 Touch Deep Well Real-Time PCR detection System (BioRad).

[0341] Polymerase stability and activity relative to SEQ ID NO: 546 (POP Quasar END RFU) was calculated as the improved Quasar END RFU value formed by the variant compared to END RFU value of SEQ ID NO: 546 and shown in Table 9.2.

TABLE 9.2
Pos Control FIOP Quasar END RFU Relative to SEQ ID NO: 546

| | Amino Acid | | |
|---|---|---|---|
| | Differences | | Fold Improvement |
| SEQ ID NO: | (Relative to | Amino Acid Differences | (HPV) Relative to |
| (nt/aa) | SEQ ID NO: 546) | (Relative to SEQ ID NO: 2) | SEQ ID NO: 546 |
| 675/676 | L438F | F291L/P395H/G402R/L438F/M478L/G515T/ | +++ |
| | | A526S/Q527A/G528A/P559R/R604H/L660V/ | |
| | | H687A/A745T/F760W | |
| 677/678 | Y697I | F291L/P395H/G402R/M478L/G515T/A526S/ | +++ |
| | | Q527A/G528A/P559R/R604H/L660V/H687A/ | |
| | | Y697I/A745T/F760W | |
| 679/680 | A457W | F291L/P395H/G402R/A457W/M478L/G515T/ | +++ |
| | | A526S/Q527A/G528A/P559R/R604H/L660V/ | |
| | | H687A/A745T/F760W | |
| 681/682 | A716E | F291L/P395H/G402R/M478L/G515T/A526S/ | +++ |
| | | 2Q57A/G528A/P559R/R604H/L660V/H687A/ | |
| | | A716E/A745T/F760W | |
| 683/684 | K79R/L474A/ | K79R/F291L/P395H/G402R/L474A/M478L/ | +++ |
| | A536V/E699V | G515T/A526S/Q527A/G528A/A536V/P559R/ | |
| | | R604H/L660V/H687A/E699V/A745T/F760W | |
| 685/686 | A536V | F291L/P395H/G402R/M478L/G515T/A526S/ | +++ |
| | | Q527A/G528A/A536V/P559R/R604H/L660V/ | |
| | | H687A/A745T/F760W | |
| 687/688 | L392V | F291L/L392V/P395H/G402R/M478L/G515T/ | +++ |
| | | A526S/Q527A/G528A/P559R/R604H/L660V/ | |
| | | H687A/A745T/F760W | |
| 689/690 | F708L | F291L/P395H/G402R/M478L/G515T/A526S/ | +++ |
| | | Q527A/G528A/P559R/R604H/L660V/H687A/ | |
| | | F708L/A745T/F760W | |
| 691/692 | P431G | F291L/P395H/G402R/P431G/M478L/G515T/ | +++ |
| | | A526S/Q527A/G528A/P559R/R604H/L660V/ | |
| | | H687A/A745T/F760W | |
| 693/694 | H395S/L474A/ | F291L/P395S/G402R/L474A/M478L/G515T/ | +++ |
| | A536V/E699V | A526S/Q527A/G528A/A536V/P559R/R604H/ | |
| | | L660V/H687A/E699V/A745T/F760W | |
| 695/696 | A453S | F291L/P395H/G402R/A453S/M478L/G515T/ | +++ |
| | | A526S/Q527A/G528A/P559R/R604H/L660V/ | |
| | | H687A/A745T/F760W | |
| 697/698 | Y697V | F291L/P395H/G402R/M478L/G515T/A526S/ | +++ |
| | | Q527A/G528A/P559R/R604H/L660V/H687A/ | |
| | | Y697V/A745T/F760W | |
| 699/700 | Q427R | F291L/P395H/G402R/Q427R/M478L/G515T/ | +++ |
| | | A526S/Q527A/G528A/P559R/R604H/L660V/ | |
| | | H687A/A745T/F760W | |
| 701/702 | K79R/H395S/ | K79R/F291L/P395S/G402R/M478L/G515T/ | +++ |
| | E699V | A526S/Q527A/G528A/P559R/R604H/L660V/ | |
| | | H687A/E699V/A745T/F760W | |
| 703/704 | V378F | F291L/V378F/P395H/G402R/M478L/G515T/ | +++ |
| | | A526S/Q527A/G528A/P559R/R604H/L660V/ | |
| | | H687A/A745T/F760W | |
| 705/706 | A370V | F291L/A370V/P395H/G402R/M478L/G515T/ | +++ |
| | | A526S/Q527A/G528A/P559R/R604H/L660V/ | |
| | | H687A/A745T/F760W | |
| 707/708 | R706S | F291L/P395H/G402R/M478L/G515T/A526S/ | ++ |
| | | Q527A/G528A/P559R/R604H/L660V/H687A/ | |
| | | R706S/A745T/F760W | |
| 709/710 | A257V/H395S/ | A257V/F291L/P395S/G402R/L474A/E475A/ | ++ |
| | L474A/E475A/ | M478L/G515T/A526S/Q527A/G528A/A536V/ | |
| | A536V/P662S | P559R/R604H/L660V/P662S/H687A/A745T/F760W | |
| 711/712 | L474A/A536V/ | F291L/P395H/G402R/L474A/M478L/G515T/ | ++ |
| | R562K | A526S/Q527A/G528A/A536V/P559R/R562K/ | |
| | | R604H/L660V/H687A/A745T/F760W | |
| 713/714 | A257V/H395S/ | A257V/F291L/P395S/G402R/L474A/M478L/ | ++ |
| | L474A/A536V | G515T/A526S/Q527A/G528A/A536V/P559R/ | |
| | | R604H/L660V/H687A/A745T/F760W | |
| 715/716 | K79R/A257V/ | K79R/A257V/F291L/P395S/G402R/L474A/ | ++ |
| | H395S/L474A/ | E475A/M478L/G515T/A526S/Q527A/G528A/ | |
| | E475A/A536V/ | A536V/P559R/R562K/R604H/L660V/H687A/ | |
| | R562K | A745T/F760W | |
| 717/718 | V378S | F291L/V378S/P395H/G402R/M478L/G515T/ | ++ |
| | | A526S/Q527A/G528A/P559R/R604H/L660V/ | |
| | | H687A/A745T/F760W | |
| 719/720 | K79R/H395S/ | K79R/F291L/P395S/G402R/M478L/G515T/ | ++ |
| | A536V/E699V | A526S/Q527A/G528A/A536V/P559R/R604H/ | |
| | | L660V/H687A/E699V/A745T/F760W | |
| 721/722 | L372V | F291L/L372V/P395H/G402R/M478L/G515T/ | ++ |
| | | A526S/Q527A/G528A/P559R/R604H/L660V/ | |
| | | H687A/A745T/F760W | |
| 723/724 | A257V/H395S/ | A257V/F291L/P395S/G402R/M478L/G515T/ | ++ |
| | L792F | A526S/Q527A/G528A/P559R/R604H/L660V/ | |
| | | H687A/A745T/F760W/L792F | |
| 725/726 | A390S | F291L/A390S/P395H/G402R/M478L/G515T/ | ++ |
| | | A526S/Q527A/G528A/P559R/R604H/L660V/ | |
| | | H687A/A745T/F760W | |
| 727/728 | Q427L | F291L/P395H/G402R/Q427L/M478L/G515T/ | ++ |
| | | A526S/Q527A/G528A/P559R/R604H/L660V/ | |
| | | H687A/A745T/F760W | |
| 729/730 | K79R/L474A/ | K79R/F291L/P395H/G402R/L474A/M478L/ | ++ |
| | A536V/E699V/ | G515T/A526S/Q527A/G528A/A536V/P559R/ | |
| | L792F | R604H/L660V/H687A/E699V/A745T/F760W/L792F | |
| 731/732 | G409S | F291L/P395H/G402R/G409S/M478L/G515T/ | ++ |
| | | A526S/Q527A/G528A/P559R/R604H/L660V/ | |
| | | AH687/A745T/F760W | |
| 733/734 | E443A | F291L/P395H/G402R/E443A/M478L/G515T/ | ++ |
| | | A526S/Q527A/G528A/P559R/R604H/L660V/ | |
| | | H687A/A745T/F760W | |
| 735/736 | L448V | F291L/P395H/G402R/L448V/M478L/G515T/ | ++ |
| | | A526S/Q527A/G528A/P559R/R604H/L660V/ | |
| | | H687A/A745T/F760W | |
| 737/738 | D381E | F291L/D381E/P395H/G402R/M478L/G515T/ | ++ |
| | | A526S/Q527A/G528A/P559R/R604H/L660V/ | |
| | | H687A/A745T/F760W | |
| 739/740 | Y707W | F291L/P395H/G402R/M478L/G515T/A526S/ | ++ |
| | | Q527A/G528A/P559R/R604H/L660V/H687A/ | |
| | | Y707W/A745T/F760W | |
| 741/742 | D381K | F291L/D381K/P395H/G402R/M478L/G515T/ | ++ |
| | | A526S/Q527A/G528A/P559R/R604H/L660V/ | |
| | | H687A/A745T/F760W | |
| 743/744 | A457Y | F291L/P395H/G402R/A457Y/M478L/G515T/ | ++ |
| | | A526S/Q527A/G528A/P559R/R604H/L660V/ | |
| | | H687A/A745T/F760W | |
| 745/746 | A416S | F291L/P395H/G402R/A416S/M478L/G515T/ | ++ |
| | | A526S/Q527A/G528A/P559R/R604H/L660V/ | |
| | | H687A/A745T/F760W | |
| 747/748 | L474A/E475A/ | F291L/P395H/G402R/L474A/E475A/M478L/ | ++ |
| | P662S | G515T/A526S/Q527A/G528A/P559R/R604H/ | |
| | | L660V/P662S/H687A/A745T/F760W | |
| 749/750 | K79R/H395S/ | K79R/F291L/P395S/G402R/L474A/E475A/ | ++ |
| | L474A/E475A/ | M478L/G515T/A526S/Q527A/G528A/A536V/ | |
| | A536V/L792F | P559R/R604H/L660V/H687A/A745T/F760W/L792F | |
| 751/752 | L474A/E475A/ | F291L/P395H/G402R/L474A/E475A/M478L/ | ++ |
| | A536V/P662S | G515T/A526S/Q527A/G528A/A536V/P559R/ | |
| | | R604H/L660V/P662S/H687A/A745T/F760W | |
| 753/754 | P382C | F291L/P382C/P395H/G402R/M478L/G515T/ | + |
| | | A526S/Q527A/G528A/P559R/R604H/L660V/ | |
| | | H687A/A745T/F760W | |
| 755/756 | A257V/L474A/ | A257V/F291L/P395H/G402R/L474A/M478L/ | + |
| | A536V/R562K/ | G515T/A526S/Q527A/G528A/A536V/P559R/ | |
| | P662S | R562K/R604H/L660V/P662S/H687A/A745T/F760W | |
| 757/758 | A257V/H395S/ | A257V/F291L/P395S/G402R/L474A/E475A/ | + |
| | L474A/E475A/ | M478L/G515T/A526S/Q527A/G528A/P559R/ | |
| | L792F | R604H/L660V/H687A/A745T/F760W/L792F | |
| 759/760 | K79R/L474A/ | K79R/F291L/P395H/G402R/L474A/M478L/ | + |
| | P662S/E699V | G515T/A526S/Q527A/G528A/P559R/R604H/ | |
| | | L660V/P662S/H687A/E699V/A745T/F760W | |
| 761/762 | G725V | F291L/P395H/G402R/M478L/G515T/A526S/ | + |
| | | Q527A/G528A/P559R/R604H/L660V/H687A/ | |
| | | G725V/A745T/F760W | |
| 763/764 | R706I | F291L/P395H/G402R/M478L/G515T/A526S/ | + |
| | | Q527A/G528A/P559R/R604H/L660V/H687A/ | |
| | | R706I/A745T/F760W | |
| 765/766 | P447R | F291L/P395H/G402R/P447R/M478L/G515T/ | + |
| | | A526S/Q527A/G528A/P559R/R604H/L660V/ | |
| | | H687A/A745T/F760W | |
| 767/768 | Y697L | F291L/P395H/G402R/M478L/G515T/A526S/ | + |
| | | Q527A/G528A/P559R/R604H/L660V/H687A/ | |
| | | Y697L/A745T/F760W | |
| 769/770 | K79R/A257V/ | K79R/A257V/F291L/P395H/G402R/M478L/ | + |
| | E699V | G515T/A526S/Q527A/G528A/P559R/R604H/ | |
| | | L660V/H687A/E699V/A745T/F760W | |
| 771/772 | E701M | F291L/P395H/G402R/M478L/G515T/A526S/ | + |
| | | Q527A/G528A/P559R/R604H/L660V/H687A/ | |
| | | E701M/A745T/F760W | |
| 773/774 | A257V/L474A/ | A257V/F291L/P395H/G402R/L474A/E475A/ | + |
| | E475A/A536V/ | M478L/G515T/A526S/Q527A/G528A/A536V/ | |
| | R562K/P662S | P559R/R562K/R604H/L660V/P662S/H687A/ | |
| | | A745T/F760W | |
| 775/776 | A702V | F291L/P395H/G402R/M478L/G515T/A526S/ | + |
| | | Q527A/G528A/P559R/R604H/L660V/H687A/ | |
| | | A702V/A745T/F760W | |
| 777/778 | E342G/A716L | F291L/E342G/P395H/G402R/M478L/G515T/ | + |
| | | A526S/Q527A/G528A/P559R/R604H/L660V/ | |
| | | H687A/A716L/A745T/F760W | |
| 779/780 | R233K/R562K/ | R233K/F291L/P395H/G402R/M478L/G515T/ | + |
| | K713G | A526S/Q527A/G528A/P559R/R562K/R604H/ | |
| | | L660V/H687A/K713G/A745T/F760W | |
| 781/782 | I704V | F291L/P395H/G402R/M478L/G515T/A526S/ | + |
| | | Q527A/G528A/P559R/R604H/L660V/H687A/ | |
| | | I704V/A745T/F760W | |
| 783/784 | L474A/E475A/ | F291L/P395H/G402R/L474A/E475A/M478L/ | + |
| | A536V/R562K/ | G515T/A526S/Q527A/G528A/A536V/P559R/ | |
| | P662S | R562K/R604H/L660V/P662S/H687A/A745T/F760W | |
| 785/786 | H454F | F291L/P395H/G402R/H454F/M478L/G515T/ | + |
| | | A526S/Q527A/G528A/P559R/R604H/L660V/ | |
| | | H687A/A745T/F760W | |
| 787/788 | K327E/Q427T | F291L/K327E/P395H/G402R/Q427T/M478L/ | + |
| | | G515T/A526S/Q527A/G528A/P559R/R604H/ | |
| | | L660V/H687A/A745T/F760W | |
| 789/790 | A257V/E316G/ | A257V/F291L/E316G/P395H/G402R/L474A/ | + |
| | L474A/A536V/ | M478L/G515T/A526S/Q527A/G528A/A536V/ | |
| | L792F | P559R/R604H/L660V/H687A/A745T/F760W/L792F | |
| 791/792 | Q427D | F291L/P395H/G402R/Q427D/M478L/G515T/ | + |
| | | A526S/Q527A/G528A/P559R/R604H/L660V/ | |
| | | H687A/A745T/F760W | |
| 793/794 | A370G | F291L/A370G/P395H/G402R/M478L/G515T/ | + |
| | | A526S/Q527A/G528A/P559R/R604H/L660V/ | |
| | | H687A/A745T/F760W | |
| 795/796 | E417R | F291L/P395H/G402R/E417R/M478L/G515T/ | + |
| | | A526S/Q527A/G528A/P559R/R604H/L660V/ | |
| | | H687A/A745T/F760W | |
| 797/798 | L425T | F291L/P395H/G402R/L425T/M478L/G515T/ | + |
| | | A526S/Q527A/G528A/P559R/R604H/L660V/ | |
| | | H687A/A745T/F760W | |
| 799/800 | A536V/R562K | F291L/P395H/G402R/M478L/G515T/A526S/ | + |
| | | Q527A/G528A/A536V/P559R/R562K/R604H/ | |
| | | L660V/H687A/A745T/F760W | |
| 801/802 | V714I | F291L/P395H/G402R/M478L/G515T/A526S/ | + |
| | | Q527A/G528A/P559R/R604H/L660V/H687A/ | |
| | | V714I/A745T/F760W | |
| 803/804 | R233H | R233H/F291L/P395H/G402R/M478L/G515T/ | + |
| | | A526S/Q527A/G528A/P559R/R604H/L660V/ | |
| | | H687A/A745T/F760W | |
| 805/806 | L392T | F291L/L392T/P395H/G402R/M478L/G515T/ | + |
| | | A526S/Q527A/G528A/P559R/R604H/L660V/ | |
| | | H687A/A745T/F760W | |
| 807/808 | G303T/E613H | F291L/G303T/P395H/G402R/M478L/G515T/ | + |
| | | A526S/Q527A/G528A/P559R/R604H/E613H/ | |
| | | L660V/H687A/A745T/F760W | |
| 809/810 | Y697A | F291L/P395H/G402R/M478L/G515T/A526S/ | + |
| | | Q527A/G528A/P559R/R604H/L660V/H687A/ | |
| | | Y697A/A745T/F760W | |
| 811/812 | V378L | F291L/V378L/P395H/G402R/M478L/G515T/ | + |
| | | A526S/Q527A/G528A/P559R/R604H/L660V/ | |
| | | H687A/A745T/F760W | |
| 813/814 | Q427H | F291L/P395H/G402R/Q427H/M478L/G515T/ | + |
| | | A526S/Q527A/G528A/P559R/R604H/L660V/ | |
| | | H687A/A745T/F760W | |
| 815/816 | P21A/K79A/ | P21A/K79A/F291L/G303T/P395H/G402R/ | + |
| | G303T/R562K/ | M478L/G515T/A526S/Q527A/G528A/P559R/ | |
| | E613H | R562K/R604H/E613H/L660V/H687A/A745T/F760W | |
| 817/818 | A370S | F291L/A370S/P395H/G402R/M478L/G515T/ | + |
| | | A526S/Q527A/G528A/P559R/R604H/L660V/ | |
| | | H687A/A745T/F760W | |
| 819/820 | A457N | F291L/P395H/G402R/A457N/M478L/G515T/ | + |
| | | A526S/Q527A/G528A/P559R/R604H/L660V/ | |
| | | H687A/A745T/F760W | |
| 821/822 | K79R/R562K | K79R/F291L/P395H/G402R/M478L/G515T/ | + |
| | | A526S/Q527A/G528A/P559R/R562K/R604H/ | |
| | | L660V/H687A/A745T/F760W | |
| 823/824 | E435P | F291L/P395H/G402R/E435P/M478L/G515T/ | + |
| | | A526S/Q527A/G528A/P559R/R604H/L660V/ | |
| | | H687A/A745T/F760W | |
| 825/826 | A257V/A536V/ | A257V/F291L/P395H/G402R/M478L/G515T/ | + |
| | E699V/L792F | A526S/Q527A/G528A/A536V/P559R/R604H/ | |
| | | L660V/H687A/E699V/A745T/F760W/L792F | |
| 827/828 | K79R/A536V | K79R/F291L/P395H/G402R/M478L/G515T/ | + |
| | | A526S/Q527A/G528A/A536V/P559R/R604H/ | |
| | | L660V/H687A/A745T/F760W | |
| 829/830 | A453S/P667T | F291L/P395H/G402R/A453S/M478L/G515T/ | + |
| | | A526S/Q527A/G528A/P559R/R604H/L660V/ | |
| | | P667T/H687A/A745T/F760W | |

Levels of increased activity were determined relative to the reference polypeptide of SEQ ID NO: 546 and defined as follows: “+” 1.00 to 1.09, “++” >1.09, “+++” >1.18.

[0342] A 15 μL reaction that comprised of 1× Low PC (Low Pool Concentration) non-infections HPV RNA, Alinity™ Reagents Polymerase Master Mix (primers, probes, dNTPs; Abbott, USA), Polymerase Activator solution and 0.5 vol (HTP lysate with and without (16.4 mM GITC, 0.51% ETOH, 80 ng gDNA) PCR inhibitors. qPCR cycling (46° C. 6 min, 97° C. 3.3 min, 97° C. 3 sec, 51.6° C. 20 sec, 92° C. 3 sec, 51.6° C. 20 sec, 54.7° C. 16 sec for 42 cycles) in a CFX384 Touch Deep Well Real-Time PCR detection System (BioRad).

[0343] Polymerase stability and activity relative to SEQ ID NO: 546 (FIOP Quasar END RFU) was calculated as the improved Quasar END RFU value formed by the variant compared to END RFU value of SEQ ID NO: 546 and shown in Table 9.3.

TABLE 9.3
Pos Control FIOP Quasar END RFU Relative to SEQ ID NO: 546

| | Amino Acid | | |
|---|---|---|---|
| | Differences | | Fold Improvement |
| SEQ ID NO: | (Relative to | Amino Acid Differences | (HPV) Relative to |
| (nt/aa) | SEQ ID NO: 546) | (Relative to SEQ ID NO: 2) | SEQ ID NO: 546 |
| 1173/1174 | R562K/E699V | F291L/P395H/G402R/M478L/G515T/A526S/ | +++ |
| | | Q527A/G528A/P559R/R562K/R604H/L660V/ | |
| | | H687A/E699V/A745T/F760W | |
| 957/958 | K79R/A257V/ | K79R/A257V/F291L/P395H/G402R/L474A/ | +++ |
| | L474A/A536V/ | M478L/G515T/A526S/Q527A/G528A/A536V/ | |
| | E699V | P559R/R604H/L660V/H687A/E699V/A745T/ | |
| | | F760W | |
| 755/756 | A257V/L474A/ | A257V/F291L/P395H/G402R/L474A/M478L/ | +++ |
| | A536V/R562K/ | G515T/A526S/Q527A/G528A/A536V/P559R/ | |
| | P662S | R562K/R604H/L660V/P662S/H687A/A745T/ | |
| | | F760W | |
| 751/752 | L474A/E475A/ | F291L/P395H/G402R/L474A/E475A/M478L/ | +++ |
| | A536V/P662S | G515T/A526S/Q527A/G528A/A536V/P559R/ | |
| | | R604H/L660V/P662S/H687A/A745T/F760W | |
| 773/774 | A257V/L474A/ | A257V/F291L/P395H/G402R/L474A/E475A/ | +++ |
| | E475A/A536V/ | M478L/G515T/A526S/Q527A/G528A/A536V/ | |
| | R562K/P662S | P559R/R562K/R604H/L660V/P662S/H687A/ | |
| | | A745T/F760W | |
| 711/712 | L474A/A536V/ | F291L/P395H/G402R/L474A/M478L/G515T/ | +++ |
| | R562K | A526S/Q527A/G528A/A536V/P559R/R562K/ | |
| | | R604H/L660V/H687A/A745T/F760W | |
| 715/716 | K79R/A257V/ | K79R/A257V/F291L/P395S/G402R/L474A/ | +++ |
| | H395S/L474A/ | E475A/M478L/G515T/A526S/Q527A/G528A/ | |
| | E475A/A536V/ | A536V/P559R/R562K/R604H/L660V/H687A/ | |
| | R562K | A745T/F760W | |
| 705/706 | A370V | F291L/A370V/P395H/G402R/M478L/G515T/ | +++ |
| | | A526S/Q527A/G528A/P559R/R604H/L660V/ | |
| | | H687A/A745T/F760W | |
| 1009/1010 | A457W | F291L/P395H/G402R/A457W/M478L/G515T/ | +++ |
| | | A526S/Q527A/G528A/P559R/R604H/L660V/ | |
| | | H687A/A745T/F760W | |
| 859/860 | K79R/V178L/ | K79R/V178L/A257V/F291L/P395H/G402R/ | +++ |
| | A257V/P662S/ | M478L/G515T/A526S/Q527A/G528A/P559R/ | |
| | E699V | R604H/L660V/P662S/H687A/E699V/A745T/ | |
| | | F760W | |
| 977/978 | A457Y | F291L/P395H/G402R/A457Y/M478L/G515T/ | +++ |
| | | A526S/Q527A/G528A/P559R/R604H/L660V/ | |
| | | H687A/A745T/F760W | |
| 779/780 | R233K/R562K/ | R233K/F291L/P395H/G402R/M478L/G515T/ | ++ |
| | K713G | A526S/Q527A/G528A/P559R/R562K/R604H/ | |
| | | L660V/H687A/K713G/A745T/F760W | |
| 753/754 | P382C | F291L/P382C/P395H/G402R/M478L/G515T/ | ++ |
| | | A526S/Q527A/G528A/P559R/R604H/L660V/ | |
| | | H687A/A745T/F760W | |
| 809/810 | Y697A | F291L/P395H/G402R/M478L/G515T/A526S/ | ++ |
| | | Q527A/G528A/P559R/R604H/L660V/H687A/ | |
| | | Y697A/A745T/F760W | |
| 757/758 | A257V/H395S/ | A257V/F291L/P395S/G402R/L474A/E475A/ | ++ |
| | L474A/E475A/ | M478L/G515T/A526S/Q527A/G528A/P559R/ | |
| | L792F | R604H/L660V/H687A/A745T/F760W/L792F | |
| 1163/1164 | K79R/A257V/ | K79R/A257V/F291L/P395S/G402R/M478L/ | ++ |
| | H395S/R562K/ | G515T/A526S/Q527A/G528A/P559R/R562K/ | |
| | P662S/E699V | R604H/L660V/P662S/H687A/E699V/A745T/ | |
| | | F760W | |
| 747/748 | L474A/E475A/ | F291L/P395H/G402R/L474A/E475A/M478L/ | ++ |
| | P662S | G515T/A526S/Q527A/G528A/P559R/R604H/ | |
| | | L660V/P662S/H687A/A745T/F760W | |
| 837/838 | K79R/A257V/ | K79R/A257V/F291L/P395H/G402R/M478L/ | ++ |
| | E699V | G515T/A526S/Q527A/G528A/P559R/R604H/ | |
| | | L660V/H687A/E699V/A745T/F760W | |
| 835/836 | K79A/A338V/ | K79A/F291L/A338V/P395H/G402R/M478L/ | ++ |
| | R562K | G515T/A526S/Q527A/G528A/P559R/R562K/ | |
| | | R604H/L660V/H687A/A745T/F760W | |
| 1145/1146 | P21A/P742K | P21A/F291L/P395H/G402R/M478L/G515T/ | ++ |
| | | A526S/Q527A/G528A/P559R/R604H/L660V/ | |
| | | H687A/P742K/A745T/F760W | |
| 815/816 | P21A/K79A/ | P21A/K79A/F291L/G303T/P395H/G402R/ | ++ |
| | G303T/R562K/ | M478L/G515T/A526S/Q527A/G528A/P559R/ | |
| | E613H | R562K/R604H/E613H/L660V/H687A/A745T/ | |
| | | F760W | |
| 857/858 | K79A/G303T/ | K79A/F291L/G303T/P395H/G402R/M478L/ | ++ |
| | P662S | G515T/A526S/Q527A/G528A/P559R/R604H/ | |
| | | L660V/P662S/H687A/A745T/F760W | |
| 709/710 | A257V/H395S/ | A257V/F291L/P395S/G402R/L474A/E475A/ | ++ |
| | L474A/E475A/ | M478L/G515T/A526S/Q527A/G528A/A536V/ | |
| | A536V/P662S | P559R/R604H/L660V/P662S/H687A/A745T/ | |
| | | F760W | |
| 1175/1176 | H2-/L374Y | H2-/F291L/L374Y/P395H/G402R/M478L/ | ++ |
| | | G515T/A526S/Q527A/G528A/P559R/R604H/ | |
| | | L660V/H687A/A745T/F760W | |
| 861/862 | K79R/A257V/ | K79R/A257V/F291L/P395H/G402R/M478L/ | ++ |
| | A536V/R562K/ | G515T/A526S/Q527A/G528A/A536V/P559R/ | |
| | P662S | R562K/R604H/L660V/P662S/H687A/A745T/ | |
| | | F760W | |
| 1177/1178 | E723Y | F291L/P395H/G402R/M478L/G515T/A526S/ | ++ |
| | | Q527A/G528A/P559R/R604H/L660V/H687A/ | |
| | | E723Y/A745T/F760W | |
| 1179/1180 | S434N | F291L/P395H/G402R/S434N/M478L/G515T/ | ++ |
| | | A526S/Q527A/G528A/P559R/R604H/L660V/ | |
| | | H687A/A745T/F760W | |
| 1181/1182 | L388V | F291L/L388V/P395H/G402R/M478L/G515T/ | + |
| | | A526S/Q527A/G528A/P559R/R604H/L660V/ | |
| | | H687A/A745T/F760W | |
| 783/784 | L474A/E475A/ | F291L/P395H/G402R/L474A/E475A/M478L/ | + |
| | A536V/R562K/ | G515T/A526S/Q527A/G528A/A536V/P559R/ | |
| | P662S | R562K/R604H/L660V/P662S/H687A/A745T/ | |
| | | F760W | |
| 803/804 | R233H | R233H/F291L/P395H/G402R/M478L/G515T/ | + |
| | | A526S/Q527A/G528A/P559R/R604H/L660V/ | |
| | | H687A/A745T/F760W | |
| 1041/1042 | K79R/A257V/ | K79R/A257V/F291L/P395H/G402R/M478L/ | + |
| | A536V/P662S/ | G515T/A526S/Q527A/G528A/A536V/P559R/ | |
| | E699V | R604H/L660V/P662S/H687A/E699V/A745T/ | |
| | | F760W | |
| 967/968 | A257V/A536V/ | A257V/F291L/P395H/G402R/M478L/G515T/ | + |
| | R562K/P662S | A526S/Q527A/G528A/A536V/P559R/R562K/ | |
| | | R604H/L660V/P662S/H687A/A745T/F760W | |
| 901/902 | K79A/K713G | K79A/F291L/P395H/G402R/M478L/G515T/ | + |
| | | A526S/Q527A/G528A/P559R/R604H/L660V/ | |
| | | H687A/K713G/A745T/F760W | |
| 963/964 | K79R | K79R/F291L/P395H/G402R/M478L/G515T/ | + |
| | | A526S/Q527A/G528A/P559R/R604H/L660V/ | |
| | | H687A/A745T/F760W | |
| 1107/1108 | R233K | R233K/F291L/P395H/G402R/M478L/G515T/ | + |
| | | A526S/Q527A/G528A/P559R/R604H/L660V/ | |
| | | H687A/A745T/F760W | |
| 1033/1034 | A257V/L474A/ | A257V/F291L/P395H/G402R/L474A/M478L/ | + |
| | A529S/A536V/ | G515T/A526S/Q527A/G528A/A529S/A536V/ | |
| | P662S | P559R/R604H/L660V/P662S/H687A/A745T/ | |
| | | F760W | |
| 871/872 | V731I | F291L/P395H/G402R/M478L/G515T/A526S/ | + |
| | | Q527A/G528A/P559R/R604H/L660V/H687A/ | |
| | | V731I/A745T/F760W | |
| 791/792 | Q427D | F291L/P395H/G402R/Q427D/M478L/G515T/ | + |
| | | A526S/Q527A/G528A/P559R/R604H/L660V/ | |
| | | H687A/A745T/F760W | |
| 827/828 | K79R/A536V | K79R/F291L/P395H/G402R/M478L/G515T/ | + |
| | | A526S/Q527A/G528A/A536V/P559R/R604H/ | |
| | | L660V/H687A/A745T/F760W | |
| 931/932 | Y697I | F291L/P395H/G402R/M478L/G515T/A526S/ | + |
| | | Q527A/G528A/P559R/R604H/L660V/H687A/ | |
| | | Y697I/A745T/F760W | |
| 1117/1118 | K79R/A257V/ | K79R/A257V/F291L/E316G/P395H/G402R/ | + |
| | E316G/L792F | M478L/G515T/A526S/Q527A/G528A/P559R/ | |
| | | R604H/L660V/H687A/A745T/F760W/L792F | |
| 1183/1184 | L420V | F291L/P395H/G402R/L420V/M478L/G515T/ | + |
| | | A526S/Q527A/G528A/P559R/R604H/L660V/ | |
| | | H687A/A745T/F760W | |
| 847/848 | K79R/A536V/ | K79R/F291L/P395H/G402R/M478L/G515T/ | + |
| | R562K/E699V | A526S/Q527A/G528A/A536V/P559R/R562K/ | |
| | | R604H/L660V/H687A/E699V/A745T/F760W | |
| 855/856 | P21A/K79A/ | P21A/K79A/F291L/P395H/G402R/Q442G/ | + |
| | Q442G/E699V | M478L/G515T/A526S/Q527A/G528A/P559R/ | |
| | | R604H/L660V/H687A/E699V/A745T/F760W | |
| 1185/1186 | E699V | F291L/P395H/G402R/M478L/G515T/A526S/ | + |
| | | Q527A/G528A/P559R/R604H/L660V/H687A/ | |
| | | E699V/A745T/F760W | |
| 817/818 | A370S | F291L/A370S/P395H/G402R/M478L/G515T/ | + |
| | | A526S/Q527A/G528A/P559R/R604H/L660V/ | |
| | | H687A/A745T/F760W | |
| 929/930 | K79R/L474A/ | K79R/F291L/P395H/G402R/L474A/M478L/ | + |
| | A536V/P662S/ | G515T/A526S/Q527A/G528A/A536V/P559R/ | |
| | E699V | R604H/L660V/P662S/H687A/E699V/A745T/ | |
| | | F760W | |
| 811/812 | V378L | F291L/V378L/P395H/G402R/M478L/G515T/ | + |
| | | A526S/Q527A/G528A/P559R/R604H/L660V/ | |
| | | H687A/A745T/F760W | |
| 799/800 | A536V/R562K | F291L/P395H/G402R/M478L/G515T/A526S/ | + |
| | | Q527A/G528A/A536V/P559R/R562K/R604H/ | |
| | | L660V/H687A/A745T/F760W | |
| 767/768 | Y697L | F291L/P395H/G402R/M478L/G515T/A526S/ | + |
| | | Q527A/G528A/P559R/R604H/L660V/H687A/ | |
| | | Y697L/A745T/F760W | |
| 845/846 | I704V | F291L/P395H/G402R/M478L/G515T/A526S/ | + |
| | | Q527A/G528A/P559R/R604H/L660V/H687A/ | |
| | | I704V/A745T/F760W | |
| 1187/1188 | Q427I | F291L/P395H/G402R/Q427I/M478L/G515T/ | + |
| | | A526S/Q527A/G528A/P559R/R604H/L660V/ | |
| | | H687A/A745T/F760W | |
| 1189/1190 | E724L | F291L/P395H/G402R/M478L/G515T/A526S/ | + |
| | | Q527A/G528A/P559R/R604H/L660V/H687A/ | |
| | | E724L/A745T/F760W | |
| 999/1000 | Q427L | F291L/P395H/G402R/Q427L/M478L/G515T/ | + |
| | | A526S/Q527A/G528A/P559R/R604H/L660V/ | |
| | | H687A/A745T/F760W | |

Levels of increased activity were determined relative to the reference polypeptide of SEQ ID NO: 546 and defined as follows: “+” 1.00 to 1.18, “++” >1.18, “+++” >1.38.

### Example 10

### Improvements Over SEQ ID NO: 710 in Enzyme Activity and Inhibitor Tolerance

[0344] SEQ ID NO: 710 was selected as the parent enzyme for this round of directed evolution. Libraries of engineered genes were produced using established techniques (e.g., saturation mutagenesis, recombination of previously identified beneficial mutations). The polypeptides encoded by each gene were produced in HTP as described in Example 2, and the soluble lysate was generated as described in Example 3. Each variant was screened in three different qPCR reactions. A 15 μL reaction that comprised of 50 copies of SARS-CoV2 DNA fragment (IDT Catalog #>CAT_10006625_2019-nCoV_N_Positive Control), containing the nucleocapsid gene, 500 nM N1 primers, 125 nM probe (CDC EUA assay, Catalog #2019-nCoVEUA-01), 0.2 mM dNTPs, RT buffer (10 mM Tris-HCl, 50 mM KCl, 1.5 mM MgCl₂), 0.5 vol 0% HTP lysate. qPCR cycling (95° C. 2 min, 95° C. 3 sec, 55° C. 30 sec for 45 cycles) in a CFX384 Touch Deep Well Real-Time PCR detection System (BioRad).

### HIV Assay Parameters

[0345] A 15 μL reaction that comprised of 50 copies of non-infections HIV RNA as well as Alinity™ Reagents Polymerase Master Mix (primers, probes, dNTPs; Abbott, USA), Polymerase Activator solution, internal control and 1 vol 00 HTP lysate with and without (25 mM GITC, 200 ETOH, 20 ng gDNA) PCR inhibitors. qPCR cycling (52° C. 10 min, 95° C. 3 min, 92° C. 40 sec, 50° C. 1 min, 92° C. 30 sec, 60° C. 30 sec, 92° C. 30 sec, 55° C. 20 sec, 34° C. 40 sec for 46 cycles) in a CFX384 Touch Deep Well Real-Time PCR detection System (BioRad).

[0346] Polymerase stability and activity relative to SEQ ID NO: 710 (F(OP FAM END RFU) was calculated as the improved FAM END RFU value formed by the variant compared to END RFU value of SEQ ID NO: 710 and shown in Table 10.1.

TABLE 10.1
Pos Control FIOP FAM END RFU Relative to SEQ ID NO: 710

| | Amino Acid | | |
|---|---|---|---|
| | Differences | | Fold Improvement |
| SEQ ID NO: | (Relative to | Amino Acid Differences | (HIV) Relative to |
| (nt/aa) | SEQ ID NO: 710) | (Relative to SEQ ID NO: 2) | SEQ ID NO: 710 |
| 1193/1194 | A78S | A78S/A257V/F291L/P395S/G402R/L474A/ | +++ |
| | | E475A/M478L/G515T/A526S/Q527A/G528A/ | |
| | | A536V/P559R/R604H/L660V/P662S/H687A/ | |
| | | A745T/F760W | |
| 1273/1274 | T745S | A257V/F291L/P395S/G402R/L474A/E475A/ | +++ |
| | | M478L/G515T/A526S/Q527A/G528A/A536V/ | |
| | | P559R/R604H/L660V/P662S/H687A/A745S/ | |
| | | F760W | |
| 1275/1276 | P465Y | A257V/F291L/P395S/G402R/P465Y/L474A/ | +++ |
| | | E475A/M478L/G515T/A526S/Q527A/G528A/ | |
| | | A536V/P559R/R604H/L660V/P662S/H687A/ | |
| | | A745T/F760W | |
| 1277/1278 | Q603M | A257V/F291L/P395S/G402R/L474A/E475A/ | +++ |
| | | M478L/G515T/A526S/Q527A/G528A/A536V/ | |
| | | P559R/Q603M/R604H/L660V/P662S/H687A/ | |
| | | A745T/F760W | |
| 1279/1280 | A78N | A78N/A257V/F291L/P395S/G402R/L474A/ | +++ |
| | | E475A/M478L/G515T/A526S/Q527A/G528A/ | |
| | | A536V/P559R/R604H/L660V/P662S/H687A/ | |
| | | A745T/F760W | |
| 1265/1266 | G787M | A257V/F291L/P395S/G402R/L474A/E475A/ | +++ |
| | | M478L/G515T/A526S/Q527A/G528A/A536V/ | |
| | | P559R/R604H/L660V/P662S/H687A/A745T/ | |
| | | F760W/G787M | |
| 1281/1282 | G317R | A257V/F291L/G317R/P395S/G402R/L474A/ | +++ |
| | | E475A/M478L/G515T/A526S/Q527A/G528A/ | |
| | | A536V/P559R/R604H/L660V/P662S/H687A/ | |
| | | A745T/F760W | |
| 1231/1232 | R251I | R251I/A257V/F291L/P395S/G402R/L474A/ | +++ |
| | | E475A/M478L/G515T/A526S/Q527A/G528A/ | |
| | | A536V/P559R/R604H/L660V/P662S/H687A/ | |
| | | A745T/F760W | |
| 1213/1214 | Q603R | A257V/F291L/P395S/G402R/L474A/E475A/ | +++ |
| | | M478L/G515T/A526S/Q527A/G528A/A536V/ | |
| | | P559R/Q603R/R604H/L660V/P662S/H687A/ | |
| | | A745T/F760W | |
| 1283/1284 | R251A | R251A/A257V/F291L/P395S/G402R/L474A/ | +++ |
| | | E475A/M478L/G515T/A526S/Q527A/G528A/ | |
| | | A536V/P559R/R604H/L660V/P662S/H687A/ | |
| | | A745T/F760W | |
| 1263/1264 | V51T | V51T/A257V/F291L/P395S/G402R/L474A/ | ++ |
| | | E475A/M478L/G515T/A526S/Q527A/G528A/ | |
| | | A536V/P559R/R604H/L660V/P662S/H687A/ | |
| | | A745T/F760W | |
| 1285/1286 | K815R | A257V/F291L/P395S/G402R/L474A/E475A/ | ++ |
| | | M478L/G515T/A526S/Q527A/G528A/A536V/ | |
| | | P559R/R604H/L660V/P662S/H687A/A745T/ | |
| | | F760W/K815R | |
| 1241/1242 | N820T | A257V/F291L/P395S/G402R/L474A/E475A/ | ++ |
| | | M478L/G515T/A526S/Q527A/G528A/A536V/ | |
| | | P559R/R604H/L660V/P662S/H687A/A745T/ | |
| | | F760W/N820T | |
| 1287/1288 | D68T | D68T/A257V/F291L/P395S/G402R/L474A/ | ++ |
| | | E475A/M478L/G515T/A526S/Q527A/G528A/ | |
| | | A536V/P559R/R604H/L660V/P662S/H687A/ | |
| | | A745T/F760W | |
| 1289/1290 | G569Q | A257V/F291L/P395S/G402R/L474A/E475A/ | ++ |
| | | M478L/G515T/A526S/Q527A/G528A/A536V/ | |
| | | P559R/G569Q/R604H/L660V/P662S/H687A/ | |
| | | A745T/F760W | |
| 1207/1208 | C147H | C147H/A257V/F291L/P395S/G402R/L474A/ | ++ |
| | | E475A/M478L/G515T/A526S/Q527A/G528A/ | |
| | | A536V/P559R/R604H/L660V/P662S/H687A/ | |
| | | A745T/F760W | |
| 1291/1292 | C147A | C147A/A257V/F291L/P395S/G402R/L474A/ | ++ |
| | | E475A/M478L/G515T/A526S/Q527A/G528A/ | |
| | | A536V/P559R/R604H/L660V/P662S/H687A/ | |
| | | A745T/F760W | |
| 1293/1294 | A341T | A257V/F291L/A341T/P395S/G402R/L474A/ | ++ |
| | | E475A/M478L/G515T/A526S/Q527A/G528A/ | |
| | | A536V/P559R/R604H/L660V/P662S/H687A/ | |
| | | A745T/F760W | |
| 1295/1296 | L824M | A257V/F291L/P395S/G402R/L474A/E475A/ | ++ |
| | | M478L/G515T/A526S/Q527A/G528A/A536V/ | |
| | | P559R/R604H/L660V/P662S/H687A/A745T/ | |
| | | F760W/L824M | |
| 1223/1224 | G787N | A257V/F291L/P395S/G402R/L474A/E475A/ | ++ |
| | | M478L/G515T/A526S/Q527A/G528A/A536V/ | |
| | | P559R/R604H/L660V/P662S/H687A/A745T/ | |
| | | F760W/G787N | |
| 1195/1196 | D68K | D68K/A257V/F291L/P395S/G402R/L474A/ | ++ |
| | | E475A/M478L/G515T/A526S/Q527A/G528A/ | |
| | | A536V/P559R/R604H/L660V/P662S/H687A/ | |
| | | A745T/F760W | |
| 1297/1298 | A78V | A78V/A257V/F291L/P395S/G402R/L474A/ | ++ |
| | | E475A/M478L/G515T/A526S/Q527A/G528A/ | |
| | | A536V/P559R/R604H/L660V/P662S/H687A/ | |
| | | A745T/F760W | |
| 1203/1204 | D68E | D68E/A257V/F291L/P395S/G402R/L474A/ | ++ |
| | | E475A/M478L/G515T/A526S/Q527A/G528A/ | |
| | | A536V/P559R/R604H/L660V/P662S/H687A/ | |
| | | A745T/F760W | |
| 1299/1300 | D68Q | D68Q/A257V/F291L/P395S/G402R/L474A/ | ++ |
| | | E475A/M478L/G515T/A526S/Q527A/G528A/ | |
| | | A536V/P559R/R604H/L660V/P662S/H687A/ | |
| | | A745T/F760W | |
| 1261/1262 | D825E | A257V/F291L/P395S/G402R/L474A/E475A/ | ++ |
| | | M478L/G515T/A526S/Q527A/G528A/A536V/ | |
| | | P559R/R604H/L660V/P662S/H687A/A745T/ | |
| | | F760W/D825E | |
| 1301/1302 | R251L | R251L/A257V/F291L/P395S/G402R/L474A/ | + |
| | | E475A/M478L/G515T/A526S/Q527A/G528A/ | |
| | | A536V/P559R/R604H/L660V/P662S/H687A/ | |
| | | A745T/F760W | |
| 1303/1304 | K181R | K181R/A257V/F291L/P395S/G402R/L474A/ | + |
| | | E475A/M478L/G515T/A526S/Q527A/G528A/ | |
| | | A536V/P559R/R604H/L660V/P662S/H687A/ | |
| | | A745T/F760W | |
| 1215/1216 | D68I | D68I/A257V/F291L/P395S/G402R/L474A/ | + |
| | | E475A/M478L/G515T/A526S/Q527A/G528A/ | |
| | | A536V/P559R/R604H/L660V/P662S/H687A/ | |
| | | A745T/F760W | |
| 1305/1306 | N820E | A257V/F291L/P395S/G402R/L474A/E475A/ | + |
| | | M478L/G515T/A526S/Q527A/G528A/A536V/ | |
| | | P559R/R604H/L660V/P662S/H687A/A745T/ | |
| | | F760W/N820E | |
| 1307/1308 | K181Q | K181Q/A257V/F291L/P395S/G402R/L474A/ | + |
| | | E475A/M478L/G515T/A526S/Q527A/G528A/ | |
| | | A536V/P559R/R604H/L660V/P662S/H687A/ | |
| | | A745T/F760W | |
| 1243/1244 | R275T | A257V/R275T/F291L/P395S/G402R/L474A/ | + |
| | | E475A/M478L/G515T/A526S/Q527A/G528A/ | |
| | | A536V/P559R/R604H/L660V/P662S/H687A/ | |
| | | A745T/F760W | |
| 1309/1310 | C147M | C147M/A257V/F291L/P395S/G402R/L474A/ | + |
| | | E475A/M478L/G515T/A526S/Q527A/G528A/ | |
| | | A536V/P559R/R604H/L660V/P662S/H687A/ | |
| | | A745T/F760W | |
| 1271/1272 | K815T | A257V/F291L/P395S/G402R/L474A/E475A/ | + |
| | | M478L/G515T/A526S/Q527A/G528A/A536V/ | |
| | | P559R/R604H/L660V/P662S/H687A/A745T/ | |
| | | F760W/K815T | |
| 1311/1312 | R275A | A257V/R275A/F291L/P395S/G402R/L474A/ | + |
| | | E475A/M478L/G515T/A526S/Q527A/G528A/ | |
| | | A536V/P559R/R604H/L660V/P662S/H687A/ | |
| | | A745T/F760W | |
| 1313/1314 | G569M | A257V/F291L/P395S/G402R/L474A/E475A/ | + |
| | | M478L/G515T/A526S/Q527A/G528A/A536V/ | |
| | | P559R/G569M/R604H/L660V/P662S/H687A/ | |
| | | A745T/F760W | |
| 1191/1192 | D68R | D68R/A257V/F291L/P395S/G402R/L474A/ | + |
| | | E475A/M478L/G515T/A526S/Q527A/G528A/ | |
| | | A536V/P559R/R604H/L660V/P662S/H687A/ | |
| | | A745T/F760W | |
| 1201/1202 | E612D | A257V/F291L/P395S/G402R/L474A/E475A/ | + |
| | | M478L/G515T/A526S/Q527A/G528A/A536V/ | |
| | | P559R/R604H/E612D/L660V/P662S/H687A/ | |
| | | A745T/F760W | |
| 1209/1210 | A356S | A257V/F291L/A356S/P395S/G402R/L474A/ | + |
| | | E475A/M478L/G515T/A526S/Q527A/G528A/ | |
| | | A536V/P559R/R604H/L660V/P662S/H687A/ | |
| | | A745T/F760W | |
| 1315/1316 | F735L | A257V/F291L/P395S/G402R/L474A/E475A/ | + |
| | | M478L/G515T/A526S/Q527A/G528A/A536V/ | |
| | | P559R/R604H/L660V/P662S/H687A/F735L/ | |
| | | A745T/F760W | |
| 1317/1318 | A341Y | A257V/F291L/A341Y/P395S/G402R/L474A/ | + |
| | | E475A/M478L/G515T/A526S/Q527A/G528A/ | |
| | | A536V/P559R/R604H/L660V/P662S/H687A/ | |
| | | A745T/F760W | |
| 1319/1320 | A336E | A257V/F291L/A336E/P395S/G402R/L474A/ | + |
| | | E475A/M478L/G515T/A526S/Q527A/G528A/ | |
| | | A536V/P559R/R604H/L660V/P662S/H687A/ | |
| | | A745T/F760W | |
| 1247/1248 | A469V | A257V/F291L/P395S/G402R/A469V/L474A/ | + |
| | | E475A/M478L/G515T/A526S/Q527A/G528A/ | |
| | | A536V/P559R/R604H/L660V/P662S/H687A/ | |
| | | A745T/F760W | |
| 1321/1322 | A341H | A257V/F291L/A341H/P395S/G402R/L474A/ | + |
| | | E475A/M478L/G515T/A526S/Q527A/G528A/ | |
| | | A536V/P559R/R604H/L660V/P662S/H687A/ | |
| | | A745T/F760W | |
| 1323/1324 | K815L | A257V/F291L/P395S/G402R/L474A/E475A/ | + |
| | | M478L/G515T/A526S/Q527A/G528A/A536V/ | |
| | | P559R/R604H/L660V/P662S/H687A/A745T/ | |
| | | F760W/K815L | |
| 1325/1326 | K815S | A257V/F291L/P395S/G402R/L474A/E475A/ | + |
| | | M478L/G515T/A526S/Q527A/G528A/A536V/ | |
| | | P559R/R604H/L660V/P662S/H687A/A745T/ | |
| | | F760W/K815S | |
| 1197/1198 | L466Y | A257V/F291L/P395S/G402R/L466Y/L474A/ | + |
| | | E475A/M478L/G515T/A526S/Q527A/G528A/ | |
| | | A536V/P559R/R604H/L660V/P662S/H687A/ | |
| | | A745T/F760W | |
| 1217/1218 | C147Q | C147Q/A257V/F291L/P395S/G402R/L474A/ | + |
| | | E475A/M478L/G515T/A526S/Q527A/G528A/ | |
| | | A536V/P559R/R604H/L660V/P662S/H687A/ | |
| | | A745T/F760W | |
| 1221/1222 | E508K | A257V/F291L/P395S/G402R/L474A/E475A/ | + |
| | | M478L/E508K/G515T/A526S/Q527A/G528A/ | |
| | | A536V/P559R/R604H/L660V/P662S/H687A/ | |
| | | A745T/F760W | |
| 1253/1254 | L798I | A257V/F291L/P395S/G402R/L474A/E475A/ | + |
| | | M478L/G515T/A526S/Q527A/G528A/A536V/ | |
| | | P559R/R604H/L660V/P662S/H687A/A745T/ | |
| | | F760W/L798I | |
| 1237/1238 | R562K | A257V/F291L/P395S/G402R/L474A/E475A/ | + |
| | | M478L/G515T/A526S/Q527A/G528A/A536V/ | |
| | | P559R/R562K/R604H/L660V/P662S/H687A/ | |
| | | A745T/F760W | |

Levels of increased activity were determined relative to the reference polypeptide of SEQ ID NO: 710 and defined as follows: “+” 1.05 to 1.40, “++” >1.40, “+++” >1.79.

### HPV Assay Parameters

[0347] A 15 μL reaction that comprised of 2×PC (Low Pool Concentration) non-infections HPV RNA, Alinity™ Reagents Polymerase Master Mix (primers, probes, dNTPs; Abbott, USA), Polymerase Activator solution and 1 vol 0% HTP lysate with and without (250 ng gDNA) PCR inhibitors. qPCR cycling (46° C. 6 min, 97° C. 3.3 min, 97° C. 3 sec, 51.6° C. 20 sec, 92° C. 3 sec, 51.6° C. 20 sec, 54.7° C. 16 sec for 42 cycles) in a CFX384 Touch Deep Well Real-Time PCR detection System (BioRad).

[0348] Polymerase stability and activity relative to SEQ ID NO: 710 (FROP FAM END RFU) was calculated as the improved FAM END RFU value formed by the variant compared to END RFU value of SEQ ID NO: 710 and shown in Table 10.2.

TABLE 10.2
Pos Control FIOP FAM END RFU Relative to SEQ ID NO: 710

| | Amino Acid | | |
|---|---|---|---|
| | Differences | | Fold Improvement |
| SEQ ID NO: | (Relative to | Amino Acid Differences | (HPV) Relative to |
| (nt/aa) | SEQ ID NO: 710) | (Relative to SEQ ID NO: 2) | SEQ ID NO: 710 |
| 1191/1192 | D68R | D68R/A257V/F291L/P395S/G402R/L474A/ | +++ |
| | | E475A/M478L/G515T/A526S/Q527A/G528A/ | |
| | | A536V/P559R/R604H/L660V/P662S/H687A/ | |
| | | A745T/F760W | |
| 1193/1194 | A78S | A78S/A257V/F291L/P395S/G402R/L474A/ | +++ |
| | | E475A/M478L/G515T/A526S/Q527A/G528A/ | |
| | | A536V/P559R/R604H/L660V/P662S/H687A/ | |
| | | A745T/F760W | |
| 1195/1196 | D68K | D68K/A257V/F291L/P395S/G402R/L474A/ | +++ |
| | | E475A/M478L/G515T/A526S/Q527A/G528A/ | |
| | | PA536V/559R/R604H/L660V/P662S/H687A/ | |
| | | A745T/F760W | |
| 1197/1198 | L466Y | A257V/F291L/P395S/G402R/L466Y/L474A/ | +++ |
| | | E475A/M478L/G515T/A526S/Q527A/G528A/ | |
| | | A536V/P559R/R604H/L660V/P662S/H687A/ | |
| | | A745T/F760W | |
| 1199/1200 | A807M | A257V/F291L/P395S/G402R/L474A/E475A/ | +++ |
| | | M478L/G515T/A526S/Q527A/G528A/A536V/ | |
| | | P559R/R604H/L660V/P662S/H687A/A745T/ | |
| | | F760W/A807M | |
| 1201/1202 | E612D | A257V/F291L/P395S/G402R/L474A/E475A/ | +++ |
| | | M478L/G515T/A526S/Q527A/G528A/A536V/ | |
| | | P559R/R604H/E612D/L660V/P662S/H687A/ | |
| | | A745T/F760W | |
| 1203/1204 | D68E | D68E/A257V/F291L/P395S/G402R/L474A/ | +++ |
| | | E475A/M478L/G515T/A526S/Q527A/G528A/ | |
| | | A536V/P559R/R604H/L660V/P662S/H687A/ | |
| | | A745T/F760W | |
| 1205/1206 | D68T | D68T/A257V/F291L/P395S/G402R/L474A/ | +++ |
| | | E475A/M478L/G515T/A526S/Q527A/G528A/ | |
| | | A536V/P559R/R604H/L660V/P662S/H687A/ | |
| | | A745T/F760W | |
| 1207/1208 | C147H | C147H/A257V/F291L/P395S/G402R/L474A/ | ++ |
| | | E475A/M478L/G515T/A526S/Q527A/G528A/ | |
| | | A536V/P559R/R604H/L660V/P662S/H687A/ | |
| | | A745T/F760W | |
| 1209/1210 | A356S | A257V/F291L/A356S/P395S/G402R/L474A/ | ++ |
| | | E475A/M478L/G515T/A526S/Q527A/G528A/ | |
| | | A536V/P559R/R604H/L660V/P662S/H687A/ | |
| | | A745T/F760W | |
| 1211/1212 | L488W | A257V/F291L/P395S/G402R/L474A/E475A/ | ++ |
| | | M478L/L488W/G515T/A526S/Q527A/G528A/ | |
| | | A536V/P559R/R604H/L660V/P662S/H687A/ | |
| | | A745T/F760W | |
| 1213/1214 | Q603R | A257V/F291L/P395S/G402R/L474A/E475A/ | ++ |
| | | M478L/G515T/A526S/Q527A/G528A/A536V/ | |
| | | P559R/Q603R/R604H/L660V/P662S/H687A/ | |
| | | A745T/F760W | |
| 1215/1216 | D68I | D68I/A257V/F291L/P395S/G402R/L474A/ | ++ |
| | | E475A/M478L/G515T/A526S/Q527A/G528A/ | |
| | | A536V/P559R/R604H/L660V/P662S/H687A/ | |
| | | A745T/F760W | |
| 1217/1218 | C147Q | C147Q/A257V/F291L/P395S/G402R/L474A/ | ++ |
| | | E475A/M478L/G515T/A526S/Q527A/G528A/ | |
| | | A536V/P559R/R604H/L660V/P662S/H687A/ | |
| | | A745T/F760W | |
| 1219/1220 | A271G | A257V/A271G/F291L/P395S/G402R/L474A/ | ++ |
| | | E475A/M478L/G515T/A526S/Q527A/G528A/ | |
| | | A536V/P559R/R604H/L660V/P662S/H687A/ | |
| | | A745T/F760W | |
| 1221/1222 | E508K | A257V/F291L/P395S/G402R/L474A/E475A/ | ++ |
| | | M478L/E508K/G515T/A526S/Q527A/G528A/ | |
| | | A536V/P559R/R604H/L660V/P662S/H687A/ | |
| | | A745T/F760W | |
| 1223/1224 | G787N | A257V/F291L/P395S/G402R/L474A/E475A/ | ++ |
| | | M478L/G515T/A526S/Q527A/G528A/A536V/ | |
| | | P559R/R604H/L660V/P662S/H687A/A745T/ | |
| | | F760W/G787N | |
| 1225/1226 | T412R/E417W/ | A257V/F291L/P395S/G402R/T412R/E417W/ | ++ |
| | Q427H | Q427H/L474A/E475A/M478L/G515T/A526S/ | |
| | | Q527A/G528A/A536V/P559R/R604H/L660V/ | |
| | | P662S/H687A/A745T/F760W | |
| 1227/1228 | A356I | A257V/F291L/A356I/P395S/G402R/L474A/ | ++ |
| | | E475A/M478L/G515T/A526S/Q527A/G528A/ | |
| | | A536V/P559R/R604H/L660V/P662S/H687A/ | |
| | | A745T/F760W | |
| 1229/1230 | A78T | A78T/A257V/F291L/P395S/G402R/L474A/ | ++ |
| | | E475A/M478L/G515T/A526S/Q527A/G528A/ | |
| | | A536V/P559R/R604H/L660V/P662S/H687A/ | |
| | | A745T/F760W | |
| 1231/1232 | R251I | R251I/A257V/F291L/P395S/G402R/L474A/ | + |
| | | E475A/M478L/G515T/A526S/Q527A/G528A/ | |
| | | A536V/P559R/R604H/L660V/P662S/H687A/ | |
| | | A745T/F760W | |
| 1233/1234 | Y697I | A257V/F291L/P395S/G402R/L474A/E475A/ | + |
| | | M478L/G515T/A526S/Q527A/G528A/A536V/ | |
| | | P559R/R604H/L660V/P662S/H687A/Y697I/ | |
| | | A745T/F760W | |
| 1235/1236 | D68G | D68G/A257V/F291L/P395S/G402R/L474A/ | + |
| | | E475A/M478L/G515T/A526S/Q527A/G528A/ | |
| | | A536V/P559R/R604H/L660V/P662S/H687A/ | |
| | | A745T/F760W | |
| 1237/1238 | R562K | A257V/F291L/P395S/G402R/L474A/E475A/ | + |
| | | M478L/G515T/A526S/Q527A/G528A/A536V/ | |
| | | P559R/R562K/R604H/L660V/P662S/H687A/ | |
| | | A745T/F760W | |
| 1239/1240 | K79R/S434N/ | K79R/A257V/F291L/P395S/G402R/S434N/ | + |
| | R562K | L474A/E475A/M478L/G515T/A526S/Q527A/ | |
| | | G528A/A536V/P559R/R562K/R604H/L660V/ | |
| | | P662S/H687A/A745T/F760W | |
| 1241/1242 | N820T | A257V/F291L/P395S/G402R/L474A/E475A/ | + |
| | | M478L/G515T/A526S/Q527A/G528A/A536V/ | |
| | | P559R/R604H/L660V/P662S/H687A/A745T/ | |
| | | F760W/N820T | |
| 1243/1244 | R275T | A257V/R275T/F291L/P395S/G402R/L474A/ | + |
| | | E475A/M478L/G515T/A526S/Q527A/G528A/ | |
| | | A536V/P559R/R604H/L660V/P662S/H687A/ | |
| | | A745T/F760W | |
| 1245/1246 | V378F/D381E/ | A257V/F291L/V378F/D381E/P395S/G402R/ | + |
| | Y697L | L447A/E475A/M478L/G515T/A526S/Q527A/ | |
| | | G528A/A536V/P559R/R604H/L660V/P662S/ | |
| | | H687A/Y697L/A745T/F760W | |
| 1247/1248 | A469V | A257V/F291L/P395S/G402R/A469V/L474A/ | + |
| | | E475A/M478L/G515T/A526S/Q527A/G528A/ | |
| | | A536V/P559R/R604H/L660V/P662S/H687A/ | |
| | | A745T/F760W | |
| 1249/1250 | N820S | A257V/F291L/P395S/G402R/L474A/E475A/ | + |
| | | M478L/G515T/A526S/Q527A/G528A/A536V/ | |
| | | P559R/R604H/L660V/P662S/H687A/A745T/ | |
| | | F760W/N820S | |
| 1251/1252 | T412R/E417W/ | A257V/F291L/P395S/G402R/T412R/E417W/ | + |
| | Y697L | L474A/E475A/M478L/G515T/A526S/Q527A/ | |
| | | G528A/A536V/P559R/R604H/L660V/P662S/ | |
| | | H687A/Y697L/A745T/F760W | |
| 1253/1254 | L798I | A257V/F291L/P395S/G402R/L474A/E475A/ | + |
| | | M478L/G515T/A526S/Q527A/G528A/A536V/ | |
| | | P559R/R604H/L660V/P662S/H687A/A745T/ | |
| | | F760W/L798I | |
| 1255/1256 | K79R/ | K79R/A257V/F291L/L388V/P395S/G402R/ | + |
| | L388V | L474A/E475A/M478L/G515T/A526S/Q527A/ | |
| | | G528A/A536V/P559R/R604H/L660V/P662S/ | |
| | | H687A/A745T/F760W | |
| 1257/1258 | A469T | A257V/F291L/P395S/G402R/A469T/L474A/ | + |
| | | E475A/M478L/G515T/A526S/Q527A/G528A/ | |
| | | A536V/P559R/R604H/L660V/P662S/H687A/ | |
| | | A745T/F760W | |
| 1259/1260 | T651Q | A257V/F291L/P395S/G402R/L474A/E475A/ | + |
| | | M478L/G515T/A526S/Q527A/G528A/A536V/ | |
| | | RP559/R604H/T651Q/L660V/P662S/H687A/ | |
| | | A745T/F760W | |
| 1261/1262 | D825E | A257V/F291L/P395S/G402R/L474A/E475A/ | + |
| | | M478L/G515T/A526S/Q527A/G528A/A536V/ | |
| | | P559R/R604H/L660V/P662S/H687A/A745T/ | |
| | | F760W/D825E | |
| 1263/1264 | V51T | V51T/A257V/F291L/P395S/G402R/L474A/ | + |
| | | E475A/M478L/G515T/A526S/Q527A/G528A/ | |
| | | A536V/P559R/R604H/L660V/P662S/H687A/ | |
| | | A745T/F760W | |
| 1265/1266 | G787M | A257V/F291L/P395S/G402R/L474A/E475A/ | + |
| | | M478L/G515T/A526S/Q527A/G528A/A536V/ | |
| | | P559R/R604H/L660V/P662S/H687A/A745T/ | |
| | | F760W/G787M | |
| 1267/1268 | A370V | A257V/F291L/A370V/P395S/G402R/L474A/ | + |
| | | E475A/M478L/G515T/A526S/Q527A/G528A/ | |
| | | A536V/P559R/R604H/L660V/P662S/H687A/ | |
| | | A745T/F760W | |
| 1269/1270 | T745V | A257V/F291L/P395S/G402R/L474A/E475A/ | + |
| | | M478L/G515T/A526S/Q527A/G528A/A536V/ | |
| | | P559R/R604H/L660V/P662S/H687A/A745V/ | |
| | | F760W | |
| 1271/1272 | K815T | A257V/F291L/P395S/G402R/L474A/E475A/ | + |
| | | M478L/G515T/A526S/Q527A/G528A/A536V/ | |
| | | P559R/R604H/L660V/P662S/H687A/A745T/ | |
| | | F760W/K815T | |

Levels of increased activity were determined relative to the reference polypeptide of SEQ ID NO: 710 and defined as follows: “+” 1.05 to 1.35, “++” >1.35, “+++” >1.70.

### Example 11

### Improvements Over SEQ ID NO: 1208 in Enzyme Activity and Inhibitor Tolerance

[0349] SEQ ID NO: 1208 was selected as the parent enzyme for this round of directed evolution. Libraries of engineered genes were produced using established techniques (e.g., saturation mutagenesis, recombination of previously identified beneficial mutations). The polypeptides encoded by each gene were produced in HTP as described in Example 2, and the soluble lysate was generated as described in Example 3. Each variant was screened in three different qPCR reactions. A 15 μL reaction that comprised of 50 copies of SARS-CoV2 DNA fragment (IDT Catalog #>CAT_10006625_2019-nCoV_N_Positive Control), containing the nucleocapsid gene, 500 nM N1 primers, 125 nM probe (CDC EUA assay, Catalog #2019-nCoVEUA-01), 0.2 mM dNTPs, RT buffer (10 mM Tris-HCl, 50 mM KCl, 1.5 mM MgCl₂), 1 vol % HTP lysate. qPCR cycling (95° C. 2 min, 95° C. 3 sec, 55° C. 30 sec for 45 cycles) in a CFX384 Touch Deep Well Real-Time PCR detection System (BioRad).

### HIV Assay Parameters

[0350] A 15 μL reaction that comprised of 50 copies of non-infections HIV RNA as well as Alinity™ Reagents Polymerase Master Mix (primers, probes, dNTPs; Abbott, USA), Polymerase Activator solution, internal control and 1 vol % HTP lysate with and without (25 mM GITC, 2% ETOH, 20 ng gDNA) PCR inhibitors. qPCR cycling (52° C. 10 min, 95° C. 3 min, 92° C. 40 sec, 50° C. 1 min, 92° C. 30 sec, 60° C. 30 sec, 92° C. 30 sec, 55° C. 20 sec, 34° C. 40 sec for 46 cycles) in a CFX384 Touch Deep Well Real-Time PCR detection System (BioRad).

[0351] Polymerase stability and activity relative to SEQ ID NO: 1208 (FIOP FAM END RFU) was calculated as the improved FAM END RFU value formed by the variant compared to END RFU value of SEQ ID NO: 1208 and shown in Table 11.1.

TABLE 11.1
Pos Control FIOP FAM END RFU Relative to SEQ ID NO: 1208

| | Amino Acid | | |
|---|---|---|---|
| | Differences | | Fold Improvement |
| SEQ ID NO: | (Relative to | Amino Acid Differences | (HIV) Relative to |
| (nt/aa) | SEQ ID NO: 1208) | (Relative to SEQ ID NO: 2) | SEQ ID NO: 1208 |
| 1333/1334 | A370V | C147H/A257V/F291L/A370V/P395S/G402R/ | +++ |
| | | L474A/E475A/M478L/G515T/A526S/Q527A/ | |
| | | G528A/A536V/P559R/R604H/L660V/P662S/ | |
| | | H687A/A745T/F760W | |
| 1369/1370 | V72A/E508K/L798I | V72A/C147H/A257V/F291L/P395S/G402R/ | +++ |
| | | L474A/E475A/M478L/E508K/G515T/A526S/ | |
| | | Q527A/G528A/A536V/P559R/R604H/L660V/ | |
| | | P662S/H687A/A745T/F760W/L798I | |
| 1361/1362 | D68G/A370V/E508K/ | D68G/C147H/A257V/F291L/A370V/P395S/ | +++ |
| | Q603M/Y697L | G402R/L474A/E475A/M478L/E508K/G515T/ | |
| | | A526S/Q527A/G528A/A536V/P559R/Q603M/ | |
| | | R604H/L660V/P662S/H687A/Y697L/A745T/ | |
| | | F760W | |
| 1339/1340 | V51T/A370V/T412R/ | V51T/C147H/A257V/F291L/A370V/P395S/ | +++ |
| | Q603M/E612D | G402R/T412R/L474A/E475A/M478L/G515T/ | |
| | | A526S/Q527A/G528A/A536V/P559R/Q603M/ | |
| | | R604H/E612D/L660V/P662S/H687A/A745T/ | |
| | | F760W | |
| 1363/1364 | A78N/R251I/A370V/ | A78N/C147H/R251I/A257V/F291L/A370V/ | ++ |
| | Y697L/L798I | P395S/G402R/L474A/E475A/M478L/G515T/ | |
| | | A526S/Q527A/G528A/A536V/P559R/R604H/ | |
| | | L660V/P662S/H687A/Y697L/A745T/F760W/ | |
| | | L798I | |
| 1371/1372 | V51T/R251I/T412R/ | V51T/C147H/R251I/A257V/F291L/P395S/ | ++ |
| | L798I | G402R/T412R/L474A/E475A/M478L/G515T/ | |
| | | A526S/Q527A/G528A/A536V/P559R/R604H/ | |
| | | L660V/P662S/H687A/A745T/F760W/L798I | |
| 1341/1342 | T412R/Q603M/L798I | C147H/A257V/F291L/P395S/G402R/T412R/ | ++ |
| | | L474A/E475A/M478L/G515T/A526S/Q527A/ | |
| | | G528A/A536V/P559R/Q603M/R604H/L660V/ | |
| | | P662S/H687A/A745T/F760W/L798I | |
| 1353/1354 | R251I/A370V/E508K | C147H/R251I/A257V/F291L/A370V/P395S/ | ++ |
| | | G402R/L474A/E475A/M478L/E508K/G515T/ | |
| | | A526S/Q527A/G528A/A536V/P559R/R604H/ | |
| | | L660V/P662S/H687A/A745T/F760W | |
| 1357/1358 | A78N/A370V/Y697L/ | A78N/C147H/A257V/F291L/A370V/P395S/ | ++ |
| | L798I | G402R/L474A/E475A/M478L/G515T/A526S/ | |
| | | Q527A/G528A/A536V/P559R/R604H/L660V/ | |
| | | P662S/H687A/Y697L/A745T/F760W/L798I | |
| 1347/1348 | A78N/R251I | A78N/C147H/R251I/A257V/F291L/P395S/ | + |
| | | G402R/L474A/E475A/M478L/G515T/A526S/ | |
| | | Q527A/G528A/A536V/P559R/R604H/L660V/ | |
| | | P662S/H687A/A745T/F760W | |
| 1329/1330 | D68R/Q603M | D68R/C147H/A257V/F291L/P395S/G402R/ | + |
| | | L474A/E475A/M478L/G515T/A526S/Q527A/ | |
| | | G528A/A536V/P559R/Q603M/R604H/L660V/ | |
| | | P662S/H687A/A745T/F760W | |
| 1337/1338 | D68G/A370V/Q603M/ | D68G/C147H/A257V/F291L/A370V/P395S/ | + |
| | E612D | G402R/L474A/E475A/M478L/G515T/A526S/ | |
| | | Q527A/G528A/A536V/P559R/Q603M/R604H/ | |
| | | E612D/L660V/P662S/H687A/A745T/F760W | |
| 1355/1356 | A78N/E508K | A78N/C147H/A257V/F291L/P395S/G402R/ | + |
| | | L474A/E475A/M478L/E508K/G515T/A526S/ | |
| | | Q527A/G528A/A536V/P559R/R604H/L660V/ | |
| | | P662S/H687A/A745T/F760W | |
| 1349/1350 | R251I | C147H/R251I/A257V/F291L/P395S/G402R/ | + |
| | | L474A/E475A/M478L/G515T/A526S/Q527A/ | |
| | | G528A/A536V/P559R/R604H/L660V/P662S/ | |
| | | H687A/A745T/F760W | |
| 1373/1374 | V51T/R251I/A370V/ | V51T/C147H/R251I/A257V/F291L/A370V/ | + |
| | E508K/Q603M/L798I | P395S/G402R/L474A/E475A/M478L/E508K/ | |
| | | G515T/A526S/Q527A/G528A/A536V/P559R/ | |
| | | Q603M/R604H/L660V/P662S/H687A/A745T/ | |
| | | F760W/L798I | |
| 1331/1332 | D68R/A78N/A370V | D68R/A78N/C147H/A257V/F291L/A370V/ | + |
| | | P395S/G402R/L474A/E475A/M478L/G515T/ | |
| | | A526S/Q527A/G528A/A536V/P559R/R604H/ | |
| | | L660V/P662S/H687A/A745T/F760W | |
| 1375/1376 | D68G/A78N/R251I/ | D68G/A78N/C147H/R251I/A257V/F291L/ | + |
| | A370V/Q603M/E612D/ | A370V/P395S/G402R/L474A/E475A/M478L/ | |
| | Y697L | G515T/A526S/Q527A/G528A/A536V/P559R/ | |
| | | Q603M/R604H/E612D/L660V/P662S/H687A/ | |
| | | Y697L/A745T/F760W | |
| 1377/1378 | V51T/D68T/R251I/ | V51T/D68T/C147H/R251I/A257V/F291L/ | + |
| | A370V/Q603M | A370V/P395S/G402R/L474A/E475A/M478L/ | |
| | | G515T/A526S/Q527A/G528A/A536V/P559R/ | |
| | | Q603M/R604H/L660V/P662S/H687A/A745T/ | |
| | | F760W | |

Levels of increased activity were determined relative to the reference polypeptide of SEQ ID NO: 1208 and defined as follows: “+” 1.12 to 3.53, “++” >3.53, “+++” >4.65.

### HPV Assay Parameters

[0352] A 15 μL reaction that comprised of 1× Low Pool Concentration non-infections HPV RNA, Alinity™ Reagents Polymerase Master Mix (primers, probes, dNTPs; Abbott, USA), Polymerase Activator solution and 1 vol 0% HTP lysate with and without (25 mM GITC, 2% ETOH, 250 ng gDNA) PCR inhibitors. qPCR cycling (46° C. 6 min, 97° C. 3.3 min, 97° C. 3 sec, 51.6° C. 20 sec, 92° C. 3 sec, 51.6° C. 20 sec, 54.7° C. 16 sec for 42 cycles) in a CFX384 Touch Deep Well Real-Time PCR detection System (BioRad).

[0353] Polymerase stability and activity relative to SEQ ID NO: 1208 (FIOP VIC END RFU) was calculated as the improved VIC END RFU value formed by the variant compared to END RFU value of SEQ ID NO: 1208 and shown in Table 11.2.

TABLE 11.2
Pos Control FIOP VIC END RFU Relative to SEQ ID NO: 1208

| | Amino Acid | | |
|---|---|---|---|
| | Differences | | Fold Improvement |
| SEQ ID NO: | (Relative to | Amino Acid Differences | (HPV) Relative to |
| (nt/aa) | SEQ ID NO: 1208) | (Relative to SEQ ID NO: 2) | SEQ ID NO: 1208 |
| 1327/1328 | D68R/R251I/Q603M/ | D68R/C147H/R251I/A257V/F291L/P395S/ | +++ |
| | E612D/L798I | G402R/L474A/E475A/M478L/G515T/A526S/ | |
| | | Q527A/G528A/A536V/P559R/Q603M/R604H/ | |
| | | E612D/L660V/P662S/H687A/A745T/F760W/ | |
| | | L798I | |
| 1329/1330 | D68R/Q603M | D68R/C147H/A257V/F291L/P395S/G402R/ | +++ |
| | | L474A/E475A/M478L/G515T/A526S/Q527A/ | |
| | | G528A/A536V/P559R/Q603M/R604H/L660V/ | |
| | | P662S/H687A/A745T/F760W | |
| 1331/1332 | D68R/A78N/A370V | D68R/A78N/C147H/A257V/F291L/A370V/ | +++ |
| | | P395S/G402R/L474A/E475A/M478L/G515T/ | |
| | | A526S/Q527A/G528A/A536V/P559R/R604H/ | |
| | | L660V/P662S/H687A/A745T/F760W | |
| 1333/1334 | A370V | C147H/A257V/F291L/A370V/P395S/G402R/ | +++ |
| | | L474A/E475A/M478L/G515T/A526S/Q527A/ | |
| | | G528A/A536V/P559R/R604H/L660V/P662S/ | |
| | | H687A/A745T/F760W | |
| 1335/1336 | R251I/L798I | C147H/R251I/A257V/F291L/P395S/G402R/ | ++ |
| | | L474A/E475A/M478L/G515T/A526S/Q527A/ | |
| | | G528A/A536V/P559R/R604H/L660V/P662S/ | |
| | | H687A/A745T/F760W/L798I | |
| 1337/1338 | D68G/A370V/Q603M/ | D68G/C147H/A257V/F291L/A370V/P395S/ | ++ |
| | E612D | G402R/L474A/E475A/M478L/G515T/A526S/ | |
| | | Q527A/G528A/A536V/P559R/Q603M/R604H/ | |
| | | E612D/L660V/P662S/H687A/A745T/F760W | |
| 1339/1340 | V51T/A370V/T412R/ | V51T/C147H/A257V/F291L/A370V/P395S/ | ++ |
| | Q603M/E612D | G402R/T412R/L474A/E475A/M478L/G515T/ | |
| | | A526S/Q527A/G528A/A536V/P559R/Q603M/ | |
| | | R604H/E612D/L660V/P662S/H687A/A745T/ | |
| | | F760W | |
| 1341/1342 | T412R/Q603M/L798I | C147H/A257V/F291L/P395S/G402R/T412R/ | ++ |
| | | L474A/E475A/M478L/G515T/A526S/Q527A/ | |
| | | G528A/A536V/P559R/Q603M/R604H/L660V/ | |
| | | P662S/H687A/A745T/F760W/L798I | |
| 1343/1344 | R251I/A370V/T412R/ | C147H/R251I/A257V/F291L/A370V/P395S/ | ++ |
| | E612D | G402R/T412R/L474A/E475A/M478L/G515T/ | |
| | | A526S/Q527A/G528A/A536V/P559R/R604H/ | |
| | | E612D/L660V/P662S/H687A/A745T/F760W | |
| 1345/1346 | A370V/L798I | C147H/A257V/F291L/A370V/P395S/G402R/ | ++ |
| | | L474A/E475A/M478L/G515T/A526S/Q527A/ | |
| | | G528A/A536V/P559R/R604H/L660V/P662S/ | |
| | | H687A/A745T/F760W/L798I | |
| 1347/1348 | A78N/R251I | A78N/C147H/R251I/A257V/F291L/P395S/ | + |
| | | G402R/L474A/E475A/M478L/G515T/A526S/ | |
| | | Q527A/G528A/A536V/P559R/R604H/L660V/ | |
| | | P662S/H687A/A745T/F760W | |
| 1349/1350 | R251I | C147H/R251I/A257V/F291L/P395S/G402R/ | + |
| | | L474A/E475A/M478L/G515T/A526S/Q527A/ | |
| | | G528A/A536V/P559R/R604H/L660V/P662S/ | |
| | | H687A/A745T/F760W | |
| 1351/1352 | D68R/A370V/E508K/ | D68R/C147H/A257V/F291L/A370V/P395S/ | + |
| | L798I | G402R/L474A/E475A/M478L/E508K/G515T/ | |
| | | A526S/Q527A/G528A/A536V/P559R/R604H/ | |
| | | L660V/P662S/H687A/A745T/F760W/L798I | |
| 1353/1354 | R251I/A370V/E508K | C147H/R251I/A257V/F291L/A370V/P395S/ | + |
| | | G402R/L474A/E475A/M478L/E508K/G515T/ | |
| | | A526S/Q527A/G528A/A536V/P559R/R604H/ | |
| | | L660V/P662S/H687A/A745T/F760W | |
| 1355/1356 | A78N/E508K | A78N/C147H/A257V/F291L/P395S/G402R/ | + |
| | | L474A/E475A/M478L/E508K/G515T/A526S/ | |
| | | Q527A/G528A/A536V/P559R/R604H/L660V/ | |
| | | P662S/H687A/A745T/F760W | |
| 1357/1358 | A78N/A370V/Y697L/ | A78N/C147H/A257V/F291L/A370V/P395S/ | + |
| | L798I | G402R/L474A/E475A/M478L/G515T/A526S/ | |
| | | Q527A/G528A/A536V/P559R/R604H/L660V/ | |
| | | P662S/H687A/Y697L/A745T/F760W/L798I | |
| 1359/1360 | V51T/R251I | V51T/C147H/R251I/A257V/F291L/P395S/ | + |
| | | G402R/L474A/E475A/M478L/G515T/A526S/ | |
| | | Q527A/G528A/A536V/P559R/R604H/L660V/ | |
| | | P662S/H687A/A745T/F760W | |
| 1361/1362 | D68G/A370V/E508K/ | D68G/C147H/A257V/F291L/A370V/P395S/ | + |
| | Q603M/Y697L | G402R/L474A/E475A/M478L/E508K/G515T/ | |
| | | A526S/Q527A/G528A/A536V/P559R/Q603M/ | |
| | | R604H/L660V/P662S/H687A/Y697L/A745T/ | |
| | | F760W | |
| 1363/1364 | A78N/R251I/A370V/ | A78N/C147H/R251I/A257V/F291L/A370V/ | + |
| | Y697L/L798I | P395S/G402R/L474A/E475A/M478L/G515T/ | |
| | | A526S/Q527A/G528A/A536V/P559R/R604H/ | |
| | | L660V/P662S/H687A/Y697L/A745T/F760W/ | |
| | | L798I | |
| 1365/1366 | A78N/Q603M/L798I/ | A78N/C147H/A257V/F291L/P395S/G402R/ | + |
| | E831G | L474A/E475A/M478L/G515T/A526S/Q527A/ | |
| | | G528A/A536V/P559R/Q603M/R604H/L660V/ | |
| | | P662S/H687A/A745T/F760W/L798I/E831G | |
| 1367/1368 | A370V/T412R/E508K/ | C147H/A257V/F291L/A370V/P395S/G402R/ | + |
| | E612D | T412R/L474A/E475A/M478L/E508K/G515T/ | |
| | | A526S/Q527A/G528A/A536V/P559R/R604H/ | |
| | | E612D/L660V/P662S/H687A/A745T/F760W | |

Levels of increased activity were determined relative to the reference polypeptide of SEQ ID NO: 1208 and defined as follows: “+” 1.02 to 1.31, “++” >1.31, “+++” >1.41.

[0354] While the invention has been described with reference to the specific embodiments, various changes can be made and equivalents can be substituted to adapt to a particular situation, material, composition of matter, process, process step or steps, thereby achieving benefits of the invention without departing from the scope of what is claimed.

[0355] For all purposes, each and every publication and patent document cited in this disclosure is incorporated herein by reference as if each such publication or document was specifically and individually indicated to be incorporated herein by reference. Citation of publications and patent documents is not intended as an indication that any such document is pertinent prior art, nor does it constitute an admission as to its contents or date.

The application's sequence listing, which the Patent Office published only in electronic form, follows.

SEQUENCE LISTING (1380 sequences)

SEQ ID NO: 1 - DNA, 2538 bp, synthetic construct
  misc_feature 1..2538: note = DNA polymerase variant
  source 1..2538: mol_type = other DNA
atgcaccatcatcatcatcatggcggtagcggcatgttaccgctgtttgatttggaagaaccaccaaaacgcgtgctgcttgttgacggccatcatctggcgtatcgtaccttctacgcactgagccttacgacctcacgtggtgagcctgtccagatggtgtatgggtttgctcgctccctgctgaaagccctgaaggaagatggtcaagccgtagtagtggttttcgatgcgaaagcaccgtcgtttcgtcacgaagcgtacgaggcctataaagctggccgcgcaccgaccccggaagactttccgcgtcagttagcgctcgtcaaacgcctcgtggatttgctgggattagttcgcttggaagctcctggctacgaggcggacgacgtgctcggtacactggccaagaaagcagaacgtgaaggcatggaggtctgcattcttaccggtgatcgcgatttcttccagctgctgtctgagaaagtgagcgttttgctgcccgatggcacgttagtaaccccgaaagatgtccaagagaaatatggagttccgccagaacgttgggtggactttcgcgcactgactggtgatcgttcagacaacatcccgggcgttgccgggattggtgaaaagacggcgctgcgcctgctggcagaatggggctcggtggaaaatctgctcaagaaccttgatcgtgtgaaacctgatagcttacgccgcaagatcgaagcccacctggaagacttgcgtctgagtctggatcttgcgcgtattcgcaccgatctgccgttggaagtagactttaaagctctgcgtcgtcgcacacccgatttagaggggttacgcgcgttcctcgaagaactggagtttggctccctgctgcatgaattcggtttgttgggcggagagaaaccgcgtgaagaagcaccatggccgccgcccgaaggtgcctttgtcggctttcttctgtcacgcaaagagccaatgtgggcggaactgttagctcttgcagccgccgcggaagggcgtgttcaccgcgcgacctctcctgtcgaggccctcgctgacctcaaagaagcacgtggtttcttggcgaaagatttagccgtgcttgcattacgcgaaggcgttgcgctcgatccgacggacgacccgcttttggtggcttatttgctcgatcctgcgaataccaacccggaaggtgtagcccgtcgttacggcggcgagtttactgaagatgcggcagaacgcgcgttgcttagcgaacgcctcttccagacgttatttccacgtctttcggagaaattactctggctctatcaggaagtcgaacgtccattgagtcgcgtgcttgcccatatggaggctcgcggtgtgcgcttagatgttccgttgttagaagcactcagcttcgagttggagaaagaaatggaacgtcttgaaggcgaagtctttcgtttagcggggcatcccttcaatctcaactctcgcgaccaattggagaaagtgctctttgatgaattaggtttaacccctgtaggacgcacagagaagaccggcaaacgttccactgctcagggagcattggaagcacttcgtggtgctcacccgatcgtcgagttgattttgcagtaccgcgagctcagcaaactcaaatcaacctatcttgatccgttacctcgtcttgttcatccacgtacgggtcgtttacacacccgcttcaatcaaacggcgacagccaccgggcgcttgtcgtcgagtgacccgaacctccagaatattccagtgcgcacgccgttaggccaacgcattcgtaaagcgtttgttgcggaagaaggttggttattacttgcggccgattactcccagatcgaacttcgtgtattggcgcatctctctggcgacgagaatcttaaacgcgtgtttcgcgaaggcaaggatattcacactgaaaccgcagcctggatgttcgggcttgacccagccttagtggaccccaagatgcgtcgtgccgccaagaccgtcaactttggcgtactctatggtatgtcagcacatcgtcttagtcaggaattgggcattgactacaaagaagctgaagcgtttatcgagcgctatttccaatcctttccgaaagttcgcgcgtggattgaacgtaccctcgaagaaggtcgcactcgcggctatgtggaaacgttattcgggcgtcgtcgctacgttccagatcttgcatctcgtgtccgctcagtgcgcgaagctgctgagcgtatggccttcaatatgcctgttcagggaacagcggcggacctcatgaagatcgccatggtgaaattgtttccgcgcttgaaacccttaggagcccaccttcttttacaggtgcatgatgaattggtcttggaagtacccgaggatcgcgcagaagaagccaaagcactcgtgaaagaggttatggaaaacgcgtatccgttagatgttccgttggaggtcgaagtgggtgtaggccgtgattggcttgaagcgaaacaagactaatga

SEQ ID NO: 2 - protein, 844 aa, synthetic construct
  REGION 1..844: note = DNA Polymerase Variant
MHHHHHHGGSGMLPLFDLEEPPKRVLLVDGHHLAYRTFYALSLTTSRGEPVQMVYGFARSLLKALKEDGQAVVVVFDAKAPSFRHEAYEAYKAGRAPTPEDFPRQLALVKRLVDLLGLVRLEAPGYEADDVLGTLAKKAEREGMEVCILTGDRDFFQLLSEKVSVLLPDGTLVTPKDVQEKYGVPPERWVDFRALTGDRSDNIPGVAGIGEKTALRLLAEWGSVENLLKNLDRVKPDSLRRKIEAHLEDLRLSLDLARIRTDLPLEVDFKALRRRTPDLEGLRAFLEELEFGSLLHEFGLLGGEKPREEAPWPPPEGAFVGFLLSRKEPMWAELLALAAAAEGRVHRATSPVEALADLKEARGFLAKDLAVLALREGVALDPTDDPLLVAYLLDPANTNPEGVARRYGGEFTEDAAERALLSERLFQTLFPRLSEKLLWLYQEVERPLSRVLAHMEARGVRLDVPLLEALSFELEKEMERLEGEVFRLAGHPFNLNSRDQLEKVLFDELGLTPVGRTEKTGKRSTAQGALEALRGAHPIVELILQYRELSKLKSTYLDPLPRLVHPRTGRLHTRFNQTATATGRLSSSDPNLQNIPVRTPLGQRIRKAFVAEEGWLLLAADYSQIELRVLAHLSGDENLKRVFREGKDIHTETAAWMFGLDPALVDPKMRRAAKTVNFGVLYGMSAHRLSQELGIDYKEAEAFIERYFQSFPKVRAWIERTLEEGRTRGYVETLFGRRRYVPDLASRVRSVREAAERMAFNMPVQGTAADLMKIAMVKLFPRLKPLGAHLLLQVHDELVLEVPEDRAEEAKALVKEVMENAYPLDVPLEVEVGVGRDWLEAKQD

SEQ ID NO: 3 - DNA, 2532 bp, synthetic construct
  misc_feature 1..2532: note = DNA Polymerase Variant
  source 1..2532: mol_type = other DNA
atgcaccatcatcatcatcatggcggtagcggcatgttaccgctgtttgatttggaagaaccaccaaaacgcgtgctgcttgttgacggccatcatctggcgtatcgtaccttctacgcactgagccttacgacctcacgtggtgagcctgtccagatggtgtatgggtttgctcgctccctgctgaaagccctgaaggaagatggtcaagccgtagtagtggttttcgatgcgaaagcaccgtcgtttcgtcacgaagcgtacgaggcctataaagctggccgcgcaccgaccccggaagactttccgcgtcagttagcgctcgtcaaacgcctcgtggatttgctgggattagttcgcttggaagctcctggctacgaggcggacgacgtgctcggtacactggccaagaaagcagaacgtgaaggcatggaggtctgcattcttaccggtgatcgcgatttcttccagctgctgtctgagaaagtgagcgttttgctgcccgatggcacgttagtaaccccgaaagatgtccaagagaaatatggagttccgccagaacgttgggtggactttcgcgcactgactggtgatcgttcagacaacatcccgggcgttgccgggattggtgaaaagacggcgctgcgcctgctggcagaatggggctcggtggaaaatctgctcaagaaccttgatcgtgtgaaacctgatagcttacgccgcaagatcgaagcccacctggaagacttgcgtctgagtctggatcttgcgcgtattcgcaccgatctgccgttggaagtagactttaaagctctgcgtcgtcgcacacccgatttagaggggttacgcgcgttcctcgaagaactggagtttggctccctgctgcatgaattcggtttgttgggcggagagaaaccgcgtgaagaagcaccatggccgccgcccgaaggtgcctttgtcggctttcttctgtcacgcaaagagccaatgtgggcggaactgttagctcttgcagccgccgcggaagggcgtgttcaccgcgcgacctctcctgtcgaggccctcgctgacctcaaagaagcacgtggtttcttggcgaaagatttagccgtgcttgcattacgcgaaggcgttgcgctcgatccgacggacgacccgcttttggtggcttatttgctcgatcctgcgaataccaatccggaaggtgtagcccgtcgttacggcggcgagtttactgaagatgcggcagaacgcgcgttgcttagcgaacgcctcttccagacgttatttccacgtctttcggagaaattactctggctctatcaggaagtcgaacgtccattgagtcgcgtgcttgcccatatggaggctcgcggtgtgcgcttagatgttccgttgttagaagcactcagcttcgagttggagaaagaaatggaacgtcttgaaggcgaagtctttcgtttagcggggcatcccttcaatctcaactctcgcgaccaattggagaaagtgctctttgatgaattaggtttaacccctgtaggacgcacagagaagaccggcaaacgttccactgctcagggagcattggaagcacttcgtggtgctcacccgatcgtcgacttgattttgcagtaccgcgagctcagtaaactcaaaggcacctatattgatccgttacctcgtcttgttcatccacgtacgggtcgtttacacacccgcttcaatcaaacggcgacagccaccgggcgcttgtcgtcgagtgacccgaacctccagaatattccagtgcgcacgccgttaggccaacgcattcgtaaagcgtttgttgcggaagaaggttggttattacttgcggccgattactcccagatcgaacttcgtgtattggcgcatctctctggcgacgagaatcttaaacgcgtgtttcgcgaaggcaaggatattcacactgaaaccgcagcctggatgttcgggcttgacccagccttagtggaccccaagatgcgtcgtgccgccaagaccgtcaactttggcgtactctatggtatgtcagcacatcgtcttagtcaggaattgggcattgactacaaagaagctgaagcgtttatcgagcgctatttccaatcctttccgaaagttcgcgcgtggattgaacgtaccctcgaagaaggtcgcactcgcggctatgtggaaacgttattcgggcgtcgtcgctacgttccagatcttgcatctcgtgtccgctcagtgcgcgaagctgctgagcgtatggccttcaatatgcctgttcagggaacagcggcggacctcatgaagatcgccatggtgaaattgtttccgcgcttgaaacccttaggagcccaccttcttttacaggtgcatgatgaattggtcttggaagtacccgaggatcgcgcagaagaagccaaagcactcgtgaaagaggttatggaaaacgcgtatccgttagatgttccgttggaggtcgaagtgggtgtaggccgtgattggcttgaagcgaaacaagac

SEQ ID NO: 4 - protein, 844 aa, synthetic construct
  REGION 1..844: note = DNA Polymerase Variant
MHHHHHHGGSGMLPLFDLEEPPKRVLLVDGHHLAYRTFYALSLTTSRGEPVQMVYGFARSLLKALKEDGQAVVVVFDAKAPSFRHEAYEAYKAGRAPTPEDFPRQLALVKRLVDLLGLVRLEAPGYEADDVLGTLAKKAEREGMEVCILTGDRDFFQLLSEKVSVLLPDGTLVTPKDVQEKYGVPPERWVDFRALTGDRSDNIPGVAGIGEKTALRLLAEWGSVENLLKNLDRVKPDSLRRKIEAHLEDLRLSLDLARIRTDLPLEVDFKALRRRTPDLEGLRAFLEELEFGSLLHEFGLLGGEKPREEAPWPPPEGAFVGFLLSRKEPMWAELLALAAAAEGRVHRATSPVEALADLKEARGFLAKDLAVLALREGVALDPTDDPLLVAYLLDPANTNPEGVARRYGGEFTEDAAERALLSERLFQTLFPRLSEKLLWLYQEVERPLSRVLAHMEARGVRLDVPLLEALSFELEKEMERLEGEVFRLAGHPFNLNSRDQLEKVLFDELGLTPVGRTEKTGKRSTAQGALEALRGAHPIVDLILQYRELSKLKGTYIDPLPRLVHPRTGRLHTRFNQTATATGRLSSSDPNLQNIPVRTPLGQRIRKAFVAEEGWLLLAADYSQIELRVLAHLSGDENLKRVFREGKDIHTETAAWMFGLDPALVDPKMRRAAKTVNFGVLYGMSAHRLSQELGIDYKEAEAFIERYFQSFPKVRAWIERTLEEGRTRGYVETLFGRRRYVPDLASRVRSVREAAERMAFNMPVQGTAADLMKIAMVKLFPRLKPLGAHLLLQVHDELVLEVPEDRAEEAKALVKEVMENAYPLDVPLEVEVGVGRDWLEAKQD

SEQ ID NO: 5 - DNA, 2532 bp, synthetic construct
  misc_feature 1..2532: note = DNA Polymerase Variant
  source 1..2532: mol_type = other DNA
atgcaccatcatcatcatcatggcggtagcggcatgttaccgctgtttgatttggaagaaccaccaaaacgcgtgctgcttgttgacggccatcatctggcgtatcgtaccttctacgcactgagccttacgacctcacgtggtgagcctgtccagatggtgtatgggtttgctcgctccctgctgaaagccctgaaggaagatggtcaagccgtagtagtggttttcgatgcgaaagcaccgtcgtttcgtcacgaagcgtacgaggcctataaagctggccgcgcaccgaccccggaagactttccgcgtcagttagcgctcgtcaaacgcctcgtggatttgctgggattagttcgcttggaagctcctggctacgaggcggacgacgtgctcggtacactggccaagaaagcagaacgtgaaggcatggaggtctgcattcttaccggtgatcgcgatttcttccagctgctgtctgagaaagtgagcgttttgctgcccgatggcacgttagtaaccccgaaagatgtccaagagaaatatggagttccgccagaacgttgggtggactttcgcgcactgactggtgatcgttcagacaacatcccgggcgttgccgggattggtgaaaagacggcgctgcgcctgctggcagaatggggctcggtggaaaatctgctcaagaaccttgatcgtgtgaaacctgatagcttacgccgcaagatcgaagcccacctggaagacttgcgtctgagtctggatcttgcgcgtattcgcaccgatctgccgttggaagtagactttaaagctctgcgtcgtcgcacacccgatttagaggggttacgcgcgttcctcgaagaactggagtttggctccctgctgcatgaattcggtttgttgggcggagagaaaccgcgtgaagaagcaccatggccgccgcccgaaggtgcctttgtcggctttcttctgtcacgcaaagagccaatgtgggcggaactgttagctcttgcagccgccgcggaagggcgtgttcaccgcgcgacctctcctgtcgaggccctcgctgacctcaaagaagcacgtggtttcttggcgaaagatttagccgtgcttgcattacgcgaaggcgttgcgctcgatccgacggacgacccgcttttggtggcttatttgctcgatcctgcgaataccaatccggaaggtgtagcccgtcgttacggcggcgagtttactgaagatgcggcagaacgcgcgttgcttagcgaacgcctcttccagacgttatttccacgtctttcggagaaattactctggctctatcaggaagtcgaacgtccattgagtcgcgtgcttgcccatatggaggctcgcggtgtgcgcttagatgttccgttgttagaagcactcagcttcgagttggagaaagaaatggaacgtcttgaaggcgaagtctttcgtttagcggggcatcccttcaatctcaactctcgcgaccaattggagaaagtgctctttgatgaattaggtttaacccctgtcggaaaaacagagaagaccggcaaacgttccactgctcagggagcattggaagcacttcgtggtgctcacccgatcgtcgacttgattttgcagtaccgcgagctcactaaactcaaaaacacctatattgatccgttacctcgtcttgttcatccacgtacgggtcgtttacacacccgcttcaatcaaacggcgacagccaccgggcgcttgtcgtcgagtgacccgaacctccagaatattccagtgcgcacgccgttaggccaacgcattcgtaaagcgtttgttgcggaagaaggttggttattacttgcggccgattactcccagatcgaacttcgtgtattggcgcatctctctggcgacgagaatcttaaacgcgtgtttcgcgaaggcaaggatattcacactgaaaccgcagcctggatgttcgggcttgacccagccttagtggaccccaagatgcgtcgtgccgccaagaccgtcaactttggcgtactctatggtatgtcagcacatcgtcttagtcaggaattgggcattgactacaaagaagctgaagcgtttatcgagcgctatttccaatcctttccgaaagttcgcgcgtggattgaacgtaccctcgaagaaggtcgcactcgcggctatgtggaaacgttattcgggcgtcgtcgctacgttccagatcttgcatctcgtgtccgctcagtgcgcgaagctgctgagcgtatggccttcaatatgcctgttcagggaacagcggcggacctcatgaagatcgccatggtgaaattgtttccgcgcttgaaacccttaggagcccaccttcttttacaggtgcatgatgaattggtcttggaagtacccgaggatcgcgcagaagaagccaaagcactcgtgaaagaggttatggaaaacgcgtatccgttagatgttccgttggaggtcgaagtgggtgtaggccgtgattggcttgaagcgaaacaagac

SEQ ID NO: 6 - protein, 844 aa, synthetic construct
  REGION 1..844: note = DNA Polymerase Variant
MHHHHHHGGSGMLPLFDLEEPPKRVLLVDGHHLAYRTFYALSLTTSRGEPVQMVYGFARSLLKALKEDGQAVVVVFDAKAPSFRHEAYEAYKAGRAPTPEDFPRQLALVKRLVDLLGLVRLEAPGYEADDVLGTLAKKAEREGMEVCILTGDRDFFQLLSEKVSVLLPDGTLVTPKDVQEKYGVPPERWVDFRALTGDRSDNIPGVAGIGEKTALRLLAEWGSVENLLKNLDRVKPDSLRRKIEAHLEDLRLSLDLARIRTDLPLEVDFKALRRRTPDLEGLRAFLEELEFGSLLHEFGLLGGEKPREEAPWPPPEGAFVGFLLSRKEPMWAELLALAAAAEGRVHRATSPVEALADLKEARGFLAKDLAVLALREGVALDPTDDPLLVAYLLDPANTNPEGVARRYGGEFTEDAAERALLSERLFQTLFPRLSEKLLWLYQEVERPLSRVLAHMEARGVRLDVPLLEALSFELEKEMERLEGEVFRLAGHPFNLNSRDQLEKVLFDELGLTPVGKTEKTGKRSTAQGALEALRGAHPIVDLILQYRELTKLKNTYIDPLPRLVHPRTGRLHTRFNQTATATGRLSSSDPNLQNIPVRTPLGQRIRKAFVAEEGWLLLAADYSQIELRVLAHLSGDENLKRVFREGKDIHTETAAWMFGLDPALVDPKMRRAAKTVNFGVLYGMSAHRLSQELGIDYKEAEAFIERYFQSFPKVRAWIERTLEEGRTRGYVETLFGRRRYVPDLASRVRSVREAAERMAFNMPVQGTAADLMKIAMVKLFPRLKPLGAHLLLQVHDELVLEVPEDRAEEAKALVKEVMENAYPLDVPLEVEVGVGRDWLEAKQD

SEQ ID NO: 7 - DNA, 2532 bp, synthetic construct
  misc_feature 1..2532: note = DNA Polymerase Variant
  source 1..2532: mol_type = other DNA
atgcaccatcatcatcatcatggcggtagcggcatgttaccgctgtttgatttggaagaaccaccaaaacgcgtgctgcttgttgacggccatcatctggcgtatcgtaccttctacgcactgagccttacgacctcacgtggtgagcctgtccagatggtgtatgggtttgctcgctccctgctgaaagccctgaaggaagatggtcaagccgtagtagtggttttcgatgcgaaagcaccgtcgtttcgtcacgaagcgtacgaggcctataaagctggccgcgcaccgaccccggaagactttccgcgtcagttagcgctcgtcaaacgcctcgtggatttgctgggattagttcgcttggaagctcctggctacgaggcggacgacgtgctcggtacactggccaagaaagcagaacgtgaaggcatggaggtctgcattcttaccggtgatcgcgatttcttccagctgctgtctgagaaagtgagcgttttgctgcccgatggcacgttagtaaccccgaaagatgtccaagagaaatatggagttccgccagaacgttgggtggactttcgcgcactgactggtgatcgttcagacaacatcccgggcgttgccgggattggtgaaaagacggcgctgcgcctgctggcagaatggggctcggtggaaaatctgctcaagaaccttgatcgtgtgaaacctgatagcttacgccgcaagatcgaagcccacctggaagacttgcgtctgagtctggatcttgcgcgtattcgcaccgatctgccgttggaagtagactttaaagctctgcgtcgtcgcacacccgatttagaggggttacgcgcgttcctcgaagaactggagtttggctccctgctgcatgaattcggtttgttgggcggagagaaaccgcgtgaagaagcaccatggccgccgcccgaaggtgcctttgtcggctttcttctgtcacgcaaagagccaatgtgggcggaactgttagctcttgcagccgccgcggaagggcgtgttcaccgcgcgacctctcctgtcgaggccctcgctgacctcaaagaagcacgtggtttcttggcgaaagatttagccgtgcttgcattacgcgaaggcgttgcgctcgatccgacggacgacccgcttttggtggcttatttgctcgatcctgcgaataccaatccggaaggtgtagcccgtcgttacggcggcgagtttactgaagatgcggcagaacgcgcgttgcttagcgaacgcctcttccagacgttatttccacgtctttcggagaaattactctggctctatcaggaagtcgaacgtccattgagtcgcgtgcttgcccatatggaggctcgcggtgtgcgcttagatgttccgttgttagaagcactcagcttcgagttggagaaagaactggaacgtcttgaaggcgaagtctttcgtttagcggggcatcccttcaatctcaactctcgcgaccaattggagaaagtgctctttgatgaattaggtttaacccctatcggacgtacagagaagaccggcaaacgttccacttcggcaggcgccttggaagcacttcgtggtgctcacccgatcgtcgagttgattttgcagtaccgcgagctcagcaaactcaaatcaacctatcttgatccgttacctcgtcttgttcatccacgtacgggtcgtttacacacccgcttcaatcaaacggcgacagccaccgggcgcttgtcgtcgagtgacccgaacctccagaatattccagtgcgcacgccgttaggccaacgcattcgtaaagcgtttgttgcggaagaaggttggttattacttgcggccgattactcccagatcgaacttcgtgtattggcgcatctctctggcgacgagaatcttaaacgcgtgtttcgcgaaggcaaggatattcacactgaaaccgcagcctggatgttcgggcttgacccagccttagtggaccccaagatgcgtcgtgccgccaagaccgtcaactttggcgtactctatggtatgtcagcacatcgtcttagtcaggaattgggcattgactacaaagaagctgaagcgtttatcgagcgctatttccaatcctttccgaaagttcgcgcgtggattgaacgtaccctcgaagaaggtcgcactcgcggctatgtggaaacgttattcgggcgtcgtcgctacgttccagatcttgcatctcgtgtccgctcagtgcgcgaagctgctgagcgtatggccttcaatatgcctgttcagggaacagcggcggacctcatgaagatcgccatggtgaaattgtttccgcgcttgaaacccttaggagcccaccttcttttacaggtgcatgatgaattggtcttggaagtacccgaggatcgcgcagaagaagccaaagcactcgtgaaagaggttatggaaaacgcgtatccgttagatgttccgttggaggtcgaagtgggtgtaggccgtgattggcttgaagcgaaacaagac

SEQ ID NO: 8 - protein, 844 aa, synthetic construct
  REGION 1..844: note = DNA Polymerase Variant
MHHHHHHGGSGMLPLFDLEEPPKRVLLVDGHHLAYRTFYALSLTTSRGEPVQMVYGFARSLLKALKEDGQAVVVVFDAKAPSFRHEAYEAYKAGRAPTPEDFPRQLALVKRLVDLLGLVRLEAPGYEADDVLGTLAKKAEREGMEVCILTGDRDFFQLLSEKVSVLLPDGTLVTPKDVQEKYGVPPERWVDFRALTGDRSDNIPGVAGIGEKTALRLLAEWGSVENLLKNLDRVKPDSLRRKIEAHLEDLRLSLDLARIRTDLPLEVDFKALRRRTPDLEGLRAFLEELEFGSLLHEFGLLGGEKPREEAPWPPPEGAFVGFLLSRKEPMWAELLALAAAAEGRVHRATSPVEALADLKEARGFLAKDLAVLALREGVALDPTDDPLLVAYLLDPANTNPEGVARRYGGEFTEDAAERALLSERLFQTLFPRLSEKLLWLYQEVERPLSRVLAHMEARGVRLDVPLLEALSFELEKELERLEGEVFRLAGHPFNLNSRDQLEKVLFDELGLTPIGRTEKTGKRSTSAGALEALRGAHPIVELILQYRELSKLKSTYLDPLPRLVHPRTGRLHTRFNQTATATGRLSSSDPNLQNIPVRTPLGQRIRKAFVAEEGWLLLAADYSQIELRVLAHLSGDENLKRVFREGKDIHTETAAWMFGLDPALVDPKMRRAAKTVNFGVLYGMSAHRLSQELGIDYKEAEAFIERYFQSFPKVRAWIERTLEEGRTRGYVETLFGRRRYVPDLASRVRSVREAAERMAFNMPVQGTAADLMKIAMVKLFPRLKPLGAHLLLQVHDELVLEVPEDRAEEAKALVKEVMENAYPLDVPLEVEVGVGRDWLEAKQD

SEQ ID NO: 9 - DNA, 2532 bp, synthetic construct
  misc_feature 1..2532: note = DNA Polymerase Variant
  source 1..2532: mol_type = other DNA
atgcaccatcatcatcatcatggcggtagcggcatgttaccgctgtttgatttggaagaaccaccaaaacgcgtgctgcttgttgacggccatcatctggcgtatcgtaccttctacgcactgagccttacgacctcacgtggtgagcctgtccagatggtgtatgggtttgctcgctccctgctgaaagccctgaaggaagatggtcaagccgtagtagtggttttcgatgcgaaagcaccgtcgtttcgtcacgaagcgtacgaggcctataaagctggccgcgcaccgaccccggaagactttccgcgtcagttagcgctcgtcaaacgcctcgtggatttgctgggattagttcgcttggaagctcctggctacgaggcggacgacgtgctcggtacactggccaagaaagcagaacgtgaaggcatggaggtctgcattcttaccggtgatcgcgatttcttccagctgctgtctgagaaagtgagcgttttgctgcccgatggcacgttagtaaccccgaaagatgtccaagagaaatatggagttccgccagaacgttgggtggactttcgcgcactgactggtgatcgttcagacaacatcccgggcgttgccgggattggtgaaaagacggcgctgcgcctgctggcagaatggggctcggtggaaaatctgctcaagaaccttgatcgtgtgaaacctgatagcttacgccgcaagatcgaagcccacctggaagacttgcgtctgagtctggatcttgcgcgtattcgcaccgatctgccgttggaagtagactttaaagctctgcgtcgtcgcacacccgatttagaggggttacgcgcgttcctcgaagaactggagtttggctccctgctgcatgaattcggtttgttgggcggagagaaaccgcgtgaagaagcaccatggccgccgcccgaaggtgcctttgtcggctttcttctgtcacgcaaagagccaatgtgggcggaactgttagctcttgcagccgccgcggaagggcgtgttcaccgcgcgacctctcctgtcgaggccctcgctgacctcaaagaagcacgtggtttcttggcgaaagatttagccgtgcttgcattacgcgaaggcgttgcgctcgatccgacggacgacccgcttttggtggcttatttgctcgatcctgcgaataccaatccggaaggtgtagcccgtcgttacggcggcgagtttactgaagatgcggcagaacgcgcgttgcttagcgaacgcctcttccagacgttatttccacgtctttcggagaaattactctggctctatcaggaagtcgaacgtccattgagtcgcgtgcttgcccatatggaggctcgcggtgtgcgcttagatgttccgttgttagaagcactcagcttcgagttggagaaagaactggaacgtcttgaaggcgaagtctttcgtttagcggggcatcccttcaatctcaactctcgcgaccaattggagaaagtgctctttgatgaattaggtttaacccctgtcggaaaaacagagaagaccggcaaacgttccacttcggcaggcgtcttggaagcacttcgtggtgctcacccgatcgtcgacttgattttgcagtaccgcgagctcagcaaactcaaatcaacctatcttgatccgttacctcgtcttgttcatccacgtacgggtcgtttacacacccgcttcaatcaaacggcgacagccaccgggcgcttgtcgtcgagtgacccgaacctccagaatattccagtgcgcacgccgttaggccaacgcattcgtaaagcgtttgttgcggaagaaggttggttattacttgcggccgattactcccagatcgaacttcgtgtattggcgcatctctctggcgacgagaatcttaaacgcgtgtttcgcgaaggcaaggatattcacactgaaaccgcagcctggatgttcgggcttgacccagccttagtggaccccaagatgcgtcgtgccgccaagaccgtcaactttggcgtactctatggtatgtcagcacatcgtcttagtcaggaattgggcattgactacaaagaagctgaagcgtttatcgagcgctatttccaatcctttccgaaagttcgcgcgtggattgaacgtaccctcgaagaaggtcgcactcgcggctatgtggaaacgttattcgggcgtcgtcgctacgttccagatcttgcatctcgtgtccgctcagtgcgcgaagctgctgagcgtatggccttcaatatgcctgttcagggaacagcggcggacctcatgaagatcgccatggtgaaattgtttccgcgcttgaaacccttaggagcccaccttcttttacaggtgcatgatgaattggtcttggaagtacccgaggatcgcgcagaagaagccaaagcactcgtgaaagaggttatggaaaacgcgtatccgttagatgttccgttggaggtcgaagtgggtgtaggccgtgattggcttgaagcgaaacaagac

SEQ ID NO: 10 - protein, 844 aa, synthetic construct
  REGION 1..844: note = DNA Polymerase Variant
MHHHHHHGGSGMLPLFDLEEPPKRVLLVDGHHLAYRTFYALSLTTSRGEPVQMVYGFARSLLKALKEDGQAVVVVFDAKAPSFRHEAYEAYKAGRAPTPEDFPRQLALVKRLVDLLGLVRLEAPGYEADDVLGTLAKKAEREGMEVCILTGDRDFFQLLSEKVSVLLPDGTLVTPKDVQEKYGVPPERWVDFRALTGDRSDNIPGVAGIGEKTALRLLAEWGSVENLLKNLDRVKPDSLRRKIEAHLEDLRLSLDLARIRTDLPLEVDFKALRRRTPDLEGLRAFLEELEFGSLLHEFGLLGGEKPREEAPWPPPEGAFVGFLLSRKEPMWAELLALAAAAEGRVHRATSPVEALADLKEARGFLAKDLAVLALREGVALDPTDDPLLVAYLLDPANTNPEGVARRYGGEFTEDAAERALLSERLFQTLFPRLSEKLLWLYQEVERPLSRVLAHMEARGVRLDVPLLEALSFELEKELERLEGEVFRLAGHPFNLNSRDQLEKVLFDELGLTPVGKTEKTGKRSTSAGVLEALRGAHPIVDLILQYRELSKLKSTYLDPLPRLVHPRTGRLHTRFNQTATATGRLSSSDPNLQNIPVRTPLGQRIRKAFVAEEGWLLLAADYSQIELRVLAHLSGDENLKRVFREGKDIHTETAAWMFGLDPALVDPKMRRAAKTVNFGVLYGMSAHRLSQELGIDYKEAEAFIERYFQSFPKVRAWIERTLEEGRTRGYVETLFGRRRYVPDLASRVRSVREAAERMAFNMPVQGTAADLMKIAMVKLFPRLKPLGAHLLLQVHDELVLEVPEDRAEEAKALVKEVMENAYPLDVPLEVEVGVGRDWLEAKQD

SEQ ID NO: 11 - DNA, 2532 bp, synthetic construct
  misc_feature 1..2532: note = DNA Polymerase Variant
  source 1..2532: mol_type = other DNA
atgcaccatcatcatcatcatggcggtagcggcatgttaccgctgtttgatttggaagaaccaccaaaacgcgtgctgcttgttgacggccatcatctggcgtatcgtaccttctacgcactgagccttacgacctcacgtggtgagcctgtccagatggtgtatgggtttgctcgctccctgctgaaagccctgaaggaagatggtcaagccgtagtagtggttttcgatgcgaaagcaccgtcgtttcgtcacgaagcgtacgaggcctataaagctggccgcgcaccgaccccggaagactttccgcgtcagttagcgctcgtcaaacgcctcgtggatttgctgggattagttcgcttggaagctcctggctacgaggcggacgacgtgctcggtacactggccaagaaagcagaacgtgaaggcatggaggtctgcattcttaccggtgatcgcgatttcttccagctgctgtctgagaaagtgagcgttttgctgcccgatggcacgttagtaaccccgaaagatgtccaagagaaatatggagttccgccagaacgttgggtggactttcgcgcactgactggtgatcgttcagacaacatcccgggcgttgccgggattggtgaaaagacggcgctgcgcctgctggcagaatggggctcggtggaaaatctgctcaagaaccttgatcgtgtgaaacctgatagcttacgccgcaagatcgaagcccacctggaagacttgcgtctgagtctggatcttgcgcgtattcgcaccgatctgccgttggaagtagactttaaagctctgcgtcgtcgcacacccgatttagaggggttacgcgcgttcctcgaacgtctggagtttggctccctgctgcatgaattcggtttgttgggcggagagaaaccgcgtgaagaagcaccatggccgccgcccgaaggtgcctttgtcggctttcttctgtcacgcaaagagccaatgtgggcggaactgttagctcttgcagccgccgcggaagggcgtgttcaccgcgcgacctctcctgtcgaggccctcgctgacctcaaagaagcacgtggtttcttggcgaaagatttagccgtgcttgcattacgcgaaggcgttgcgctcgatccgacggacgacccgcttttggtggcttatttgctcgatcctgcgaataccaatccggaaggtgtagcccgtcgttacggcggcgagtttactgaagatgcggcagaacgcgcgttgcttagcgaacgcctcttccagacgttatttccacgtctttcggagaaattactctggctctatcaggaagtcgaacgtccattgagtcgcgtgcttgcccatatggaggctcgcggtgtgcgcttagatgttccgttgttagaagcactcagcttcgagttggagaaagaaatcgaacgtcttgaaggcgaagtctttcgtttagcggggcatcccttcaatctcaactctcgcgaccaattggagaaagtgctctttgatgaattaggtttaacccctatcggaaaaacagagaagaccggcaaacgttccactgctcagggagcattggaagcacttcgtggtgctcacccgatcgtcgacttgattttgcagtaccgcgagctcagtaaactcaaaagcacctatattgatccgttacctcgtcttgttcatccacgtacgggtcgtttacacacccgcttcaatcaaacggcgacagccaccgggcgcttgtcgtcgagtgacccgaacctccagaatattccagtgcgcacgccgttaggccaacgcattcgtaaagcgtttgttgcggaagaaggttggttattacttgcggccgattactcccagatcgaacttcgtgtattggcgcatctctctggcgacgagaatcttaaacgcgtgtttcgcgaaggcaaggatattcacactgaaaccgcagcctggatgttcgggcttgacccagccttagtggaccccaagatgcgtcgtgccgccaagaccgtcaactttggcgtactctatggtatgtcagcacatcgtcttagtcaggaattgggcattgactacaaagaagctgaagcgtttatcgagcgctatttccaatcctttccgaaagttcgcgcgtggattgaacgtaccctcgaagaaggtcgcactcgcggctatgtggaaacgttattcgggcgtcgtcgctacgttccagatcttgcatctcgtgtccgctcagtgcgcgaagctgctgagcgtatggccttcaatatgcctgttcagggaacagcggcggacctcatgaagatcgccatggtgaaattgtttccgcgcttgaaacccttaggagcccaccttcttttacaggtgcatgatgaattggtcttggaagtacccgaggatcgcgcagaagaagccaaagcactcgtgaaagaggttatggaaaacgcgtatccgttagatgttccgttggaggtcgaagtgggtgtaggccgtgattggcttgaagcgaaacaagac

SEQ ID NO: 12 - protein, 844 aa, synthetic construct
  REGION 1..844: note = DNA Polymerase Variant
MHHHHHHGGSGMLPLFDLEEPPKRVLLVDGHHLAYRTFYALSLTTSRGEPVQMVYGFARSLLKALKEDGQAVVVVFDAKAPSFRHEAYEAYKAGRAPTPEDFPRQLALVKRLVDLLGLVRLEAPGYEADDVLGTLAKKAEREGMEVCILTGDRDFFQLLSEKVSVLLPDGTLVTPKDVQEKYGVPPERWVDFRALTGDRSDNIPGVAGIGEKTALRLLAEWGSVENLLKNLDRVKPDSLRRKIEAHLEDLRLSLDLARIRTDLPLEVDFKALRRRTPDLEGLRAFLERLEFGSLLHEFGLLGGEKPREEAPWPPPEGAFVGFLLSRKEPMWAELLALAAAAEGRVHRATSPVEALADLKEARGFLAKDLAVLALREGVALDPTDDPLLVAYLLDPANTNPEGVARRYGGEFTEDAAERALLSERLFQTLFPRLSEKLLWLYQEVERPLSRVLAHMEARGVRLDVPLLEALSFELEKEIERLEGEVFRLAGHPFNLNSRDQLEKVLFDELGLTPIGKTEKTGKRSTAQGALEALRGAHPIVDLILQYRELSKLKSTYIDPLPRLVHPRTGRLHTRFNQTATATGRLSSSDPNLQNIPVRTPLGQRIRKAFVAEEGWLLLAADYSQIELRVLAHLSGDENLKRVFREGKDIHTETAAWMFGLDPALVDPKMRRAAKTVNFGVLYGMSAHRLSQELGIDYKEAEAFIERYFQSFPKVRAWIERTLEEGRTRGYVETLFGRRRYVPDLASRVRSVREAAERMAFNMPVQGTAADLMKIAMVKLFPRLKPLGAHLLLQVHDELVLEVPEDRAEEAKALVKEVMENAYPLDVPLEVEVGVGRDWLEAKQD

SEQ ID NO: 13 - DNA, 2532 bp, synthetic construct
  misc_feature 1..2532: note = DNA Polymerase Variant
  source 1..2532: mol_type = other DNA
atgcaccatcatcatcatcatggcggtagcggcatgttaccgctgtttgatttggaagaaccaccaaaacgcgtgctgcttgttgacggccatcatctggcgtatcgtaccttctacgcactgagccttacgacctcacgtggtgagcctgtccagatggtgtatgggtttgctcgctccctgctgaaagccctgaaggaagatggtcaagccgtagtagtggttttcgatgcgaaagcaccgtcgtttcgtcacgaagcgtacgaggcctataaagctggccgcgcaccgaccccggaagactttccgcgtcagttagcgctcgtcaaacgcctcgtggatttgctgggattagttcgcttggaagctcctggctacgaggcggacgacgtgctcggtacactggccaagaaagcagaacgtgaaggcatggaggtctgcattcttaccggtgatcgcgatttcttccagctgctgtctgagaaagtgagcgttttgctgcccgatggcacgttagtaaccccgaaagatgtccaagagaaatatggagttccgccagaacgttgggtggactttcgcgcactgactggtgatcgttcagacaacatcccgggcgttgccgggattggtgaaaagacggcgctgcgcctgctggcagaatggggctcggtggaaaatctgctcaagaaccttgatcgtgtgaaacctgatagcttacgccgcaagatcgaagcccacctggaagacttgcgtctgagtctggatcttgcgcgtattcgcaccgatctgccgttggaagtagactttaaagctctgcgtcgtcgcacacccgatttagaggggttacgcgcgttcctcgaacgtctggagtttggctccctgctgcatgaattcggtttgttgggcggagagaaaccgcgtgaagaagcaccatggccgccgcccgaaggtgcctttgtcggctttcttctgtcacgcaaagagccaatgtgggcggaactgttagctcttgcagccgccgcggaagggcgtgttcaccgcgcgacctctcctgtcgaggccctcgctgacctcaaagaagcacgtggtttcttggcgaaagatttagccgtgcttgcattacgcgaaggcgttgcgctcgatccgacggacgacccgcttttggtggcttatttgctcgatcctgcgaataccaacccggaaggtgtagcccgtcgttacggcggcgagtttactgaagatgcggcagaacgcgcgttgcttagcgaacgcctcttccagacgttatttccacgtctttcggagaaattactctggctctatcaggaagtcgaacgtccattgagtcgcgtgcttgcccatatggaggctcgcggtgtgcgcttagatgttccgttgttagaagcactcagcttcgagttggagaaagaactggaacgtcttgaaggcgaagtctttcgtttagcggggcatcccttcaatctcaactctcgcgaccaattggagaaagtgctctttgatgaattaggtttaacccctgtcggaaaaacagagaagaccggcaaacgttccactgctcagggagcattggaagcacttcgtggtgctcacccgatcgtcgacttgattttgcagtaccgcgagctcactaaactcaaaggcacctatattgatccgttacctcgtcttgttcatccacgtacgggtcgtttacacacccgcttcaatcaaacggcgacagccaccgggcgcttgtcgtcgagtgacccgaacctccagaatattccagtgcgcacgccgttaggccaacgcattcgtaaagcgtttgttgcggaagaaggttggttattacttgcggccgattactcccagatcgaacttcgtgtattggcgcatctctctggcgacgagaatcttaaacgcgtgtttcgcgaaggcaaggatattcacactgaaaccgcagcctggatgttcgggcttgacccagccttagtggaccccaagatgcgtcgtgccgccaagaccgtcaactttggcgtactctatggtatgtcagcacatcgtcttagtcaggaattgggcattgactacaaagaagctgaagcgtttatcgagcgctatttccaatcctttccgaaagttcgcgcgtggattgaacgtaccctcgaagaaggtcgcactcgcggctatgtggaaacgttattcgggcgtcgtcgctacgttccagatcttgcatctcgtgtccgctcagtgcgcgaagctgctgagcgtatggccttcaatatgcctgttcagggaacagcggcggacctcatgaagatcgccatggtgaaattgtttccgcgcttgaaacccttaggagcccaccttcttttacaggtgcatgatgaattggtcttggaagtacccgaggatcgcgcagaagaagccaaagcactcgtgaaagaggttatggaaaacgcgtatccgttagatgttccgttggaggtcgaagtgggtgtaggccgtgattggcttgaagcgaaacaagac

SEQ ID NO: 14 - protein, 844 aa, synthetic construct
  REGION 1..844: note = DNA Polymerase Variant
MHHHHHHGGSGMLPLFDLEEPPKRVLLVDGHHLAYRTFYALSLTTSRGEPVQMVYGFARSLLKALKEDGQAVVVVFDAKAPSFRHEAYEAYKAGRAPTPEDFPRQLALVKRLVDLLGLVRLEAPGYEADDVLGTLAKKAEREGMEVCILTGDRDFFQLLSEKVSVLLPDGTLVTPKDVQEKYGVPPERWVDFRALTGDRSDNIPGVAGIGEKTALRLLAEWGSVENLLKNLDRVKPDSLRRKIEAHLEDLRLSLDLARIRTDLPLEVDFKALRRRTPDLEGLRAFLERLEFGSLLHEFGLLGGEKPREEAPWPPPEGAFVGFLLSRKEPMWAELLALAAAAEGRVHRATSPVEALADLKEARGFLAKDLAVLALREGVALDPTDDPLLVAYLLDPANTNPEGVARRYGGEFTEDAAERALLSERLFQTLFPRLSEKLLWLYQEVERPLSRVLAHMEARGVRLDVPLLEALSFELEKELERLEGEVFRLAGHPFNLNSRDQLEKVLFDELGLTPVGKTEKTGKRSTAQGALEALRGAHPIVDLILQYRELTKLKGTYIDPLPRLVHPRTGRLHTRFNQTATATGRLSSSDPNLQNIPVRTPLGQRIRKAFVAEEGWLLLAADYSQIELRVLAHLSGDENLKRVFREGKDIHTETAAWMFGLDPALVDPKMRRAAKTVNFGVLYGMSAHRLSQELGIDYKEAEAFIERYFQSFPKVRAWIERTLEEGRTRGYVETLFGRRRYVPDLASRVRSVREAAERMAFNMPVQGTAADLMKIAMVKLFPRLKPLGAHLLLQVHDELVLEVPEDRAEEAKALVKEVMENAYPLDVPLEVEVGVGRDWLEAKQD

SEQ ID NO: 15 - DNA, 2532 bp, synthetic construct
  misc_feature 1..2532: note = DNA Polymerase Variant
  source 1..2532: mol_type = other DNA
atgcaccatcatcatcatcatggcggtagcggcatgttaccgctgtttgatttggaagaaccaccaaaacgcgtgctgcttgttgacggccatcatctggcgtatcgtaccttctacgcactgagccttacgacctcacgtggtgagcctgtccagatggtgtatgggtttgctcgctccctgctgaaagccctgaaggaagatggtcaagccgtagtagtggttttcgatgcgaaagcaccgtcgtttcgtcacgaagcgtacgaggcctataaagctggccgcgcaccgaccccggaagactttccgcgtcagttagcgctcgtcaaacgcctcgtggatttgctgggattagttcgcttggaagctcctggctacgaggcggacgacgtgctcggtacactggccaagaaagcagaacgtgaaggcatggaggtctgcattcttaccggtgatcgcgatttcttccagctgctgtctgagaaagtgagcgttttgctgcccgatggcacgttagtaaccccgaaagatgtccaagagaaatatggagttccgccagaacgttgggtggactttcgcgcactgactggtgatcgttcagacaacatcccgggcgttgccgggattggtgaaaagacggcgctgcgcctgctggcagaatggggctcggtggaaaatctgctcaagaaccttgatcgtgtgaaacctgatagcttacgccgcaagatcgaagcccacctggaagacttgcgtctgagtctggatcttgcgcgtattcgcaccgatctgccgttggaagtagactttaaagctctgcgtcgtcgcacacccgatttagaggggttacgcgcgttcctcgaagaactggagtttggctccctgctgcatgaattcggtttgttgggcggagagaaaccgcgtgaagaagcaccatggccgccgcccgaaggtgcctttgtcggctttcttctgtcacgcaaagagccaatgtgggcggaactgttagctcttgcagccgccgcggaagggcgtgttcaccgcgcgacctctcctgtcgaggccctcgctgacctcaaagaagcacgtggtttcttggcgaaagatttagccgtgcttgcattacgcgaaggcgttgcgctcgatccgacggacgacccgcttttggtggcttatttgctcgatcctgcgaataccaacccggaaggtgtagcccgtcgttacggcggcgagtttactgaagatgcggcagaacgcgcgttgcttagcgaacgcctcttccagacgttatttccacgtctttcggagaaattactctggctctatcaggaagtcgaacgtccattgagtcgcgtgcttgcccatatggaggctcgcggtgtgcgcttagatgttccgttgttagaagcactcagcttcgagttggagaaagaaatggaacgtcttgaaggcgaagtctttcgtttagcggggcatcccttcaatctcaactctcgcgaccaattggagaaagtgctctttgatgaattaggtttaacccctgtaggacgcacagagaagaccggcaaacgttccactgctcagggagcattggaagcacttcgtggtgctcacccgatcgtcgagttgattttgcagtaccgcgagctcactaaactcaaaaacacctatattgatccgttacctcgtcttgttcatccacgtacgggtcgtttacacacccgcttcaatcaaacggcgacagccaccgggcgcttgtcgtcgagtgacccgaacctccagaatattccagtgcgcacgccgttaggccaacgcattcgtaaagcgtttgttgcggaagaaggttggttattacttgcggccgattactcccagatcgaacttcgtgtattggcgcatctctctggcgacgagaatcttaaacgcgtgtttcgcgaaggcaaggatattcacactgaaaccgcagcctggatgttcgggcttgacccagccttagtggaccccaagatgcgtcgtgccgccaagaccgtcaactttggcgtactctatggtatgtcagcacatcgtcttagtcaggaattgggcattgactacaaagaagctgaagcgtttatcgagcgctatttccaatcctttccgaaagttcgcgcgtggattgaacgtaccctcgaagaaggtcgcactcgcggctatgtggaaacgttattcgggcgtcgtcgctacgttccagatcttgcatctcgtgtccgctcagtgcgcgaagctgctgagcgtatggccttcaatatgcctgttcagggaacagcggcggacctcatgaagatcgccatggtgaaattgtttccgcgcttgaaacccttaggagcccaccttcttttacaggtgcatgatgaattggtcttggaagtacccgaggatcgcgcagaagaagccaaagcactcgtgaaagaggttatggaaaacgcgtatccgttagatgttccgttggaggtcgaagtgggtgtaggccgtgattggcttgaagcgaaacaagac

SEQ ID NO: 16 - protein, 844 aa, synthetic construct
  REGION 1..844: note = DNA Polymerase Variant
MHHHHHHGGSGMLPLFDLEEPPKRVLLVDGHHLAYRTFYALSLTTSRGEPVQMVYGFARSLLKALKEDGQAVVVVFDAKAPSFRHEAYEAYKAGRAPTPEDFPRQLALVKRLVDLLGLVRLEAPGYEADDVLGTLAKKAEREGMEVCILTGDRDFFQLLSEKVSVLLPDGTLVTPKDVQEKYGVPPERWVDFRALTGDRSDNIPGVAGIGEKTALRLLAEWGSVENLLKNLDRVKPDSLRRKIEAHLEDLRLSLDLARIRTDLPLEVDFKALRRRTPDLEGLRAFLEELEFGSLLHEFGLLGGEKPREEAPWPPPEGAFVGFLLSRKEPMWAELLALAAAAEGRVHRATSPVEALADLKEARGFLAKDLAVLALREGVALDPTDDPLLVAYLLDPANTNPEGVARRYGGEFTEDAAERALLSERLFQTLFPRLSEKLLWLYQEVERPLSRVLAHMEARGVRLDVPLLEALSFELEKEMERLEGEVFRLAGHPFNLNSRDQLEKVLFDELGLTPVGRTEKTGKRSTAQGALEALRGAHPIVELILQYRELTKLKNTYIDPLPRLVHPRTGRLHTRFNQTATATGRLSSSDPNLQNIPVRTPLGQRIRKAFVAEEGWLLLAADYSQIELRVLAHLSGDENLKRVFREGKDIHTETAAWMFGLDPALVDPKMRRAAKTVNFGVLYGMSAHRLSQELGIDYKEAEAFIERYFQSFPKVRAWIERTLEEGRTRGYVETLFGRRRYVPDLASRVRSVREAAERMAFNMPVQGTAADLMKIAMVKLFPRLKPLGAHLLLQVHDELVLEVPEDRAEEAKALVKEVMENAYPLDVPLEVEVGVGRDWLEAKQD

SEQ ID NO: 17 - DNA, 2532 bp, synthetic construct
  misc_feature 1..2532: note = DNA Polymerase Variant
  source 1..2532: mol_type = other DNA
atgcaccatcatcatcatcatggcggtagcggcatgttaccgctgtttgatttggaagaaccaccaaaacgcgtgctgcttgttgacggccatcatctggcgtatcgtaccttctacgcactgagccttacgacctcacgtggtgagcctgtccagatggtgtatgggtttgctcgctccctgctgaaagccctgaaggaagatggtcaagccgtagtagtggttttcgatgcgaaagcaccgtcgtttcgtcacgaagcgtacgaggcctataaagctggccgcgcaccgaccccggaagactttccgcgtcagttagcgctcgtcaaacgcctcgtggatttgctgggattagttcgcttggaagctcctggctacgaggcggacgacgtgctcggtacactggccaagaaagcagaacgtgaaggcatggaggtctgcattcttaccggtgatcgcgatttcttccagctgctgtctgagaaagtgagcgttttgctgcccgatggcacgttagtaaccccgaaagatgtccaagagaaatatggagttccgccagaacgttgggtggactttcgcgcactgactggtgatcgttcagacaacatcccgggcgttgccgggattggtgaaaagacggcgctgcgcctgctggcagaatggggctcggtggaaaatctgctcaagaaccttgatcgtgtgaaacctgatagcttacgccgcaagatcgaagcccacctggaagacttgcgtctgagtctggatcttgcgcgtattcgcaccgatctgccgttggaagtagactttaaagctctgcgtcgtcgcacacccgatttagaggggttacgcgcgttcctcgaagaactggagtttggctccctgctgcatgaattcggtttgttgggcggagagaaaccgcgtgaagaagcaccatggccgccgcccgaaggtgcctttgtcggctttcttctgtcacgcaaagagccaatgtgggcggaactgttagctcttgcagccgccgcggaagggcgtgttcaccgcgcgacctctcctgtcgaggccctcgctgacctcaaagaagcacgtggtttcttggcgaaagatttagccgtgcttgcattacgcgaaggcgttgcgctcgatccgacggacgacccgcttttggtggcttatttgctcgatcctgcgaataccaacccggaaggtgtagcccgtcgttacggcggcgagtttactgaagatgcggcagaacgcgcgttgcttagcgaacgcctcttccagacgttatttccacgtctttcggagaaattactctggctctatcaggaagtcgaacgtccattgagtcgcgtgcttgcccatatggaggctcgcggtgtgcgcttagatgttccgttgttagaagcactcagcttcgagttggagaaagaactggaacgtcttgaaggcgaagtctttcgtttagcggggcatcccttcaatctcaactctcgcgaccaattggagaaagtgctctttgatgaattaggtttaacccctgtaggacgcacagagaagaccggcaaacgttccactgctcagggagcattggaagcacttcgtggtgctcacccgatcgtcgagttgattttgcagtaccgcgagctcagcaaactcaaatcaacctatcttgatccgttacctcgtcttgttcatccacgtacgggtcgtttacacacccgcttcaatcaaacggcgacagccaccgggcgcttgtcgtcgagtgacccgaacctccagaatattccagtgcgcacgccgttaggccaacgcattcgtaaagcgtttgttgcggaagaaggttggttattacttgcggccgattactcccagatcgaacttcgtgtattggcgcatctctctggcgacgagaatcttaaacgcgtgtttcgcgaaggcaaggatattcacactgaaaccgcagcctggatgttcgggcttgacccagccttagtggaccccaagatgcgtcgtgccgccaagaccgtcaactttggcgtactctatggtatgtcagcacatcgtcttagtcaggaattgggcattgactacaaagaagctgaagcgtttatcgagcgctatttccaatcctttccgaaagttcgcgcgtggattgaacgtaccctcgaagaaggtcgcactcgcggctatgtggaaacgttattcgggcgtcgtcgctacgttccagatcttgcatctcgtgtccgctcagtgcgcgaagctgctgagcgtatggccttcaatatgcctgttcagggaacagcggcggacctcatgaagatcgccatggtgaaattgtttccgcgcttgaaacccttaggagcccaccttcttttacaggtgcatgatgaattggtcttggaagtacccgaggatcgcgcagaagaagccaaagcactcgtgaaagaggttatggaaaacgcgtatccgttagatgttccgttggaggtcgaagtgggtgtaggccgtgattggcttgaagcgaaacaagac

SEQ ID NO: 18 - protein, 844 aa, synthetic construct
  REGION 1..844: note = DNA Polymerase Variant
MHHHHHHGGSGMLPLFDLEEPPKRVLLVDGHHLAYRTFYALSLTTSRGEPVQMVYGFARSLLKALKEDGQAVVVVFDAKAPSFRHEAYEAYKAGRAPTPEDFPRQLALVKRLVDLLGLVRLEAPGYEADDVLGTLAKKAEREGMEVCILTGDRDFFQLLSEKVSVLLPDGTLVTPKDVQEKYGVPPERWVDFRALTGDRSDNIPGVAGIGEKTALRLLAEWGSVENLLKNLDRVKPDSLRRKIEAHLEDLRLSLDLARIRTDLPLEVDFKALRRRTPDLEGLRAFLEELEFGSLLHEFGLLGGEKPREEAPWPPPEGAFVGFLLSRKEPMWAELLALAAAAEGRVHRATSPVEALADLKEARGFLAKDLAVLALREGVALDPTDDPLLVAYLLDPANTNPEGVARRYGGEFTEDAAERALLSERLFQTLFPRLSEKLLWLYQEVERPLSRVLAHMEARGVRLDVPLLEALSFELEKELERLEGEVFRLAGHPFNLNSRDQLEKVLFDELGLTPVGRTEKTGKRSTAQGALEALRGAHPIVELILQYRELSKLKSTYLDPLPRLVHPRTGRLHTRFNQTATATGRLSSSDPNLQNIPVRTPLGQRIRKAFVAEEGWLLLAADYSQIELRVLAHLSGDENLKRVFREGKDIHTETAAWMFGLDPALVDPKMRRAAKTVNFGVLYGMSAHRLSQELGIDYKEAEAFIERYFQSFPKVRAWIERTLEEGRTRGYVETLFGRRRYVPDLASRVRSVREAAERMAFNMPVQGTAADLMKIAMVKLFPRLKPLGAHLLLQVHDELVLEVPEDRAEEAKALVKEVMENAYPLDVPLEVEVGVGRDWLEAKQD

SEQ ID NO: 19 - DNA, 2532 bp, synthetic construct
  misc_feature 1..2532: note = DNA Polymerase Variant
  source 1..2532: mol_type = other DNA
atgcaccatcatcatcatcatggcggtagcggcatgttaccgctgtttgatttggaagaaccaccaaaacgcgtgctgcttgttgacggccatcatctggcgtatcgtaccttctacgcactgagccttacgacctcacgtggtgagcctgtccagatggtgtatgggtttgctcgctccctgctgaaagccctgaaggaagatggtcaagccgtagtagtggttttcgatgcgaaagcaccgtcgtttcgtcacgaagcgtacgaggcctataaagctggccgcgcaccgaccccggaagactttccgcgtcagttagcgctcgtcaaacgcctcgtggatttgctgggattagttcgcttggaagctcctggctacgaggcggacgacgtgctcggtacactggccaagaaagcagaacgtgaaggcatggaggtctgcattcttaccggtgatcgcgatttcttccagctgctgtctgagaaagtgagcgttttgctgcccgatggcacgttagtaaccccgaaagatgtccaagagaaatatggagttccgccagaacgttgggtggactttcgcgcactgactggtgatcgttcagacaacatcccgggcgttgccgggattggtgaaaagacggcgctgcgcctgctggcagaatggggctcggtggaaaatctgctcaagaaccttgatcgtgtgaaacctgatagcttacgccgcaagatcgaagcccacctggaagacttgcgtctgagtctggatcttgcgcgtattcgcaccgatctgccgttggaagtagactttaaagctctgcgtcgtcgcacacccgatttagaggggttacgcgcgttcctcgaagaactggagtttggctccctgctgcatgaattcggtttgttgggcggagagaaaccgcgtgaagaagcaccatggccgccgcccgaaggtgcctttgtcggctttcttctgtcacgcaaagagccaatgtgggcggaactgttagctcttgcagccgccgcggaagggcgtgttcaccgcgcgacctctcctgtcgaggccctcgctgacctcaaagaagcacgtggtttcttggcgaaagatttagccgtgcttgcattacgcgaaggcgttgcgctcgatccgacggacgacccgcttttggtggcttatttgctcgatcctgcgaataccactccggaaggtgtagcccgtcgttacggcggcgagtttactgaagatgcggcagaacgcgcgttgcttagcgaacgcctcttccagacgttatttccacgtctttcggagaaattactctggctctatcaggaagtcgaacgtccattgagtcgcgtgcttgcccatatggaggctcgcggtgtgcgcttagatgttccgttgttagaagcactcagcttcgagttggagaaagaaatggaacgtcttgaaggcgaagtctttcgtttagcggggcatcccttcaatctcaactctcgcgaccaattggagaaagtgctctttgatgaattaggtttaacccctgtaggacgcacagagaagaccggcaaacgttccactgctcagggagcattggaagcacttcgtggtgctcacccgatcgtcgaattgattttgcagtaccgcgagctcagtaaactcaaaagcacctatctggatccgttacctcgtcttgttcatccacgtacgggtcgtttacacacccgcttcaatcaaacggcgacagccaccgggcgcttgtcgtcgagtgacccgaacctccagaatattccagtgcgcacgccgttaggccaacgcattcgtaaagcgtttgttgcggaagaaggttggttattacttgcggccgattactcccagatcgaacttcgtgtattggcgcatctctctggcgacgagaatcttaaacgcgtgtttcgcgaaggcaaggatattcacactgaaaccgcagcctggatgttcgggcttgacccagccttagtggaccccaagatgcgtcgtgccgccaagaccgtcaactttggcgtactctatggtatgtcagcacatcgtcttagtcaggaattgggcattgactacaaagaagctgaagcgtttatcgagcgctatttccaatcctttccgaaagttcgcgcgtggattgaacgtaccctcgaagaaggtcgcactcgcggctatgtggaaacgttattcgggcgtcgtcgctacgttccagatcttgcatctcgtgtccgctcagtgcgcgaagctgctgagcgtatggccttcaatatgcctgttcagggaacagcggcggacctcatgaagatcgccatggtgaaattgtttccgcgcttgaaacccttaggagcccaccttcttttacaggtgcatgatgaattggtcttggaagtacccgaggatcgcgcagaagaagccaaagcactcgtgaaagaggttatggaaaacgcgtatccgttagatgttccgttggaggtcgaagtgggtgtaggccgtgattggcttgaagcgaaacaagac

SEQ ID NO: 20 - protein, 844 aa, synthetic construct
  REGION 1..844: note = DNA Polymerase Variant
MHHHHHHGGSGMLPLFDLEEPPKRVLLVDGHHLAYRTFYALSLTTSRGEPVQMVYGFARSLLKALKEDGQAVVVVFDAKAPSFRHEAYEAYKAGRAPTPEDFPRQLALVKRLVDLLGLVRLEAPGYEADDVLGTLAKKAEREGMEVCILTGDRDFFQLLSEKVSVLLPDGTLVTPKDVQEKYGVPPERWVDFRALTGDRSDNIPGVAGIGEKTALRLLAEWGSVENLLKNLDRVKPDSLRRKIEAHLEDLRLSLDLARIRTDLPLEVDFKALRRRTPDLEGLRAFLEELEFGSLLHEFGLLGGEKPREEAPWPPPEGAFVGFLLSRKEPMWAELLALAAAAEGRVHRATSPVEALADLKEARGFLAKDLAVLALREGVALDPTDDPLLVAYLLDPANTTPEGVARRYGGEFTEDAAERALLSERLFQTLFPRLSEKLLWLYQEVERPLSRVLAHMEARGVRLDVPLLEALSFELEKEMERLEGEVFRLAGHPFNLNSRDQLEKVLFDELGLTPVGRTEKTGKRSTAQGALEALRGAHPIVELILQYRELSKLKSTYLDPLPRLVHPRTGRLHTRFNQTATATGRLSSSDPNLQNIPVRTPLGQRIRKAFVAEEGWLLLAADYSQIELRVLAHLSGDENLKRVFREGKDIHTETAAWMFGLDPALVDPKMRRAAKTVNFGVLYGMSAHRLSQELGIDYKEAEAFIERYFQSFPKVRAWIERTLEEGRTRGYVETLFGRRRYVPDLASRVRSVREAAERMAFNMPVQGTAADLMKIAMVKLFPRLKPLGAHLLLQVHDELVLEVPEDRAEEAKALVKEVMENAYPLDVPLEVEVGVGRDWLEAKQD

SEQ ID NO: 21 - DNA, 2532 bp, synthetic construct
  misc_feature 1..2532: note = DNA Polymerase Variant
  source 1..2532: mol_type = other DNA
atgcaccatcatcatcatcatggcggtagcggcatgttaccgctgtttgatttggaagaaccaccaaaacgcgtgctgcttgttgacggccatcatctggcgtatcgtaccttctacgcactgagccttacgacctcacgtggtgagcctgtccagatggtgtatgggtttgctcgctccctgctgaaagccctgaaggaagatggtcaagccgtagtagtggttttcgatgcgaaagcaccgtcgtttcgtcacgaagcgtacgaggcctataaagctggccgcgcaccgaccccggaagactttccgcgtcagttagcgctcgtcaaacgcctcgtggatttgctgggattagttcgcttggaagctcctggctacgaggcggacgacgtgctcggtacactggccaagaaagcagaacgtgaaggcatggaggtctgcattcttaccggtgatcgcgatttcttccagctgctgtctgagaaagtgagcgttttgctgcccgatggcacgttagtaaccccgaaagatgtccaagagaaatatggagttccgccagaacgttgggtggactttcgcgcactgactggtgatcgttcagacaacatcccgggcgttgccgggattggtgaaaagacggcgctgcgcctgctggcagaatggggctcggtggaaaatctgctcaagaaccttgatcgtgtgaaacctgatagcttacgccgcaagatcgaagcccacctggaagacttgcgtctgagtctggatcttgcgcgtattcgcaccgatctgccgttggaagtagactttaaagctctgcgtcgtcgcacacccgatttagaggggttacgcgcgttcctcgaagaactggagtttggctccctgctgcatgaattcggtttgttgggcggagagaaaccgcgtgaagaagcaccatggccgccgcccgaaggtgcctttgtcggctttcttctgtcacgcaaagagccaatgtgggcggaactgttagctcttgcagccgccgcggaagggcgtgttcaccgcgcgacctctcctgtcgaggccctcgctgacctcaaagaagcacgtggtttcttggcgaaagatttagccgtgcttgcattacgcgaaggcgttgcgctcgatccgacggacgacccgcttttggtggcttatttgctcgatcctgcgaataccaatccggaaggtgtagcccgtcgttacggcggcgagtttactgaagatgcggcagaacgcgcgttgcttagcgaacgcctcttccagacgttatttccacgtctttcggagaaattactctggctctatcaggaagtcgaacgtccattgagtcgcgtgcttgcccatatggaggctcgcggtgtgcgcttagatgttccgttgttagaagcactcagcttcgagttggagaaagaaatggaacgtcttgaaggcgaagtctttcgtttagcggggcatcccttcaatctcaactctcgcgaccaattggagaaagtgctctttgatgaattaggtttaacccctatcggaaaaacagagaagaccggcaaacgttccactgctcagggagcattggaagcacttcgtggtgctcacccgatcgtcgagttgattttgcagtaccgcgagctcagcaaactcaaatcaacctatcttgatccgttacctcgtcttgttcatccacgtacgggtcgtttacacacccgcttcaatcaaacggcgacagccaccgggcgcttgtcgtcgagtgacccgaacctccagaatattccagtgcgcacgccgttaggccaacgcattcgtaaagcgtttgttgcggaagaaggttggttattacttgcggccgattactcccagatcgaacttcgtgtattggcgcatctctctggcgacgagaatcttaaacgcgtgtttcgcgaaggcaaggatattcacactgaaaccgcagcctggatgttcgggcttgacccagccttagtggaccccaagatgcgtcgtgccgccaagaccgtcaactttggcgtactctatggtatgtcagcacatcgtcttagtcaggaattgggcattgactacaaagaagctgaagcgtttatcgagcgctatttccaatcctttccgaaagttcgcgcgtggattgaacgtaccctcgaagaaggtcgcactcgcggctatgtggaaacgttattcgggcgtcgtcgctacgttccagatcttgcatctcgtgtccgctcagtgcgcgaagctgctgagcgtatggccttcaatatgcctgttcagggaacagcggcggacctcatgaagatcgccatggtgaaattgtttccgcgcttgaaacccttaggagcccaccttcttttacaggtgcatgatgaattggtcttggaagtacccgaggatcgcgcagaagaagccaaagcactcgtgaaagaggttatggaaaacgcgtatccgttagatgttccgttggaggtcgaagtgggtgtaggccgtgattggcttgaagcgaaacaagac

SEQ ID NO: 22 - protein, 844 aa, synthetic construct
  REGION 1..844: note = DNA Polymerase Variant
MHHHHHHGGSGMLPLFDLEEPPKRVLLVDGHHLAYRTFYALSLTTSRGEPVQMVYGFARSLLKALKEDGQAVVVVFDAKAPSFRHEAYEAYKAGRAPTPEDFPRQLALVKRLVDLLGLVRLEAPGYEADDVLGTLAKKAEREGMEVCILTGDRDFFQLLSEKVSVLLPDGTLVTPKDVQEKYGVPPERWVDFRALTGDRSDNIPGVAGIGEKTALRLLAEWGSVENLLKNLDRVKPDSLRRKIEAHLEDLRLSLDLARIRTDLPLEVDFKALRRRTPDLEGLRAFLEELEFGSLLHEFGLLGGEKPREEAPWPPPEGAFVGFLLSRKEPMWAELLALAAAAEGRVHRATSPVEALADLKEARGFLAKDLAVLALREGVALDPTDDPLLVAYLLDPANTNPEGVARRYGGEFTEDAAERALLSERLFQTLFPRLSEKLLWLYQEVERPLSRVLAHMEARGVRLDVPLLEALSFELEKEMERLEGEVFRLAGHPFNLNSRDQLEKVLFDELGLTPIGKTEKTGKRSTAQGALEALRGAHPIVELILQYRELSKLKSTYLDPLPRLVHPRTGRLHTRFNQTATATGRLSSSDPNLQNIPVRTPLGQRIRKAFVAEEGWLLLAADYSQIELRVLAHLSGDENLKRVFREGKDIHTETAAWMFGLDPALVDPKMRRAAKTVNFGVLYGMSAHRLSQELGIDYKEAEAFIERYFQSFPKVRAWIERTLEEGRTRGYVETLFGRRRYVPDLASRVRSVREAAERMAFNMPVQGTAADLMKIAMVKLFPRLKPLGAHLLLQVHDELVLEVPEDRAEEAKALVKEVMENAYPLDVPLEVEVGVGRDWLEAKQD

SEQ ID NO: 23 - DNA, 2532 bp, synthetic construct
  misc_feature 1..2532: note = DNA Polymerase Variant
  source 1..2532: mol_type = other DNA
atgcaccatcatcatcatcatggcggtagcggcatgttaccgctgtttgatttggaagaaccaccaaaacgcgtgctgcttgttgacggccatcatctggcgtatcgtaccttctacgcactgagccttacgacctcacgtggtgagcctgtccagatggtgtatgggtttgctcgctccctgctgaaagccctgaaggaagatggtcaagccgtagtagtggttttcgatgcgaaagcaccgtcgtttcgtcacgaagcgtacgaggcctataaagctggccgcgcaccgaccccggaagactttccgcgtcagttagcgctcgtcaaacgcctcgtggatttgctgggattagttcgcttggaagctcctggctacgaggcggacgacgtgctcggtacactggccaagaaagcagaacgtgaaggcatggaggtctgcattcttaccggtgatcgcgatttcttccagctgctgtctgagaaagtgagcgttttgctgcccgatggcacgttagtaaccccgaaagatgtccaagagaaatatggagttccgccagaacgttgggtggactttcgcgcactgactggtgatcgttcagacaacatcccgggcgttgccgggattggtgaaaagacggcgctgcgcctgctggcagaatggggctcggtggaaaatctgctcaagaaccttgatcgtgtgaaacctgatagcttacgccgcaagatcgaagcccacctggaagacttgcgtctgagtctggatcttgcgcgtattcgcaccgatctgccgttggaagtagactttaaagctctgcgtcgtcgcacacccgatttagaggggttacgcgcgttcctcgaagaactggagtttggctccctgctgcatgaattcggtttgttgggcggagagaaaccgcgtgaagaagcaccatggccgccgcccgaaggtgcctttgtcggctttcttctgtcacgcaaagagccaatgtgggcggaactgttagctcttgcagccgccgcggaagggcgtgttcaccgcgcgacctctcctgtcgaggccctcgctgacctcaaagaagcacgtggtttcttggcgaaagatttagccgtgcttgcattacgcgaaggcgttgcgctcgatccgacggacgacccgcttttggtggcttatttgctcgatcctgcgaataccactccggaaggtgtagcccgtcgttacggcggcgagtttactgaagatgcggcagaacgcgcgttgcttagcgaacgcctcttccagacgttatttccacgtctttcggagaaattactctggctctatcaggaagtcgaacgtccattgagtcgcgtgcttgcccatatggaggctcgcggtgtgcgcttagatgttccgttgttagaagcactcagcttcgagttggagaaagaaatggaacgtcttgaaggcgaagtctttcgtttagcggggcatcccttcaatctcaactctcgcgaccaattggagaaagtgctctttgatgaattaggtttaacccctgtcggaaaaacagagaagaccggcaaacgttccacttcgcaagccgtcttggaagcacttcgtggtgctcacccgatcgtcgaattgattttgcagtaccgcgagctcagtaaactcaaaaacacctatattgatccgttacctcgtcttgttcatccacgtacgggtcgtttacacacccgcttcaatcaaacggcgacagccaccgggcgcttgtcgtcgagtgacccgaacctccagaatattccagtgcgcacgccgttaggccaacgcattcgtaaagcgtttgttgcggaagaaggttggttattacttgcggccgattactcccagatcgaacttcgtgtattggcgcatctctctggcgacgagaatcttaaacgcgtgtttcgcgaaggcaaggatattcacactgaaaccgcagcctggatgttcgggcttgacccagccttagtggaccccaagatgcgtcgtgccgccaagaccgtcaactttggcgtactctatggtatgtcagcacatcgtcttagtcaggaattgggcattgactacaaagaagctgaagcgtttatcgagcgctatttccaatcctttccgaaagttcgcgcgtggattgaacgtaccctcgaagaaggtcgcactcgcggctatgtggaaacgttattcgggcgtcgtcgctacgttccagatcttgcatctcgtgtccgctcagtgcgcgaagctgctgagcgtatggccttcaatatgcctgttcagggaacagcggcggacctcatgaagatcgccatggtgaaattgtttccgcgcttgaaacccttaggagcccaccttcttttacaggtgcatgatgaattggtcttggaagtacccgaggatcgcgcagaagaagccaaagcactcgtgaaagaggttatggaaaacgcgtatccgttagatgttccgttggaggtcgaagtgggtgtaggccgtgattggcttgaagcgaaacaagac

SEQ ID NO: 24 - protein, 844 aa, synthetic construct
  REGION 1..844: note = DNA Polymerase Variant
MHHHHHHGGSGMLPLFDLEEPPKRVLLVDGHHLAYRTFYALSLTTSRGEPVQMVYGFARSLLKALKEDGQAVVVVFDAKAPSFRHEAYEAYKAGRAPTPEDFPRQLALVKRLVDLLGLVRLEAPGYEADDVLGTLAKKAEREGMEVCILTGDRDFFQLLSEKVSVLLPDGTLVTPKDVQEKYGVPPERWVDFRALTGDRSDNIPGVAGIGEKTALRLLAEWGSVENLLKNLDRVKPDSLRRKIEAHLEDLRLSLDLARIRTDLPLEVDFKALRRRTPDLEGLRAFLEELEFGSLLHEFGLLGGEKPREEAPWPPPEGAFVGFLLSRKEPMWAELLALAAAAEGRVHRATSPVEALADLKEARGFLAKDLAVLALREGVALDPTDDPLLVAYLLDPANTTPEGVARRYGGEFTEDAAERALLSERLFQTLFPRLSEKLLWLYQEVERPLSRVLAHMEARGVRLDVPLLEALSFELEKEMERLEGEVFRLAGHPFNLNSRDQLEKVLFDELGLTPVGKTEKTGKRSTSQAVLEALRGAHPIVELILQYRELSKLKNTYIDPLPRLVHPRTGRLHTRFNQTATATGRLSSSDPNLQNIPVRTPLGQRIRKAFVAEEGWLLLAADYSQIELRVLAHLSGDENLKRVFREGKDIHTETAAWMFGLDPALVDPKMRRAAKTVNFGVLYGMSAHRLSQELGIDYKEAEAFIERYFQSFPKVRAWIERTLEEGRTRGYVETLFGRRRYVPDLASRVRSVREAAERMAFNMPVQGTAADLMKIAMVKLFPRLKPLGAHLLLQVHDELVLEVPEDRAEEAKALVKEVMENAYPLDVPLEVEVGVGRDWLEAKQD

SEQ ID NO: 25 - DNA, 2532 bp, synthetic construct
  misc_feature 1..2532: note = DNA Polymerase Variant
  source 1..2532: mol_type = other DNA
atgcaccatcatcatcatcatggcggtagcggcatgttaccgctgtttgatttggaagaaccaccaaaacgcgtgctgcttgttgacggccatcatctggcgtatcgtaccttctacgcactgagccttacgacctcacgtggtgagcctgtccagatggtgtatgggtttgctcgctccctgctgaaagccctgaaggaagatggtcaagccgtagtagtggttttcgatgcgaaagcaccgtcgtttcgtcacgaagcgtacgaggcctataaagctggccgcgcaccgaccccggaagactttccgcgtcagttagcgctcgtcaaacgcctcgtggatttgctgggattagttcgcttggaagctcctggctacgaggcggacgacgtgctcggtacactggccaagaaagcagaacgtgaaggcatggaggtctgcattcttaccggtgatcgcgatttcttccagctgctgtctgagaaagtgagcgttttgctgcccgatggcacgttagtaaccccgaaagatgtccaagagaaatatggagttccgccagaacgttgggtggactttcgcgcactgactggtgatcgttcagacaacatcccgggcgttgccgggattggtgaaaagacggcgctgcgcctgctggcagaatggggctcggtggaaaatctgctcaagaaccttgatcgtgtgaaacctgatagcttacgccgcaagatcgaagcccacctggaagacttgcgtctgagtctggatcttgcgcgtattcgcaccgatctgccgttggaagtagactttaaagctctgcgtcgtcgcacacccgatttagaggggttacgcgcgttcctcgaagaactggagtttggctccctgctgcatgaattcggtttgttgggcggagagaaaccgcgtgaagaagcaccatggccgccgcccgaaggtgcctttgtcggctttcttctgtcacgcaaagagccaatgtgggcggaactgttagctcttgcagccgccgcggaagggcgtgttcaccgcgcgacctctcctgtcgaggccctcgctgacctcaaagaagcacgtggtttcttggcgaaagatttagccgtgcttgcattacgcgaaggcgttgcgctcgatccgacggacgacccgcttttggtggcttatttgctcgatcctgcgaataccaatccggaaggtgtagcccgtcgttacggcggcgagtttactgaagatgcggcagaacgcgcgttgcttagcgaacgcctcttccagacgttatttccacgtctttcggagaaattactctggctctatcaggaagtcgaacgtccattgagtcgcgtgcttgcccatatggaggctcgcggtgtgcgcttagatgttccgttgttagaagcactcagcttcgagttggagaaagaactggaacgtcttgaaggcgaagtctttcgtttagcggggcatcccttcaatctcaactctcgcgaccaattggagaaagtgctctttgatgaattaggtttaacccctgtcggaaaaacagagaagaccggcaaacgttccactgctcagggagcattggaagcacttcgtggtgctcacccgatcgtcgacttgattttgcagtaccgcgagctcagtaaactcaaaagcacctatctggatccgttacctcgtcttgttcatccacgtacgggtcgtttacacacccgcttcaatcaaacggcgacagccaccgggcgcttgtcgtcgagtgacccgaacctccagaatattccagtgcgcacgccgttaggccaacgcattcgtaaagcgtttgttgcggaagaaggttggttattacttgcggccgattactcccagatcgaacttcgtgtattggcgcatctctctggcgacgagaatcttaaacgcgtgtttcgcgaaggcaaggatattcacactgaaaccgcagcctggatgttcgggcttgacccagccttagtggaccccaagatgcgtcgtgccgccaagaccgtcaactttggcgtactctatggtatgtcagcacatcgtcttagtcaggaattgggcattgactacaaagaagctgaagcgtttatcgagcgctatttccaatcctttccgaaagttcgcgcgtggattgaacgtaccctcgaagaaggtcgcactcgcggctatgtggaaacgttattcgggcgtcgtcgctacgttccagatcttgcatctcgtgtccgctcagtgcgcgaagctgctgagcgtatggccttcaatatgcctgttcagggaacagcggcggacctcatgaagatcgccatggtgaaattgtttccgcgcttgaaacccttaggagcccaccttcttttacaggtgcatgatgaattggtcttggaagtacccgaggatcgcgcagaagaagccaaagcactcgtgaaagaggttatggaaaacgcgtatccgttagatgttccgttggaggtcgaagtgggtgtaggccgtgattggcttgaagcgaaacaagac

SEQ ID NO: 26 - protein, 844 aa, synthetic construct
  REGION 1..844: note = DNA Polymerase Variant
MHHHHHHGGSGMLPLFDLEEPPKRVLLVDGHHLAYRTFYALSLTTSRGEPVQMVYGFARSLLKALKEDGQAVVVVFDAKAPSFRHEAYEAYKAGRAPTPEDFPRQLALVKRLVDLLGLVRLEAPGYEADDVLGTLAKKAEREGMEVCILTGDRDFFQLLSEKVSVLLPDGTLVTPKDVQEKYGVPPERWVDFRALTGDRSDNIPGVAGIGEKTALRLLAEWGSVENLLKNLDRVKPDSLRRKIEAHLEDLRLSLDLARIRTDLPLEVDFKALRRRTPDLEGLRAFLEELEFGSLLHEFGLLGGEKPREEAPWPPPEGAFVGFLLSRKEPMWAELLALAAAAEGRVHRATSPVEALADLKEARGFLAKDLAVLALREGVALDPTDDPLLVAYLLDPANTNPEGVARRYGGEFTEDAAERALLSERLFQTLFPRLSEKLLWLYQEVERPLSRVLAHMEARGVRLDVPLLEALSFELEKELERLEGEVFRLAGHPFNLNSRDQLEKVLFDELGLTPVGKTEKTGKRSTAQGALEALRGAHPIVDLILQYRELSKLKSTYLDPLPRLVHPRTGRLHTRFNQTATATGRLSSSDPNLQNIPVRTPLGQRIRKAFVAEEGWLLLAADYSQIELRVLAHLSGDENLKRVFREGKDIHTETAAWMFGLDPALVDPKMRRAAKTVNFGVLYGMSAHRLSQELGIDYKEAEAFIERYFQSFPKVRAWIERTLEEGRTRGYVETLFGRRRYVPDLASRVRSVREAAERMAFNMPVQGTAADLMKIAMVKLFPRLKPLGAHLLLQVHDELVLEVPEDRAEEAKALVKEVMENAYPLDVPLEVEVGVGRDWLEAKQD

SEQ ID NO: 27 - DNA, 2532 bp, synthetic construct
  misc_feature 1..2532: note = DNA Polymerase Variant
  source 1..2532: mol_type = other DNA
atgcaccatcatcatcatcatggcggtagcggcatgttaccgctgtttgatttggaagaaccaccaaaacgcgtgctgcttgttgacggccatcatctggcgtatcgtaccttctacgcactgagccttacgacctcacgtggtgagcctgtccagatggtgtatgggtttgctcgctccctgctgaaagccctgaaggaagatggtcaagccgtagtagtggttttcgatgcgaaagcaccgtcgtttcgtcacgaagcgtacgaggcctataaagctggccgcgcaccgaccccggaagactttccgcgtcagttagcgctcgtcaaacgcctcgtggatttgctgggattagttcgcttggaagctcctggctacgaggcggacgacgtgctcggtacactggccaagaaagcagaacgtgaaggcatggaggtctgcattcttaccggtgatcgcgatttcttccagctgctgtctgagaaagtgagcgttttgctgcccgatggcacgttagtaaccccgaaagatgtccaagagaaatatggagttccgccagaacgttgggtggactttcgcgcactgactggtgatcgttcagacaacatcccgggcgttgccgggattggtgaaaagacggcgctgcgcctgctggcagaatggggctcggtggaaaatctgctcaagaaccttgatcgtgtgaaacctgatagcttacgccgcaagatcgaagcccacctggaagacttgcgtctgagtctggatcttgcgcgtattcgcaccgatctgccgttggaagtagactttaaagctctgcgtcgtcgcacacccgatttagaggggttacgcgcgttcctcgaagaactggagtttggctccctgctgcatgaattcggtttgttgggcggagagaaaccgcgtgaagaagcaccatggccgccgcccgaaggtgcctttgtcggctttcttctgtcacgcaaagagccaatgtgggcggaactgttagctcttgcagccgccgcggaagggcgtgttcaccgcgcgacctctcctgtcgaggccctcgctgacctcaaagaagcacgtggtttcttggcgaaagatttagccgtgcttgcattacgcgaaggcgttgcgctcgatccgacggacgacccgcttttggtggcttatttgctcgatcctgcgaataccaatccggaaggtgtagcccgtcgttacggcggcgagtttactgaagatgcggcagaacgcgcgttgcttagcgaacgcctcttccagacgttatttccacgtctttcggagaaattactctggctctatcaggaagtcgaacgtccattgagtcgcgtgcttgcccatatggaggctcgcggtgtgcgcttagatgttccgttgttagaagcactcagcttcgagttggagaaagaaatcgaacgtcttgaaggcgaagtctttcgtttagcggggcatcccttcaatctcaactctcgcgaccaattggagaaagtgctctttgatgaattaggtttaacccctgtaggacgcacagagaagaccggcaaacgttccactgctcagggagcattggaagcacttcgtggtgctcacccgatcgtcgacttgattttgcagtaccgcgagctcagcaaactcaaatcaacctatcttgatccgttacctcgtcttgttcatccacgtacgggtcgtttacacacccgcttcaatcaaacggcgacagccaccgggcgcttgtcgtcgagtgacccgaacctccagaatattccagtgcgcacgccgttaggccaacgcattcgtaaagcgtttgttgcggaagaaggttggttattacttgcggccgattactcccagatcgaacttcgtgtattggcgcatctctctggcgacgagaatcttaaacgcgtgtttcgcgaaggcaaggatattcacactgaaaccgcagcctggatgttcgggcttgacccagccttagtggaccccaagatgcgtcgtgccgccaagaccgtcaactttggcgtactctatggtatgtcagcacatcgtcttagtcaggaattgggcattgactacaaagaagctgaagcgtttatcgagcgctatttccaatcctttccgaaagttcgcgcgtggattgaacgtaccctcgaagaaggtcgcactcgcggctatgtggaaacgttattcgggcgtcgtcgctacgttccagatcttgcatctcgtgtccgctcagtgcgcgaagctgctgagcgtatggccttcaatatgcctgttcagggaacagcggcggacctcatgaagatcgccatggtgaaattgtttccgcgcttgaaacccttaggagcccaccttcttttacaggtgcatgatgaattggtcttggaagtacccgaggatcgcgcagaagaagccaaagcactcgtgaaagaggttatggaaaacgcgtatccgttagatgttccgttggaggtcgaagtgggtgtaggccgtgattggcttgaagcgaaacaagac

SEQ ID NO: 28 - protein, 844 aa, synthetic construct
  REGION 1..844: note = DNA Polymerase Variant
MHHHHHHGGSGMLPLFDLEEPPKRVLLVDGHHLAYRTFYALSLTTSRGEPVQMVYGFARSLLKALKEDGQAVVVVFDAKAPSFRHEAYEAYKAGRAPTPEDFPRQLALVKRLVDLLGLVRLEAPGYEADDVLGTLAKKAEREGMEVCILTGDRDFFQLLSEKVSVLLPDGTLVTPKDVQEKYGVPPERWVDFRALTGDRSDNIPGVAGIGEKTALRLLAEWGSVENLLKNLDRVKPDSLRRKIEAHLEDLRLSLDLARIRTDLPLEVDFKALRRRTPDLEGLRAFLEELEFGSLLHEFGLLGGEKPREEAPWPPPEGAFVGFLLSRKEPMWAELLALAAAAEGRVHRATSPVEALADLKEARGFLAKDLAVLALREGVALDPTDDPLLVAYLLDPANTNPEGVARRYGGEFTEDAAERALLSERLFQTLFPRLSEKLLWLYQEVERPLSRVLAHMEARGVRLDVPLLEALSFELEKEIERLEGEVFRLAGHPFNLNSRDQLEKVLFDELGLTPVGRTEKTGKRSTAQGALEALRGAHPIVDLILQYRELSKLKSTYLDPLPRLVHPRTGRLHTRFNQTATATGRLSSSDPNLQNIPVRTPLGQRIRKAFVAEEGWLLLAADYSQIELRVLAHLSGDENLKRVFREGKDIHTETAAWMFGLDPALVDPKMRRAAKTVNFGVLYGMSAHRLSQELGIDYKEAEAFIERYFQSFPKVRAWIERTLEEGRTRGYVETLFGRRRYVPDLASRVRSVREAAERMAFNMPVQGTAADLMKIAMVKLFPRLKPLGAHLLLQVHDELVLEVPEDRAEEAKALVKEVMENAYPLDVPLEVEVGVGRDWLEAKQD

SEQ ID NO: 29 - DNA, 2532 bp, synthetic construct
  misc_feature 1..2532: note = DNA Polymerase Variant
  source 1..2532: mol_type = other DNA
atgcaccatcatcatcatcatggcggtagcggcatgttaccgctgtttgatttggaagaaccaccaaaacgcgtgctgcttgttgacggccatcatctggcgtatcgtaccttctacgcactgagccttacgacctcacgtggtgagcctgtccagatggtgtatgggtttgctcgctccctgctgaaagccctgaaggaagatggtcaagccgtagtagtggttttcgatgcgaaagcaccgtcgtttcgtcacgaagcgtacgaggcctataaagctggccgcgcaccgaccccggaagactttccgcgtcagttagcgctcgtcaaacgcctcgtggatttgctgggattagttcgcttggaagctcctggctacgaggcggacgacgtgctcggtacactggccaagaaagcagaacgtgaaggcatggaggtctgcattcttaccggtgatcgcgatttcttccagctgctgtctgagaaagtgagcgttttgctgcccgatggcacgttagtaaccccgaaagatgtccaagagaaatatggagttccgccagaacgttgggtggactttcgcgcactgactggtgatcgttcagacaacatcccgggcgttgccgggattggtgaaaagacggcgctgcgcctgctggcagaatggggctcggtggaaaatctgctcaagaaccttgatcgtgtgaaacctgatagcttacgccgcaagatcgaagcccacctggaagacttgcgtctgagtctggatcttgcgcgtattcgcaccgatctgccgttggaagtagactttaaagctctgcgtcgtcgcacacccgatttagaggggttacgcgcgttcctcgaacgtctggagtttggctccctgctgcatgaattcggtttgttgggcggagagaaaccgcgtgaagaagcaccatggccgccgcccgaaggtgcctttgtcggctttcttctgtcacgcaaagagccaatgtgggcggaactgttagctcttgcagccgccgcggaagggcgtgttcaccgcgcgacctctcctgtcgaggccctcgctgacctcaaagaagcacgtggtttcttggcgaaagatttagccgtgcttgcattacgcgaaggcgttgcgctcgatccgacggacgacccgcttttggtggcttatttgctcgatcctgcgaataccactccggaaggtgtagcccgtcgttacggcggcgagtttactgaagatgcggcagaacgcgcgttgcttagcgaacgcctcttccagacgttatttccacgtctttcggagaaattactctggctctatcaggaagtcgaacgtccattgagtcgcgtgcttgcccatatggaggctcgcggtgtgcgcttagatgttccgttgttagaagcactcagcttcgagttggagaaagaaatggaacgtcttgaaggcgaagtctttcgtttagcggggcatcccttcaatctcaactctcgcgaccaattggagaaagtgctctttgatgaattaggtttaacccctatcggacgtacagagaagaccggcaaacgttccactgctcagggagcattggaagcacttcgtggtgctcacccgatcgtcgaattgattttgcagtaccgcgagctcagtaaactcaaaggcacctatattgatccgttacctcgtcttgttcatccacgtacgggtcgtttacacacccgcttcaatcaaacggcgacagccaccgggcgcttgtcgtcgagtgacccgaacctccagaatattccagtgcgcacgccgttaggccaacgcattcgtaaagcgtttgttgcggaagaaggttggttattacttgcggccgattactcccagatcgaacttcgtgtattggcgcatctctctggcgacgagaatcttaaacgcgtgtttcgcgaaggcaaggatattcacactgaaaccgcagcctggatgttcgggcttgacccagccttagtggaccccaagatgcgtcgtgccgccaagaccgtcaactttggcgtactctatggtatgtcagcacatcgtcttagtcaggaattgggcattgactacaaagaagctgaagcgtttatcgagcgctatttccaatcctttccgaaagttcgcgcgtggattgaacgtaccctcgaagaaggtcgcactcgcggctatgtggaaacgttattcgggcgtcgtcgctacgttccagatcttgcatctcgtgtccgctcagtgcgcgaagctgctgagcgtatggccttcaatatgcctgttcagggaacagcggcggacctcatgaagatcgccatggtgaaattgtttccgcgcttgaaacccttaggagcccaccttcttttacaggtgcatgatgaattggtcttggaagtacccgaggatcgcgcagaagaagccaaagcactcgtgaaagaggttatggaaaacgcgtatccgttagatgttccgttggaggtcgaagtgggtgtaggccgtgattggcttgaagcgaaacaagac

SEQ ID NO: 30 - protein, 844 aa, synthetic construct
  REGION 1..844: note = DNA Polymerase Variant
MHHHHHHGGSGMLPLFDLEEPPKRVLLVDGHHLAYRTFYALSLTTSRGEPVQMVYGFARSLLKALKEDGQAVVVVFDAKAPSFRHEAYEAYKAGRAPTPEDFPRQLALVKRLVDLLGLVRLEAPGYEADDVLGTLAKKAEREGMEVCILTGDRDFFQLLSEKVSVLLPDGTLVTPKDVQEKYGVPPERWVDFRALTGDRSDNIPGVAGIGEKTALRLLAEWGSVENLLKNLDRVKPDSLRRKIEAHLEDLRLSLDLARIRTDLPLEVDFKALRRRTPDLEGLRAFLERLEFGSLLHEFGLLGGEKPREEAPWPPPEGAFVGFLLSRKEPMWAELLALAAAAEGRVHRATSPVEALADLKEARGFLAKDLAVLALREGVALDPTDDPLLVAYLLDPANTTPEGVARRYGGEFTEDAAERALLSERLFQTLFPRLSEKLLWLYQEVERPLSRVLAHMEARGVRLDVPLLEALSFELEKEMERLEGEVFRLAGHPFNLNSRDQLEKVLFDELGLTPIGRTEKTGKRSTAQGALEALRGAHPIVELILQYRELSKLKGTYIDPLPRLVHPRTGRLHTRFNQTATATGRLSSSDPNLQNIPVRTPLGQRIRKAFVAEEGWLLLAADYSQIELRVLAHLSGDENLKRVFREGKDIHTETAAWMFGLDPALVDPKMRRAAKTVNFGVLYGMSAHRLSQELGIDYKEAEAFIERYFQSFPKVRAWIERTLEEGRTRGYVETLFGRRRYVPDLASRVRSVREAAERMAFNMPVQGTAADLMKIAMVKLFPRLKPLGAHLLLQVHDELVLEVPEDRAEEAKALVKEVMENAYPLDVPLEVEVGVGRDWLEAKQD

SEQ ID NO: 31 - DNA, 2532 bp, synthetic construct
  misc_feature 1..2532: note = DNA Polymerase Variant
  source 1..2532: mol_type = other DNA
atgcaccatcatcatcatcatggcggtagcggcatgttaccgctgtttgatttggaagaaccaccaaaacgcgtgctgcttgttgacggccatcatctggcgtatcgtaccttctacgcactgagccttacgacctcacgtggtgagcctgtccagatggtgtatgggtttgctcgctccctgctgaaagccctgaaggaagatggtcaagccgtagtagtggttttcgatgcgaaagcaccgtcgtttcgtcacgaagcgtacgaggcctataaagctggccgcgcaccgaccccggaagactttccgcgtcagttagcgctcgtcaaacgcctcgtggatttgctgggattagttcgcttggaagctcctggctacgaggcggacgacgtgctcggtacactggccaagaaagcagaacgtgaaggcatggaggtctgcattcttaccggtgatcgcgatttcttccagctgctgtctgagaaagtgagcgttttgctgcccgatggcacgttagtaaccccgaaagatgtccaagagaaatatggagttccgccagaacgttgggtggactttcgcgcactgactggtgatcgttcagacaacatcccgggcgttgccgggattggtgaaaagacggcgctgcgcctgctggcagaatggggctcggtggaaaatctgctcaagaaccttgatcgtgtgaaacctgatagcttacgccgcaagatcgaagcccacctggaagacttgcgtctgagtctggatcttgcgcgtattcgcaccgatctgccgttggaagtagactttaaagctctgcgtcgtcgcacacccgatttagaggggttacgcgcgttcctcgaagaactggagtttggctccctgctgcatgaattcggtttgttgggcggagagaaaccgcgtgaagaagcaccatggccgccgcccgaaggtgcctttgtcggctttcttctgtcacgcaaagagccaatgtgggcggaactgttagctcttgcagccgccgcggaagggcgtgttcaccgcgcgacctctcctgtcgaggccctcgctgacctcaaagaagcacgtggtttcttggcgaaagatttagccgtgcttgcattacgcgaaggcgttgcgctcgatccgacggacgacccgcttttggtggcttatttgctcgatcctgcgaataccaatccggaaggtgtagcccgtcgttacggcggcgagtttactgaagatgcggcagaacgcgcgttgcttagcgaacgcctcttccagacgttatttccacgtctttcggagaaattactctggctctatcaggaagtcgaacgtccattgagtcgcgtgcttgcccatatggaggctcgcggtgtgcgcttagatgttccgttgttagaagcactcagcttcgagttggagaaagaactggaacgtcttgaaggcgaagtctttcgtttagcggggcatcccttcaatctcaactctcgcgaccaattggagaaagtgctctttgatgaattaggtttaacccctatcggacgtacagagaagaccggcaaacgttccactgctcagggagcattggaagcacttcgtggtgctcacccgatcgtcgaattgattttgcagtaccgcgagctcagtaaactcaaaaacacctatattgatccgttacctcgtcttgttcatccacgtacgggtcgtttacacacccgcttcaatcaaacggcgacagccaccgggcgcttgtcgtcgagtgacccgaacctccagaatattccagtgcgcacgccgttaggccaacgcattcgtaaagcgtttgttgcggaagaaggttggttattacttgcggccgattactcccagatcgaacttcgtgtattggcgcatctctctggcgacgagaatcttaaacgcgtgtttcgcgaaggcaaggatattcacactgaaaccgcagcctggatgttcgggcttgacccagccttagtggaccccaagatgcgtcgtgccgccaagaccgtcaactttggcgtactctatggtatgtcagcacatcgtcttagtcaggaattgggcattgactacaaagaagctgaagcgtttatcgagcgctatttccaatcctttccgaaagttcgcgcgtggattgaacgtaccctcgaagaaggtcgcactcgcggctatgtggaaacgttattcgggcgtcgtcgctacgttccagatcttgcatctcgtgtccgctcagtgcgcgaagctgctgagcgtatggccttcaatatgcctgttcagggaacagcggcggacctcatgaagatcgccatggtgaaattgtttccgcgcttgaaacccttaggagcccaccttcttttacaggtgcatgatgaattggtcttggaagtacccgaggatcgcgcagaagaagccaaagcactcgtgaaagaggttatggaaaacgcgtatccgttagatgttccgttggaggtcgaagtgggtgtaggccgtgattggcttgaagcgaaacaagac

SEQ ID NO: 32 - protein, 844 aa, synthetic construct
  REGION 1..844: note = DNA Polymerase Variant
MHHHHHHGGSGMLPLFDLEEPPKRVLLVDGHHLAYRTFYALSLTTSRGEPVQMVYGFARSLLKALKEDGQAVVVVFDAKAPSFRHEAYEAYKAGRAPTPEDFPRQLALVKRLVDLLGLVRLEAPGYEADDVLGTLAKKAEREGMEVCILTGDRDFFQLLSEKVSVLLPDGTLVTPKDVQEKYGVPPERWVDFRALTGDRSDNIPGVAGIGEKTALRLLAEWGSVENLLKNLDRVKPDSLRRKIEAHLEDLRLSLDLARIRTDLPLEVDFKALRRRTPDLEGLRAFLEELEFGSLLHEFGLLGGEKPREEAPWPPPEGAFVGFLLSRKEPMWAELLALAAAAEGRVHRATSPVEALADLKEARGFLAKDLAVLALREGVALDPTDDPLLVAYLLDPANTNPEGVARRYGGEFTEDAAERALLSERLFQTLFPRLSEKLLWLYQEVERPLSRVLAHMEARGVRLDVPLLEALSFELEKELERLEGEVFRLAGHPFNLNSRDQLEKVLFDELGLTPIGRTEKTGKRSTAQGALEALRGAHPIVELILQYRELSKLKNTYIDPLPRLVHPRTGRLHTRFNQTATATGRLSSSDPNLQNIPVRTPLGQRIRKAFVAEEGWLLLAADYSQIELRVLAHLSGDENLKRVFREGKDIHTETAAWMFGLDPALVDPKMRRAAKTVNFGVLYGMSAHRLSQELGIDYKEAEAFIERYFQSFPKVRAWIERTLEEGRTRGYVETLFGRRRYVPDLASRVRSVREAAERMAFNMPVQGTAADLMKIAMVKLFPRLKPLGAHLLLQVHDELVLEVPEDRAEEAKALVKEVMENAYPLDVPLEVEVGVGRDWLEAKQD

SEQ ID NO: 33 - DNA, 2532 bp, synthetic construct
  misc_feature 1..2532: note = DNA Polymerase Variant
  source 1..2532: mol_type = other DNA
atgcaccatcatcatcatcatggcggtagcggcatgttaccgctgtttgatttggaagaaccaccaaaacgcgtgctgcttgttgacggccatcatctggcgtatcgtaccttctacgcactgagccttacgacctcacgtggtgagcctgtccagatggtgtatgggtttgctcgctccctgctgaaagccctgaaggaagatggtcaagccgtagtagtggttttcgatgcgaaagcaccgtcgtttcgtcacgaagcgtacgaggcctataaagctggccgcgcaccgaccccggaagactttccgcgtcagttagcgctcgtcaaacgcctcgtggatttgctgggattagttcgcttggaagctcctggctacgaggcggacgacgtgctcggtacactggccaagaaagcagaacgtgaaggcatggaggtctgcattcttaccggtgatcgcgatttcttccagctgctgtctgagaaagtgagcgttttgctgcccgatggcacgttagtaaccccgaaagatgtccaagagaaatatggagttccgccagaacgttgggtggactttcgcgcactgactggtgatcgttcagacaacatcccgggcgttgccgggattggtgaaaagacggcgctgcgcctgctggcagaatggggctcggtggaaaatctgctcaagaaccttgatcgtgtgaaacctgatagcttacgccgcaagatcgaagcccacctggaagacttgcgtctgagtctggatcttgcgcgtattcgcaccgatctgccgttggaagtagactttaaagctctgcgtcgtcgcacacccgatttagaggggttacgcgcgttcctcgaacgtctggagtttggctccctgctgcatgaattcggtttgttgggcggagagaaaccgcgtgaagaagcaccatggccgccgcccgaaggtgcctttgtcggctttcttctgtcacgcaaagagccaatgtgggcggaactgttagctcttgcagccgccgcggaagggcgtgttcaccgcgcgacctctcctgtcgaggccctcgctgacctcaaagaagcacgtggtttcttggcgaaagatttagccgtgcttgcattacgcgaaggcgttgcgctcgatccgacggacgacccgcttttggtggcttatttgctcgatcctgcgaataccaatccggaaggtgtagcccgtcgttacggcggcgagtttactgaagatgcggcagaacgcgcgttgcttagcgaacgcctcttccagacgttatttccacgtctttcggagaaattactctggctctatcaggaagtcgaacgtccattgagtcgcgtgcttgcccatatggaggctcgcggtgtgcgcttagatgttccgttgttagaagcactcagcttcgagttggagaaagaactggaacgtcttgaaggcgaagtctttcgtttagcggggcatcccttcaatctcaactctcgcgaccaattggagaaagtgctctttgatgaattaggtttaacccctgtaggacgcacagagaagaccggcaaacgttccacttcgcaaggcgccttggaagcacttcgtggtgctcacccgatcgtcgaattgattttgcagtaccgcgagctcactaaactcaaaaacacctatctggatccgttacctcgtcttgttcatccacgtacgggtcgtttacacacccgcttcaatcaaacggcgacagccaccgggcgcttgtcgtcgagtgacccgaacctccagaatattccagtgcgcacgccgttaggccaacgcattcgtaaagcgtttgttgcggaagaaggttggttattacttgcggccgattactcccagatcgaacttcgtgtattggcgcatctctctggcgacgagaatcttaaacgcgtgtttcgcgaaggcaaggatattcacactgaaaccgcagcctggatgttcgggcttgacccagccttagtggaccccaagatgcgtcgtgccgccaagaccgtcaactttggcgtactctatggtatgtcagcacatcgtcttagtcaggaattgggcattgactacaaagaagctgaagcgtttatcgagcgctatttccaatcctttccgaaagttcgcgcgtggattgaacgtaccctcgaagaaggtcgcactcgcggctatgtggaaacgttattcgggcgtcgtcgctacgttccagatcttgcatctcgtgtccgctcagtgcgcgaagctgctgagcgtatggccttcaatatgcctgttcagggaacagcggcggacctcatgaagatcgccatggtgaaattgtttccgcgcttgaaacccttaggagcccaccttcttttacaggtgcatgatgaattggtcttggaagtacccgaggatcgcgcagaagaagccaaagcactcgtgaaagaggttatggaaaacgcgtatccgttagatgttccgttggaggtcgaagtgggtgtaggccgtgattggcttgaagcgaaacaagac

SEQ ID NO: 34 - protein, 844 aa, synthetic construct
  REGION 1..844: note = DNA Polymerase Variant
MHHHHHHGGSGMLPLFDLEEPPKRVLLVDGHHLAYRTFYALSLTTSRGEPVQMVYGFARSLLKALKEDGQAVVVVFDAKAPSFRHEAYEAYKAGRAPTPEDFPRQLALVKRLVDLLGLVRLEAPGYEADDVLGTLAKKAEREGMEVCILTGDRDFFQLLSEKVSVLLPDGTLVTPKDVQEKYGVPPERWVDFRALTGDRSDNIPGVAGIGEKTALRLLAEWGSVENLLKNLDRVKPDSLRRKIEAHLEDLRLSLDLARIRTDLPLEVDFKALRRRTPDLEGLRAFLERLEFGSLLHEFGLLGGEKPREEAPWPPPEGAFVGFLLSRKEPMWAELLALAAAAEGRVHRATSPVEALADLKEARGFLAKDLAVLALREGVALDPTDDPLLVAYLLDPANTNPEGVARRYGGEFTEDAAERALLSERLFQTLFPRLSEKLLWLYQEVERPLSRVLAHMEARGVRLDVPLLEALSFELEKELERLEGEVFRLAGHPFNLNSRDQLEKVLFDELGLTPVGRTEKTGKRSTSQGALEALRGAHPIVELILQYRELTKLKNTYLDPLPRLVHPRTGRLHTRFNQTATATGRLSSSDPNLQNIPVRTPLGQRIRKAFVAEEGWLLLAADYSQIELRVLAHLSGDENLKRVFREGKDIHTETAAWMFGLDPALVDPKMRRAAKTVNFGVLYGMSAHRLSQELGIDYKEAEAFIERYFQSFPKVRAWIERTLEEGRTRGYVETLFGRRRYVPDLASRVRSVREAAERMAFNMPVQGTAADLMKIAMVKLFPRLKPLGAHLLLQVHDELVLEVPEDRAEEAKALVKEVMENAYPLDVPLEVEVGVGRDWLEAKQD

SEQ ID NO: 35 - DNA, 2532 bp, synthetic construct
  misc_feature 1..2532: note = DNA Polymerase Variant
  source 1..2532: mol_type = other DNA
atgcaccatcatcatcatcatggcggtagcggcatgttaccgctgtttgatttggaagaaccaccaaaacgcgtgctgcttgttgacggccatcatctggcgtatcgtaccttctacgcactgagccttacgacctcacgtggtgagcctgtccagatggtgtatgggtttgctcgctccctgctgaaagccctgaaggaagatggtcaagccgtagtagtggttttcgatgcgaaagcaccgtcgtttcgtcacgaagcgtacgaggcctataaagctggccgcgcaccgaccccggaagactttccgcgtcagttagcgctcgtcaaacgcctcgtggatttgctgggattagttcgcttggaagctcctggctacgaggcggacgacgtgctcggtacactggccaagaaagcagaacgtgaaggcatggaggtctgcattcttaccggtgatcgcgatttcttccagctgctgtctgagaaagtgagcgttttgctgcccgatggcacgttagtaaccccgaaagatgtccaagagaaatatggagttccgccagaacgttgggtggactttcgcgcactgactggtgatcgttcagacaacatcccgggcgttgccgggattggtgaaaagacggcgctgcgcctgctggcagaatggggctcggtggaaaatctgctcaagaaccttgatcgtgtgaaacctgatagcttacgccgcaagatcgaagcccacctggaagacttgcgtctgagtctggatcttgcgcgtattcgcaccgatctgccgttggaagtagactttaaagctctgcgtcgtcgcacacccgatttagaggggttacgcgcgttcctcgaagaactggagtttggctccctgctgcatgaattcggtttgttgggcggagagaaaccgcgtgaagaagcaccatggccgccgcccgaaggtgcctttgtcggctttcttctgtcacgcaaagagccaatgtgggcggaactgttagctcttgcagccgccgcggaagggcgtgttcaccgcgcgacctctcctgtcgaggccctcgctgacctcaaagaagcacgtggtttcttggcgaaagatttagccgtgcttgcattacgcgaaggcgttgcgctcgatccgacggacgacccgcttttggtggcttatttgctcgatcctgcgaataccaatccggaaggtgtagcccgtcgttacggcggcgagtttactgaagatgcggcagaacgcgcgttgcttagcgaacgcctcttccagacgttatttccacgtctttcggagaaattactctggctctatcaggaagtcgaacgtccattgagtcgcgtgcttgcccatatggaggctcgcggtgtgcgcttagatgttccgttgttagaagcactcagcttcgagttggagaaagaactggaacgtcttgaaggcgaagtctttcgtttagcggggcatcccttcaatctcaactctcgcgaccaattggagaaagtgctctttgatgaattaggtttaacccctgtaggacgcacagagaagaccggcaaacgttccactgcgcaaggcgccttggaagcacttcgtggtgctcacccgatcgtcgacttgattttgcagtaccgcgagctcactaaactcaaaagcacctatattgatccgttacctcgtcttgttcatccacgtacgggtcgtttacacacccgcttcaatcaaacggcgacagccaccgggcgcttgtcgtcgagtgacccgaacctccagaatattccagtgcgcacgccgttaggccaacgcattcgtaaagcgtttgttgcggaagaaggttggttattacttgcggccgattactcccagatcgaacttcgtgtattggcgcatctctctggcgacgagaatcttaaacgcgtgtttcgcgaaggcaaggatattcacactgaaaccgcagcctggatgttcgggcttgacccagccttagtggaccccaagatgcgtcgtgccgccaagaccgtcaactttggcgtactctatggtatgtcagcacatcgtcttagtcaggaattgggcattgactacaaagaagctgaagcgtttatcgagcgctatttccaatcctttccgaaagttcgcgcgtggattgaacgtaccctcgaagaaggtcgcactcgcggctatgtggaaacgttattcgggcgtcgtcgctacgttccagatcttgcatctcgtgtccgctcagtgcgcgaagctgctgagcgtatggccttcaatatgcctgttcagggaacagcggcggacctcatgaagatcgccatggtgaaattgtttccgcgcttgaaacccttaggagcccaccttcttttacaggtgcatgatgaattggtcttggaagtacccgaggatcgcgcagaagaagccaaagcactcgtgaaagaggttatggaaaacgcgtatccgttagatgttccgttggaggtcgaagtgggtgtaggccgtgattggcttgaagcgaaacaagac

SEQ ID NO: 36 - protein, 844 aa, synthetic construct
  REGION 1..844: note = DNA Polymerase Variant
MHHHHHHGGSGMLPLFDLEEPPKRVLLVDGHHLAYRTFYALSLTTSRGEPVQMVYGFARSLLKALKEDGQAVVVVFDAKAPSFRHEAYEAYKAGRAPTPEDFPRQLALVKRLVDLLGLVRLEAPGYEADDVLGTLAKKAEREGMEVCILTGDRDFFQLLSEKVSVLLPDGTLVTPKDVQEKYGVPPERWVDFRALTGDRSDNIPGVAGIGEKTALRLLAEWGSVENLLKNLDRVKPDSLRRKIEAHLEDLRLSLDLARIRTDLPLEVDFKALRRRTPDLEGLRAFLEELEFGSLLHEFGLLGGEKPREEAPWPPPEGAFVGFLLSRKEPMWAELLALAAAAEGRVHRATSPVEALADLKEARGFLAKDLAVLALREGVALDPTDDPLLVAYLLDPANTNPEGVARRYGGEFTEDAAERALLSERLFQTLFPRLSEKLLWLYQEVERPLSRVLAHMEARGVRLDVPLLEALSFELEKELERLEGEVFRLAGHPFNLNSRDQLEKVLFDELGLTPVGRTEKTGKRSTAQGALEALRGAHPIVDLILQYRELTKLKSTYIDPLPRLVHPRTGRLHTRFNQTATATGRLSSSDPNLQNIPVRTPLGQRIRKAFVAEEGWLLLAADYSQIELRVLAHLSGDENLKRVFREGKDIHTETAAWMFGLDPALVDPKMRRAAKTVNFGVLYGMSAHRLSQELGIDYKEAEAFIERYFQSFPKVRAWIERTLEEGRTRGYVETLFGRRRYVPDLASRVRSVREAAERMAFNMPVQGTAADLMKIAMVKLFPRLKPLGAHLLLQVHDELVLEVPEDRAEEAKALVKEVMENAYPLDVPLEVEVGVGRDWLEAKQD

SEQ ID NO: 37 - DNA, 2532 bp, synthetic construct
  misc_feature 1..2532: note = DNA Polymerase Variant
  source 1..2532: mol_type = other DNA
atgcaccatcatcatcatcatggcggtagcggcatgttaccgctgtttgatttggaagaaccaccaaaacgcgtgctgcttgttgacggccatcatctggcgtatcgtaccttctacgcactgagccttacgacctcacgtggtgagcctgtccagatggtgtatgggtttgctcgctccctgctgaaagccctgaaggaagatggtcaagccgtagtagtggttttcgatgcgaaagcaccgtcgtttcgtcacgaagcgtacgaggcctataaagctggccgcgcaccgaccccggaagactttccgcgtcagttagcgctcgtcaaacgcctcgtggatttgctgggattagttcgcttggaagctcctggctacgaggcggacgacgtgctcggtacactggccaagaaagcagaacgtgaaggcatggaggtctgcattcttaccggtgatcgcgatttcttccagctgctgtctgagaaagtgagcgttttgctgcccgatggcacgttagtaaccccgaaagatgtccaagagaaatatggagttccgccagaacgttgggtggactttcgcgcactgactggtgatcgttcagacaacatcccgggcgttgccgggattggtgaaaagacggcgctgcgcctgctggcagaatggggctcggtggaaaatctgctcaagaaccttgatcgtgtgaaacctgatagcttacgccgcaagatcgaagcccacctggaagacttgcgtctgagtctggatcttgcgcgtattcgcaccgatctgccgttggaagtagactttaaagctctgcgtcgtcgcacacccgatttagaggggttacgcgcgttcctcgaagaactggagtttggctccctgctgcatgaattcggtttgttgggcggagagaaaccgcgtgaagaagcaccatggccgccgcccgaaggtgcctttgtcggctttcttctgtcacgcaaagagccaatgtgggcggaactgttagctcttgcagccgccgcggaagggcgtgttcaccgcgcgacctctcctgtcgaggccctcgctgacctcaaagaagcacgtggtttcttggcgaaagatttagccgtgcttgcattacgcgaaggcgttgcgctcgatccgacggacgacccgcttttggtggcttatttgctcgatcctgcgaataccaatccggaaggtgtagcccgtcgttacggcggcgagtttactgaagatgcggcagaacgcgcgttgcttagcgaacgcctcttccagacgttatttccacgtctttcggagaaattactctggctctatcaggaagtcgaacgtccattgagtcgcgtgcttgcccatatggaggctcgcggtgtgcgcttagatgttccgttgttagaagcactcagcttcgagttggagaaagaaatggaacgtcttgaaggcgaagtctttcgtttagcggggcatcccttcaatctcaactctcgcgaccaattggagaaagtgctctttgatgaattaggtttaacccctgtaggacgcacagagaagaccggcaaacgttccactgctcagggagcattggaagcacttcgtggtgctcacccgatcgtcgacttgattttgcagtaccgcgagctcagtaaactcaaaagcacctatctggatccgttacctcgtcttgttcatccacgtacgggtcgtttacacacccgcttcaatcaaacggcgacagccaccgggcgcttgtcgtcgagtgacccgaacctccagaatattccagtgcgcacgccgttaggccaacgcattcgtaaagcgtttgttgcggaagaaggttggttattacttgcggccgattactcccagatcgaacttcgtgtattggcgcatctctctggcgacgagaatcttaaacgcgtgtttcgcgaaggcaaggatattcacactgaaaccgcagcctggatgttcgggcttgacccagccttagtggaccccaagatgcgtcgtgccgccaagaccgtcaactttggcgtactctatggtatgtcagcacatcgtcttagtcaggaattgggcattgactacaaagaagctgaagcgtttatcgagcgctatttccaatcctttccgaaagttcgcgcgtggattgaacgtaccctcgaagaaggtcgcactcgcggctatgtggaaacgttattcgggcgtcgtcgctacgttccagatcttgcatctcgtgtccgctcagtgcgcgaagctgctgagcgtatggccttcaatatgcctgttcagggaacagcggcggacctcatgaagatcgccatggtgaaattgtttccgcgcttgaaacccttaggagcccaccttcttttacaggtgcatgatgaattggtcttggaagtacccgaggatcgcgcagaagaagccaaagcactcgtgaaagaggttatggaaaacgcgtatccgttagatgttccgttggaggtcgaagtgggtgtaggccgtgattggcttgaagcgaaacaagac

SEQ ID NO: 38 - protein, 844 aa, synthetic construct
  REGION 1..844: note = DNA Polymerase Variant
MHHHHHHGGSGMLPLFDLEEPPKRVLLVDGHHLAYRTFYALSLTTSRGEPVQMVYGFARSLLKALKEDGQAVVVVFDAKAPSFRHEAYEAYKAGRAPTPEDFPRQLALVKRLVDLLGLVRLEAPGYEADDVLGTLAKKAEREGMEVCILTGDRDFFQLLSEKVSVLLPDGTLVTPKDVQEKYGVPPERWVDFRALTGDRSDNIPGVAGIGEKTALRLLAEWGSVENLLKNLDRVKPDSLRRKIEAHLEDLRLSLDLARIRTDLPLEVDFKALRRRTPDLEGLRAFLEELEFGSLLHEFGLLGGEKPREEAPWPPPEGAFVGFLLSRKEPMWAELLALAAAAEGRVHRATSPVEALADLKEARGFLAKDLAVLALREGVALDPTDDPLLVAYLLDPANTNPEGVARRYGGEFTEDAAERALLSERLFQTLFPRLSEKLLWLYQEVERPLSRVLAHMEARGVRLDVPLLEALSFELEKEMERLEGEVFRLAGHPFNLNSRDQLEKVLFDELGLTPVGRTEKTGKRSTAQGALEALRGAHPIVDLILQYRELSKLKSTYLDPLPRLVHPRTGRLHTRFNQTATATGRLSSSDPNLQNIPVRTPLGQRIRKAFVAEEGWLLLAADYSQIELRVLAHLSGDENLKRVFREGKDIHTETAAWMFGLDPALVDPKMRRAAKTVNFGVLYGMSAHRLSQELGIDYKEAEAFIERYFQSFPKVRAWIERTLEEGRTRGYVETLFGRRRYVPDLASRVRSVREAAERMAFNMPVQGTAADLMKIAMVKLFPRLKPLGAHLLLQVHDELVLEVPEDRAEEAKALVKEVMENAYPLDVPLEVEVGVGRDWLEAKQD

SEQ ID NO: 39 - DNA, 2532 bp, synthetic construct
  misc_feature 1..2532: note = DNA Polymerase Variant
  source 1..2532: mol_type = other DNA
atgcaccatcatcatcatcatggcggtagcggcatgttaccgctgtttgatttggaagaaccaccaaaacgcgtgctgcttgttgacggccatcatctggcgtatcgtaccttctacgcactgagccttacgacctcacgtggtgagcctgtccagatggtgtatgggtttgctcgctccctgctgaaagccctgaaggaagatggtcaagccgtagtagtggttttcgatgcgaaagcaccgtcgtttcgtcacgaagcgtacgaggcctataaagctggccgcgcaccgaccccggaagactttccgcgtcagttagcgctcgtcaaacgcctcgtggatttgctgggattagttcgcttggaagctcctggctacgaggcggacgacgtgctcggtacactggccaagaaagcagaacgtgaaggcatggaggtctgcattcttaccggtgatcgcgatttcttccagctgctgtctgagaaagtgagcgttttgctgcccgatggcacgttagtaaccccgaaagatgtccaagagaaatatggagttccgccagaacgttgggtggactttcgcgcactgactggtgatcgttcagacaacatcccgggcgttgccgggattggtgaaaagacggcgctgcgcctgctggcagaatggggctcggtggaaaatctgctcaagaaccttgatcgtgtgaaacctgatagcttacgccgcaagatcgaagcccacctggaagacttgcgtctgagtctggatcttgcgcgtattcgcaccgatctgccgttggaagtagactttaaagctctgcgtcgtcgcacacccgatttagaggggttacgcgcgttcctcgaacgtctggagtttggctccctgctgcatgaattcggtttgttgggcggagagaaaccgcgtgaagaagcaccatggccgccgcccgaaggtgcctttgtcggctttcttctgtcacgcaaagagccaatgtgggcggaactgttagctcttgcagccgccgcggaagggcgtgttcaccgcgcgacctctcctgtcgaggccctcgctgacctcaaagaagcacgtggtttcttggcgaaagatttagccgtgcttgcattacgcgaaggcgttgcgctcgatccgacggacgacccgcttttggtggcttatttgctcgatcctgcgaataccaatccggaaggtgtagcccgtcgttacggcggcgagtttactgaagatgcggcagaacgcgcgttgcttagcgaacgcctcttccagacgttatttccacgtctttcggagaaattactctggctctatcaggaagtcgaacgtccattgagtcgcgtgcttgcccatatggaggctcgcggtgtgcgcttagatgttccgttgttagaagcactcagcttcgagttggagaaagaaatggaacgtcttgaaggcgaagtctttcgtttagcggggcatcccttcaatctcaactctcgcgaccaattggagaaagtgctctttgatgaattaggtttaacccctatcggacgtacagagaagaccggcaaacgttccacttcgcaaggcgccttggaagcacttcgtggtgctcacccgatcgtcgacttgattttgcagtaccgcgagctcagtaaactcaaaagcacctatctggatccgttacctcgtcttgttcatccacgtacgggtcgtttacacacccgcttcaatcaaacggcgacagccaccgggcgcttgtcgtcgagtgacccgaacctccagaatattccagtgcgcacgccgttaggccaacgcattcgtaaagcgtttgttgcggaagaaggttggttattacttgcggccgattactcccagatcgaacttcgtgtattggcgcatctctctggcgacgagaatcttaaacgcgtgtttcgcgaaggcaaggatattcacactgaaaccgcagcctggatgttcgggcttgacccagccttagtggaccccaagatgcgtcgtgccgccaagaccgtcaactttggcgtactctatggtatgtcagcacatcgtcttagtcaggaattgggcattgactacaaagaagctgaagcgtttatcgagcgctatttccaatcctttccgaaagttcgcgcgtggattgaacgtaccctcgaagaaggtcgcactcgcggctatgtggaaacgttattcgggcgtcgtcgctacgttccagatcttgcatctcgtgtccgctcagtgcgcgaagctgctgagcgtatggccttcaatatgcctgttcagggaacagcggcggacctcatgaagatcgccatggtgaaattgtttccgcgcttgaaacccttaggagcccaccttcttttacaggtgcatgatgaattggtcttggaagtacccgaggatcgcgcagaagaagccaaagcactcgtgaaagaggttatggaaaacgcgtatccgttagatgttccgttggaggtcgaagtgggtgtaggccgtgattggcttgaagcgaaacaagac

SEQ ID NO: 40 - protein, 844 aa, synthetic construct
  REGION 1..844: note = DNA Polymerase Variant
MHHHHHHGGSGMLPLFDLEEPPKRVLLVDGHHLAYRTFYALSLTTSRGEPVQMVYGFARSLLKALKEDGQAVVVVFDAKAPSFRHEAYEAYKAGRAPTPEDFPRQLALVKRLVDLLGLVRLEAPGYEADDVLGTLAKKAEREGMEVCILTGDRDFFQLLSEKVSVLLPDGTLVTPKDVQEKYGVPPERWVDFRALTGDRSDNIPGVAGIGEKTALRLLAEWGSVENLLKNLDRVKPDSLRRKIEAHLEDLRLSLDLARIRTDLPLEVDFKALRRRTPDLEGLRAFLERLEFGSLLHEFGLLGGEKPREEAPWPPPEGAFVGFLLSRKEPMWAELLALAAAAEGRVHRATSPVEALADLKEARGFLAKDLAVLALREGVALDPTDDPLLVAYLLDPANTNPEGVARRYGGEFTEDAAERALLSERLFQTLFPRLSEKLLWLYQEVERPLSRVLAHMEARGVRLDVPLLEALSFELEKEMERLEGEVFRLAGHPFNLNSRDQLEKVLFDELGLTPIGRTEKTGKRSTSQGALEALRGAHPIVDLILQYRELSKLKSTYLDPLPRLVHPRTGRLHTRFNQTATATGRLSSSDPNLQNIPVRTPLGQRIRKAFVAEEGWLLLAADYSQIELRVLAHLSGDENLKRVFREGKDIHTETAAWMFGLDPALVDPKMRRAAKTVNFGVLYGMSAHRLSQELGIDYKEAEAFIERYFQSFPKVRAWIERTLEEGRTRGYVETLFGRRRYVPDLASRVRSVREAAERMAFNMPVQGTAADLMKIAMVKLFPRLKPLGAHLLLQVHDELVLEVPEDRAEEAKALVKEVMENAYPLDVPLEVEVGVGRDWLEAKQD

SEQ ID NO: 41 - DNA, 2532 bp, synthetic construct
  misc_feature 1..2532: note = DNA Polymerase Variant
  source 1..2532: mol_type = other DNA
atgcaccatcatcatcatcatggcggtagcggcatgttaccgctgtttgatttggaagaaccaccaaaacgcgtgctgcttgttgacggccatcatctggcgtatcgtaccttctacgcactgagccttacgacctcacgtggtgagcctgtccagatggtgtatgggtttgctcgctccctgctgaaagccctgaaggaagatggtcaagccgtagtagtggttttcgatgcgaaagcaccgtcgtttcgtcacgaagcgtacgaggcctataaagctggccgcgcaccgaccccggaagactttccgcgtcagttagcgctcgtcaaacgcctcgtggatttgctgggattagttcgcttggaagctcctggctacgaggcggacgacgtgctcggtacactggccaagaaagcagaacgtgaaggcatggaggtctgcattcttaccggtgatcgcgatttcttccagctgctgtctgagaaagtgagcgttttgctgcccgatggcacgttagtaaccccgaaagatgtccaagagaaatatggagttccgccagaacgttgggtggactttcgcgcactgactggtgatcgttcagacaacatcccgggcgttgccgggattggtgaaaagacggcgctgcgcctgctggcagaatggggctcggtggaaaatctgctcaagaaccttgatcgtgtgaaacctgatagcttacgccgcaagatcgaagcccacctggaagacttgcgtctgagtctggatcttgcgcgtattcgcaccgatctgccgttggaagtagactttaaagctctgcgtcgtcgcacacccgatttagaggggttacgcgcgttcctcgaagaactggagtttggctccctgctgcatgaattcggtttgttgggcggagagaaaccgcgtgaagaagcaccatggccgccgcccgaaggtgcctttgtcggctttcttctgtcacgcaaagagccaatgtgggcggaactgttagctcttgcagccgccgcggaagggcgtgttcaccgcgcgacctctcctgtcgaggccctcgctgacctcaaagaagcacgtggtttcttggcgaaagatttagccgtgcttgcattacgcgaaggcgttgcgctcgatccgacggacgacccgcttttggtggcttatttgctcgatcctgcgaataccaatccggaaggtgtagcccgtcgttacggcggcgagtttactgaagatgcggcagaacgcgcgttgcttagcgaacgcctcttccagacgttatttccacgtctttcggagaaattactctggctctatcaggaagtcgaacgtccattgagtcgcgtgcttgcccatatggaggctcgcggtgtgcgcttagatgttccgttgttagaagcactcagcttcgagttggagaaagaaatggaacgtcttgaaggcgaagtctttcgtttagcggggcatcccttcaatctcaactctcgcgaccaattggagaaagtgctctttgatgaattaggtttaacccctgtaggacgcacagagaagaccggcaaacgttccactgctcagggagcattggaagcacttcgtggtgctcacccgatcgtcgagttgattttgcagtaccgcgagctcagtaaactcaaaaacacctatattgatccgttacctcgtcttgttcatccacgtacgggtcgtttacacacccgcttcaatcaaacggcgacagccaccgggcgcttgtcgtcgagtgacccgaacctccagaatattccagtgcgcacgccgttaggccaacgcattcgtaaagcgtttgttgcggaagaaggttggttattacttgcggccgattactcccagatcgaacttcgtgtattggcgcatctctctggcgacgagaatcttaaacgcgtgtttcgcgaaggcaaggatattcacactgaaaccgcagcctggatgttcgggcttgacccagccttagtggaccccaagatgcgtcgtgccgccaagaccgtcaactttggcgtactctatggtatgtcagcacatcgtcttagtcaggaattgggcattgactacaaagaagctgaagcgtttatcgagcgctatttccaatcctttccgaaagttcgcgcgtggattgaacgtaccctcgaagaaggtcgcactcgcggctatgtggaaacgttattcgggcgtcgtcgctacgttccagatcttgcatctcgtgtccgctcagtgcgcgaagctgctgagcgtatggccttcaatatgcctgttcagggaacagcggcggacctcatgaagatcgccatggtgaaattgtttccgcgcttgaaacccttaggagcccaccttcttttacaggtgcatgatgaattggtcttggaagtacccgaggatcgcgcagaagaagccaaagcactcgtgaaagaggttatggaaaacgcgtatccgttagatgttccgttggaggtcgaagtgggtgtaggccgtgattggcttgaagcgaaacaagac

SEQ ID NO: 42 - protein, 844 aa, synthetic construct
  REGION 1..844: note = DNA Polymerase Variant
MHHHHHHGGSGMLPLFDLEEPPKRVLLVDGHHLAYRTFYALSLTTSRGEPVQMVYGFARSLLKALKEDGQAVVVVFDAKAPSFRHEAYEAYKAGRAPTPEDFPRQLALVKRLVDLLGLVRLEAPGYEADDVLGTLAKKAEREGMEVCILTGDRDFFQLLSEKVSVLLPDGTLVTPKDVQEKYGVPPERWVDFRALTGDRSDNIPGVAGIGEKTALRLLAEWGSVENLLKNLDRVKPDSLRRKIEAHLEDLRLSLDLARIRTDLPLEVDFKALRRRTPDLEGLRAFLEELEFGSLLHEFGLLGGEKPREEAPWPPPEGAFVGFLLSRKEPMWAELLALAAAAEGRVHRATSPVEALADLKEARGFLAKDLAVLALREGVALDPTDDPLLVAYLLDPANTNPEGVARRYGGEFTEDAAERALLSERLFQTLFPRLSEKLLWLYQEVERPLSRVLAHMEARGVRLDVPLLEALSFELEKEMERLEGEVFRLAGHPFNLNSRDQLEKVLFDELGLTPVGRTEKTGKRSTAQGALEALRGAHPIVELILQYRELSKLKNTYIDPLPRLVHPRTGRLHTRFNQTATATGRLSSSDPNLQNIPVRTPLGQRIRKAFVAEEGWLLLAADYSQIELRVLAHLSGDENLKRVFREGKDIHTETAAWMFGLDPALVDPKMRRAAKTVNFGVLYGMSAHRLSQELGIDYKEAEAFIERYFQSFPKVRAWIERTLEEGRTRGYVETLFGRRRYVPDLASRVRSVREAAERMAFNMPVQGTAADLMKIAMVKLFPRLKPLGAHLLLQVHDELVLEVPEDRAEEAKALVKEVMENAYPLDVPLEVEVGVGRDWLEAKQD

SEQ ID NO: 43 - DNA, 2532 bp, synthetic construct
  misc_feature 1..2532: note = DNA Polymerase Variant
  source 1..2532: mol_type = other DNA
atgcaccatcatcatcatcatggcggtagcggcatgttaccgctgtttgatttggaagaaccaccaaaacgcgtgctgcttgttgacggccatcatctggcgtatcgtaccttctacgcactgagccttacgacctcacgtggtgagcctgtccagatggtgtatgggtttgctcgctccctgctgaaagccctgaaggaagatggtcaagccgtagtagtggttttcgatgcgaaagcaccgtcgtttcgtcacgaagcgtacgaggcctataaagctggccgcgcaccgaccccggaagactttccgcgtcagttagcgctcgtcaaacgcctcgtggatttgctgggattagttcgcttggaagctcctggctacgaggcggacgacgtgctcggtacactggccaagaaagcagaacgtgaaggcatggaggtctgcattcttaccggtgatcgcgatttcttccagctgctgtctgagaaagtgagcgttttgctgcccgatggcacgttagtaaccccgaaagatgtccaagagaaatatggagttccgccagaacgttgggtggactttcgcgcactgactggtgatcgttcagacaacatcccgggcgttgccgggattggtgaaaagacggcgctgcgcctgctggcagaatggggctcggtggaaaatctgctcaagaaccttgatcgtgtgaaacctgatagcttacgccgcaagatcgaagcccacctggaagacttgcgtctgagtctggatcttgcgcgtattcgcaccgatctgccgttggaagtagactttaaagctctgcgtcgtcgcacacccgatttagaggggttacgcgcgttcctcgaagaactggagtttggctccctgctgcatgaattcggtttgttgggcggagagaaaccgcgtgaagaagcaccatggccgccgcccgaaggtgcctttgtcggctttcttctgtcacgcaaagagccaatgtgggcggaactgttagctcttgcagccgccgcggaagggcgtgttcaccgcgcgacctctcctgtcgaggccctcgctgacctcaaagaagcacgtggtttcttggcgaaagatttagccgtgcttgcattacgcgaaggcgttgcgctcgatccgacggacgacccgcttttggtggcttatttgctcgatcctgcgaataccactccggaaggtgtagcccgtcgttacggcggcgagtttactgaagatgcggcagaacgcgcgttgcttagcgaacgcctcttccagacgttatttccacgtctttcggagaaattactctggctctatcaggaagtcgaacgtccattgagtcgcgtgcttgcccatatggaggctcgcggtgtgcgcttagatgttccgttgttagaagcactcagcttcgagttggagaaagaactggaacgtcttgaaggcgaagtctttcgtttagcggggcatcccttcaatctcaactctcgcgaccaattggagaaagtgctctttgatgaattaggtttaacccctgtaggacgcacagagaagaccggcaaacgttccactgctcagggagcattggaagcacttcgtggtgctcacccgatcgtcgaattgattttgcagtaccgcgagctcagcaaactcaaatcaacctatcttgatccgttacctcgtcttgttcatccacgtacgggtcgtttacacacccgcttcaatcaaacggcgacagccaccgggcgcttgtcgtcgagtgacccgaacctccagaatattccagtgcgcacgccgttaggccaacgcattcgtaaagcgtttgttgcggaagaaggttggttattacttgcggccgattactcccagatcgaacttcgtgtattggcgcatctctctggcgacgagaatcttaaacgcgtgtttcgcgaaggcaaggatattcacactgaaaccgcagcctggatgttcgggcttgacccagccttagtggaccccaagatgcgtcgtgccgccaagaccgtcaactttggcgtactctatggtatgtcagcacatcgtcttagtcaggaattgggcattgactacaaagaagctgaagcgtttatcgagcgctatttccaatcctttccgaaagttcgcgcgtggattgaacgtaccctcgaagaaggtcgcactcgcggctatgtggaaacgttattcgggcgtcgtcgctacgttccagatcttgcatctcgtgtccgctcagtgcgcgaagctgctgagcgtatggccttcaatatgcctgttcagggaacagcggcggacctcatgaagatcgccatggtgaaattgtttccgcgcttgaaacccttaggagcccaccttcttttacaggtgcatgatgaattggtcttggaagtacccgaggatcgcgcagaagaagccaaagcactcgtgaaagaggttatggaaaacgcgtatccgttagatgttccgttggaggtcgaagtgggtgtaggccgtgattggcttgaagcgaaacaagac

SEQ ID NO: 44 - protein, 844 aa, synthetic construct
  REGION 1..844: note = DNA Polymerase Variant
MHHHHHHGGSGMLPLFDLEEPPKRVLLVDGHHLAYRTFYALSLTTSRGEPVQMVYGFARSLLKALKEDGQAVVVVFDAKAPSFRHEAYEAYKAGRAPTPEDFPRQLALVKRLVDLLGLVRLEAPGYEADDVLGTLAKKAEREGMEVCILTGDRDFFQLLSEKVSVLLPDGTLVTPKDVQEKYGVPPERWVDFRALTGDRSDNIPGVAGIGEKTALRLLAEWGSVENLLKNLDRVKPDSLRRKIEAHLEDLRLSLDLARIRTDLPLEVDFKALRRRTPDLEGLRAFLEELEFGSLLHEFGLLGGEKPREEAPWPPPEGAFVGFLLSRKEPMWAELLALAAAAEGRVHRATSPVEALADLKEARGFLAKDLAVLALREGVALDPTDDPLLVAYLLDPANTTPEGVARRYGGEFTEDAAERALLSERLFQTLFPRLSEKLLWLYQEVERPLSRVLAHMEARGVRLDVPLLEALSFELEKELERLEGEVFRLAGHPFNLNSRDQLEKVLFDELGLTPVGRTEKTGKRSTAQGALEALRGAHPIVELILQYRELSKLKSTYLDPLPRLVHPRTGRLHTRFNQTATATGRLSSSDPNLQNIPVRTPLGQRIRKAFVAEEGWLLLAADYSQIELRVLAHLSGDENLKRVFREGKDIHTETAAWMFGLDPALVDPKMRRAAKTVNFGVLYGMSAHRLSQELGIDYKEAEAFIERYFQSFPKVRAWIERTLEEGRTRGYVETLFGRRRYVPDLASRVRSVREAAERMAFNMPVQGTAADLMKIAMVKLFPRLKPLGAHLLLQVHDELVLEVPEDRAEEAKALVKEVMENAYPLDVPLEVEVGVGRDWLEAKQD

SEQ ID NO: 45 - DNA, 2532 bp, synthetic construct
  misc_feature 1..2532: note = DNA Polymerase Variant
  source 1..2532: mol_type = other DNA
atgcaccatcatcatcatcatggcggtagcggcatgttaccgctgtttgatttggaagaaccaccaaaacgcgtgctgcttgttgacggccatcatctggcgtatcgtaccttctacgcactgagccttacgacctcacgtggtgagcctgtccagatggtgtatgggtttgctcgctccctgctgaaagccctgaaggaagatggtcaagccgtagtagtggttttcgatgcgaaagcaccgtcgtttcgtcacgaagcgtacgaggcctataaagctggccgcgcaccgaccccggaagactttccgcgtcagttagcgctcgtcaaacgcctcgtggatttgctgggattagttcgcttggaagctcctggctacgaggcggacgacgtgctcggtacactggccaagaaagcagaacgtgaaggcatggaggtctgcattcttaccggtgatcgcgatttcttccagctgctgtctgagaaagtgagcgttttgctgcccgatggcacgttagtaaccccgaaagatgtccaagagaaatatggagttccgccagaacgttgggtggactttcgcgcactgactggtgatcgttcagacaacatcccgggcgttgccgggattggtgaaaagacggcgctgcgcctgctggcagaatggggctcggtggaaaatctgctcaagaaccttgatcgtgtgaaacctgatagcttacgccgcaagatcgaagcccacctggaagacttgcgtctgagtctggatcttgcgcgtattcgcaccgatctgccgttggaagtagactttaaagctctgcgtcgtcgcacacccgatttagaggggttacgcgcgttcctcgaacgtctggagtttggctccctgctgcatgaattcggtttgttgggcggagagaaaccgcgtgaagaagcaccatggccgccgcccgaaggtgcctttgtcggctttcttctgtcacgcaaagagccaatgtgggcggaactgttagctcttgcagccgccgcggaagggcgtgttcaccgcgcgacctctcctgtcgaggccctcgctgacctcaaagaagcacgtggtttcttggcgaaagatttagccgtgcttgcattacgcgaaggcgttgcgctcgatccgacggacgacccgcttttggtggcttatttgctcgatcctgcgaataccaatccggaaggtgtagcccgtcgttacggcggcgagtttactgaagatgcggcagaacgcgcgttgcttagcgaacgcctcttccagacgttatttccacgtctttcggagaaattactctggctctatcaggaagtcgaacgtccattgagtcgcgtgcttgcccatatggaggctcgcggtgtgcgcttagatgttccgttgttagaagcactcagcttcgagttggagaaagaaatggaacgtcttgaaggcgaagtctttcgtttagcggggcatcccttcaatctcaactctcgcgaccaattggagaaagtgctctttgatgaattaggtttaacccctatcggacgtacagagaagaccggcaaacgttccactgctcagggagcattggaagcacttcgtggtgctcacccgatcgtcgagttgattttgcagtaccgcgagctcagtaaactcaaaaacacctatattgatccgttacctcgtcttgttcatccacgtacgggtcgtttacacacccgcttcaatcaaacggcgacagccaccgggcgcttgtcgtcgagtgacccgaacctccagaatattccagtgcgcacgccgttaggccaacgcattcgtaaagcgtttgttgcggaagaaggttggttattacttgcggccgattactcccagatcgaacttcgtgtattggcgcatctctctggcgacgagaatcttaaacgcgtgtttcgcgaaggcaaggatattcacactgaaaccgcagcctggatgttcgggcttgacccagccttagtggaccccaagatgcgtcgtgccgccaagaccgtcaactttggcgtactctatggtatgtcagcacatcgtcttagtcaggaattgggcattgactacaaagaagctgaagcgtttatcgagcgctatttccaatcctttccgaaagttcgcgcgtggattgaacgtaccctcgaagaaggtcgcactcgcggctatgtggaaacgttattcgggcgtcgtcgctacgttccagatcttgcatctcgtgtccgctcagtgcgcgaagctgctgagcgtatggccttcaatatgcctgttcagggaacagcggcggacctcatgaagatcgccatggtgaaattgtttccgcgcttgaaacccttaggagcccaccttcttttacaggtgcatgatgaattggtcttggaagtacccgaggatcgcgcagaagaagccaaagcactcgtgaaagaggttatggaaaacgcgtatccgttagatgttccgttggaggtcgaagtgggtgtaggccgtgattggcttgaagcgaaacaagac

SEQ ID NO: 46 - protein, 844 aa, synthetic construct
  REGION 1..844: note = DNA Polymerase Variant
MHHHHHHGGSGMLPLFDLEEPPKRVLLVDGHHLAYRTFYALSLTTSRGEPVQMVYGFARSLLKALKEDGQAVVVVFDAKAPSFRHEAYEAYKAGRAPTPEDFPRQLALVKRLVDLLGLVRLEAPGYEADDVLGTLAKKAEREGMEVCILTGDRDFFQLLSEKVSVLLPDGTLVTPKDVQEKYGVPPERWVDFRALTGDRSDNIPGVAGIGEKTALRLLAEWGSVENLLKNLDRVKPDSLRRKIEAHLEDLRLSLDLARIRTDLPLEVDFKALRRRTPDLEGLRAFLERLEFGSLLHEFGLLGGEKPREEAPWPPPEGAFVGFLLSRKEPMWAELLALAAAAEGRVHRATSPVEALADLKEARGFLAKDLAVLALREGVALDPTDDPLLVAYLLDPANTNPEGVARRYGGEFTEDAAERALLSERLFQTLFPRLSEKLLWLYQEVERPLSRVLAHMEARGVRLDVPLLEALSFELEKEMERLEGEVFRLAGHPFNLNSRDQLEKVLFDELGLTPIGRTEKTGKRSTAQGALEALRGAHPIVELILQYRELSKLKNTYIDPLPRLVHPRTGRLHTRFNQTATATGRLSSSDPNLQNIPVRTPLGQRIRKAFVAEEGWLLLAADYSQIELRVLAHLSGDENLKRVFREGKDIHTETAAWMFGLDPALVDPKMRRAAKTVNFGVLYGMSAHRLSQELGIDYKEAEAFIERYFQSFPKVRAWIERTLEEGRTRGYVETLFGRRRYVPDLASRVRSVREAAERMAFNMPVQGTAADLMKIAMVKLFPRLKPLGAHLLLQVHDELVLEVPEDRAEEAKALVKEVMENAYPLDVPLEVEVGVGRDWLEAKQD

SEQ ID NO: 47 - DNA, 2532 bp, synthetic construct
  misc_feature 1..2532: note = DNA Polymerase Variant
  source 1..2532: mol_type = other DNA
atgcaccatcatcatcatcatggcggtagcggcatgttaccgctgtttgatttggaagaaccaccaaaacgcgtgctgcttgttgacggccatcatctggcgtatcgtaccttctacgcactgagccttacgacctcacgtggtgagcctgtccagatggtgtatgggtttgctcgctccctgctgaaagccctgaaggaagatggtcaagccgtagtagtggttttcgatgcgaaagcaccgtcgtttcgtcacgaagcgtacgaggcctataaagctggccgcgcaccgaccccggaagactttccgcgtcagttagcgctcgtcaaacgcctcgtggatttgctgggattagttcgcttggaagctcctggctacgaggcggacgacgtgctcggtacactggccaagaaagcagaacgtgaaggcatggaggtctgcattcttaccggtgatcgcgatttcttccagctgctgtctgagaaagtgagcgttttgctgcccgatggcacgttagtaaccccgaaagatgtccaagagaaatatggagttccgccagaacgttgggtggactttcgcgcactgactggtgatcgttcagacaacatcccgggcgttgccgggattggtgaaaagacggcgctgcgcctgctggcagaatggggctcggtggaaaatctgctcaagaaccttgatcgtgtgaaacctgatagcttacgccgcaagatcgaagcccacctggaagacttgcgtctgagtctggatcttgcgcgtattcgcaccgatctgccgttggaagtagactttaaagctctgcgtcgtcgcacacccgatttagaggggttacgcgcgttcctcgaagaactggagtttggctccctgctgcatgaattcggtttgttgggcggagagaaaccgcgtgaagaagcaccatggccgccgcccgaaggtgcctttgtcggctttcttctgtcacgcaaagagccaatgtgggcggaactgttagctcttgcagccgccgcggaagggcgtgttcaccgcgcgacctctcctgtcgaggccctcgctgacctcaaagaagcacgtggtttcttggcgaaagatttagccgtgcttgcattacgcgaaggcgttgcgctcgatccgacggacgacccgcttttggtggcttatttgctcgatcctgcgaataccaatccggaaggtgtagcccgtcgttacggcggcgagtttactgaagatgcggcagaacgcgcgttgcttagcgaacgcctcttccagacgttatttccacgtctttcggagaaattactctggctctatcaggaagtcgaacgtccattgagtcgcgtgcttgcccatatggaggctcgcggtgtgcgcttagatgttccgttgttagaagcactcagcttcgagttggagaaagaactggaacgtcttgaaggcgaagtctttcgtttagcggggcatcccttcaatctcaactctcgcgaccaattggagaaagtgctctttgatgaattaggtttaacccctatcggaaaaacagagaagaccggcaaacgttccacttcggcaggcgtcttggaagcacttcgtggtgctcacccgatcgtcgagttgattttgcagtaccgcgagctcagtaaactcaaaagcacctatattgatccgttacctcgtcttgttcatccacgtacgggtcgtttacacacccgcttcaatcaaacggcgacagccaccgggcgcttgtcgtcgagtgacccgaacctccagaatattccagtgcgcacgccgttaggccaacgcattcgtaaagcgtttgttgcggaagaaggttggttattacttgcggccgattactcccagatcgaacttcgtgtattggcgcatctctctggcgacgagaatcttaaacgcgtgtttcgcgaaggcaaggatattcacactgaaaccgcagcctggatgttcgggcttgacccagccttagtggaccccaagatgcgtcgtgccgccaagaccgtcaactttggtgtactctatggtatgtcagcacatcgtcttagtcaggaattgggcattgactacaaagaagctgaagcgtttatcgagcgctatttccaatcctttccgaaagttcgcgcgtggattgaacgtaccctcgaagaaggtcgcactcgcggctatgtggaaacgttattcgggcgtcgtcgctacgttccagatcttgcatctcgtgtccgctcagtgcgcgaagctgctgagcgtatggccttcaatatgcctgttcagggaacagcggcggacctcatgaagatcgccatggtgaaattgtttccgcgcttgaaacccttaggagcccaccttcttttacaggtgcatgatgaattggtcttggaagtacccgaggatcgcgcagaagaagccaaagcactcgtgaaagaggttatggaaaacgcgtatccgttagatgttccgttggaggtcgaagtgggtgtaggccgtgattggcttgaagcgaaacaagac

SEQ ID NO: 48 - protein, 844 aa, synthetic construct
  REGION 1..844: note = DNA Polymerase Variant
MHHHHHHGGSGMLPLFDLEEPPKRVLLVDGHHLAYRTFYALSLTTSRGEPVQMVYGFARSLLKALKEDGQAVVVVFDAKAPSFRHEAYEAYKAGRAPTPEDFPRQLALVKRLVDLLGLVRLEAPGYEADDVLGTLAKKAEREGMEVCILTGDRDFFQLLSEKVSVLLPDGTLVTPKDVQEKYGVPPERWVDFRALTGDRSDNIPGVAGIGEKTALRLLAEWGSVENLLKNLDRVKPDSLRRKIEAHLEDLRLSLDLARIRTDLPLEVDFKALRRRTPDLEGLRAFLEELEFGSLLHEFGLLGGEKPREEAPWPPPEGAFVGFLLSRKEPMWAELLALAAAAEGRVHRATSPVEALADLKEARGFLAKDLAVLALREGVALDPTDDPLLVAYLLDPANTNPEGVARRYGGEFTEDAAERALLSERLFQTLFPRLSEKLLWLYQEVERPLSRVLAHMEARGVRLDVPLLEALSFELEKELERLEGEVFRLAGHPFNLNSRDQLEKVLFDELGLTPIGKTEKTGKRSTSAGVLEALRGAHPIVELILQYRELSKLKSTYIDPLPRLVHPRTGRLHTRFNQTATATGRLSSSDPNLQNIPVRTPLGQRIRKAFVAEEGWLLLAADYSQIELRVLAHLSGDENLKRVFREGKDIHTETAAWMFGLDPALVDPKMRRAAKTVNFGVLYGMSAHRLSQELGIDYKEAEAFIERYFQSFPKVRAWIERTLEEGRTRGYVETLFGRRRYVPDLASRVRSVREAAERMAFNMPVQGTAADLMKIAMVKLFPRLKPLGAHLLLQVHDELVLEVPEDRAEEAKALVKEVMENAYPLDVPLEVEVGVGRDWLEAKQD

SEQ ID NO: 49 - DNA, 2532 bp, synthetic construct
  misc_feature 1..2532: note = DNA Polymerase Variant
  source 1..2532: mol_type = other DNA
atgcaccatcatcatcatcatggcggtagcggcatgttaccgctgtttgatttggaagaaccaccaaaacgcgtgctgcttgttgacggccatcatctggcgtatcgtaccttctacgcactgagccttacgacctcacgtggtgagcctgtccagatggtgtatgggtttgctcgctccctgctgaaagccctgaaggaagatggtcaagccgtagtagtggttttcgatgcgaaagcaccgtcgtttcgtcacgaagcgtacgaggcctataaagctggccgcgcaccgaccccggaagactttccgcgtcagttagcgctcgtcaaacgcctcgtggatttgctgggattagttcgcttggaagctcctggctacgaggcggacgacgtgctcggtacactggccaagaaagcagaacgtgaaggcatggaggtctgcattcttaccggtgatcgcgatttcttccagctgctgtctgagaaagtgagcgttttgctgcccgatggcacgttagtaaccccgaaagatgtccaagagaaatatggagttccgccagaacgttgggtggactttcgcgcactgactggtgatcgttcagacaacatcccgggcgttgccgggattggtgaaaagacggcgctgcgcctgctggcagaatggggctcggtggaaaatctgctcaagaaccttgatcgtgtgaaacctgatagcttacgccgcaagatcgaagcccacctggaagacttgcgtctgagtctggatcttgcgcgtattcgcaccgatctgccgttggaagtagactttaaagctctgcgtcgtcgcacacccgatttagaggggttacgcgcgttcctcgaagaactggagtttggctccctgctgcatgaattcggtttgttgggcggagagaaaccgcgtgaagaagcaccatggccgccgcccgaaggtgcctttgtcggctttcttctgtcacgcaaagagccaatgtgggcggaactgttagctcttgcagccgccgcggaagggcgtgttcaccgcgcgacctctcctgtcgaggccctcgctgacctcaaagaagcacgtggtttcttggcgaaagatttagccgtgcttgcattacgcgaaggcgttgcgctcgatccgacggacgacccgcttttggtggcttatttgctcgatcctgcgaataccactccggaaggtgtagcccgtcgttacggcggcgagtttactgaagatgcggcagaacgcgcgttgcttagcgaacgcctcttccagacgttatttccacgtctttcggagaaattactctggctctatcaggaagtcgaacgtccattgagtcgcgtgcttgcccatatggaggctcgcggtgtgcgcttagatgttccgttgttagaagcactcagcttcgagttggagaaagaaatggaacgtcttgaaggcgaagtctttcgtttagcggggcatcccttcaatctcaactctcgcgaccaattggagaaagtgctctttgatgaattaggtttaacccctgtcggacgtacagagaagaccggcaaacgttccactgctcagggagcattggaagcacttcgtggtgctcacccgatcgtcgacttgattttgcagtaccgcgagctcactaaactcaaaaacacctatctggatccgttacctcgtcttgttcatccacgtacgggtcgtttacacacccgcttcaatcaaacggcgacagccaccgggcgcttgtcgtcgagtgacccgaacctccagaatattccagtgcgcacgccgttaggccaacgcattcgtaaagcgtttgttgcggaagaaggttggttattacttgcggccgattactcccagatcgaacttcgtgtattggcgcatctctctggcgacgagaatcttaaacgcgtgtttcgcgaaggcaaggatattcacactgaaaccgcagcctggatgttcgggcttgacccagccttagtggaccccaagatgcgtcgtgccgccaagaccgtcaactttggcgtactctatggtatgtcagcacatcgtcttagtcaggaattgggcattgactacaaagaagctgaagcgtttatcgagcgctatttccaatcctttccgaaagttcgcgcgtggattgaacgtaccctcgaagaaggtcgcactcgcggctatgtggaaacgttattcgggcgtcgtcgctacgttccagatcttgcatctcgtgtccgctcagtgcgcgaagctgctgagcgtatggccttcaatatgcctgttcagggaacagcggcggacctcatgaagatcgccatggtgaaattgtttccgcgcttgaaacccttaggagcccaccttcttttacaggtgcatgatgaattggtcttggaagtacccgaggatcgcgcagaagaagccaaagcactcgtgaaagaggttatggaaaacgcgtatccgttagatgttccgttggaggtcgaagtgggtgtaggccgtgattggcttgaagcgaaacaagac

SEQ ID NO: 50 - protein, 844 aa, synthetic construct
  REGION 1..844: note = DNA Polymerase Variant
MHHHHHHGGSGMLPLFDLEEPPKRVLLVDGHHLAYRTFYALSLTTSRGEPVQMVYGFARSLLKALKEDGQAVVVVFDAKAPSFRHEAYEAYKAGRAPTPEDFPRQLALVKRLVDLLGLVRLEAPGYEADDVLGTLAKKAEREGMEVCILTGDRDFFQLLSEKVSVLLPDGTLVTPKDVQEKYGVPPERWVDFRALTGDRSDNIPGVAGIGEKTALRLLAEWGSVENLLKNLDRVKPDSLRRKIEAHLEDLRLSLDLARIRTDLPLEVDFKALRRRTPDLEGLRAFLEELEFGSLLHEFGLLGGEKPREEAPWPPPEGAFVGFLLSRKEPMWAELLALAAAAEGRVHRATSPVEALADLKEARGFLAKDLAVLALREGVALDPTDDPLLVAYLLDPANTTPEGVARRYGGEFTEDAAERALLSERLFQTLFPRLSEKLLWLYQEVERPLSRVLAHMEARGVRLDVPLLEALSFELEKEMERLEGEVFRLAGHPFNLNSRDQLEKVLFDELGLTPVGRTEKTGKRSTAQGALEALRGAHPIVDLILQYRELTKLKNTYLDPLPRLVHPRTGRLHTRFNQTATATGRLSSSDPNLQNIPVRTPLGQRIRKAFVAEEGWLLLAADYSQIELRVLAHLSGDENLKRVFREGKDIHTETAAWMFGLDPALVDPKMRRAAKTVNFGVLYGMSAHRLSQELGIDYKEAEAFIERYFQSFPKVRAWIERTLEEGRTRGYVETLFGRRRYVPDLASRVRSVREAAERMAFNMPVQGTAADLMKIAMVKLFPRLKPLGAHLLLQVHDELVLEVPEDRAEEAKALVKEVMENAYPLDVPLEVEVGVGRDWLEAKQD

SEQ ID NO: 51 - DNA, 2532 bp, synthetic construct
  misc_feature 1..2532: note = DNA Polymerase Variant
  source 1..2532: mol_type = other DNA
atgcaccatcatcatcatcatggcggtagcggcatgttaccgctgtttgatttggaagaaccaccaaaacgcgtgctgcttgttgacggccatcatctggcgtatcgtaccttctacgcactgagccttacgacctcacgtggtgagcctgtccagatggtgtatgggtttgctcgctccctgctgaaagccctgaaggaagatggtcaagccgtagtagtggttttcgatgcgaaagcaccgtcgtttcgtcacgaagcgtacgaggcctataaagctggccgcgcaccgaccccggaagactttccgcgtcagttagcgctcgtcaaacgcctcgtggatttgctgggattagttcgcttggaagctcctggctacgaggcggacgacgtgctcggtacactggccaagaaagcagaacgtgaaggcatggaggtctgcattcttaccggtgatcgcgatttcttccagctgctgtctgagaaagtgagcgttttgctgcccgatggcacgttagtaaccccgaaagatgtccaagagaaatatggagttccgccagaacgttgggtggactttcgcgcactgactggtgatcgttcagacaacatcccgggcgttgccgggattggtgaaaagacggcgctgcgcctgctggcagaatggggctcggtggaaaatctgctcaagaaccttgatcgtgtgaaacctgatagcttacgccgcaagatcgaagcccacctggaagacttgcgtctgagtctggatcttgcgcgtattcgcaccgatctgccgttggaagtagactttaaagctctgcgtcgtcgcacacccgatttagaggggttacgcgcgttcctcgaagaactggagtttggctccctgctgcatgaattcggtttgttgggcggagagaaaccgcgtgaagaagcaccatggccgccgcccgaaggtgcctttgtcggctttcttctgtcacgcaaagagccaatgtgggcggaactgttagctcttgcagccgccgcggaagggcgtgttcaccgcgcgacctctcctgtcgaggccctcgctgacctcaaagaagcacgtggtttcttggcgaaagatttagccgtgcttgcattacgcgaaggcgttgcgctcgatccgacggacgacccgcttttggtggcttatttgctcgatcctgcgaataccaatccggaaggtgtagcccgtcgttacggcggcgagtttactgaagatgcggcagaacgcgcgttgcttagcgaacgcctcttccagacgttatttccacgtctttcggagaaattactctggctctatcaggaagtcgaacgtccattgagtcgcgtgcttgcccatatggaggctcgcggtgtgcgcttagatgttccgttgttagaagcactcagcttcgagttggagaaagaaatggaacgtcttgaaggcgaagtctttcgtttagcggggcatcccttcaatctcaactctcgcgaccaattggagaaagtgctctttgatgaattaggtttaacccctgtcggaaaaacagagaagaccggcaaacgttccactgcgcaaggcgtcttggaagcacttcgtggtgctcacccgatcgtcgacttgattttgcagtaccgcgagctcagtaaactcaaaggcacctatattgatccgttacctcgtcttgttcatccacgtacgggtcgtttacacacccgcttcaatcaaacggcgacagccaccgggcgcttgtcgtcgagtgacccgaacctccagaatattccagtgcgcacgccgttaggccaacgcattcgtaaagcgtttgttgcggaagaaggttggttattacttgcggccgattactcccagatcgaacttcgtgtattggcgcatctctctggcgacgagaatcttaaacgcgtgtttcgcgaaggcaaggatattcacactgaaaccgcagcctggatgttcgggcttgacccagccttagtggaccccaagatgcgtcgtgccgccaagaccgtcaactttggcgtactctatggtatgtcagcacatcgtcttagtcaggaattgggcattgactacaaagaagctgaagcgtttatcgagcgctatttccaatcctttccgaaagttcgcgcgtggattgaacgtaccctcgaagaaggtcgcactcgcggctatgtggaaacgttattcgggcgtcgtcgctacgttccagatcttgcatctcgtgtccgctcagtgcgcgaagctgctgagcgtatggccttcaatatgcctgttcagggaacagcggcggacctcatgaagatcgccatggtgaaattgtttccgcgcttgaaacccttaggagcccaccttcttttacaggtgcatgatgaattggtcttggaagtacccgaggatcgcgcagaagaagccaaagcactcgtgaaagaggttatggaaaacgcgtatccgttagatgttccgttggaggtcgaagtgggtgtaggccgtgattggcttgaagcgaaacaagac

SEQ ID NO: 52 - protein, 844 aa, synthetic construct
  REGION 1..844: note = DNA Polymerase Variant
MHHHHHHGGSGMLPLFDLEEPPKRVLLVDGHHLAYRTFYALSLTTSRGEPVQMVYGFARSLLKALKEDGQAVVVVFDAKAPSFRHEAYEAYKAGRAPTPEDFPRQLALVKRLVDLLGLVRLEAPGYEADDVLGTLAKKAEREGMEVCILTGDRDFFQLLSEKVSVLLPDGTLVTPKDVQEKYGVPPERWVDFRALTGDRSDNIPGVAGIGEKTALRLLAEWGSVENLLKNLDRVKPDSLRRKIEAHLEDLRLSLDLARIRTDLPLEVDFKALRRRTPDLEGLRAFLEELEFGSLLHEFGLLGGEKPREEAPWPPPEGAFVGFLLSRKEPMWAELLALAAAAEGRVHRATSPVEALADLKEARGFLAKDLAVLALREGVALDPTDDPLLVAYLLDPANTNPEGVARRYGGEFTEDAAERALLSERLFQTLFPRLSEKLLWLYQEVERPLSRVLAHMEARGVRLDVPLLEALSFELEKEMERLEGEVFRLAGHPFNLNSRDQLEKVLFDELGLTPVGKTEKTGKRSTAQGVLEALRGAHPIVDLILQYRELSKLKGTYIDPLPRLVHPRTGRLHTRFNQTATATGRLSSSDPNLQNIPVRTPLGQRIRKAFVAEEGWLLLAADYSQIELRVLAHLSGDENLKRVFREGKDIHTETAAWMFGLDPALVDPKMRRAAKTVNFGVLYGMSAHRLSQELGIDYKEAEAFIERYFQSFPKVRAWIERTLEEGRTRGYVETLFGRRRYVPDLASRVRSVREAAERMAFNMPVQGTAADLMKIAMVKLFPRLKPLGAHLLLQVHDELVLEVPEDRAEEAKALVKEVMENAYPLDVPLEVEVGVGRDWLEAKQD

SEQ ID NO: 53 - DNA, 2532 bp, synthetic construct
  misc_feature 1..2532: note = DNA Polymerase Variant
  source 1..2532: mol_type = other DNA
atgcaccatcatcatcatcatggcggtagcggcatgttaccgctgtttgatttggaagaaccaccaaaacgcgtgctgcttgttgacggccatcatctggcgtatcgtaccttctacgcactgagccttacgacctcacgtggtgagcctgtccagatggtgtatgggtttgctcgctccctgctgaaagccctgaaggaagatggtcaagccgtagtagtggttttcgatgcgaaagcaccgtcgtttcgtcacgaagcgtacgaggcctataaagctggccgcgcaccgaccccggaagactttccgcgtcagttagcgctcgtcaaacgcctcgtggatttgctgggattagttcgcttggaagctcctggctacgaggcggacgacgtgctcggtacactggccaagaaagcagaacgtgaaggcatggaggtctgcattcttaccggtgatcgcgatttcttccagctgctgtctgagaaagtgagcgttttgctgcccgatggcacgttagtaaccccgaaagatgtccaagagaaatatggagttccgccagaacgttgggtggactttcgcgcactgactggtgatcgttcagacaacatcccgggcgttgccgggattggtgaaaagacggcgctgcgcctgctggcagaatggggctcggtggaaaatctgctcaagaaccttgatcgtgtgaaacctgatagcttacgccgcaagatcgaagcccacctggaagacttgcgtctgagtctggatcttgcgcgtattcgcaccgatctgccgttggaagtagactttaaagctctgcgtcgtcgcacacccgatttagaggggttacgcgcgttcctcgaagaactggagtttggctccctgctgcatgaattcggtttgttgggcggagagaaaccgcgtgaagaagcaccatggccgccgcccgaaggtgcctttgtcggctttcttctgtcacgcaaagagccaatgtgggcggaactgttagctcttgcagccgccgcggaagggcgtgttcaccgcgcgacctctcctgtcgaggccctcgctgacctcaaagaagcacgtggtttcttggcgaaagatttagccgtgcttgcattacgcgaaggcgttgcgctcgatccgacggacgacccgcttttggtggcttatttgctcgatcctgcgaataccaacccggaaggtgtagcccgtcgttacggcggcgagtttactgaagatgcggcagaacgcgcgttgcttagcgaacgcctcttccagacgttatttccacgtctttcggagaaattactctggctctatcaggaagtcgaacgtccattgagtcgcgtgcttgcccatatggaggctcgcggtgtgcgcttagatgttccgttgttagaagcactcagcttcgagttggagaaagaaatcgaacgtcttgaaggcgaagtctttcgtttagcggggcatcccttcaatctcaactctcgcgaccaattggagaaagtgctctttgatgaattaggtttaacccctgtaggacgcacagagaagaccggcaaacgttccactgctcagggagcattggaagcacttcgtggtgctcacccgatcgtcgacttgattttgcagtaccgcgagctcagtaaactcaaaggcacctatattgatccgttacctcgtcttgttcatccacgtacgggtcgtttacacacccgcttcaatcaaacggcgacagccaccgggcgcttgtcgtcgagtgacccgaacctccagaatattccagtgcgcacgccgttaggccaacgcattcgtaaagcgtttgttgcggaagaaggttggttattacttgcggccgattactcccagatcgaacttcgtgtattggcgcatctctctggcgacgagaatcttaaacgcgtgtttcgcgaaggcaaggatattcacactgaaaccgcagcctggatgttcgggcttgacccagccttagtggaccccaagatgcgtcgtgccgccaagaccgtcaactttggcgtactctatggtatgtcagcacatcgtcttagtcaggaattgggcattgactacaaagaagctgaagcgtttatcgagcgctatttccaatcctttccgaaagttcgcgcgtggattgaacgtaccctcgaagaaggtcgcactcgcggctatgtggaaacgttattcgggcgtcgtcgctacgttccagatcttgcatctcgtgtccgctcagtgcgcgaagctgctgagcgtatggccttcaatatgcctgttcagggaacagcggcggacctcatgaagatcgccatggtgaaattgtttccgcgcttgaaacccttaggagcccaccttcttttacaggtgcatgatgaattggtcttggaagtacccgaggatcgcgcagaagaagccaaagcactcgtgaaagaggttatggaaaacgcgtatccgttagatgttccgttggaggtcgaagtgggtgtaggccgtgattggcttgaagcgaaacaagac

SEQ ID NO: 54 - protein, 844 aa, synthetic construct
  REGION 1..844: note = DNA Polymerase Variant
MHHHHHHGGSGMLPLFDLEEPPKRVLLVDGHHLAYRTFYALSLTTSRGEPVQMVYGFARSLLKALKEDGQAVVVVFDAKAPSFRHEAYEAYKAGRAPTPEDFPRQLALVKRLVDLLGLVRLEAPGYEADDVLGTLAKKAEREGMEVCILTGDRDFFQLLSEKVSVLLPDGTLVTPKDVQEKYGVPPERWVDFRALTGDRSDNIPGVAGIGEKTALRLLAEWGSVENLLKNLDRVKPDSLRRKIEAHLEDLRLSLDLARIRTDLPLEVDFKALRRRTPDLEGLRAFLEELEFGSLLHEFGLLGGEKPREEAPWPPPEGAFVGFLLSRKEPMWAELLALAAAAEGRVHRATSPVEALADLKEARGFLAKDLAVLALREGVALDPTDDPLLVAYLLDPANTNPEGVARRYGGEFTEDAAERALLSERLFQTLFPRLSEKLLWLYQEVERPLSRVLAHMEARGVRLDVPLLEALSFELEKEIERLEGEVFRLAGHPFNLNSRDQLEKVLFDELGLTPVGRTEKTGKRSTAQGALEALRGAHPIVDLILQYRELSKLKGTYIDPLPRLVHPRTGRLHTRFNQTATATGRLSSSDPNLQNIPVRTPLGQRIRKAFVAEEGWLLLAADYSQIELRVLAHLSGDENLKRVFREGKDIHTETAAWMFGLDPALVDPKMRRAAKTVNFGVLYGMSAHRLSQELGIDYKEAEAFIERYFQSFPKVRAWIERTLEEGRTRGYVETLFGRRRYVPDLASRVRSVREAAERMAFNMPVQGTAADLMKIAMVKLFPRLKPLGAHLLLQVHDELVLEVPEDRAEEAKALVKEVMENAYPLDVPLEVEVGVGRDWLEAKQD

SEQ ID NO: 55 - DNA, 2532 bp, synthetic construct
  misc_feature 1..2532: note = DNA Polymerase Variant
  source 1..2532: mol_type = other DNA
atgcaccatcatcatcatcatggcggtagcggcatgttaccgctgtttgatttggaagaaccaccaaaacgcgtgctgcttgttgacggccatcatctggcgtatcgtaccttctacgcactgagccttacgacctcacgtggtgagcctgtccagatggtgtatgggtttgctcgctccctgctgaaagccctgaaggaagatggtcaagccgtagtagtggttttcgatgcgaaagcaccgtcgtttcgtcacgaagcgtacgaggcctataaagctggccgcgcaccgaccccggaagactttccgcgtcagttagcgctcgtcaaacgcctcgtggatttgctgggattagttcgcttggaagctcctggctacgaggcggacgacgtgctcggtacactggccaagaaagcagaacgtgaaggcatggaggtctgcattcttaccggtgatcgcgatttcttccagctgctgtctgagaaagtgagcgttttgctgcccgatggcacgttagtaaccccgaaagatgtccaagagaaatatggagttccgccagaacgttgggtggactttcgcgcactgactggtgatcgttcagacaacatcccgggcgttgccgggattggtgaaaagacggcgctgcgcctgctggcagaatggggctcggtggaaaatctgctcaagaaccttgatcgtgtgaaacctgatagcttacgccgcaagatcgaagcccacctggaagacttgcgtctgagtctggatcttgcgcgtattcgcaccgatctgccgttggaagtagactttaaagctctgcgtcgtcgcacacccgatttagaggggttacgcgcgttcctcgaacgtctggagtttggctccctgctgcatgaattcggtttgttgggcggagagaaaccgcgtgaagaagcaccatggccgccgcccgaaggtgcctttgtcggctttcttctgtcacgcaaagagccaatgtgggcggaactgttagctcttgcagccgccgcggaagggcgtgttcaccgcgcgacctctcctgtcgaggccctcgctgacctcaaagaagcacgtggtttcttggcgaaagatttagccgtgcttgcattacgcgaaggcgttgcgctcgatccgacggacgacccgcttttggtggcttatttgctcgatcctgcgaataccaatccggaaggtgtagcccgtcgttacggcggcgagtttactgaagatgcggcagaacgcgcgttgcttagcgaacgcctcttccagacgttatttccacgtctttcggagaaattactctggctctatcaggaagtcgaacgtccattgagtcgcgtgcttgcccatatggaggctcgcggtgtgcgcttagatgttccgttgttagaagcactcagcttcgagttggagaaagaactggaacgtcttgaaggcgaagtctttcgtttagcggggcatcccttcaatctcaactctcgcgaccaattggagaaagtgctctttgatgaattaggtttaacccctgtaggacgcacagagaagaccggcaaacgttccacttcgcaaagtgtcttggaagcacttcgtggtgctcacccgatcgtcgagttgattttgcagtaccgcgagctcagtaaactcaaaaacacctatattgatccgttacctcgtcttgttcatccacgtacgggtcgtttacacacccgcttcaatcaaacggcgacagccaccgggcgcttgtcgtcgagtgacccgaacctccagaatattccagtgcgcacgccgttaggccaacgcattcgtaaagcgtttgttgcggaagaaggttggttattacttgcggccgattactcccagatcgaacttcgtgtattggcgcatctctctggcgacgagaatcttaaacgcgtgtttcgcgaaggcaaggatattcacactgaaaccgcagcctggatgttcgggcttgacccagccttagtggaccccaagatgcgtcgtgccgccaagaccgtcaactttggcgtactctatggtatgtcagcacatcgtcttagtcaggaattgggcattgactacaaagaagctgaagcgtttatcgagcgctatttccaatcctttccgaaagttcgcgcgtggattgaacgtaccctcgaagaaggtcgcactcgcggctatgtggaaacgttattcgggcgtcgtcgctacgttccagatcttgcatctcgtgtccgctcagtgcgcgaagctgctgagcgtatggccttcaatatgcctgttcagggaacagcggcggacctcatgaagatcgccatggtgaaattgtttccgcgcttgaaacccttaggagcccaccttcttttacaggtgcatgatgaattggtcttggaagtacccgaggatcgcgcagaagaagccaaagcactcgtgaaagaggttatggaaaacgcgtatccgttagatgttccgttggaggtcgaagtgggtgtaggccgtgattggcttgaagcgaaacaagac

SEQ ID NO: 56 - protein, 844 aa, synthetic construct
  REGION 1..844: note = DNA Polymerase Variant
MHHHHHHGGSGMLPLFDLEEPPKRVLLVDGHHLAYRTFYALSLTTSRGEPVQMVYGFARSLLKALKEDGQAVVVVFDAKAPSFRHEAYEAYKAGRAPTPEDFPRQLALVKRLVDLLGLVRLEAPGYEADDVLGTLAKKAEREGMEVCILTGDRDFFQLLSEKVSVLLPDGTLVTPKDVQEKYGVPPERWVDFRALTGDRSDNIPGVAGIGEKTALRLLAEWGSVENLLKNLDRVKPDSLRRKIEAHLEDLRLSLDLARIRTDLPLEVDFKALRRRTPDLEGLRAFLERLEFGSLLHEFGLLGGEKPREEAPWPPPEGAFVGFLLSRKEPMWAELLALAAAAEGRVHRATSPVEALADLKEARGFLAKDLAVLALREGVALDPTDDPLLVAYLLDPANTNPEGVARRYGGEFTEDAAERALLSERLFQTLFPRLSEKLLWLYQEVERPLSRVLAHMEARGVRLDVPLLEALSFELEKELERLEGEVFRLAGHPFNLNSRDQLEKVLFDELGLTPVGRTEKTGKRSTSQSVLEALRGAHPIVELILQYRELSKLKNTYIDPLPRLVHPRTGRLHTRFNQTATATGRLSSSDPNLQNIPVRTPLGQRIRKAFVAEEGWLLLAADYSQIELRVLAHLSGDENLKRVFREGKDIHTETAAWMFGLDPALVDPKMRRAAKTVNFGVLYGMSAHRLSQELGIDYKEAEAFIERYFQSFPKVRAWIERTLEEGRTRGYVETLFGRRRYVPDLASRVRSVREAAERMAFNMPVQGTAADLMKIAMVKLFPRLKPLGAHLLLQVHDELVLEVPEDRAEEAKALVKEVMENAYPLDVPLEVEVGVGRDWLEAKQD

SEQ ID NO: 57 - DNA, 2532 bp, synthetic construct
  misc_feature 1..2532: note = DNA Polymerase Variant
  source 1..2532: mol_type = other DNA
atgcaccatcatcatcatcatggcggtagcggcatgttaccgctgtttgatttggaagaaccaccaaaacgcgtgctgcttgttgacggccatcatctggcgtatcgtaccttctacgcactgagccttacgacctcacgtggtgagcctgtccagatggtgtatgggtttgctcgctccctgctgaaagccctgaaggaagatggtcaagccgtagtagtggttttcgatgcgaaagcaccgtcgtttcgtcacgaagcgtacgaggcctataaagctggccgcgcaccgaccccggaagactttccgcgtcagttagcgctcgtcaaacgcctcgtggatttgctgggattagttcgcttggaagctcctggctacgaggcggacgacgtgctcggtacactggccaagaaagcagaacgtgaaggcatggaggtctgcattcttaccggtgatcgcgatttcttccagctgctgtctgagaaagtgagcgttttgctgcccgatggcacgttagtaaccccgaaagatgtccaagagaaatatggagttccgccagaacgttgggtggactttcgcgcactgactggtgatcgttcagacaacatcccgggcgttgccgggattggtgaaaagacggcgctgcgcctgctggcagaatggggctcggtggaaaatctgctcaagaaccttgatcgtgtgaaacctgatagcttacgccgcaagatcgaagcccacctggaagacttgcgtctgagtctggatcttgcgcgtattcgcaccgatctgccgttggaagtagactttaaagctctgcgtcgtcgcacacccgatttagaggggttacgcgcgttcctcgaacgtctggagtttggctccctgctgcatgaattcggtttgttgggcggagagaaaccgcgtgaagaagcaccatggccgccgcccgaaggtgcctttgtcggctttcttctgtcacgcaaagagccaatgtgggcggaactgttagctcttgcagccgccgcggaagggcgtgttcaccgcgcgacctctcctgtcgaggccctcgctgacctcaaagaagcacgtggtttcttggcgaaagatttagccgtgcttgcattacgcgaaggcgttgcgctcgatccgacggacgacccgcttttggtggcttatttgctcgatcctgcgaataccaacccggaaggtgtagcccgtcgttacggcggcgagtttactgaagatgcggcagaacgcgcgttgcttagcgaacgcctcttccagacgttatttccacgtctttcggagaaattactctggctctatcaggaagtcgaacgtccattgagtcgcgtgcttgcccatatggaggctcgcggtgtgcgcttagatgttccgttgttagaagcactcagcttcgagttggagaaagaaatggaacgtcttgaaggcgaagtctttcgtttagcggggcatcccttcaatctcaactctcgcgaccaattggagaaagtgctctttgatgaattaggtttaacccctatcggaaaaacagagaagaccggcaaacgttccactgcgcaaggcgtcttggaagcacttcgtggtgctcacccgatcgtcgacttgattttgcagtaccgcgagctcagcaaactcaaatcaacctatcttgatccgttacctcgtcttgttcatccacgtacgggtcgtttacacacccgcttcaatcaaacggcgacagccaccgggcgcttgtcgtcgagtgacccgaacctccagaatattccagtgcgcacgccgttaggccaacgcattcgtaaagcgtttgttgcggaagaaggttggttattacttgcggccgattactcccagatcgaacttcgtgtattggcgcatctctctggcgacgagaatcttaaacgcgtgtttcgcgaaggcaaggatattcacactgaaaccgcagcctggatgttcgggcttgacccagccttagtggaccccaagatgcgtcgtgccgccaagaccgtcaactttggcgtactctatggtatgtcagcacatcgtcttagtcaggaattgggcattgactacaaagaagctgaagcgtttatcgagcgctatttccaatcctttccgaaagttcgcgcgtggattgaacgtaccctcgaagaaggtcgcactcgcggctatgtggaaacgttattcgggcgtcgtcgctacgttccagatcttgcatctcgtgtccgctcagtgcgcgaagctgctgagcgtatggccttcaatatgcctgttcagggaacagcggcggacctcatgaagatcgccatggtgaaattgtttccgcgcttgaaacccttaggagcccaccttcttttacaggtgcatgatgaattggtcttggaagtacccgaggatcgcgcagaagaagccaaagcactcgtgaaagaggttatggaaaacgcgtatccgttagatgttccgttggaggtcgaagtgggtgtaggccgtgattggcttgaagcgaaacaagac

SEQ ID NO: 58 - protein, 844 aa, synthetic construct
  REGION 1..844: note = DNA Polymerase Variant
MHHHHHHGGSGMLPLFDLEEPPKRVLLVDGHHLAYRTFYALSLTTSRGEPVQMVYGFARSLLKALKEDGQAVVVVFDAKAPSFRHEAYEAYKAGRAPTPEDFPRQLALVKRLVDLLGLVRLEAPGYEADDVLGTLAKKAEREGMEVCILTGDRDFFQLLSEKVSVLLPDGTLVTPKDVQEKYGVPPERWVDFRALTGDRSDNIPGVAGIGEKTALRLLAEWGSVENLLKNLDRVKPDSLRRKIEAHLEDLRLSLDLARIRTDLPLEVDFKALRRRTPDLEGLRAFLERLEFGSLLHEFGLLGGEKPREEAPWPPPEGAFVGFLLSRKEPMWAELLALAAAAEGRVHRATSPVEALADLKEARGFLAKDLAVLALREGVALDPTDDPLLVAYLLDPANTNPEGVARRYGGEFTEDAAERALLSERLFQTLFPRLSEKLLWLYQEVERPLSRVLAHMEARGVRLDVPLLEALSFELEKEMERLEGEVFRLAGHPFNLNSRDQLEKVLFDELGLTPIGKTEKTGKRSTAQGVLEALRGAHPIVDLILQYRELSKLKSTYLDPLPRLVHPRTGRLHTRFNQTATATGRLSSSDPNLQNIPVRTPLGQRIRKAFVAEEGWLLLAADYSQIELRVLAHLSGDENLKRVFREGKDIHTETAAWMFGLDPALVDPKMRRAAKTVNFGVLYGMSAHRLSQELGIDYKEAEAFIERYFQSFPKVRAWIERTLEEGRTRGYVETLFGRRRYVPDLASRVRSVREAAERMAFNMPVQGTAADLMKIAMVKLFPRLKPLGAHLLLQVHDELVLEVPEDRAEEAKALVKEVMENAYPLDVPLEVEVGVGRDWLEAKQD

SEQ ID NO: 59 - DNA, 2532 bp, synthetic construct
  misc_feature 1..2532: note = DNA Polymerase Variant
  source 1..2532: mol_type = other DNA
atgcaccatcatcatcatcatggcggtagcggcatgttaccgctgtttgatttggaagaaccaccaaaacgcgtgctgcttgttgacggccatcatctggcgtatcgtaccttctacgcactgagccttacgacctcacgtggtgagcctgtccagatggtgtatgggtttgctcgctccctgctgaaagccctgaaggaagatggtcaagccgtagtagtggttttcgatgcgaaagcaccgtcgtttcgtcacgaagcgtacgaggcctataaagctggccgcgcaccgaccccggaagactttccgcgtcagttagcgctcgtcaaacgcctcgtggatttgctgggattagttcgcttggaagctcctggctacgaggcggacgacgtgctcggtacactggccaagaaagcagaacgtgaaggcatggaggtctgcattcttaccggtgatcgcgatttcttccagctgctgtctgagaaagtgagcgttttgctgcccgatggcacgttagtaaccccgaaagatgtccaagagaaatatggagttccgccagaacgttgggtggactttcgcgcactgactggtgatcgttcagacaacatcccgggcgttgccgggattggtgaaaagacggcgctgcgcctgctggcagaatggggctcggtggaaaatctgctcaagaaccttgatcgtgtgaaacctgatagcttacgccgcaagatcgaagcccacctggaagacttgcgtctgagtctggatcttgcgcgtattcgcaccgatctgccgttggaagtagactttaaagctctgcgtcgtcgcacacccgatttagaggggttacgcgcgttcctcgaagaactggagtttggctccctgctgcatgaattcggtttgttgggcggagagaaaccgcgtgaagaagcaccatggccgccgcccgaaggtgcctttgtcggctttcttctgtcacgcaaagagccaatgtgggcggaactgttagctcttgcagccgccgcggaagggcgtgttcaccgcgcgacctctcctgtcgaggccctcgctgacctcaaagaagcacgtggtttcttggcgaaagatttagccgtgcttgcattacgcgaaggcgttgcgctcgatccgacggacgacccgcttttggtggcttatttgctcgatcctgcgaataccaatccggaaggtgtagcccgtcgttacggcggcgagtttactgaagatgcggcagaacgcgcgttgcttagcgaacgcctcttccagacgttatttccacgtctttcggagaaattactctggctctatcaggaagtcgaacgtccattgagtcgcgtgcttgcccatatggaggctcgcggtgtgcgcttagatgttccgttgttagaagcactcagcttcgagttggagaaagaaatcgaacgtcttgaaggcgaagtctttcgtttagcggggcatcccttcaatctcaactctcgcgaccaattggagaaagtgctctttgatgaattaggtttaacccctatcggaaaaacagagaagaccggcaaacgttccactgctcagggagcattggaagcacttcgtggtgctcacccgatcgtcgacttgattttgcagtaccgcgagctcagcaaactcaaatcaacctatcttgatccgttacctcgtcttgttcatccacgtacgggtcgtttacacacccgcttcaatcaaacggcgacagccaccgggcgcttgtcgtcgagtgacccgaacctccagaatattccagtgcgcacgccgttaggccaacgcattcgtaaagcgtttgttgcggaagaaggttggttattacttgcggccgattactcccagatcgaacttcgtgtattggcgcatctctctggcgacgagaatcttaaacgcgtgtttcgcgaaggcaaggatattcacactgaaaccgcagcctggatgttcgggcttgacccagccttagtggaccccaagatgcgtcgtgccgccaagaccgtcaactttggcgtactctatggtatgtcagcacatcgtcttagtcaggaattgggcattgactacaaagaagctgaagcgtttatcgagcgctatttccaatcctttccgaaagttcgcgcgtggattgaacgtaccctcgaagaaggtcgcactcgcggctatgtggaaacgttattcgggcgtcgtcgctacgttccagatcttgcatctcgtgtccgctcagtgcgcgaagctgctgagcgtatggccttcaatatgcctgttcagggaacagcggcggacctcatgaagatcgccatggtgaaattgtttccgcgcttgaaacccttaggagcccaccttcttttacaggtgcatgatgaattggtcttggaagtacccgaggatcgcgcagaagaagccaaagcactcgtgaaagaggttatggaaaacgcgtatccgttagatgttccgttggaggtcgaagtgggtgtaggccgtgattggcttgaagcgaaacaagac

SEQ ID NO: 60 - protein, 844 aa, synthetic construct
  REGION 1..844: note = DNA Polymerase Variant
MHHHHHHGGSGMLPLFDLEEPPKRVLLVDGHHLAYRTFYALSLTTSRGEPVQMVYGFARSLLKALKEDGQAVVVVFDAKAPSFRHEAYEAYKAGRAPTPEDFPRQLALVKRLVDLLGLVRLEAPGYEADDVLGTLAKKAEREGMEVCILTGDRDFFQLLSEKVSVLLPDGTLVTPKDVQEKYGVPPERWVDFRALTGDRSDNIPGVAGIGEKTALRLLAEWGSVENLLKNLDRVKPDSLRRKIEAHLEDLRLSLDLARIRTDLPLEVDFKALRRRTPDLEGLRAFLEELEFGSLLHEFGLLGGEKPREEAPWPPPEGAFVGFLLSRKEPMWAELLALAAAAEGRVHRATSPVEALADLKEARGFLAKDLAVLALREGVALDPTDDPLLVAYLLDPANTNPEGVARRYGGEFTEDAAERALLSERLFQTLFPRLSEKLLWLYQEVERPLSRVLAHMEARGVRLDVPLLEALSFELEKEIERLEGEVFRLAGHPFNLNSRDQLEKVLFDELGLTPIGKTEKTGKRSTAQGALEALRGAHPIVDLILQYRELSKLKSTYLDPLPRLVHPRTGRLHTRFNQTATATGRLSSSDPNLQNIPVRTPLGQRIRKAFVAEEGWLLLAADYSQIELRVLAHLSGDENLKRVFREGKDIHTETAAWMFGLDPALVDPKMRRAAKTVNFGVLYGMSAHRLSQELGIDYKEAEAFIERYFQSFPKVRAWIERTLEEGRTRGYVETLFGRRRYVPDLASRVRSVREAAERMAFNMPVQGTAADLMKIAMVKLFPRLKPLGAHLLLQVHDELVLEVPEDRAEEAKALVKEVMENAYPLDVPLEVEVGVGRDWLEAKQD

SEQ ID NO: 61 - DNA, 2532 bp, synthetic construct
  misc_feature 1..2532: note = DNA Polymerase Variant
  source 1..2532: mol_type = other DNA
atgcaccatcatcatcatcatggcggtagcggcatgttaccgctgtttgatttggaagaaccaccaaaacgcgtgctgcttgttgacggccatcatctggcgtatcgtaccttctacgcactgagccttacgacctcacgtggtgagcctgtccagatggtgtatgggtttgctcgctccctgctgaaagccctgaaggaagatggtcaagccgtagtagtggttttcgatgcgaaagcaccgtcgtttcgtcacgaagcgtacgaggcctataaagctggccgcgcaccgaccccggaagactttccgcgtcagttagcgctcgtcaaacgcctcgtggatttgctgggattagttcgcttggaagctcctggctacgaggcggacgacgtgctcggtacactggccaagaaagcagaacgtgaaggcatggaggtctgcattcttaccggtgatcgcgatttcttccagctgctgtctgagaaagtgagcgttttgctgcccgatggcacgttagtaaccccgaaagatgtccaagagaaatatggagttccgccagaacgttgggtggactttcgcgcactgactggtgatcgttcagacaacatcccgggcgttgccgggattggtgaaaagacggcgctgcgcctgctggcagaatggggctcggtggaaaatctgctcaagaaccttgatcgtgtgaaacctgatagcttacgccgcaagatcgaagcccacctggaagacttgcgtctgagtctggatcttgcgcgtattcgcaccgatctgccgttggaagtagactttaaagctctgcgtcgtcgcacacccgatttagaggggttacgcgcgttcctcgaagaactggagtttggctccctgctgcatgaattcggtttgttgggcggagagaaaccgcgtgaagaagcaccatggccgccgcccgaaggtgcctttgtcggctttcttctgtcacgcaaagagccaatgtgggcggaactgttagctcttgcagccgccgcggaagggcgtgttcaccgcgcgacctctcctgtcgaggccctcgctgacctcaaagaagcacgtggtttcttggcgaaagatttagccgtgcttgcattacgcgaaggcgttgcgctcgatccgacggacgacccgcttttggtggcttatttgctcgatcctgcgaataccaatccggaaggtgtagcccgtcgttacggcggcgagtttactgaagatgcggcagaacgcgcgttgcttagcgaacgcctcttccagacgttatttccacgtctttcggagaaattactctggctctatcaggaagtcgaacgtccattgagtcgcgtgcttgcccatatggaggctcgcggtgtgcgcttagatgttccgttgttagaagcactcagcttcgagttggagaaagaactggaacgtcttgaaggcgaagtctttcgtttagcggggcatcccttcaatctcaactctcgcgaccaattggagaaagtgctctttgatgaattaggtttaacccctatcggacgtacagagaagaccggcaaacgttccactgctcagggagcattggaagcacttcgtggtgctcacccgatcgtcgaattgattttgcagtaccgcgagctcagtaaactcaaaagcacctatattgatccgttacctcgtcttgttcatccacgtacgggtcgtttacacacccgcttcaatcaaacggcgacagccaccgggcgcttgtcgtcgagtgacccgaacctccagaatattccagtgcgcacgccgttaggccaacgcattcgtaaagcgtttgttgcggaagaaggttggttattacttgcggccgattactcccagatcgaacttcgtgtattggcgcatctctctggcgacgagaatcttaaacgcgtgtttcgcgaaggcaaggatattcacactgaaaccgcagcctggatgttcgggcttgacccagccttagtggaccccaagatgcgtcgtgccgccaagaccgtcaactttggcgtactctatggtatgtcagcacatcgtcttagtcaggaattgggcattgactacaaagaagctgaagcgtttatcgagcgctatttccaatcctttccgaaagttcgcgcgtggattgaacgtaccctcgaagaaggtcgcactcgcggctatgtggaaacgttattcgggcgtcgtcgctacgttccagatcttgcatctcgtgtccgctcagtgcgcgaagctgctgagcgtatggccttcaatatgcctgttcagggaacagcggcggacctcatgaagatcgccatggtgaaattgtttccgcgcttgaaacccttaggagcccaccttcttttacaggtgcatgatgaattggtcttggaagtacccgaggatcgcgcagaagaagccaaagcactcgtgaaagaggttatggaaaacgcgtatccgttagatgttccgttggaggtcgaagtgggtgtaggccgtgattggcttgaagcgaaacaagac

SEQ ID NO: 62 - protein, 844 aa, synthetic construct
  REGION 1..844: note = DNA Polymerase Variant
MHHHHHHGGSGMLPLFDLEEPPKRVLLVDGHHLAYRTFYALSLTTSRGEPVQMVYGFARSLLKALKEDGQAVVVVFDAKAPSFRHEAYEAYKAGRAPTPEDFPRQLALVKRLVDLLGLVRLEAPGYEADDVLGTLAKKAEREGMEVCILTGDRDFFQLLSEKVSVLLPDGTLVTPKDVQEKYGVPPERWVDFRALTGDRSDNIPGVAGIGEKTALRLLAEWGSVENLLKNLDRVKPDSLRRKIEAHLEDLRLSLDLARIRTDLPLEVDFKALRRRTPDLEGLRAFLEELEFGSLLHEFGLLGGEKPREEAPWPPPEGAFVGFLLSRKEPMWAELLALAAAAEGRVHRATSPVEALADLKEARGFLAKDLAVLALREGVALDPTDDPLLVAYLLDPANTNPEGVARRYGGEFTEDAAERALLSERLFQTLFPRLSEKLLWLYQEVERPLSRVLAHMEARGVRLDVPLLEALSFELEKELERLEGEVFRLAGHPFNLNSRDQLEKVLFDELGLTPIGRTEKTGKRSTAQGALEALRGAHPIVELILQYRELSKLKSTYIDPLPRLVHPRTGRLHTRFNQTATATGRLSSSDPNLQNIPVRTPLGQRIRKAFVAEEGWLLLAADYSQIELRVLAHLSGDENLKRVFREGKDIHTETAAWMFGLDPALVDPKMRRAAKTVNFGVLYGMSAHRLSQELGIDYKEAEAFIERYFQSFPKVRAWIERTLEEGRTRGYVETLFGRRRYVPDLASRVRSVREAAERMAFNMPVQGTAADLMKIAMVKLFPRLKPLGAHLLLQVHDELVLEVPEDRAEEAKALVKEVMENAYPLDVPLEVEVGVGRDWLEAKQD

SEQ ID NO: 63 - DNA, 2532 bp, synthetic construct
  misc_feature 1..2532: note = DNA Polymerase Variant
  source 1..2532: mol_type = other DNA
atgcaccatcatcatcatcatggcggtagcggcatgttaccgctgtttgatttggaagaaccaccaaaacgcgtgctgcttgttgacggccatcatctggcgtatcgtaccttctacgcactgagccttacgacctcacgtggtgagcctgtccagatggtgtatgggtttgctcgctccctgctgaaagccctgaaggaagatggtcaagccgtagtagtggttttcgatgcgaaagcaccgtcgtttcgtcacgaagcgtacgaggcctataaagctggccgcgcaccgaccccggaagactttccgcgtcagttagcgctcgtcaaacgcctcgtggatttgctgggattagttcgcttggaagctcctggctacgaggcggacgacgtgctcggtacactggccaagaaagcagaacgtgaaggcatggaggtctgcattcttaccggtgatcgcgatttcttccagctgctgtctgagaaagtgagcgttttgctgcccgatggcacgttagtaaccccgaaagatgtccaagagaaatatggagttccgccagaacgttgggtggactttcgcgcactgactggtgatcgttcagacaacatcccgggcgttgccgggattggtgaaaagacggcgctgcgcctgctggcagaatggggctcggtggaaaatctgctcaagaaccttgatcgtgtgaaacctgatagcttacgccgcaagatcgaagcccacctggaagacttgcgtctgagtctggatcttgcgcgtattcgcaccgatctgccgttggaagtagactttaaagctctgcgtcgtcgcacacccgatttagaggggttacgcgcgttcctcgaagaactggagtttggctccctgctgcatgaattcggtttgttgggcggagagaaaccgcgtgaagaagcaccatggccgccgcccgaaggtgcctttgtcggctttcttctgtcacgcaaagagccaatgtgggcggaactgttagctcttgcagccgccgcggaagggcgtgttcaccgcgcgacctctcctgtcgaggccctcgctgacctcaaagaagcacgtggtttcttggcgaaagatttagccgtgcttgcattacgcgaaggcgttgcgctcgatccgacggacgacccgcttttggtggcttatttgctcgatcctgcgaataccactccggaaggtgtagcccgtcgttacggcggcgagtttactgaagatgcggcagaacgcgcgttgcttagcgaacgcctcttccagacgttatttccacgtctttcggagaaattactctggctctatcaggaagtcgaacgtccattgagtcgcgtgcttgcccatatggaggctcgcggtgtgcgcttagatgttccgttgttagaagcactcagcttcgagttggagaaagaaatggaacgtcttgaaggcgaagtctttcgtttagcggggcatcccttcaatctcaactctcgcgaccaattggagaaagtgctctttgatgaattaggtttaacccctgtcggacgtacagagaagaccggcaaacgttccactgctcagggagcattggaagcacttcgtggtgctcacccgatcgtcgacttgattttgcagtaccgcgagctcagcaaactcaaatcaacctatattgatccgttacctcgtcttgttcatccacgtacgggtcgtttacacacccgcttcaatcaaacggcgacagccaccgggcgcttgtcgtcgagtgacccgaacctccagaatattccagtgcgcacgccgttaggccaacgcattcgtaaagcgtttgttgcggaagaaggttggttattacttgcggccgattactcccagatcgaacttcgtgtattggcgcatctctctggcgacgagaatcttaaacgcgtgtttcgcgaaggcaaggatattcacactgaaaccgcagcctggatgttcgggcttgacccagccttagtggaccccaagatgcgtcgtgccgccaagaccgtcaactttggcgtactctatggtatgtcagcacatcgtcttagtcaggaattgggcattgactacaaagaagctgaagcgtttatcgagcgctatttccaatcctttccgaaagttcgcgcgtggattgaacgtaccctcgaagaaggtcgcactcgcggctatgtggaaacgttattcgggcgtcgtcgctacgttccagatcttgcatctcgtgtccgctcagtgcgcgaagctgctgagcgtatggccttcaatatgcctgttcagggaacagcggcggacctcatgaagatcgccatggtgaaattgtttccgcgcttgaaacccttaggagcccaccttcttttacaggtgcatgatgaattggtcttggaagtacccgaggatcgcgcagaagaagccaaagcactcgtgaaagaggttatggaaaacgcgtatccgttagatgttccgttggaggtcgaagtgggtgtaggccgtgattggcttgaagcgaaacaagac

SEQ ID NO: 64 - protein, 844 aa, synthetic construct
  REGION 1..844: note = DNA Polymerase Variant
MHHHHHHGGSGMLPLFDLEEPPKRVLLVDGHHLAYRTFYALSLTTSRGEPVQMVYGFARSLLKALKEDGQAVVVVFDAKAPSFRHEAYEAYKAGRAPTPEDFPRQLALVKRLVDLLGLVRLEAPGYEADDVLGTLAKKAEREGMEVCILTGDRDFFQLLSEKVSVLLPDGTLVTPKDVQEKYGVPPERWVDFRALTGDRSDNIPGVAGIGEKTALRLLAEWGSVENLLKNLDRVKPDSLRRKIEAHLEDLRLSLDLARIRTDLPLEVDFKALRRRTPDLEGLRAFLEELEFGSLLHEFGLLGGEKPREEAPWPPPEGAFVGFLLSRKEPMWAELLALAAAAEGRVHRATSPVEALADLKEARGFLAKDLAVLALREGVALDPTDDPLLVAYLLDPANTTPEGVARRYGGEFTEDAAERALLSERLFQTLFPRLSEKLLWLYQEVERPLSRVLAHMEARGVRLDVPLLEALSFELEKEMERLEGEVFRLAGHPFNLNSRDQLEKVLFDELGLTPVGRTEKTGKRSTAQGALEALRGAHPIVDLILQYRELSKLKSTYIDPLPRLVHPRTGRLHTRFNQTATATGRLSSSDPNLQNIPVRTPLGQRIRKAFVAEEGWLLLAADYSQIELRVLAHLSGDENLKRVFREGKDIHTETAAWMFGLDPALVDPKMRRAAKTVNFGVLYGMSAHRLSQELGIDYKEAEAFIERYFQSFPKVRAWIERTLEEGRTRGYVETLFGRRRYVPDLASRVRSVREAAERMAFNMPVQGTAADLMKIAMVKLFPRLKPLGAHLLLQVHDELVLEVPEDRAEEAKALVKEVMENAYPLDVPLEVEVGVGRDWLEAKQD

SEQ ID NO: 65 - DNA, 2532 bp, synthetic construct
  misc_feature 1..2532: note = DNA Polymerase Variant
  source 1..2532: mol_type = other DNA
atgcaccatcatcatcatcatggcggtagcggcatgttaccgctgtttgatttggaagaaccaccaaaacgcgtgctgcttgttgacggccatcatctggcgtatcgtaccttctacgcactgagccttacgacctcacgtggtgagcctgtccagatggtgtatgggtttgctcgctccctgctgaaagccctgaaggaagatggtcaagccgtagtagtggttttcgatgcgaaagcaccgtcgtttcgtcacgaagcgtacgaggcctataaagctggccgcgcaccgaccccggaagactttccgcgtcagttagcgctcgtcaaacgcctcgtggatttgctgggattagttcgcttggaagctcctggctacgaggcggacgacgtgctcggtacactggccaagaaagcagaacgtgaaggcatggaggtctgcattcttaccggtgatcgcgatttcttccagctgctgtctgagaaagtgagcgttttgctgcccgatggcacgttagtaaccccgaaagatgtccaagagaaatatggagttccgccagaacgttgggtggactttcgcgcactgactggtgatcgttcagacaacatcccgggcgttgccgggattggtgaaaagacggcgctgcgcctgctggcagaatggggctcggtggaaaatctgctcaagaaccttgatcgtgtgaaacctgatagcttacgccgcaagatcgaagcccacctggaagacttgcgtctgagtctggatcttgcgcgtattcgcaccgatctgccgttggaagtagactttaaagctctgcgtcgtcgcacacccgatttagaggggttacgcgcgttcctcgaagaactggagtttggctccctgctgcatgaattcggtttgttgggcggagagaaaccgcgtgaagaagcaccatggccgccgcccgaaggtgcctttgtcggctttcttctgtcacgcaaagagccaatgtgggcggaactgttagctcttgcagccgccgcggaagggcgtgttcaccgcgcgacctctcctgtcgaggccctcgctgacctcaaagaagcacgtggtttcttggcgaaagatttagccgtgcttgcattacgcgaaggcgttgcgctcgatccgacggacgacccgcttttggtggcttatttgctcgatcctgcgaataccactccggaaggtgtagcccgtcgttacggcggcgagtttactgaagatgcggcagaacgcgcgttgcttagcgaacgcctcttccagacgttatttccacgtctttcggagaaattactctggctctatcaggaagtcgaacgtccattgagtcgcgtgcttgcccatatggaggctcgcggtgtgcgcttagatgttccgttgttagaagcactcagcttcgagttggagaaagaaatggaacgtcttgaaggcgaagtctttcgtttagcggggcatcccttcaatctcaactctcgcgaccaattggagaaagtgctctttgatgaattaggtttaacccctgtcggacgtacagagaagaccggcaaacgttccactgctcagggagcattggaagcacttcgtggtgctcacccgatcgtcgacttgattttgcagtaccgcgagctcagcaaactcaaatcaacctatcttgatccgttacctcgtcttgttcatccacgtacgggtcgtttacacacccgcttcaatcaaacggcgacagccaccgggcgcttgtcgtcgagtgacccgaacctccagaatattccagtgcgcacgccgttaggccaacgcattcgtaaagcgtttgttgcggaagaaggttggttattacttgcggccgattactcccagatcgaacttcgtgtattggcgcatctctctggcgacgagaatcttaaacgcgtgtttcgcgaaggcaaggatattcacactgaaaccgcagcctggatgttcgggcttgacccagccttagtggaccccaagatgcgtcgtgccgccaagaccgtcaactttggcgtactctatggtatgtcagcacatcgtcttagtcaggaattgggcattgactacaaagaagctgaagcgtttatcgagcgctatttccaatcctttccgaaagttcgcgcgtggattgaacgtaccctcgaagaaggtcgcactcgcggctatgtggaaacgttattcgggcgtcgtcgctacgttccagatcttgcatctcgtgtccgctcagtgcgcgaagctgctgagcgtatggccttcaatatgcctgttcagggaacagcggcggacctcatgaagatcgccatggtgaaattgtttccgcgcttgaaacccttaggagcccaccttcttttacaggtgcatgatgaattggtcttggaagtacccgaggatcgcgcagaagaagccaaagcactcgtgaaagaggttatggaaaacgcgtatccgttagatgttccgttggaggtcgaagtgggtgtaggccgtgattggcttgaagcgaaacaagac

SEQ ID NO: 66 - protein, 844 aa, synthetic construct
  REGION 1..844: note = DNA Polymerase Variant
MHHHHHHGGSGMLPLFDLEEPPKRVLLVDGHHLAYRTFYALSLTTSRGEPVQMVYGFARSLLKALKEDGQAVVVVFDAKAPSFRHEAYEAYKAGRAPTPEDFPRQLALVKRLVDLLGLVRLEAPGYEADDVLGTLAKKAEREGMEVCILTGDRDFFQLLSEKVSVLLPDGTLVTPKDVQEKYGVPPERWVDFRALTGDRSDNIPGVAGIGEKTALRLLAEWGSVENLLKNLDRVKPDSLRRKIEAHLEDLRLSLDLARIRTDLPLEVDFKALRRRTPDLEGLRAFLEELEFGSLLHEFGLLGGEKPREEAPWPPPEGAFVGFLLSRKEPMWAELLALAAAAEGRVHRATSPVEALADLKEARGFLAKDLAVLALREGVALDPTDDPLLVAYLLDPANTTPEGVARRYGGEFTEDAAERALLSERLFQTLFPRLSEKLLWLYQEVERPLSRVLAHMEARGVRLDVPLLEALSFELEKEMERLEGEVFRLAGHPFNLNSRDQLEKVLFDELGLTPVGRTEKTGKRSTAQGALEALRGAHPIVDLILQYRELSKLKSTYLDPLPRLVHPRTGRLHTRFNQTATATGRLSSSDPNLQNIPVRTPLGQRIRKAFVAEEGWLLLAADYSQIELRVLAHLSGDENLKRVFREGKDIHTETAAWMFGLDPALVDPKMRRAAKTVNFGVLYGMSAHRLSQELGIDYKEAEAFIERYFQSFPKVRAWIERTLEEGRTRGYVETLFGRRRYVPDLASRVRSVREAAERMAFNMPVQGTAADLMKIAMVKLFPRLKPLGAHLLLQVHDELVLEVPEDRAEEAKALVKEVMENAYPLDVPLEVEVGVGRDWLEAKQD

SEQ ID NO: 67 - DNA, 2532 bp, synthetic construct
  misc_feature 1..2532: note = DNA Polymerase Variant
  source 1..2532: mol_type = other DNA
atgcaccatcatcatcatcatggcggtagcggcatgttaccgctgtttgatttggaagaaccaccaaaacgcgtgctgcttgttgacggccatcatctggcgtatcgtaccttctacgcactgagccttacgacctcacgtggtgagcctgtccagatggtgtatgggtttgctcgctccctgctgaaagccctgaaggaagatggtcaagccgtagtagtggttttcgatgcgaaagcaccgtcgtttcgtcacgaagcgtacgaggcctataaagctggccgcgcaccgaccccggaagactttccgcgtcagttagcgctcgtcaaacgcctcgtggatttgctgggattagttcgcttggaagctcctggctacgaggcggacgacgtgctcggtacactggccaagaaagcagaacgtgaaggcatggaggtctgcattcttaccggtgatcgcgatttcttccagctgctgtctgagaaagtgagcgttttgctgcccgatggcacgttagtaaccccgaaagatgtccaagagaaatatggagttccgccagaacgttgggtggactttcgcgcactgactggtgatcgttcagacaacatcccgggcgttgccgggattggtgaaaagacggcgctgcgcctgctggcagaatggggctcggtggaaaatctgctcaagaaccttgatcgtgtgaaacctgatagcttacgccgcaagatcgaagcccacctggaagacttgcgtctgagtctggatcttgcgcgtattcgcaccgatctgccgttggaagtagactttaaagctctgcgtcgtcgcacacccgatttagaggggttacgcgcgttcctcgaacgtctggagtttggctccctgctgcatgaattcggtttgttgggcggagagaaaccgcgtgaagaagcaccatggccgccgcccgaaggtgcctttgtcggctttcttctgtcacgcaaagagccaatgtgggcggaactgttagctcttgcagccgccgcggaagggcgtgttcaccgcgcgacctctcctgtcgaggccctcgctgacctcaaagaagcacgtggtttcttggcgaaagatttagccgtgcttgcattacgcgaaggcgttgcgctcgatccgacggacgacccgcttttggtggcttatttgctcgatcctgcgaataccactccggaaggtgtagcccgtcgttacggcggcgagtttactgaagatgcggcagaacgcgcgttgcttagcgaacgcctcttccagacgttatttccacgtctttcggagaaattactctggctctatcaggaagtcgaacgtccattgagtcgcgtgcttgcccatatggaggctcgcggtgtgcgcttagatgttccgttgttagaagcactcagcttcgagttggagaaagaaatggaacgtcttgaaggcgaagtctttcgtttagcggggcatcccttcaatctcaactctcgcgaccaattggagaaagtgctctttgatgaattaggtttaacccctgtcggaaaaacagagaagaccggcaaacgttccactgcggcaggcgccttggaagcacttcgtggtgctcacccgatcgtcgacttgattttgcagtaccgcgagctcagtaaactcaaaagcacctatattgatccgttacctcgtcttgttcatccacgtacgggtcgtttacacacccgcttcaatcaaacggcgacagccaccgggcgcttgtcgtcgagtgacccgaacctccagaatattccagtgcgcacgccgttaggccaacgcattcgtaaagcgtttgttgcggaagaaggttggttattacttgcggccgattactcccagatcgaacttcgtgtattggcgcatctctctggcgacgagaatcttaaacgcgtgtttcgcgaaggcaaggatattcacactgaaaccgcagcctggatgttcgggcttgacccagccttagtggaccccaagatgcgtcgtgccgccaagaccgtcaactttggcgtactctatggtatgtcagcacatcgtcttagtcaggaattgggcattgactacaaagaagctgaagcgtttatcgagcgctatttccaatcctttccgaaagttcgcgcgtggattgaacgtaccctcgaagaaggtcgcactcgcggctatgtggaaacgttattcgggcgtcgtcgctacgttccagatcttgcatctcgtgtccgctcagtgcgcgaagctgctgagcgtatggccttcaatatgcctgttcagggaacagcggcggacctcatgaagatcgccatggtgaaattgtttccgcgcttgaaacccttaggagcccaccttcttttacaggtgcatgatgaattggtcttggaagtacccgaggatcgcgcagaagaagccaaagcactcgtgaaagaggttatggaaaacgcgtatccgttagatgttccgttggaggtcgaagtgggtgtaggccgtgattggcttgaagcgaaacaagac

SEQ ID NO: 68 - protein, 844 aa, synthetic construct
  REGION 1..844: note = DNA Polymerase Variant
MHHHHHHGGSGMLPLFDLEEPPKRVLLVDGHHLAYRTFYALSLTTSRGEPVQMVYGFARSLLKALKEDGQAVVVVFDAKAPSFRHEAYEAYKAGRAPTPEDFPRQLALVKRLVDLLGLVRLEAPGYEADDVLGTLAKKAEREGMEVCILTGDRDFFQLLSEKVSVLLPDGTLVTPKDVQEKYGVPPERWVDFRALTGDRSDNIPGVAGIGEKTALRLLAEWGSVENLLKNLDRVKPDSLRRKIEAHLEDLRLSLDLARIRTDLPLEVDFKALRRRTPDLEGLRAFLERLEFGSLLHEFGLLGGEKPREEAPWPPPEGAFVGFLLSRKEPMWAELLALAAAAEGRVHRATSPVEALADLKEARGFLAKDLAVLALREGVALDPTDDPLLVAYLLDPANTTPEGVARRYGGEFTEDAAERALLSERLFQTLFPRLSEKLLWLYQEVERPLSRVLAHMEARGVRLDVPLLEALSFELEKEMERLEGEVFRLAGHPFNLNSRDQLEKVLFDELGLTPVGKTEKTGKRSTAAGALEALRGAHPIVDLILQYRELSKLKSTYIDPLPRLVHPRTGRLHTRFNQTATATGRLSSSDPNLQNIPVRTPLGQRIRKAFVAEEGWLLLAADYSQIELRVLAHLSGDENLKRVFREGKDIHTETAAWMFGLDPALVDPKMRRAAKTVNFGVLYGMSAHRLSQELGIDYKEAEAFIERYFQSFPKVRAWIERTLEEGRTRGYVETLFGRRRYVPDLASRVRSVREAAERMAFNMPVQGTAADLMKIAMVKLFPRLKPLGAHLLLQVHDELVLEVPEDRAEEAKALVKEVMENAYPLDVPLEVEVGVGRDWLEAKQD

SEQ ID NO: 69 - DNA, 2532 bp, synthetic construct
  misc_feature 1..2532: note = DNA Polymerase Variant
  source 1..2532: mol_type = other DNA
atgcaccatcatcatcatcatggcggtagcggcatgttaccgctgtttgatttggaagaaccaccaaaacgcgtgctgcttgttgacggccatcatctggcgtatcgtaccttctacgcactgagccttacgacctcacgtggtgagcctgtccagatggtgtatgggtttgctcgctccctgctgaaagccctgaaggaagatggtcaagccgtagtagtggttttcgatgcgaaagcaccgtcgtttcgtcacgaagcgtacgaggcctataaagctggccgcgcaccgaccccggaagactttccgcgtcagttagcgctcgtcaaacgcctcgtggatttgctgggattagttcgcttggaagctcctggctacgaggcggacgacgtgctcggtacactggccaagaaagcagaacgtgaaggcatggaggtctgcattcttaccggtgatcgcgatttcttccagctgctgtctgagaaagtgagcgttttgctgcccgatggcacgttagtaaccccgaaagatgtccaagagaaatatggagttccgccagaacgttgggtggactttcgcgcactgactggtgatcgttcagacaacatcccgggcgttgccgggattggtgaaaagacggcgctgcgcctgctggcagaatggggctcggtggaaaatctgctcaagaaccttgatcgtgtgaaacctgatagcttacgccgcaagatcgaagcccacctggaagacttgcgtctgagtctggatcttgcgcgtattcgcaccgatctgccgttggaagtagactttaaagctctgcgtcgtcgcacacccgatttagaggggttacgcgcgttcctcgaacgtctggagtttggctccctgctgcatgaattcggtttgttgggcggagagaaaccgcgtgaagaagcaccatggccgccgcccgaaggtgcctttgtcggctttcttctgtcacgcaaagagccaatgtgggcggaactgttagctcttgcagccgccgcggaagggcgtgttcaccgcgcgacctctcctgtcgaggccctcgctgacctcaaagaagcacgtggtttcttggcgaaagatttagccgtgcttgcattacgcgaaggcgttgcgctcgatccgacggacgacccgcttttggtggcttatttgctcgatcctgcgaataccaatccggaaggtgtagcccgtcgttacggcggcgagtttactgaagatgcggcagaacgcgcgttgcttagcgaacgcctcttccagacgttatttccacgtctttcggagaaattactctggctctatcaggaagtcgaacgtccattgagtcgcgtgcttgcccatatggaggctcgcggtgtgcgcttagatgttccgttgttagaagcactcagcttcgagttggagaaagaaatcgaacgtcttgaaggcgaagtctttcgtttagcggggcatcccttcaatctcaactctcgcgaccaattggagaaagtgctctttgatgaattaggtttaacccctatcggacgtacagagaagaccggcaaacgttccactgctcagggagcattggaagcacttcgtggtgctcacccgatcgtcgacttgattttgcagtaccgcgagctcagcaaactcaaatcaacctatcttgatccgttacctcgtcttgttcatccacgtacgggtcgtttacacacccgcttcaatcaaacggcgacagccaccgggcgcttgtcgtcgagtgacccgaacctccagaatattccagtgcgcacgccgttaggccaacgcattcgtaaagcgtttgttgcggaagaaggttggttattacttgcggccgattactcccagatcgaacttcgtgtattggcgcatctctctggcgacgagaatcttaaacgcgtgtttcgcgaaggcaaggatattcacactgaaaccgcagcctggatgttcgggcttgacccagccttagtggaccccaagatgcgtcgtgccgccaagaccgtcaactttggcgtactctatggtatgtcagcacatcgtcttagtcaggaattgggcattgactacaaagaagctgaagcgtttatcgagcgctatttccaatcctttccgaaagttcgcgcgtggattgaacgtaccctcgaagaaggtcgcactcgcggctatgtggaaacgttattcgggcgtcgtcgctacgttccagatcttgcatctcgtgtccgctcagtgcgcgaagctgctgagcgtatggccttcaatatgcctgttcagggaacagcggcggacctcatgaagatcgccatggtgaaattgtttccgcgcttgaaacccttaggagcccaccttcttttacaggtgcatgatgaattggtcttggaagtacccgaggatcgcgcagaagaagccaaagcactcgtgaaagaggttatggaaaacgcgtatccgttagatgttccgttggaggtcgaagtgggtgtaggccgtgattggcttgaagcgaaacaagac

SEQ ID NO: 70 - protein, 844 aa, synthetic construct
  REGION 1..844: note = DNA Polymerase Variant
MHHHHHHGGSGMLPLFDLEEPPKRVLLVDGHHLAYRTFYALSLTTSRGEPVQMVYGFARSLLKALKEDGQAVVVVFDAKAPSFRHEAYEAYKAGRAPTPEDFPRQLALVKRLVDLLGLVRLEAPGYEADDVLGTLAKKAEREGMEVCILTGDRDFFQLLSEKVSVLLPDGTLVTPKDVQEKYGVPPERWVDFRALTGDRSDNIPGVAGIGEKTALRLLAEWGSVENLLKNLDRVKPDSLRRKIEAHLEDLRLSLDLARIRTDLPLEVDFKALRRRTPDLEGLRAFLERLEFGSLLHEFGLLGGEKPREEAPWPPPEGAFVGFLLSRKEPMWAELLALAAAAEGRVHRATSPVEALADLKEARGFLAKDLAVLALREGVALDPTDDPLLVAYLLDPANTNPEGVARRYGGEFTEDAAERALLSERLFQTLFPRLSEKLLWLYQEVERPLSRVLAHMEARGVRLDVPLLEALSFELEKEIERLEGEVFRLAGHPFNLNSRDQLEKVLFDELGLTPIGRTEKTGKRSTAQGALEALRGAHPIVDLILQYRELSKLKSTYLDPLPRLVHPRTGRLHTRFNQTATATGRLSSSDPNLQNIPVRTPLGQRIRKAFVAEEGWLLLAADYSQIELRVLAHLSGDENLKRVFREGKDIHTETAAWMFGLDPALVDPKMRRAAKTVNFGVLYGMSAHRLSQELGIDYKEAEAFIERYFQSFPKVRAWIERTLEEGRTRGYVETLFGRRRYVPDLASRVRSVREAAERMAFNMPVQGTAADLMKIAMVKLFPRLKPLGAHLLLQVHDELVLEVPEDRAEEAKALVKEVMENAYPLDVPLEVEVGVGRDWLEAKQD

SEQ ID NO: 71 - DNA, 2532 bp, synthetic construct
  misc_feature 1..2532: note = DNA Polymerase Variant
  source 1..2532: mol_type = other DNA
atgcaccatcatcatcatcatggcggtagcggcatgttaccgctgtttgatttggaagaaccaccaaaacgcgtgctgcttgttgacggccatcatctggcgtatcgtaccttctacgcactgagccttacgacctcacgtggtgagcctgtccagatggtgtatgggtttgctcgctccctgctgaaagccctgaaggaagatggtcaagccgtagtagtggttttcgatgcgaaagcaccgtcgtttcgtcacgaagcgtacgaggcctataaagctggccgcgcaccgaccccggaagactttccgcgtcagttagcgctcgtcaaacgcctcgtggatttgctgggattagttcgcttggaagctcctggctacgaggcggacgacgtgctcggtacactggccaagaaagcagaacgtgaaggcatggaggtctgcattcttaccggtgatcgcgatttcttccagctgctgtctgagaaagtgagcgttttgctgcccgatggcacgttagtaaccccgaaagatgtccaagagaaatatggagttccgccagaacgttgggtggactttcgcgcactgactggtgatcgttcagacaacatcccgggcgttgccgggattggtgaaaagacggcgctgcgcctgctggcagaatggggctcggtggaaaatctgctcaagaaccttgatcgtgtgaaacctgatagcttacgccgcaagatcgaagcccacctggaagacttgcgtctgagtctggatcttgcgcgtattcgcaccgatctgccgttggaagtagactttaaagctctgcgtcgtcgcacacccgatttagaggggttacgcgcgttcctcgaacgtctggagtttggctccctgctgcatgaattcggtttgttgggcggagagaaaccgcgtgaagaagcaccatggccgccgcccgaaggtgcctttgtcggctttcttctgtcacgcaaagagccaatgtgggcggaactgttagctcttgcagccgccgcggaagggcgtgttcaccgcgcgacctctcctgtcgaggccctcgctgacctcaaagaagcacgtggtttcttggcgaaagatttagccgtgcttgcattacgcgaaggcgttgcgctcgatccgacggacgacccgcttttggtggcttatttgctcgatcctgcgaataccaacccggaaggtgtagcccgtcgttacggcggcgagtttactgaagatgcggcagaacgcgcgttgcttagcgaacgcctcttccagacgttatttccacgtctttcggagaaattactctggctctatcaggaagtcgaacgtccattgagtcgcgtgcttgcccatatggaggctcgcggtgtgcgcttagatgttccgttgttagaagcactcagcttcgagttggagaaagaaatggaacgtcttgaaggcgaagtctttcgtttagcggggcatcccttcaatctcaactctcgcgaccaattggagaaagtgctctttgatgaattaggtttaacccctatcggaaaaacagagaagaccggcaaacgttccactgctcagggagcattggaagcacttcgtggtgctcacccgatcgtcgagttgattttgcagtaccgcgagctcagcaaactcaaatcaacctatcttgatccgttacctcgtcttgttcatccacgtacgggtcgtttacacacccgcttcaatcaaacggcgacagccaccgggcgcttgtcgtcgagtgacccgaacctccagaatattccagtgcgcacgccgttaggccaacgcattcgtaaagcgtttgttgcggaagaaggttggttattacttgcggccgattactcccagatcgaacttcgtgtattggcgcatctctctggcgacgagaatcttaaacgcgtgtttcgcgaaggcaaggatattcacactgaaaccgcagcctggatgttcgggcttgacccagccttagtggaccccaagatgcgtcgtgccgccaagaccgtcaactttggcgtactctatggtatgtcagcacatcgtcttagtcaggaattgggcattgactacaaagaagctgaagcgtttatcgagcgctatttccaatcctttccgaaagttcgcgcgtggattgaacgtaccctcgaagaaggtcgcactcgcggctatgtggaaacgttattcgggcgtcgtcgctacgttccagatcttgcatctcgtgtccgctcagtgcgcgaagctgctgagcgtatggccttcaatatgcctgttcagggaacagcggcggacctcatgaagatcgccatggtgaaattgtttccgcgcttgaaacccttaggagcccaccttcttttacaggtgcatgatgaattggtcttggaagtacccgaggatcgcgcagaagaagccaaagcactcgtgaaagaggttatggaaaacgcgtatccgttagatgttccgttggaggtcgaagtgggtgtaggccgtgattggcttgaagcgaaacaagac

SEQ ID NO: 72 - protein, 844 aa, synthetic construct
  REGION 1..844: note = DNA Polymerase Variant
MHHHHHHGGSGMLPLFDLEEPPKRVLLVDGHHLAYRTFYALSLTTSRGEPVQMVYGFARSLLKALKEDGQAVVVVFDAKAPSFRHEAYEAYKAGRAPTPEDFPRQLALVKRLVDLLGLVRLEAPGYEADDVLGTLAKKAEREGMEVCILTGDRDFFQLLSEKVSVLLPDGTLVTPKDVQEKYGVPPERWVDFRALTGDRSDNIPGVAGIGEKTALRLLAEWGSVENLLKNLDRVKPDSLRRKIEAHLEDLRLSLDLARIRTDLPLEVDFKALRRRTPDLEGLRAFLERLEFGSLLHEFGLLGGEKPREEAPWPPPEGAFVGFLLSRKEPMWAELLALAAAAEGRVHRATSPVEALADLKEARGFLAKDLAVLALREGVALDPTDDPLLVAYLLDPANTNPEGVARRYGGEFTEDAAERALLSERLFQTLFPRLSEKLLWLYQEVERPLSRVLAHMEARGVRLDVPLLEALSFELEKEMERLEGEVFRLAGHPFNLNSRDQLEKVLFDELGLTPIGKTEKTGKRSTAQGALEALRGAHPIVELILQYRELSKLKSTYLDPLPRLVHPRTGRLHTRFNQTATATGRLSSSDPNLQNIPVRTPLGQRIRKAFVAEEGWLLLAADYSQIELRVLAHLSGDENLKRVFREGKDIHTETAAWMFGLDPALVDPKMRRAAKTVNFGVLYGMSAHRLSQELGIDYKEAEAFIERYFQSFPKVRAWIERTLEEGRTRGYVETLFGRRRYVPDLASRVRSVREAAERMAFNMPVQGTAADLMKIAMVKLFPRLKPLGAHLLLQVHDELVLEVPEDRAEEAKALVKEVMENAYPLDVPLEVEVGVGRDWLEAKQD

SEQ ID NO: 73 - DNA, 2532 bp, synthetic construct
  misc_feature 1..2532: note = DNA Polymerase Variant
  source 1..2532: mol_type = other DNA
atgcaccatcatcatcatcatggcggtagcggcatgttaccgctgtttgatttggaagaaccaccaaaacgcgtgctgcttgttgacggccatcatctggcgtatcgtaccttctatgcactgagccttacgacctcacgtggtgagcctgtccagatggtgtatgggtttgctcgctccctgctgaaagccctgaaggaagatggtcaagccgtagtagtggttttcgatgcgaaagcaccgtcgtttcgtcacgaagcgtacgaggcctataaagctggccgcgcaccgaccccggaagactttccgcgtcagttagcgctcgtcaaacgcctcgtggatttgctgggattagttcgcttggaagctcctggctacgaggcggacgacgtgctcggtacactggccaagaaagcagaacgtgaaggcatggaggtctgcattcttaccggtgatcgcgatttcttccagctgctgtctgagaaagtgagcgttttgctgcccgatggcacgttagtaaccccgaaagatgtccaagagaaatatggagttccgccagaacgttgggtggactttcgcgcactgactggtgatcgttcagacaacatcccgggcgttgccgggattggtgaaaagacggcgctgcgcctgctggcagaatggggctcggtggaaaatctgctcaagaaccttgatcgtgtgaaacctgatagcttacgccgcaagatcgaagcccacctggaagacttgcgtctgagtctggatcttgcgcgtattcgcaccgatctgccgttggaagtagactttaaagctctgcgtcgtcgcacacccgatttagaggggttacgcgcgttcctcgaagaactggagtttggctccctgctgcatgaattcggtttgttgggcggagagaaaccgcgtgaagaagcaccatggccgccgcccgaaggtgcctttgtcggctttcttctgtcacgcaaagagccaatgtgggcggaactgttagctcttgcagccgccgcggaagggcgtgttcaccgcgcgacctctcctgtcgaggccctcgctgacctcaaagaagcacgtggtttcttggcgaaagatttagccgtgcttgcattacgcgaaggcgttgcgctcgatccgacggacgacccgcttttggtggcttatttgctcgatcctgcgaataccaacccggaaggtgtagcccgtcgttacggcggcgagtttactgaagatgcggcagaacgcgcgttgcttagcgaacgcctcttccagacgttatttccacgtctttcggagaaattactctggctctatcaggaagtcgaacgtccattgagtcgcgtgcttgcccatatggaggctcgcggtgtgcgcttagatgttccgttgttagaagcactcagcttcgagttggagaaagaaatggaacgtcttgaaggcgaagtctttcgtttagcggggcatcccttcaatctcaactctcgcgaccaattggagaaagtgctctttgatgaattaggtttaaccccggtaggacgcacagagaagaccggcaaacgttccactgctcagggagcattggaagcacttcgtggtgctcacccgatcgtcgagttgattttgcagtaccgcgagctcagcaaactcaaatcaacctatcttgatccgttacctcgtcttgttcatccacgtacgggtcgtttacacacccgcttcaatcaaacggcgacagccaccgggcgcttgtcgtcgagtgacccgaacctccagaatattccagtgcgcacgccgttaggccaacgcattcgtaaagcgtttgttgcggaagaaggttggttattacttgcggccgattactcccagatcgaacttcgtgtattggcgcatctctctggcgacgagaatcttaaacgcgtgtttcgcgaaggcaaggatattcacactgaaaccgcagcctggatgttcgggcttgacccagcggctgtggaccccaagatgcgtcgtgccgccaagaccgtcaactttggcgtactctatggtatgtcagcacatcgtcttagtcaggaattgggcattgactacgaggaagctgaagcgtttatcgagcgctatttccaatcctttccgaaagttcgcgcgtggattgaacgtaccctcgaagaaggtcgcactcgcggctatgtggaaacgttattcgggcgtcgtcgctacgttccagatcttgcatctcgtgtccgctcagtgcgcgaagctgctgagcgtatggccttcaatatgcctgttcagggaacagcggcggacctcatgaagatcgccatggtgaaattgtttccgcgcttgaaacccttaggagcccaccttcttttacaggtgcatgatgaattggtcttggaagtacccgaggatcgcgcagaagaagccaaagcactcgtgaaagaggttatggaaaacgcgtatccgttagatgttccgttggaggtcgaagtgggtgtaggccgtgattggcttgaagcgaaacaagac

SEQ ID NO: 74 - protein, 844 aa, synthetic construct
  REGION 1..844: note = DNA Polymerase Variant
MHHHHHHGGSGMLPLFDLEEPPKRVLLVDGHHLAYRTFYALSLTTSRGEPVQMVYGFARSLLKALKEDGQAVVVVFDAKAPSFRHEAYEAYKAGRAPTPEDFPRQLALVKRLVDLLGLVRLEAPGYEADDVLGTLAKKAEREGMEVCILTGDRDFFQLLSEKVSVLLPDGTLVTPKDVQEKYGVPPERWVDFRALTGDRSDNIPGVAGIGEKTALRLLAEWGSVENLLKNLDRVKPDSLRRKIEAHLEDLRLSLDLARIRTDLPLEVDFKALRRRTPDLEGLRAFLEELEFGSLLHEFGLLGGEKPREEAPWPPPEGAFVGFLLSRKEPMWAELLALAAAAEGRVHRATSPVEALADLKEARGFLAKDLAVLALREGVALDPTDDPLLVAYLLDPANTNPEGVARRYGGEFTEDAAERALLSERLFQTLFPRLSEKLLWLYQEVERPLSRVLAHMEARGVRLDVPLLEALSFELEKEMERLEGEVFRLAGHPFNLNSRDQLEKVLFDELGLTPVGRTEKTGKRSTAQGALEALRGAHPIVELILQYRELSKLKSTYLDPLPRLVHPRTGRLHTRFNQTATATGRLSSSDPNLQNIPVRTPLGQRIRKAFVAEEGWLLLAADYSQIELRVLAHLSGDENLKRVFREGKDIHTETAAWMFGLDPAAVDPKMRRAAKTVNFGVLYGMSAHRLSQELGIDYEEAEAFIERYFQSFPKVRAWIERTLEEGRTRGYVETLFGRRRYVPDLASRVRSVREAAERMAFNMPVQGTAADLMKIAMVKLFPRLKPLGAHLLLQVHDELVLEVPEDRAEEAKALVKEVMENAYPLDVPLEVEVGVGRDWLEAKQD

SEQ ID NO: 75 - DNA, 2532 bp, synthetic construct
  misc_feature 1..2532: note = DNA Polymerase Variant
  source 1..2532: mol_type = other DNA
atgcaccatcatcatcatcatggcggtagcggcatgttaccgctgtttgatttggaagaaccaccaaaacgcgtgctgcttgttgacggccatcatctggcgtatcgtaccttctacgcactgagccttacgacctcacgtggtgagcctgtccagatggtgtatgggtttgctcgctccctgctgaaagccctgaaggaagatggtcaagccgtagtagtggttttcgatgcgaaagcaccgtcgtttcgtcacgaagcgtacgaggcctataaagctggccgcgcaccgaccccggaagactttccgcgtcagttagcgctcgtcaaacgcctcgtggatttgctgggattagttcgcttggaagctcctggctacgaggcggacgacgtgctcggtacactggccaagaaagcagaacgtgaaggcatggaggtctgcattcttaccggtgatcgcgatttcttccagctgctgtctgagaaagtgagcgttttgctgcccgatggcacgttagtaaccccgaaagatgtccaagagaaatatggagttccgccagaacgttgggtggactttcgcgcactgactggtgatcgttcagacaacatcccgggcgttgccgggattggtgaaaagacggcgctgcgcctgctggcagaatggggctcggtggaaaatctgctcaagaaccttgatcgtgtgaaacctgatagcttacgccgcaagatcgaagcccacctggaagacttgcgtctgagtctggatcttgcgcgtattcgcaccgatctgccgttggaagtagactttaaagctctgcgtcgtcgcacacccgatttagaggggttacgcgcgttcctcgaagaactggagtttggctccctgctgcatgaattcggtttgttgggcggagagaaaccgcgtgaagaagcaccatggccgccgcccgaaggtgcctttgtcggctttcttctgtcacgcaaagagccaatgtgggcggaactgttagctcttgcagccgccgcggaagggcgtgttcaccgcgcgacctctcctgtcgaggccctcgctgacctcaaagaagcacgtggtttcttggcgaaagatttagccgtgcttgcattacgcgaaggcgttgcgctcgatccgacggacgacccgcttttggtggcttatttgctcgatcctgcgaataccactccggaaggtgtagcccgtcgttacggcggcgagtttactgaagatgcggcagaacgcgcgttgcttagcgaacgcctcttccagacgttatttccacgtctttcggagaaattactctggctctatcaggaagtcgaacgtccattgagtcgcgtgcttgcccatatggaggctcgcggtgtgcgcttagatgttccgttgttagaagcactcagcttcgagttggagaaagaactggaacgtcttgaaggcgaagtctttcgtttagcggggcatcccttcaatctcaactctcgcgaccaattggagaaagtgctctttgatgaattaggtttaacccctgtcggaaaaacagagaagaccggcaaacgttccactgctcagggagcattggaagcacttcgtggtgctcacccgatcgtcgacttgattttgcagtaccgcgagctcagcaaactcaaatcaacctatcttgatccgttacctcgtcttgttcatccacgtacgggtcgtttacacacccgcttcaatcaaacggcgacagccaccgggcgcttgtcgtcgagtgacccgaacctccagaatattccagtgcgcacgccgttaggccaacgcattcgtaaagcgtttgttgcggaagaaggttggttattacttgcggccgattactcccagatcgaacttcgtgtattggcgcatctctctggcgacgagaatcttaaacgcgtgtttcgcgaaggcaaggatattcacactgaaaccgcagcctggatgttcgggcttgacccagccttagtggaccccaagatgcgtcgtgccgccaagaccgtcaactttggcgtactctatggtatgtcagcacatcgtcttagtcaggaattgggcattgactacaaagaagctgaagcgtttatcgagcgctatttccaatcctttccgaaagttcgcgcgtggattgaacgtaccctcgaagaaggtcgcactcgcggctatgtggaaacgttattcgggcgtcgtcgctacgttccagatcttgcatctcgtgtccgctcagtgcgcgaagctgctgagcgtatggccttcaatatgcctgttcagggaacagcggcggacctcatgaagatcgccatggtgaaattgtttccgcgcttgaaacccttaggagcccaccttcttttacaggtgcatgatgaattggtcttggaagtacccgaggatcgcgcagaagaagccaaagcactcgtgaaagaggttatggaaaacgcgtatccgttagatgttccgttggaggtcgaagtgggtgtaggccgtgattggcttgaagcgaaacaagac

SEQ ID NO: 76 - protein, 844 aa, synthetic construct
  REGION 1..844: note = DNA Polymerase Variant
MHHHHHHGGSGMLPLFDLEEPPKRVLLVDGHHLAYRTFYALSLTTSRGEPVQMVYGFARSLLKALKEDGQAVVVVFDAKAPSFRHEAYEAYKAGRAPTPEDFPRQLALVKRLVDLLGLVRLEAPGYEADDVLGTLAKKAEREGMEVCILTGDRDFFQLLSEKVSVLLPDGTLVTPKDVQEKYGVPPERWVDFRALTGDRSDNIPGVAGIGEKTALRLLAEWGSVENLLKNLDRVKPDSLRRKIEAHLEDLRLSLDLARIRTDLPLEVDFKALRRRTPDLEGLRAFLEELEFGSLLHEFGLLGGEKPREEAPWPPPEGAFVGFLLSRKEPMWAELLALAAAAEGRVHRATSPVEALADLKEARGFLAKDLAVLALREGVALDPTDDPLLVAYLLDPANTTPEGVARRYGGEFTEDAAERALLSERLFQTLFPRLSEKLLWLYQEVERPLSRVLAHMEARGVRLDVPLLEALSFELEKELERLEGEVFRLAGHPFNLNSRDQLEKVLFDELGLTPVGKTEKTGKRSTAQGALEALRGAHPIVDLILQYRELSKLKSTYLDPLPRLVHPRTGRLHTRFNQTATATGRLSSSDPNLQNIPVRTPLGQRIRKAFVAEEGWLLLAADYSQIELRVLAHLSGDENLKRVFREGKDIHTETAAWMFGLDPALVDPKMRRAAKTVNFGVLYGMSAHRLSQELGIDYKEAEAFIERYFQSFPKVRAWIERTLEEGRTRGYVETLFGRRRYVPDLASRVRSVREAAERMAFNMPVQGTAADLMKIAMVKLFPRLKPLGAHLLLQVHDELVLEVPEDRAEEAKALVKEVMENAYPLDVPLEVEVGVGRDWLEAKQD

SEQ ID NO: 77 - DNA, 2532 bp, synthetic construct
  misc_feature 1..2532: note = DNA Polymerase Variant
  source 1..2532: mol_type = other DNA
atgcaccatcatcatcatcatggcggtagcggcatgttaccgctgtttgatttggaagaaccaccaaaacgcgtgctgcttgttgacggccatcatctggcgtatcgtaccttctacgcactgagccttacgacctcacgtggtgagcctgtccagatggtgtatgggtttgctcgctccctgctgaaagccctgaaggaagatggtcaagccgtagtagtggttttcgatgcgaaagcaccgtcgtttcgtcacgaagcgtacgaggcctataaagctggccgcgcaccgaccccggaagactttccgcgtcagttagcgctcgtcaaacgcctcgtggatttgctgggattagttcgcttggaagctcctggctacgaggcggacgacgtgctcggtacactggccaagaaagcagaacgtgaaggcatggaggtctgcattcttaccggtgatcgcgatttcttccagctgctgtctgagaaagtgagcgttttgctgcccgatggcacgttagtaaccccgaaagatgtccaagagaaatatggagttccgccagaacgttgggtggactttcgcgcactgactggtgatcgttcagacaacatcccgggcgttgccgggattggtgaaaagacggcgctgcgcctgctggcagaatggggctcggtggaaaatctgctcaagaaccttgatcgtgtgaaacctgatagcttacgccgcaagatcgaagcccacctggaagacttgcgtctgagtctggatcttgcgcgtattcgcaccgatctgccgttggaagtagactttaaagctctgcgtcgtcgcacacccgatttagaggggttacgcgcgttcctcgaagaactggagtttggctccctgctgcatgaattcggtttgttgggcggagagaaaccgcgtgaagaagcaccatggccgccgcccgaaggtgcctttgtcggctttcttctgtcacgcaaagagccaatgtgggcggaactgttagctcttgcagccgccgcggaagggcgtgttcaccgcgcgacctctcctgtcgaggccctcgctgacctcaaagaagcacgtggtttcttggcgaaagatttagccgtgcttgcattacgcgaaggcgttgcgctcgatccgacggacgacccgcttttggtggcttatttgctcgatcctgcgaataccactccggaaggtgtagcccgtcgttacggcggcgagtttactgaagatgcggcagaacgcgcgttgcttagcgaacgcctcttccagacgttatttccacgtctttcggagaaattactctggctctatcaggaagtcgaacgtccattgagtcgcgtgcttgcccatatggaggctcgcggtgtgcgcttagatgttccgttgttagaagcactcagcttcgagttggagaaagaaatggaacgtcttgaaggcgaagtctttcgtttagcggggcatcccttcaatctcaactctcgcgaccaattggagaaagtgctctttgatgaattaggtttaacccctgtaggacgcacagagaagaccggcaaacgttccactgcgcaagccgccttggaagcacttcgtggtgctcacccgatcgtcgaattgattttgcagtaccgcgagctcactaaactcaaaagcacctatctggatccgttacctcgtcttgttcatccacgtacgggtcgtttacacacccgcttcaatcaaacggcgacagccaccgggcgcttgtcgtcgagtgacccgaacctccagaatattccagtgcgcacgccgttaggccaacgcattcgtaaagcgtttgttgcggaagaaggttggttattacttgcggccgattactcccagatcgaacttcgtgtattggcgcatctctctggcgacgagaatcttaaacgcgtgtttcgcgaaggcaaggatattcacactgaaaccgcagcctggatgttcgggcttgacccagccttagtggaccccaagatgcgtcgtgccgccaagaccgtcaactttggcgtactctatggtatgtcagcacatcgtcttagtcaggaattgggcattgactacaaagaagctgaagcgtttatcgagcgctatttccaatcctttccgaaagttcgcgcgtggattgaacgtaccctcgaagaaggtcgcactcgcggctatgtggaaacgttattcgggcgtcgtcgctacgttccagatcttgcatctcgtgtccgctcagtgcgcgaagctgctgagcgtatggccttcaatatgcctgttcagggaacagcggcggacctcatgaagatcgccatggtgaaattgtttccgcgcttgaaacccttaggagcccaccttcttttacaggtgcatgatgaattggtcttggaagtacccgaggatcgcgcagaagaagccaaagcactcgtgaaagaggttatggaaaacgcgtatccgttagatgttccgttggaggtcgaagtgggtgtaggccgtgattggcttgaagcgaaacaagac

SEQ ID NO: 78 - protein, 844 aa, synthetic construct
  REGION 1..844: note = DNA Polymerase Variant
MHHHHHHGGSGMLPLFDLEEPPKRVLLVDGHHLAYRTFYALSLTTSRGEPVQMVYGFARSLLKALKEDGQAVVVVFDAKAPSFRHEAYEAYKAGRAPTPEDFPRQLALVKRLVDLLGLVRLEAPGYEADDVLGTLAKKAEREGMEVCILTGDRDFFQLLSEKVSVLLPDGTLVTPKDVQEKYGVPPERWVDFRALTGDRSDNIPGVAGIGEKTALRLLAEWGSVENLLKNLDRVKPDSLRRKIEAHLEDLRLSLDLARIRTDLPLEVDFKALRRRTPDLEGLRAFLEELEFGSLLHEFGLLGGEKPREEAPWPPPEGAFVGFLLSRKEPMWAELLALAAAAEGRVHRATSPVEALADLKEARGFLAKDLAVLALREGVALDPTDDPLLVAYLLDPANTTPEGVARRYGGEFTEDAAERALLSERLFQTLFPRLSEKLLWLYQEVERPLSRVLAHMEARGVRLDVPLLEALSFELEKEMERLEGEVFRLAGHPFNLNSRDQLEKVLFDELGLTPVGRTEKTGKRSTAQAALEALRGAHPIVELILQYRELTKLKSTYLDPLPRLVHPRTGRLHTRFNQTATATGRLSSSDPNLQNIPVRTPLGQRIRKAFVAEEGWLLLAADYSQIELRVLAHLSGDENLKRVFREGKDIHTETAAWMFGLDPALVDPKMRRAAKTVNFGVLYGMSAHRLSQELGIDYKEAEAFIERYFQSFPKVRAWIERTLEEGRTRGYVETLFGRRRYVPDLASRVRSVREAAERMAFNMPVQGTAADLMKIAMVKLFPRLKPLGAHLLLQVHDELVLEVPEDRAEEAKALVKEVMENAYPLDVPLEVEVGVGRDWLEAKQD

SEQ ID NO: 79 - DNA, 2532 bp, synthetic construct
  misc_feature 1..2532: note = DNA Polymerase Variant
  source 1..2532: mol_type = other DNA
atgcaccatcatcatcatcatggcggtagcggcatgttaccgctgtttgatttggaagaaccaccaaaacgcgtgctgcttgttgacggccatcatctggcgtatcgtaccttctacgcactgagccttacgacctcacgtggtgagcctgtccagatggtgtatgggtttgctcgctccctgctgaaagccctgaaggaagatggtcaagccgtagtagtggttttcgatgcgaaagcaccgtcgtttcgtcacgaagcgtacgaggcctataaagctggccgcgcaccgaccccggaagactttccgcgtcagttagcgctcgtcaaacgcctcgtggatttgctgggattagttcgcttggaagctcctggctacgaggcggacgacgtgctcggtacactggccaagaaagcagaacgtgaaggcatggaggtctgcattcttaccggtgatcgcgatttcttccagctgctgtctgagaaagtgagcgttttgctgcccgatggcacgttagtaaccccgaaagatgtccaagagaaatatggagttccgccagaacgttgggtggactttcgcgcactgactggtgatcgttcagacaacatcccgggcgttgccgggattggtgaaaagacggcgctgcgcctgctggcagaatggggctcggtggaaaatctgctcaagaaccttgatcgtgtgaaacctgatagcttacgccgcaagatcgaagcccacctggaagacttgcgtctgagtctggatcttgcgcgtattcgcaccgatctgccgttggaagtagactttaaagctctgcgtcgtcgcacacccgatttagaggggttacgcgcgttcctcgaagaactggagtttggctccctgctgcatgaattcggtttgttgggcggagagaaaccgcgtgaagaagcaccatggccgccgcccgaaggtgcctttgtcggctttcttctgtcacgcaaagagccaatgtgggcggaactgttagctcttgcagccgccgcggaagggcgtgttcaccgcgcgacctctcctgtcgaggccctcgctgacctcaaagaagcacgtggtttcttggcgaaagatttagccgtgcttgcattacgcgaaggcgttgcgctcgatccgacggacgacccgcttttggtggcttatttgctcgatcctgcgaataccactccggaaggtgtagcccgtcgttacggcggcgagtttactgaagatgcggcagaacgcgcgttgcttagcgaacgcctcttccagacgttatttccacgtctttcggagaaattactctggctctatcaggaagtcgaacgtccattgagtcgcgtgcttgcccatatggaggctcgcggtgtgcgcttagatgttccgttgttagaagcactcagcttcgagttggagaaagaaatcgaacgtcttgaaggcgaagtctttcgtttagcggggcatcccttcaatctcaactctcgcgaccaattggagaaagtgctctttgatgaattaggtttaacccctatcggacgtacagagaagaccggcaaacgttccactgctcagggagcattggaagcacttcgtggtgctcacccgatcgtcgacttgattttgcagtaccgcgagctcagtaaactcaaaagcacctatattgatccgttacctcgtcttgttcatccacgtacgggtcgtttacacacccgcttcaatcaaacggcgacagccaccgggcgcttgtcgtcgagtgacccgaacctccagaatattccagtgcgcacgccgttaggccaacgcattcgtaaagcgtttgttgcggaagaaggttggttattacttgcggccgattactcccagatcgaacttcgtgtattggcgcatctctctggcgacgagaatcttaaacgcgtgtttcgcgaaggcaaggatattcacactgaaaccgcagcctggatgttcgggcttgacccagccttagtggaccccaagatgcgtcgtgccgccaagaccgtcaactttggcgtactctatggtatgtcagcacatcgtcttagtcaggaattgggcattgactacaaagaagctgaagcgtttatcgagcgctatttccaatcctttccgaaagttcgcgcgtggattgaacgtaccctcgaagaaggtcgcactcgcggctatgtggaaacgttattcgggcgtcgtcgctacgttccagatcttgcatctcgtgtccgctcagtgcgcgaagctgctgagcgtatggccttcaatatgcctgttcagggaacagcggcggacctcatgaagatcgccatggtgaaattgtttccgcgcttgaaacccttaggagcccaccttcttttacaggtgcatgatgaattggtcttggaagtacccgaggatcgcgcagaagaagccaaagcactcgtgaaagaggttatggaaaacgcgtatccgttagatgttccgttggaggtcgaagtgggtgtaggccgtgattggcttgaagcgaaacaagac

SEQ ID NO: 80 - protein, 844 aa, synthetic construct
  REGION 1..844: note = DNA Polymerase Variant
MHHHHHHGGSGMLPLFDLEEPPKRVLLVDGHHLAYRTFYALSLTTSRGEPVQMVYGFARSLLKALKEDGQAVVVVFDAKAPSFRHEAYEAYKAGRAPTPEDFPRQLALVKRLVDLLGLVRLEAPGYEADDVLGTLAKKAEREGMEVCILTGDRDFFQLLSEKVSVLLPDGTLVTPKDVQEKYGVPPERWVDFRALTGDRSDNIPGVAGIGEKTALRLLAEWGSVENLLKNLDRVKPDSLRRKIEAHLEDLRLSLDLARIRTDLPLEVDFKALRRRTPDLEGLRAFLEELEFGSLLHEFGLLGGEKPREEAPWPPPEGAFVGFLLSRKEPMWAELLALAAAAEGRVHRATSPVEALADLKEARGFLAKDLAVLALREGVALDPTDDPLLVAYLLDPANTTPEGVARRYGGEFTEDAAERALLSERLFQTLFPRLSEKLLWLYQEVERPLSRVLAHMEARGVRLDVPLLEALSFELEKEIERLEGEVFRLAGHPFNLNSRDQLEKVLFDELGLTPIGRTEKTGKRSTAQGALEALRGAHPIVDLILQYRELSKLKSTYIDPLPRLVHPRTGRLHTRFNQTATATGRLSSSDPNLQNIPVRTPLGQRIRKAFVAEEGWLLLAADYSQIELRVLAHLSGDENLKRVFREGKDIHTETAAWMFGLDPALVDPKMRRAAKTVNFGVLYGMSAHRLSQELGIDYKEAEAFIERYFQSFPKVRAWIERTLEEGRTRGYVETLFGRRRYVPDLASRVRSVREAAERMAFNMPVQGTAADLMKIAMVKLFPRLKPLGAHLLLQVHDELVLEVPEDRAEEAKALVKEVMENAYPLDVPLEVEVGVGRDWLEAKQD

SEQ ID NO: 81 - DNA, 2532 bp, synthetic construct
  misc_feature 1..2532: note = DNA Polymerase Variant
  source 1..2532: mol_type = other DNA
atgcaccatcatcatcatcatggcggtagcggcatgttaccgctgtttgatttggaagaaccaccaaaacgcgtgctgcttgttgacggccatcatctggcgtatcgtaccttctacgcactgagccttacgacctcacgtggtgagcctgtccagatggtgtatgggtttgctcgctccctgctgaaagccctgaaggaagatggtcaagccgtagtagtggttttcgatgcgaaagcaccgtcgtttcgtcacgaagcgtacgaggcctataaagctggccgcgcaccgaccccggaagactttccgcgtcagttagcgctcgtcaaacgcctcgtggatttgctgggattagttcgcttggaagctcctggctacgaggcggacgacgtgctcggtacactggccaagaaagcagaacgtgaaggcatggaggtctgcattcttaccggtgatcgcgatttcttccagctgctgtctgagaaagtgagcgttttgctgcccgatggcacgttagtaaccccgaaagatgtccaagagaaatatggagttccgccagaacgttgggtggactttcgcgcactgactggtgatcgttcagacaacatcccgggcgttgccgggattggtgaaaagacggcgctgcgcctgctggcagaatggggctcggtggaaaatctgctcaagaaccttgatcgtgtgaaacctgatagcttacgccgcaagatcgaagcccacctggaagacttgcgtctgagtctggatcttgcgcgtattcgcaccgatctgccgttggaagtagactttaaagctctgcgtcgtcgcacacccgatttagaggggttacgcgcgttcctcgaacgtctggagtttggctccctgctgcatgaattcggtttgttgggcggagagaaaccgcgtgaagaagcaccatggccgccgcccgaaggtgcctttgtcggctttcttctgtcacgcaaagagccaatgtgggcggaactgttagctcttgcagccgccgcggaagggcgtgttcaccgcgcgacctctcctgtcgaggccctcgctgacctcaaagaagcacgtggtttcttggcgaaagatttagccgtgcttgcattacgcgaaggcgttgcgctcgatccgacggacgacccgcttttggtggcttatttgctcgatcctgcgaataccaatccggaaggtgtagcccgtcgttacggcggcgagtttactgaagatgcggcagaacgcgcgttgcttagcgaacgcctcttccagacgttatttccacgtctttcggagaaattactctggctctatcaggaagtcgaacgtccattgagtcgcgtgcttgcccatatggaggctcgcggtgtgcgcttagatgttccgttgttagaagcactcagcttcgagttggagaaagaactggaacgtcttgaaggcgaagtctttcgtttagcggggcatcccttcaatctcaactctcgcgaccaattggagaaagtgctctttgatgaattaggtttaacccctatcggaaaaacagagaagaccggcaaacgttccactgctcagggagcattggaagcacttcgtggtgctcacccgatcgtcgagttgattttgcagtaccgcgagctcagcaaactcaaatcaacctatcttgatccgttacctcgtcttgttcatccacgtacgggtcgtttacacacccgcttcaatcaaacggcgacagccaccgggcgcttgtcgtcgagtgacccgaacctccagaatattccagtgcgcacgccgttaggccaacgcattcgtaaagcgtttgttgcggaagaaggttggttattacttgcggccgattactcccagatcgaacttcgtgtattggcgcatctctctggcgacgagaatcttaaacgcgtgtttcgcgaaggcaaggatattcacactgaaaccgcagcctggatgttcgggcttgacccagccttagtggaccccaagatgcgtcgtgccgccaagaccgtcaactttggcgtactctatggtatgtcagcacatcgtcttagtcaggaattgggcattgactacaaagaagctgaagcgtttatcgagcgctatttccaatcctttccgaaagttcgcgcgtggattgaacgtaccctcgaagaaggtcgcactcgcggctatgtggaaacgttattcgggcgtcgtcgctacgttccagatcttgcatctcgtgtccgctcagtgcgcgaagctgctgagcgtatggccttcaatatgcctgttcagggaacagcggcggacctcatgaagatcgccatggtgaaattgtttccgcgcttgaaacccttaggagcccaccttcttttacaggtgcatgatgaattggtcttggaagtacccgaggatcgcgcagaagaagccaaagcactcgtgaaagaggttatggaaaacgcgtatccgttagatgttccgttggaggtcgaagtgggtgtaggccgtgattggcttgaagcgaaacaagac

SEQ ID NO: 82 - protein, 844 aa, synthetic construct
  REGION 1..844: note = DNA Polymerase Variant
MHHHHHHGGSGMLPLFDLEEPPKRVLLVDGHHLAYRTFYALSLTTSRGEPVQMVYGFARSLLKALKEDGQAVVVVFDAKAPSFRHEAYEAYKAGRAPTPEDFPRQLALVKRLVDLLGLVRLEAPGYEADDVLGTLAKKAEREGMEVCILTGDRDFFQLLSEKVSVLLPDGTLVTPKDVQEKYGVPPERWVDFRALTGDRSDNIPGVAGIGEKTALRLLAEWGSVENLLKNLDRVKPDSLRRKIEAHLEDLRLSLDLARIRTDLPLEVDFKALRRRTPDLEGLRAFLERLEFGSLLHEFGLLGGEKPREEAPWPPPEGAFVGFLLSRKEPMWAELLALAAAAEGRVHRATSPVEALADLKEARGFLAKDLAVLALREGVALDPTDDPLLVAYLLDPANTNPEGVARRYGGEFTEDAAERALLSERLFQTLFPRLSEKLLWLYQEVERPLSRVLAHMEARGVRLDVPLLEALSFELEKELERLEGEVFRLAGHPFNLNSRDQLEKVLFDELGLTPIGKTEKTGKRSTAQGALEALRGAHPIVELILQYRELSKLKSTYLDPLPRLVHPRTGRLHTRFNQTATATGRLSSSDPNLQNIPVRTPLGQRIRKAFVAEEGWLLLAADYSQIELRVLAHLSGDENLKRVFREGKDIHTETAAWMFGLDPALVDPKMRRAAKTVNFGVLYGMSAHRLSQELGIDYKEAEAFIERYFQSFPKVRAWIERTLEEGRTRGYVETLFGRRRYVPDLASRVRSVREAAERMAFNMPVQGTAADLMKIAMVKLFPRLKPLGAHLLLQVHDELVLEVPEDRAEEAKALVKEVMENAYPLDVPLEVEVGVGRDWLEAKQD

SEQ ID NO: 83 - DNA, 2532 bp, synthetic construct
  misc_feature 1..2532: note = DNA Polymerase Variant
  source 1..2532: mol_type = other DNA
atgcaccatcatcatcatcatggcggtagcggcatgttaccgctgtttgatttggaagaaccaccaaaacgcgtgctgcttgttgacggccatcatctggcgtatcgtaccttctacgcactgagccttacgacctcacgtggtgagcctgtccagatggtgtatgggtttgctcgctccctgctgaaagccctgaaggaagatggtcaagccgtagtagtggttttcgatgcgaaagcaccgtcgtttcgtcacgaagcgtacgaggcctataaagctggccgcgcaccgaccccggaagactttccgcgtcagttagcgctcgtcaaacgcctcgtggatttgctgggattagttcgcttggaagctcctggctacgaggcggacgacgtgctcggtacactggccaagaaagcagaacgtgaaggcatggaggtctgcattcttaccggtgatcgcgatttcttccagctgctgtctgagaaagtgagcgttttgctgcccgatggcacgttagtaaccccgaaagatgtccaagagaaatatggagttccgccagaacgttgggtggactttcgcgcactgactggtgatcgttcagacaacatcccgggcgttgccgggattggtgaaaagacggcgctgcgcctgctggcagaatggggctcgctggaaaatctgctcaagaaccttgatcgtgtgaaacctgatagcttacgccgcaagatcgaagcccacctggaagacttgcgtctgagtctggatcttgcgcgtattcgcaccgatctgccgttggaagtagactttaaagctctgcgtcgtcgcacacccgatttagaggggttacgcgcgttcctcgaagaactggagtttggctccctgctgcatgaattcggtttgttgggcggagagaaaccgcgtgaagaagcaccatggccgccgcccgaaggtgcctttgtcggctttcttctgtcacgcaaagagccaatgtgggcggaactgttagctcttgcagccgccgcggaagggcgtgttcaccgcgcgacctctcctgtcgaggccctcgctgacctcaaagaagcacgtggtttcttggcgaaagatttagccgtgcttgcattacgcgaaggcgttgcgctcgatccgacggacgacccgcttttggtggcttatttgctcgatcctgcgaataccaacccggaaggtgtagcccgtcgttacggcggcgagtttactgaagatgcggcagaacgcgcgttgcttagcgaacgcctcttccagacgttatttccacgtctttcggagaaattactctggctctatcaggaagtcgaacgtccattgagtcgcgtgcttgcccatatggaggctcgcggtgtgcgcttagatgttccgttgttagaagcactcagcttcgagttggagaaagaaatggaacgtcttgaaggcgaagtctttcgtttagcggggcatcccttcaatctcaactctcgcgaccaattggagaaagtgctctttgatgaattaggtttaaccccggtaggacgcacagagaagaccggcaaacgttccactgctcagggagcattggaagcacttcgtggtgctcacccgatcgtcgagttgattttgcagtaccgcgagctcagcaaactcaaatcaacctatcttgatccgttacctcgtcttgttcatccacgtacgggtcgtttacacacccgcttcaatcaaacggcgacagccaccgggcgcttgtcgtcgagtgacccgaacctccagaatattccagtgcgcacgccgttaggccaacgcattcgtaaagcgtttgttgcggaagaaggttggttattacttgcggccgattactcccagatcgaacttcgtgtattggcgcatctctctggcgacgagaatcttaaacgcgtgtttcgcgaaggcaaggatattcacactgaaaccgcagcctggatgttcgggcttgacccagcggctgtggaccccaagatgcgtcgtgccgccaagaccgtcaactttggcgtactctatggtatgtcagcacatcgtcttagtcaggaattgggcattgactacaaagaagctgaagcgtttatcgagcgctatttccaatcctttccgaaagttcgcgcgtggattgaacgtaccctcgaagaaggtcgcactcgcggctatgtggaaacgttattcgggcgtcgtcgctacgttccagatcttgcatctcgtgtccgctcagtgcgcgaagctgctgagcgtatggccttcaatatgcctgttcagggaacagcggcggacctcatgaagatcgccatggtgaaattgtttccgcgcttgaaacccttaggagcccaccttcttttacaggtgcatgatgaattggtcttggaagtacccgaggatcgcgcagaagaagccaaagcactcgtgaaagaggttatggaaaacgcgtatccgttagatgttccgttggaggtcgaagtgggtgtaggccgtgattggcttgaagcgaaacaagac

SEQ ID NO: 84 - protein, 844 aa, synthetic construct
  REGION 1..844: note = DNA Polymerase Variant
MHHHHHHGGSGMLPLFDLEEPPKRVLLVDGHHLAYRTFYALSLTTSRGEPVQMVYGFARSLLKALKEDGQAVVVVFDAKAPSFRHEAYEAYKAGRAPTPEDFPRQLALVKRLVDLLGLVRLEAPGYEADDVLGTLAKKAEREGMEVCILTGDRDFFQLLSEKVSVLLPDGTLVTPKDVQEKYGVPPERWVDFRALTGDRSDNIPGVAGIGEKTALRLLAEWGSLENLLKNLDRVKPDSLRRKIEAHLEDLRLSLDLARIRTDLPLEVDFKALRRRTPDLEGLRAFLEELEFGSLLHEFGLLGGEKPREEAPWPPPEGAFVGFLLSRKEPMWAELLALAAAAEGRVHRATSPVEALADLKEARGFLAKDLAVLALREGVALDPTDDPLLVAYLLDPANTNPEGVARRYGGEFTEDAAERALLSERLFQTLFPRLSEKLLWLYQEVERPLSRVLAHMEARGVRLDVPLLEALSFELEKEMERLEGEVFRLAGHPFNLNSRDQLEKVLFDELGLTPVGRTEKTGKRSTAQGALEALRGAHPIVELILQYRELSKLKSTYLDPLPRLVHPRTGRLHTRFNQTATATGRLSSSDPNLQNIPVRTPLGQRIRKAFVAEEGWLLLAADYSQIELRVLAHLSGDENLKRVFREGKDIHTETAAWMFGLDPAAVDPKMRRAAKTVNFGVLYGMSAHRLSQELGIDYKEAEAFIERYFQSFPKVRAWIERTLEEGRTRGYVETLFGRRRYVPDLASRVRSVREAAERMAFNMPVQGTAADLMKIAMVKLFPRLKPLGAHLLLQVHDELVLEVPEDRAEEAKALVKEVMENAYPLDVPLEVEVGVGRDWLEAKQD

SEQ ID NO: 85 - DNA, 2532 bp, synthetic construct
  misc_feature 1..2532: note = DNA Polymerase Variant
  source 1..2532: mol_type = other DNA
atgcaccatcatcatcatcatggcggtagcggcatgttaccgctgtttgatttggaagaaccaccaaaacgcgtgctgcttgttgacggccatcatctggcgtatcgtaccttctacgcactgagccttacgacctcacgtggtgagcctgtccagatggtgtatgggtttgctcgctccctgctgaaagccctgaaggaagatggtcaagccgtagtagtggttttcgatgcgaaagcaccgtcgtttcgtcacgaagcgtacgaggcctataaagctggccgcgcaccgaccccggaagactttccgcgtcagttagcgctcgtcaaacgcctcgtggatttgctgggattagttcgcttggaagctcctggctacgaggcggacgacgtgctcggtacactggccaagaaagcagaacgtgaaggcatggaggtctgcattcttaccggtgatcgcgatttcttccagctgctgtctgagaaagtgagcgttttgctgcccgatggcacgttagtaaccccgaaagatgtccaagagaaatatggagttccgccagaacgttgggtggactttcgcgcactgactggtgatcgttcagacaacatcccgggcgttgccgggattggtgaaaagacggcgctgcgcctgctggcagaatggggctcggtggaaaatctgctcaagaaccttgatcgtgtgaaacctgatagcttacgccgcaagatcgaagcccacctggaagacttgcgtctgagtctggatcttgcgcgtattcgcaccgatctgccgttggaagtagactttaaagctctgcgtcgtcgcacacccgatttagaggggttacgcgcgttcctcgaagaactggagtttggctccctgctgcatgaattcggtttgttgggcggagagaaaccgcgtgaagaagcaccatggccgccgcccgaaggtgcctttgtcggctttcttctgtcacgcaaagagccaatgtgggcggaactgttagctcttgcagccgccgcggaagggcgtgttcaccgcgcgacctctcctgtcgaggccctcgctgacctcaaagaagcacgtggtttcttggcgaaagatttagccgtgcttgcattacgcgaaggcgttgcgctcgatccgacggacgacccgcttttggtggcttatttgctcgatcctgcgaataccaatccggaaggtgtagcccgtcgttacggcggcgagtttactgaagatgcggcagaacgcgcgttgcttagcgaacgcctcttccagacgttatttccacgtctttcggagaaattactctggctctatcaggaagtcgaacgtccattgagtcgcgtgcttgcccatatggaggctcgcggtgtgcgcttagatgttccgttgttagaagcactcagcttcgagttggagaaagaactggaacgtcttgaaggcgaagtctttcgtttagcggggcatcccttcaatctcaactctcgcgaccaattggagaaagtgctctttgatgaattaggtttaacccctgtaggacgcacagagaagaccggcaaacgttccacttcggcaagtgccttggaagcacttcgtggtgctcacccgatcgtcgaattgattttgcagtaccgcgagctcagcaaactcaaatcaacctatcttgatccgttacctcgtcttgttcatccacgtacgggtcgtttacacacccgcttcaatcaaacggcgacagccaccgggcgcttgtcgtcgagtgacccgaacctccagaatattccagtgcgcacgccgttaggccaacgcattcgtaaagcgtttgttgcggaagaaggttggttattacttgcggccgattactcccagatcgaacttcgtgtattggcgcatctctctggcgacgagaatcttaaacgcgtgtttcgcgaaggcaaggatattcacactgaaaccgcagcctggatgttcgggcttgacccagccttagtggaccccaagatgcgtcgtgccgccaagaccgtcaactttggcgtactctatggtatgtcagcacatcgtcttagtcaggaattgggcattgactacaaagaagctgaagcgtttatcgagcgctatttccaatcctttccgaaagttcgcgcgtggattgaacgtaccctcgaagaaggtcgcactcgcggctatgtggaaacgttattcgggcgtcgtcgctacgttccagatcttgcatctcgtgtccgctcagtgcgcgaagctgctgagcgtatggccttcaatatgcctgttcagggaacagcggcggacctcatgaagatcgccatggtgaaattgtttccgcgcttgaaacccttaggagcccaccttcttttacaggtgcatgatgaattggtcttggaagtacccgaggatcgcgcagaagaagccaaagcactcgtgaaagaggttatggaaaacgcgtatccgttagatgttccgttggaggtcgaagtgggtgtaggccgtgattggcttgaagcgaaacaagac

SEQ ID NO: 86 - protein, 844 aa, synthetic construct
  REGION 1..844: note = DNA Polymerase Variant
MHHHHHHGGSGMLPLFDLEEPPKRVLLVDGHHLAYRTFYALSLTTSRGEPVQMVYGFARSLLKALKEDGQAVVVVFDAKAPSFRHEAYEAYKAGRAPTPEDFPRQLALVKRLVDLLGLVRLEAPGYEADDVLGTLAKKAEREGMEVCILTGDRDFFQLLSEKVSVLLPDGTLVTPKDVQEKYGVPPERWVDFRALTGDRSDNIPGVAGIGEKTALRLLAEWGSVENLLKNLDRVKPDSLRRKIEAHLEDLRLSLDLARIRTDLPLEVDFKALRRRTPDLEGLRAFLEELEFGSLLHEFGLLGGEKPREEAPWPPPEGAFVGFLLSRKEPMWAELLALAAAAEGRVHRATSPVEALADLKEARGFLAKDLAVLALREGVALDPTDDPLLVAYLLDPANTNPEGVARRYGGEFTEDAAERALLSERLFQTLFPRLSEKLLWLYQEVERPLSRVLAHMEARGVRLDVPLLEALSFELEKELERLEGEVFRLAGHPFNLNSRDQLEKVLFDELGLTPVGRTEKTGKRSTSASALEALRGAHPIVELILQYRELSKLKSTYLDPLPRLVHPRTGRLHTRFNQTATATGRLSSSDPNLQNIPVRTPLGQRIRKAFVAEEGWLLLAADYSQIELRVLAHLSGDENLKRVFREGKDIHTETAAWMFGLDPALVDPKMRRAAKTVNFGVLYGMSAHRLSQELGIDYKEAEAFIERYFQSFPKVRAWIERTLEEGRTRGYVETLFGRRRYVPDLASRVRSVREAAERMAFNMPVQGTAADLMKIAMVKLFPRLKPLGAHLLLQVHDELVLEVPEDRAEEAKALVKEVMENAYPLDVPLEVEVGVGRDWLEAKQD

SEQ ID NO: 87 - DNA, 2532 bp, synthetic construct
  misc_feature 1..2532: note = DNA Polymerase Variant
  source 1..2532: mol_type = other DNA
atgcaccatcatcatcatcatggcggtagcggcatgttaccgctgtttgatttggaagaaccaccaaaacgcgtgctgcttgttgacggccatcatctggcgtatcgtaccttctacgcactgagccttacgacctcacgtggtgagcctgtccagatggtgtatgggtttgctcgctccctgctgaaagccctgaaggaagatggtcaagccgtagtagtggttttcgatgcgaaagcaccgtcgtttcgtcacgaagcgtacgaggcctataaagctggccgcgcaccgaccccggaagactttccgcgtcagttagcgctcgtcaaacgcctcgtggatttgctgggattagttcgcttggaagctcctggctacgaggcggacgacgtgctcggtacactggccaagaaagcagaacgtgaaggcatggaggtctgcattcttaccggtgatcgcgatttcttccagctgctgtctgagaaagtgagcgttttgctgcccgatggcacgttagtaaccccgaaagatgtccaagagaaatatggagttccgccagaacgttgggtggactttcgcgcactgactggtgatcgttcagacaacatcccgggcgttgccgggattggtgaaaagacggcgctgcgcctgctggcagaatggggctcggtggaaaatctgctcaagaaccttgatcgtgtgaaacctgatagcttacgccgcaagatcgaagcccacctggaagacttgcgtctgagtctggatcttgcgcgtattcgcaccgatctgccgttggaagtagactttaaagctctgcgtcgtcgcacacccgatttagaggggttacgcgcgttcctcgaacgtctggagtttggctccctgctgcatgaattcggtttgttgggcggagagaaaccgcgtgaagaagcaccatggccgccgcccgaaggtgcctttgtcggctttcttctgtcacgcaaagagccaatgtgggcggaactgttagctcttgcagccgccgcggaagggcgtgttcaccgcgcgacctctcctgtcgaggccctcgctgacctcaaagaagcacgtggtttcttggcgaaagatttagccgtgcttgcattacgcgaaggcgttgcgctcgatccgacggacgacccgcttttggtggcttatttgctcgatcctgcgaataccaatccggaaggtgtagcccgtcgttacggcggcgagtttactgaagatgcggcagaacgcgcgttgcttagcgaacgcctcttccagacgttatttccacgtctttcggagaaattactctggctctatcaggaagtcgaacgtccattgagtcgcgtgcttgcccatatggaggctcgcggtgtgcgcttagatgttccgttgttagaagcactcagcttcgagttggagaaagaactggaacgtcttgaaggcgaagtctttcgtttagcggggcatcccttcaatctcaactctcgcgaccaattggagaaagtgctctttgatgaattaggtttaacccctatcggaaaaacagagaagaccggcaaacgttccactgctcagggagcattggaagcacttcgtggtgctcacccgatcgtcgacttgattttgcagtaccgcgagctcactaaactcaaaaacacctatctggatccgttacctcgtcttgttcatccacgtacgggtcgtttacacacccgcttcaatcaaacggcgacagccaccgggcgcttgtcgtcgagtgacccgaacctccagaatattccagtgcgcacgccgttaggccaacgcattcgtaaagcgtttgttgcggaagaaggttggttattacttgcggccgattactcccagatcgaacttcgtgtattggcgcatctctctggcgacgagaatcttaaacgcgtgtttcgcgaaggcaaggatattcacactgaaaccgcagcctggatgttcgggcttgacccagccttagtggaccccaagatgcgtcgtgccgccaagaccgtcaactttggcgtactctatggtatgtcagcacatcgtcttagtcaggaattgggcattgactacaaagaagctgaagcgtttatcgagcgctatttccaatcctttccgaaagttcgcgcgtggattgaacgtaccctcgaagaaggtcgcactcgcggctatgtggaaacgttattcgggcgtcgtcgctacgttccagatcttgcatctcgtgtccgctcagtgcgcgaagctgctgagcgtatggccttcaatatgcctgttcagggaacagcggcggacctcatgaagatcgccatggtgaaattgtttccgcgcttgaaacccttaggagcccaccttcttttacaggtgcatgatgaattggtcttggaagtacccgaggatcgcgcagaagaagccaaagcactcgtgaaagaggttatggaaaacgcgtatccgttagatgttccgttggaggtcgaagtgggtgtaggccgtgattggcttgaagcgaaacaagac

SEQ ID NO: 88 - protein, 844 aa, synthetic construct
  REGION 1..844: note = DNA Polymerase Variant
MHHHHHHGGSGMLPLFDLEEPPKRVLLVDGHHLAYRTFYALSLTTSRGEPVQMVYGFARSLLKALKEDGQAVVVVFDAKAPSFRHEAYEAYKAGRAPTPEDFPRQLALVKRLVDLLGLVRLEAPGYEADDVLGTLAKKAEREGMEVCILTGDRDFFQLLSEKVSVLLPDGTLVTPKDVQEKYGVPPERWVDFRALTGDRSDNIPGVAGIGEKTALRLLAEWGSVENLLKNLDRVKPDSLRRKIEAHLEDLRLSLDLARIRTDLPLEVDFKALRRRTPDLEGLRAFLERLEFGSLLHEFGLLGGEKPREEAPWPPPEGAFVGFLLSRKEPMWAELLALAAAAEGRVHRATSPVEALADLKEARGFLAKDLAVLALREGVALDPTDDPLLVAYLLDPANTNPEGVARRYGGEFTEDAAERALLSERLFQTLFPRLSEKLLWLYQEVERPLSRVLAHMEARGVRLDVPLLEALSFELEKELERLEGEVFRLAGHPFNLNSRDQLEKVLFDELGLTPIGKTEKTGKRSTAQGALEALRGAHPIVDLILQYRELTKLKNTYLDPLPRLVHPRTGRLHTRFNQTATATGRLSSSDPNLQNIPVRTPLGQRIRKAFVAEEGWLLLAADYSQIELRVLAHLSGDENLKRVFREGKDIHTETAAWMFGLDPALVDPKMRRAAKTVNFGVLYGMSAHRLSQELGIDYKEAEAFIERYFQSFPKVRAWIERTLEEGRTRGYVETLFGRRRYVPDLASRVRSVREAAERMAFNMPVQGTAADLMKIAMVKLFPRLKPLGAHLLLQVHDELVLEVPEDRAEEAKALVKEVMENAYPLDVPLEVEVGVGRDWLEAKQD

SEQ ID NO: 89 - DNA, 2532 bp, synthetic construct
  misc_feature 1..2532: note = DNA Polymerase Variant
  source 1..2532: mol_type = other DNA
atgcaccatcatcatcatcatggcggtagcggcatgttaccgctgtttgatttggaagaaccaccaaaacgcgtgctgcttgttgacggccatcatctggcgtatcgtaccttctacgcactgagccttacgacctcacgtggtgagcctgtccagatggtgtatgggtttgctcgctccctgctgaaagccctgaaggaagatggtcaagccgtagtagtggttttcgatgcgaaagcaccgtcgtttcgtcacgaagcgtacgaggcctataaagctggccgcgcaccgaccccggaagactttccgcgtcagttagcgctcgtcaaacgcctcgtggatttgctgggattagttcgcttggaagctcctggctacgaggcggacgacgtgctcggtacactggccaagaaagcagaacgtgaaggcatggaggtctgcattcttaccggtgatcgcgatttcttccagctgctgtctgagaaagtgagcgttttgctgcccgatggcacgttagtaaccccgaaagatgtccaagagaaatatggagttccgccagaacgttgggtggactttcgcgcactgactggtgatcgttcagacaacatcccgggcgttgccgggattggtgaaaagacggcgctgcgcctgctggcagaatggggctcggtggaaaatctgctcaagaaccttgatcgtgtgaaacctgatagcttacgccgcaagatcgaagcccacctggaagacttgcgtctgagtctggatcttgcgcgtattcgcaccgatctgccgttggaagtagactttaaagctctgcgtcgtcgcacacccgatttagaggggttacgcgcgttcctcgaagaactggagtttggctccctgctgcatgaattcggtttgttgggcggagagaaaccgcgtgaagaagcaccatggccgccgcccgaaggtgcctttgtcggctttcttctgtcacgcaaagagccaatgtgggcggaactgttagctcttgcagccgccgcggaagggcgtgttcaccgcgcgacctctcctgtcgaggccctcgctgacctcaaagaagcacgtggtttcttggcgaaagatttagccgtgcttgcattacgcgaaggcgttgcgctcgatccgacggacgacccgcttttggtggcttatttgctcgatcctgcgaataccaacccggaaggtgtagcccgtcgttacggcggcgagtttactgaagatgcggcagaacgcgcgttgcttagcgaacgcctcttccagacgttatttccacgtctttcggagaaattactctggctctatcaggaagtcgaacgtccattgagtcgcgtgcttgcccatatggaggctcgcggtgtgcgcttagatgttccgttgttagaagcactcagcttcgagttggagaaagaactggaacgtcttgaaggcgaagtctttcgtttagcggggcatcccttcaatctcaactctcgcgaccaattggagaaagtgctctttgatgaattaggtttaacccctatcggacgtacagagaagaccggcaaacgttccactgcgcaaggcgccttggaagcacttcgtggtgctcacccgatcgtcgacttgattttgcagtaccgcgagctcagtaaactcaaaaacacctatctggatccgttacctcgtcttgttcatccacgtacgggtcgtttacacacccgcttcaatcaaacggcgacagccaccgggcgcttgtcgtcgagtgacccgaacctccagaatattccagtgcgcacgccgttaggccaacgcattcgtaaagcgtttgttgcggaagaaggttggttattacttgcggccgattactcccagatcgaacttcgtgtattggcgcatctctctggcgacgagaatcttaaacgcgtgtttcgcgaaggcaaggatattcacactgaaaccgcagcctggatgttcgggcttgacccagccttagtggaccccaagatgcgtcgtgccgccaagaccgtcaactttggcgtactctatggtatgtcagcacatcgtcttagtcaggaattgggcattgactacaaagaagctgaagcgtttatcgagcgctatttccaatcctttccgaaagttcgcgcgtggattgaacgtaccctcgaagaaggtcgcactcgcggctatgtggaaacgttattcgggcgtcgtcgctacgttccagatcttgcatctcgtgtccgctcagtgcgcgaagctgctgagcgtatggccttcaatatgcctgttcagggaacagcggcggacctcatgaagatcgccatggtgaaattgtttccgcgcttgaaacccttaggagcccaccttcttttacaggtgcatgatgaattggtcttggaagtacccgaggatcgcgcagaagaagccaaagcactcgtgaaagaggttatggaaaacgcgtatccgttagatgttccgttggaggtcgaagtgggtgtaggccgtgattggcttgaagcgaaacaagac

SEQ ID NO: 90 - protein, 844 aa, synthetic construct
  REGION 1..844: note = DNA Polymerase Variant
MHHHHHHGGSGMLPLFDLEEPPKRVLLVDGHHLAYRTFYALSLTTSRGEPVQMVYGFARSLLKALKEDGQAVVVVFDAKAPSFRHEAYEAYKAGRAPTPEDFPRQLALVKRLVDLLGLVRLEAPGYEADDVLGTLAKKAEREGMEVCILTGDRDFFQLLSEKVSVLLPDGTLVTPKDVQEKYGVPPERWVDFRALTGDRSDNIPGVAGIGEKTALRLLAEWGSVENLLKNLDRVKPDSLRRKIEAHLEDLRLSLDLARIRTDLPLEVDFKALRRRTPDLEGLRAFLEELEFGSLLHEFGLLGGEKPREEAPWPPPEGAFVGFLLSRKEPMWAELLALAAAAEGRVHRATSPVEALADLKEARGFLAKDLAVLALREGVALDPTDDPLLVAYLLDPANTNPEGVARRYGGEFTEDAAERALLSERLFQTLFPRLSEKLLWLYQEVERPLSRVLAHMEARGVRLDVPLLEALSFELEKELERLEGEVFRLAGHPFNLNSRDQLEKVLFDELGLTPIGRTEKTGKRSTAQGALEALRGAHPIVDLILQYRELSKLKNTYLDPLPRLVHPRTGRLHTRFNQTATATGRLSSSDPNLQNIPVRTPLGQRIRKAFVAEEGWLLLAADYSQIELRVLAHLSGDENLKRVFREGKDIHTETAAWMFGLDPALVDPKMRRAAKTVNFGVLYGMSAHRLSQELGIDYKEAEAFIERYFQSFPKVRAWIERTLEEGRTRGYVETLFGRRRYVPDLASRVRSVREAAERMAFNMPVQGTAADLMKIAMVKLFPRLKPLGAHLLLQVHDELVLEVPEDRAEEAKALVKEVMENAYPLDVPLEVEVGVGRDWLEAKQD

SEQ ID NO: 91 - DNA, 2532 bp, synthetic construct
  misc_feature 1..2532: note = DNA Polymerase Variant
  source 1..2532: mol_type = other DNA
atgcaccatcatcatcatcatggcggtagcggcatgttaccgctgtttgatttggaagaaccaccaaaacgcgtgctgcttgttgacggccatcatctggcgtatcgtaccttctacgcactgagccttacgacctcacgtggtgagcctgtccagatggtgtatgggtttgctcgctccctgctgaaagccctgaaggaagatggtcaagccgtagtagtggttttcgatgcgaaagcaccgtcgtttcgtcacgaagcgtacgaggcctataaagctggccgcgcaccgaccccggaagactttccgcgtcagttagcgctcgtcaaacgcctcgtggatttgctgggattagttcgcttggaagctcctggctacgaggcggacgacgtgctcggtacactggccaagaaagcagaacgtgaaggcatggaggtctgcattcttaccggtgatcgcgatttcttccagctgctgtctgagaaagtgagcgttttgctgcccgatggcacgttagtaaccccgaaagatgtccaagagaaatatggagttccgccagaacgttgggtggactttcgcgcactgactggtgatcgttcagacaacatcccgggcgttgccgggattggtgaaaagacggcgctgcgcctgctggcagaatggggctcggtggaaaatctgctcaagaaccttgatcgtgtgaaacctgatagcttacgccgcaagatcgaagcccacctggaagacttgcgtctgagtctggatcttgcgcgtattcgcaccgatctgccgttggaagtagactttaaagctctgcgtcgtcgcacacccgatttagaggggttacgcgcgttcctcgaagaactggagtttggctccctgctgcatgaattcggtttgttgggcggagagaaaccgcgtgaagaagcaccatggccgccgcccgaaggtgcctttgtcggctttcttctgtcacgcaaagagccaatgtgggcggaactgttagctcttgcagccgccgcggaagggcgtgttcaccgcgcgacctctcctgtcgaggccctcgctgacctcaaagaagcacgtggtttcttggcgaaagatttagccgtgcttgcattacgcgaaggcgttgcgctcgatccgacggacgacccgcttttggtggcttatttgctcgatcctgcgaataccaatccggaaggtgtagcccgtcgttacggcggcgagtttactgaagatgcggcagaacgcgcgttgcttagcgaacgcctcttccagacgttatttccacgtctttcggagaaattactctggctctatcaggaagtcgaacgtccattgagtcgcgtgcttgcccatatggaggctcgcggtgtgcgcttagatgttccgttgttagaagcactcagcttcgagttggagaaagaactggaacgtcttgaaggcgaagtctttcgtttagcggggcatcccttcaatctcaactctcgcgaccaattggagaaagtgctctttgatgaattaggtttaacccctgtcggaaaaacagagaagaccggcaaacgttccactgctcagggagcattggaagcacttcgtggtgctcacccgatcgtcgaattgattttgcagtaccgcgagctcagcaaactcaaatcaacctatcttgatccgttacctcgtcttgttcatccacgtacgggtcgtttacacacccgcttcaatcaaacggcgacagccaccgggcgcttgtcgtcgagtgacccgaacctccagaatattccagtgcgcacgccgttaggccaacgcattcgtaaagcgtttgttgcggaagaaggttggttattacttgcggccgattactcccagatcgaacttcgtgtattggcgcatctctctggcgacgagaatcttaaacgcgtgtttcgcgaaggcaaggatattcacactgaaaccgcagcctggatgttcgggcttgacccagccttagtggaccccaagatgcgtcgtgccgccaagaccgtcaactttggcgtactctatggtatgtcagcacatcgtcttagtcaggaattgggcattgactacaaagaagctgaagcgtttatcgagcgctatttccaatcctttccgaaagttcgcgcgtggattgaacgtaccctcgaagaaggtcgcactcgcggctatgtggaaacgttattcgggcgtcgtcgctacgttccagatcttgcatctcgtgtccgctcagtgcgcgaagctgctgagcgtatggccttcaatatgcctgttcagggaacagcggcggacctcatgaagatcgccatggtgaaattgtttccgcgcttgaaacccttaggagcccaccttcttttacaggtgcatgatgaattggtcttggaagtacccgaggatcgcgcagaagaagccaaagcactcgtgaaagaggttatggaaaacgcgtatccgttagatgttccgttggaggtcgaagtgggtgtaggccgtgattggcttgaagcgaaacaagac

SEQ ID NO: 92 - protein, 844 aa, synthetic construct
  REGION 1..844: note = DNA Polymerase Variant
MHHHHHHGGSGMLPLFDLEEPPKRVLLVDGHHLAYRTFYALSLTTSRGEPVQMVYGFARSLLKALKEDGQAVVVVFDAKAPSFRHEAYEAYKAGRAPTPEDFPRQLALVKRLVDLLGLVRLEAPGYEADDVLGTLAKKAEREGMEVCILTGDRDFFQLLSEKVSVLLPDGTLVTPKDVQEKYGVPPERWVDFRALTGDRSDNIPGVAGIGEKTALRLLAEWGSVENLLKNLDRVKPDSLRRKIEAHLEDLRLSLDLARIRTDLPLEVDFKALRRRTPDLEGLRAFLEELEFGSLLHEFGLLGGEKPREEAPWPPPEGAFVGFLLSRKEPMWAELLALAAAAEGRVHRATSPVEALADLKEARGFLAKDLAVLALREGVALDPTDDPLLVAYLLDPANTNPEGVARRYGGEFTEDAAERALLSERLFQTLFPRLSEKLLWLYQEVERPLSRVLAHMEARGVRLDVPLLEALSFELEKELERLEGEVFRLAGHPFNLNSRDQLEKVLFDELGLTPVGKTEKTGKRSTAQGALEALRGAHPIVELILQYRELSKLKSTYLDPLPRLVHPRTGRLHTRFNQTATATGRLSSSDPNLQNIPVRTPLGQRIRKAFVAEEGWLLLAADYSQIELRVLAHLSGDENLKRVFREGKDIHTETAAWMFGLDPALVDPKMRRAAKTVNFGVLYGMSAHRLSQELGIDYKEAEAFIERYFQSFPKVRAWIERTLEEGRTRGYVETLFGRRRYVPDLASRVRSVREAAERMAFNMPVQGTAADLMKIAMVKLFPRLKPLGAHLLLQVHDELVLEVPEDRAEEAKALVKEVMENAYPLDVPLEVEVGVGRDWLEAKQD

SEQ ID NO: 93 - DNA, 2532 bp, synthetic construct
  misc_feature 1..2532: note = DNA Polymerase Variant
  source 1..2532: mol_type = other DNA
atgcaccatcatcatcatcatggcggtagcggcatgttaccgctgtttgatttggaagaaccaccaaaacgcgtgctgcttgttgacggccatcatctggcgtatcgtaccttctacgcactgagccttacgacctcacgtggtgagcctgtccagatggtgtatgggtttgctcgctccctgctgaaagccctgaaggaagatggtcaagccgtagtagtggttttcgatgcgaaagcaccgtcgtttcgtcacgaagcgtacgaggcctataaagctggccgcgcaccgaccccggaagactttccgcgtcagttagcgctcgtcaaacgcctcgtggatttgctgggattagttcgcttggaagctcctggctacgaggcggacgacgtgctcggtacactggccaagaaagcagaacgtgaaggcatggaggtctgcattcttaccggtgatcgcgatttcttccagctgctgtctgagaaagtgagcgttttgctgcccgatggcacgttagtaaccccgaaagatgtccaagagaaatatggagttccgccagaacgttgggtggactttcgcgcactgactggtgatcgttcagacaacatcccgggcgttgccgggattggtgaaaagacggcgctgcgcctgctggcagaatggggctcggtggaaaatctgctcaagaaccttgatcgtgtgaaacctgatagcttacgccgcaagatcgaagcccacctggaagacttgcgtctgagtctggatcttgcgcgtattcgcaccgatctgccgttggaagtagactttaaagctctgcgtcgtcgcacacccgatttagaggggttacgcgcgttcctcgaagaactggagtttggctccctgctgcatgaattcggtttgttgggcggagagaaaccgcgtgaagaagcaccatggccgccgcccgaaggtgcctttgtcggctttcttctgtcacgcaaagagccaatgtgggcggaactgttagctcttgcagccgccgcggaagggcgtgttcaccgcgcgacctctcctgtcgaggccctcgctgacctcaaagaagcacgtggtttcttggcgaaagatttagccgtgcttgcattacgcgaaggcgttgcgctcgatccgacggacgacccgcttttggtggcttatttgctcgatcctgcgaataccaatccggaaggtgtagcccgtcgttacggcggcgagtttactgaagatgcggcagaacgcgcgttgcttagcgaacgcctcttccagacgttatttccacgtctttcggagaaattactctggctctatcaggaagtcgaacgtccattgagtcgcgtgcttgcccatatggaggctcgcggtgtgcgcttagatgttccgttgttagaagcactcagcttcgagttggagaaagaactggaacgtcttgaaggcgaagtctttcgtttagcggggcatcccttcaatctcaactctcgcgaccaattggagaaagtgctctttgatgaattaggtttaacccctatcggaaaaacagagaagaccggcaaacgttccactgctcagggagcattggaagcacttcgtggtgctcacccgatcgtcgacttgattttgcagtaccgcgagctcagtaaactcaaaaacacctatattgatccgttacctcgtcttgttcatccacgtacgggtcgtttacacacccgcttcaatcaaacggcgacagccaccgggcgcttgtcgtcgagtgacccgaacctccagaatattccagtgcgcacgccgttaggccaacgcattcgtaaagcgtttgttgcggaagaaggttggttattacttgcggccgattactcccagatcgaacttcgtgtattggcgcatctctctggcgacgagaatcttaaacgcgtgtttcgcgaaggcaaggatattcacactgaaaccgcagcctggatgttcgggcttgacccagccttagtggaccccaagatgcgtcgtgccgccaagaccgtcaactttggcgtactctatggtatgtcagcacatcgtcttagtcaggaattgggcattgactacaaagaagctgaagcgtttatcgagcgctatttccaatcctttccgaaagttcgcgcgtggattgaacgtaccctcgaagaaggtcgcactcgcggctatgtggaaacgttattcgggcgtcgtcgctacgttccagatcttgcatctcgtgtccgctcagtgcgcgaagctgctgagcgtatggccttcaatatgcctgttcagggaacagcggcggacctcatgaagatcgccatggtgaaattgtttccgcgcttgaaacccttaggagcccaccttcttttacaggtgcatgatgaattggtcttggaagtacccgaggatcgcgcagaagaagccaaagcactcgtgaaagaggttatggaaaacgcgtatccgttagatgttccgttggaggtcgaagtgggtgtaggccgtgattggcttgaagcgaaacaagac

SEQ ID NO: 94 - protein, 844 aa, synthetic construct
  REGION 1..844: note = DNA Polymerase Variant
MHHHHHHGGSGMLPLFDLEEPPKRVLLVDGHHLAYRTFYALSLTTSRGEPVQMVYGFARSLLKALKEDGQAVVVVFDAKAPSFRHEAYEAYKAGRAPTPEDFPRQLALVKRLVDLLGLVRLEAPGYEADDVLGTLAKKAEREGMEVCILTGDRDFFQLLSEKVSVLLPDGTLVTPKDVQEKYGVPPERWVDFRALTGDRSDNIPGVAGIGEKTALRLLAEWGSVENLLKNLDRVKPDSLRRKIEAHLEDLRLSLDLARIRTDLPLEVDFKALRRRTPDLEGLRAFLEELEFGSLLHEFGLLGGEKPREEAPWPPPEGAFVGFLLSRKEPMWAELLALAAAAEGRVHRATSPVEALADLKEARGFLAKDLAVLALREGVALDPTDDPLLVAYLLDPANTNPEGVARRYGGEFTEDAAERALLSERLFQTLFPRLSEKLLWLYQEVERPLSRVLAHMEARGVRLDVPLLEALSFELEKELERLEGEVFRLAGHPFNLNSRDQLEKVLFDELGLTPIGKTEKTGKRSTAQGALEALRGAHPIVDLILQYRELSKLKNTYIDPLPRLVHPRTGRLHTRFNQTATATGRLSSSDPNLQNIPVRTPLGQRIRKAFVAEEGWLLLAADYSQIELRVLAHLSGDENLKRVFREGKDIHTETAAWMFGLDPALVDPKMRRAAKTVNFGVLYGMSAHRLSQELGIDYKEAEAFIERYFQSFPKVRAWIERTLEEGRTRGYVETLFGRRRYVPDLASRVRSVREAAERMAFNMPVQGTAADLMKIAMVKLFPRLKPLGAHLLLQVHDELVLEVPEDRAEEAKALVKEVMENAYPLDVPLEVEVGVGRDWLEAKQD

SEQ ID NO: 95 - DNA, 2532 bp, synthetic construct
  misc_feature 1..2532: note = DNA Polymerase Variant
  source 1..2532: mol_type = other DNA
atgcaccatcatcatcatcatggcggtagcggcatgttaccgctgtttgatttggaagaaccaccaaaacgcgtgctgcttgttgacggccatcatctggcgtatcgtaccttctacgcactgagccttacgacctcacgtggtgagcctgtccagatggtgtatgggtttgctcgctccctgctgaaagccctgaaggaagatggtcaagccgtagtagtggttttcgatgcgaaagcaccgtcgtttcgtcacgaagcgtacgaggcctataaagctggccgcgcaccgaccccggaagactttccgcgtcagttagcgctcgtcaaacgcctcgtggatttgctgggattagttcgcttggaagctcctggctacgaggcggacgacgtgctcggtacactggccaagaaagcagaacgtgaaggcatggaggtctgcattcttaccggtgatcgcgatttcttccagctgctgtctgagaaagtgagcgttttgctgcccgatggcacgttagtaaccccgaaagatgtccaagagaaatatggagttccgccagaacgttgggtggactttcgcgcactgactggtgatcgttcagacaacatcccgggcgttgccgggattggtgaaaagacggcgctgcgcctgctggcagaatggggctcggtggaaaatctgctcaagaaccttgatcgtgtgaaacctgatagcttacgccgcaagatcgaagcccacctggaagacttgcgtctgagtctggatcttgcgcgtattcgcaccgatctgccgttggaagtagactttaaagctctgcgtcgtcgcacacccgatttagaggggttacgcgcgttcctcgaacgtctggagtttggctccctgctgcatgaattcggtttgttgggcggagagaaaccgcgtgaagaagcaccatggccgccgcccgaaggtgcctttgtcggctttcttctgtcacgcaaagagccaatgtgggcggaactgttagctcttgcagccgccgcggaagggcgtgttcaccgcgcgacctctcctgtcgaggccctcgctgacctcaaagaagcacgtggtttcttggcgaaagatttagccgtgcttgcattacgcgaaggcgttgcgctcgatccgacggacgacccgcttttggtggcttatttgctcgatcctgcgaataccactccggaaggtgtagcccgtcgttacggcggcgagtttactgaagatgcggcagaacgcgcgttgcttagcgaacgcctcttccagacgttatttccacgtctttcggagaaattactctggctctatcaggaagtcgaacgtccattgagtcgcgtgcttgcccatatggaggctcgcggtgtgcgcttagatgttccgttgttagaagcactcagcttcgagttggagaaagaactggaacgtcttgaaggcgaagtctttcgtttagcggggcatcccttcaatctcaactctcgcgaccaattggagaaagtgctctttgatgaattaggtttaacccctgtcggaaaaacagagaagaccggcaaacgttccactgctcagggagcattggaagcacttcgtggtgctcacccgatcgtcgacttgattttgcagtaccgcgagctcagcaaactcaaatcaacctatcttgatccgttacctcgtcttgttcatccacgtacgggtcgtttacacacccgcttcaatcaaacggcgacagccaccgggcgcttgtcgtcgagtgacccgaacctccagaatattccagtgcgcacgccgttaggccaacgcattcgtaaagcgtttgttgcggaagaaggttggttattacttgcggccgattactcccagatcgaacttcgtgtattggcgcatctctctggcgacgagaatcttaaacgcgtgtttcgcgaaggcaaggatattcacactgaaaccgcagcctggatgttcgggcttgacccagccttagtggaccccaagatgcgtcgtgccgccaagaccgtcaactttggcgtactctatggtatgtcagcacatcgtcttagtcaggaattgggcattgactacaaagaagctgaagcgtttatcgagcgctatttccaatcctttccgaaagttcgcgcgtggattgaacgtaccctcgaagaaggtcgcactcgcggctatgtggaaacgttattcgggcgtcgtcgctacgttccagatcttgcatctcgtgtccgctcagtgcgcgaagctgctgagcgtatggccttcaatatgcctgttcagggaacagcggcggacctcatgaagatcgccatggtgaaattgtttccgcgcttgaaacccttaggagcccaccttcttttacaggtgcatgatgaattggtcttggaagtacccgaggatcgcgcagaagaagccaaagcactcgtgaaagaggttatggaaaacgcgtatccgttagatgttccgttggaggtcgaagtgggtgtaggccgtgattggcttgaagcgaaacaagac

SEQ ID NO: 96 - protein, 844 aa, synthetic construct
  REGION 1..844: note = DNA Polymerase Variant
MHHHHHHGGSGMLPLFDLEEPPKRVLLVDGHHLAYRTFYALSLTTSRGEPVQMVYGFARSLLKALKEDGQAVVVVFDAKAPSFRHEAYEAYKAGRAPTPEDFPRQLALVKRLVDLLGLVRLEAPGYEADDVLGTLAKKAEREGMEVCILTGDRDFFQLLSEKVSVLLPDGTLVTPKDVQEKYGVPPERWVDFRALTGDRSDNIPGVAGIGEKTALRLLAEWGSVENLLKNLDRVKPDSLRRKIEAHLEDLRLSLDLARIRTDLPLEVDFKALRRRTPDLEGLRAFLERLEFGSLLHEFGLLGGEKPREEAPWPPPEGAFVGFLLSRKEPMWAELLALAAAAEGRVHRATSPVEALADLKEARGFLAKDLAVLALREGVALDPTDDPLLVAYLLDPANTTPEGVARRYGGEFTEDAAERALLSERLFQTLFPRLSEKLLWLYQEVERPLSRVLAHMEARGVRLDVPLLEALSFELEKELERLEGEVFRLAGHPFNLNSRDQLEKVLFDELGLTPVGKTEKTGKRSTAQGALEALRGAHPIVDLILQYRELSKLKSTYLDPLPRLVHPRTGRLHTRFNQTATATGRLSSSDPNLQNIPVRTPLGQRIRKAFVAEEGWLLLAADYSQIELRVLAHLSGDENLKRVFREGKDIHTETAAWMFGLDPALVDPKMRRAAKTVNFGVLYGMSAHRLSQELGIDYKEAEAFIERYFQSFPKVRAWIERTLEEGRTRGYVETLFGRRRYVPDLASRVRSVREAAERMAFNMPVQGTAADLMKIAMVKLFPRLKPLGAHLLLQVHDELVLEVPEDRAEEAKALVKEVMENAYPLDVPLEVEVGVGRDWLEAKQD

SEQ ID NO: 97 - DNA, 2532 bp, synthetic construct
  misc_feature 1..2532: note = DNA Polymerase Variant
  source 1..2532: mol_type = other DNA
atgcaccatcatcatcatcatggcggtagcggcatgttaccgctgtttgatttggaagaaccaccaaaacgcgtgctgcttgttgacggccatcatctggcgtatcgtaccttctacgcactgagccttacgacctcacgtggtgagcctgtccagatggtgtatgggtttgctcgctccctgctgaaagccctgaaggaagatggtcaagccgtagtagtggttttcgatgcgaaagcaccgtcgtttcgtcacgaagcgtacgaggcctataaagctggccgcgcaccgaccccggaagactttccgcgtcagttagcgctcgtcaaacgcctcgtggatttgctgggattagttcgcttggaagctcctggctacgaggcggacgacgtgctcggtacactggccaagaaagcagaacgtgaaggcatggaggtctgcattcttaccggtgatcgcgatttcttccagctgctgtctgagaaagtgagcgttttgctgcccgatggcacgttagtaaccccgaaagatgtccaagagaaatatggagttccgccagaacgttgggtggactttcgcgcactgactggtgatcgttcagacaacatcccgggcgttgccgggattggtgaaaagacggcgctgcgcctgctggcagaatggggctcggtggaaaatctgctcaagaaccttgatcgtgtgaaacctgatagcttacgccgcaagatcgaagcccacctggaagacttgcgtctgagtctggatcttgcgcgtattcgcaccgatctgccgttggaagtagactttaaagctctgcgtcgtcgcacacccgatttagaggggttacgcgcgttcctcgaacgtctggagtttggctccctgctgcatgaattcggtttgttgggcggagagaaaccgcgtgaagaagcaccatggccgccgcccgaaggtgcctttgtcggctttcttctgtcacgcaaagagccaatgtgggcggaactgttagctcttgcagccgccgcggaagggcgtgttcaccgcgcgacctctcctgtcgaggccctcgctgacctcaaagaagcacgtggtttcttggcgaaagatttagccgtgcttgcattacgcgaaggcgttgcgctcgatccgacggacgacccgcttttggtggcttatttgctcgatcctgcgaataccaacccggaaggtgtagcccgtcgttacggcggcgagtttactgaagatgcggcagaacgcgcgttgcttagcgaacgcctcttccagacgttatttccacgtctttcggagaaattactctggctctatcaggaagtcgaacgtccattgagtcgcgtgcttgcccatatggaggctcgcggtgtgcgcttagatgttccgttgttagaagcactcagcttcgagttggagaaagaactggaacgtcttgaaggcgaagtctttcgtttagcggggcatcccttcaatctcaactctcgcgaccaattggagaaagtgctctttgatgaattaggtttaacccctatcggacgtacagagaagaccggcaaacgttccactgctcagggagcattggaagcacttcgtggtgctcacccgatcgtcgagttgattttgcagtaccgcgagctcagtaaactcaaaaacacctatattgatccgttacctcgtcttgttcatccacgtacgggtcgtttacacacccgcttcaatcaaacggcgacagccaccgggcgcttgtcgtcgagtgacccgaacctccagaatattccagtgcgcacgccgttaggccaacgcattcgtaaagcgtttgttgcggaagaaggttggttattacttgcggccgattactcccagatcgaacttcgtgtattggcgcatctctctggcgacgagaatcttaaacgcgtgtttcgcgaaggcaaggatattcacactgaaaccgcagcctggatgttcgggcttgacccagccttagtggaccccaagatgcgtcgtgccgccaagaccgtcaactttggcgtactctatggtatgtcagcacatcgtcttagtcaggaattgggcattgactacaaagaagctgaagcgtttatcgagcgctatttccaatcctttccgaaagttcgcgcgtggattgaacgtaccctcgaagaaggtcgcactcgcggctatgtggaaacgttattcgggcgtcgtcgctacgttccagatcttgcatctcgtgtccgctcagtgcgcgaagctgctgagcgtatggccttcaatatgcctgttcagggaacagcggcggacctcatgaagatcgccatggtgaaattgtttccgcgcttgaaacccttaggagcccaccttcttttacaggtgcatgatgaattggtcttggaagtacccgaggatcgcgcagaagaagccaaagcactcgtgaaagaggttatggaaaacgcgtatccgttagatgttccgttggaggtcgaagtgggtgtaggccgtgattggcttgaagcgaaacaagac

SEQ ID NO: 98 - protein, 844 aa, synthetic construct
  REGION 1..844: note = DNA Polymerase Variant
MHHHHHHGGSGMLPLFDLEEPPKRVLLVDGHHLAYRTFYALSLTTSRGEPVQMVYGFARSLLKALKEDGQAVVVVFDAKAPSFRHEAYEAYKAGRAPTPEDFPRQLALVKRLVDLLGLVRLEAPGYEADDVLGTLAKKAEREGMEVCILTGDRDFFQLLSEKVSVLLPDGTLVTPKDVQEKYGVPPERWVDFRALTGDRSDNIPGVAGIGEKTALRLLAEWGSVENLLKNLDRVKPDSLRRKIEAHLEDLRLSLDLARIRTDLPLEVDFKALRRRTPDLEGLRAFLERLEFGSLLHEFGLLGGEKPREEAPWPPPEGAFVGFLLSRKEPMWAELLALAAAAEGRVHRATSPVEALADLKEARGFLAKDLAVLALREGVALDPTDDPLLVAYLLDPANTNPEGVARRYGGEFTEDAAERALLSERLFQTLFPRLSEKLLWLYQEVERPLSRVLAHMEARGVRLDVPLLEALSFELEKELERLEGEVFRLAGHPFNLNSRDQLEKVLFDELGLTPIGRTEKTGKRSTAQGALEALRGAHPIVELILQYRELSKLKNTYIDPLPRLVHPRTGRLHTRFNQTATATGRLSSSDPNLQNIPVRTPLGQRIRKAFVAEEGWLLLAADYSQIELRVLAHLSGDENLKRVFREGKDIHTETAAWMFGLDPALVDPKMRRAAKTVNFGVLYGMSAHRLSQELGIDYKEAEAFIERYFQSFPKVRAWIERTLEEGRTRGYVETLFGRRRYVPDLASRVRSVREAAERMAFNMPVQGTAADLMKIAMVKLFPRLKPLGAHLLLQVHDELVLEVPEDRAEEAKALVKEVMENAYPLDVPLEVEVGVGRDWLEAKQD

SEQ ID NO: 99 - DNA, 2532 bp, synthetic construct
  misc_feature 1..2532: note = DNA Polymerase Variant
  source 1..2532: mol_type = other DNA
atgcaccatcatcatcatcatggcggtagcggcatgttaccgctgtttgatttggaagaaccaccaaaacgcgtgctgcttgttgacggccatcatctggcgtatcgtaccttctacgcactgagccttacgacctcacgtggtgagcctgtccagatggtgtatgggtttgctcgctccctgctgaaagccctgaaggaagatggtcaagccgtagtagtggttttcgatgcgaaagcaccgtcgtttcgtcacgaagcgtacgaggcctataaagctggccgcgcaccgaccccggaagactttccgcgtcagttagcgctcgtcaaacgcctcgtggatttgctgggattagttcgcttggaagctcctggctacgaggcggacgacgtgctcggtacactggccaagaaagcagaacgtgaaggcatggaggtctgcattcttaccggtgatcgcgatttcttccagctgctgtctgagaaagtgagcgttttgctgcccgatggcacgttagtaaccccgaaagatgtccaagagaaatatggagttccgccagaacgttgggtggactttcgcgcactgactggtgatcgttcagacaacatcccgggcgttgccgggattggtgaaaagacggcgctgcgcctgctggcagaatggggctcggtggaaaatctgctcaagaaccttgatcgtgtgaaacctgatagcttacgccgcaagatcgaagcccacctggaagacttgcgtctgagtctggatcttgcgcgtattcgcaccgatctgccgttggaagtagactttaaagctctgcgtcgtcgcacacccgatttagaggggttacgcgcgttcctcgaacgtctggagtttggctccctgctgcatgaattcggtttgttgggcggagagaaaccgcgtgaagaagcaccatggccgccgcccgaaggtgcctttgtcggctttcttctgtcacgcaaagagccaatgtgggcggaactgttagctcttgcagccgccgcggaagggcgtgttcaccgcgcgacctctcctgtcgaggccctcgctgacctcaaagaagcacgtggtttcttggcgaaagatttagccgtgcttgcattacgcgaaggcgttgcgctcgatccgacggacgacccgcttttggtggcttatttgctcgatcctgcgaataccaatccggaaggtgtagcccgtcgttacggcggcgagtttactgaagatgcggcagaacgcgcgttgcttagcgaacgcctcttccagacgttatttccacgtctttcggagaaattactctggctctatcaggaagtcgaacgtccattgagtcgcgtgcttgcccatatggaggctcgcggtgtgcgcttagatgttccgttgttagaagcactcagcttcgagttggagaaagaaatcgaacgtcttgaaggcgaagtctttcgtttagcggggcatcccttcaatctcaactctcgcgaccaattggagaaagtgctctttgatgaattaggtttaacccctgtcggaaaaacagagaagaccggcaaacgttccactgctcagggagcattggaagcacttcgtggtgctcacccgatcgtcgaattgattttgcagtaccgcgagctcagcaaactcaaatcaacctatcttgatccgttacctcgtcttgttcatccacgtacgggtcgtttacacacccgcttcaatcaaacggcgacagccaccgggcgcttgtcgtcgagtgacccgaacctccagaatattccagtgcgcacgccgttaggccaacgcattcgtaaagcgtttgttgcggaagaaggttggttattacttgcggccgattactcccagatcgaacttcgtgtattggcgcatctctctggcgacgagaatcttaaacgcgtgtttcgcgaaggcaaggatattcacactgaaaccgcagcctggatgttcgggcttgacccagccttagtggaccccaagatgcgtcgtgccgccaagaccgtcaactttggcgtactctatggtatgtcagcacatcgtcttagtcaggaattgggcattgactacaaagaagctgaagcgtttatcgagcgctatttccaatcctttccgaaagttcgcgcgtggattgaacgtaccctcgaagaaggtcgcactcgcggctatgtggaaacgttattcgggcgtcgtcgctacgttccagatcttgcatctcgtgtccgctcagtgcgcgaagctgctgagcgtatggccttcaatatgcctgttcagggaacagcggcggacctcatgaagatcgccatggtgaaattgtttccgcgcttgaaacccttaggagcccaccttcttttacaggtgcatgatgaattggtcttggaagtacccgaggatcgcgcagaagaagccaaagcactcgtgaaagaggttatggaaaacgcgtatccgttagatgttccgttggaggtcgaagtgggtgtaggccgtgattggcttgaagcgaaacaagac

SEQ ID NO: 100 - protein, 844 aa, synthetic construct
  REGION 1..844: note = DNA Polymerase Variant
MHHHHHHGGSGMLPLFDLEEPPKRVLLVDGHHLAYRTFYALSLTTSRGEPVQMVYGFARSLLKALKEDGQAVVVVFDAKAPSFRHEAYEAYKAGRAPTPEDFPRQLALVKRLVDLLGLVRLEAPGYEADDVLGTLAKKAEREGMEVCILTGDRDFFQLLSEKVSVLLPDGTLVTPKDVQEKYGVPPERWVDFRALTGDRSDNIPGVAGIGEKTALRLLAEWGSVENLLKNLDRVKPDSLRRKIEAHLEDLRLSLDLARIRTDLPLEVDFKALRRRTPDLEGLRAFLERLEFGSLLHEFGLLGGEKPREEAPWPPPEGAFVGFLLSRKEPMWAELLALAAAAEGRVHRATSPVEALADLKEARGFLAKDLAVLALREGVALDPTDDPLLVAYLLDPANTNPEGVARRYGGEFTEDAAERALLSERLFQTLFPRLSEKLLWLYQEVERPLSRVLAHMEARGVRLDVPLLEALSFELEKEIERLEGEVFRLAGHPFNLNSRDQLEKVLFDELGLTPVGKTEKTGKRSTAQGALEALRGAHPIVELILQYRELSKLKSTYLDPLPRLVHPRTGRLHTRFNQTATATGRLSSSDPNLQNIPVRTPLGQRIRKAFVAEEGWLLLAADYSQIELRVLAHLSGDENLKRVFREGKDIHTETAAWMFGLDPALVDPKMRRAAKTVNFGVLYGMSAHRLSQELGIDYKEAEAFIERYFQSFPKVRAWIERTLEEGRTRGYVETLFGRRRYVPDLASRVRSVREAAERMAFNMPVQGTAADLMKIAMVKLFPRLKPLGAHLLLQVHDELVLEVPEDRAEEAKALVKEVMENAYPLDVPLEVEVGVGRDWLEAKQD

SEQ ID NO: 101 - DNA, 2532 bp, synthetic construct
  misc_feature 1..2532: note = DNA Polymerase Variant
  source 1..2532: mol_type = other DNA
atgcaccatcatcatcatcatggcggtagcggcatgttaccgctgtttgatttggaagaaccaccaaaacgcgtgctgcttgttgacggccatcatctggcgtatcgtaccttctacgcactgagccttacgacctcacgtggtgagcctgtccagatggtgtatgggtttgctcgctccctgctgaaagccctgaaggaagatggtcaagccgtagtagtggttttcgatgcgaaagcaccgtcgtttcgtcacgaagcgtacgaggcctataaagctggccgcgcaccgaccccggaagactttccgcgtcagttagcgctcgtcaaacgcctcgtggatttgctgggattagttcgcttggaagctcctggctacgaggcggacgacgtgctcggtacactggccaagaaagcagaacgtgaaggcatggaggtctgcattcttaccggtgatcgcgatttcttccagctgctgtctgagaaagtgagcgttttgctgcccgatggcacgttagtaaccccgaaagatgtccaagagaaatatggagttccgccagaacgttgggtggactttcgcgcactgactggtgatcgttcagacaacatcccgggcgttgccgggattggtgaaaagacggcgctgcgcctgctggcagaatggggctcggtggaaaatctgctcaagaaccttgatcgtgtgaaacctgatagcttacgccgcaagatcgaagcccacctggaagacttgcgtctgagtctggatcttgcgcgtattcgcaccgatctgccgttggaagtagactttaaagctctgcgtcgtcgcacacccgatttagaggggttacgcgcgttcctcgaacgtctggagtttggctccctgctgcatgaattcggtttgttgggcggagagaaaccgcgtgaagaagcaccatggccgccgcccgaaggtgcctttgtcggctttcttctgtcacgcaaagagccaatgtgggcggaactgttagctcttgcagccgccgcggaagggcgtgttcaccgcgcgacctctcctgtcgaggccctcgctgacctcaaagaagcacgtggtttcttggcgaaagatttagccgtgcttgcattacgcgaaggcgttgcgctcgatccgacggacgacccgcttttggtggcttatttgctcgatcctgcgaataccactccggaaggtgtagcccgtcgttacggcggcgagtttactgaagatgcggcagaacgcgcgttgcttagcgaacgcctcttccagacgttatttccacgtctttcggagaaattactctggctctatcaggaagtcgaacgtccattgagtcgcgtgcttgcccatatggaggctcgcggtgtgcgcttagatgttccgttgttagaagcactcagcttcgagttggagaaagaaatggaacgtcttgaaggcgaagtctttcgtttagcggggcatcccttcaatctcaactctcgcgaccaattggagaaagtgctctttgatgaattaggtttaacccctgtcggaaaaacagagaagaccggcaaacgttccactgctcagggagcattggaagcacttcgtggtgctcacccgatcgtcgaattgattttgcagtaccgcgagctcagtaaactcaaaggcacctatattgatccgttacctcgtcttgttcatccacgtacgggtcgtttacacacccgcttcaatcaaacggcgacagccaccgggcgcttgtcgtcgagtgacccgaacctccagaatattccagtgcgcacgccgttaggccaacgcattcgtaaagcgtttgttgcggaagaaggttggttattacttgcggccgattactcccagatcgaacttcgtgtattggcgcatctctctggcgacgagaatcttaaacgcgtgtttcgcgaaggcaaggatattcacactgaaaccgcagcctggatgttcgggcttgacccagccttagtggaccccaagatgcgtcgtgccgccaagaccgtcaactttggcgtactctatggtatgtcagcacatcgtcttagtcaggaattgggcattgactacaaagaagctgaagcgtttatcgagcgctatttccaatcctttccgaaagttcgcgcgtggattgaacgtaccctcgaagaaggtcgcactcgcggctatgtggaaacgttattcgggcgtcgtcgctacgttccagatcttgcatctcgtgtccgctcagtgcgcgaagctgctgagcgtatggccttcaatatgcctgttcagggaacagcggcggacctcatgaagatcgccatggtgaaattgtttccgcgcttgaaacccttaggagcccaccttcttttacaggtgcatgatgaattggtcttggaagtacccgaggatcgcgcagaagaagccaaagcactcgtgaaagaggttatggaaaacgcgtatccgttagatgttccgttggaggtcgaagtgggtgtaggccgtgattggcttgaagcgaaacaagac

SEQ ID NO: 102 - protein, 844 aa, synthetic construct
  REGION 1..844: note = DNA Polymerase Variant
MHHHHHHGGSGMLPLFDLEEPPKRVLLVDGHHLAYRTFYALSLTTSRGEPVQMVYGFARSLLKALKEDGQAVVVVFDAKAPSFRHEAYEAYKAGRAPTPEDFPRQLALVKRLVDLLGLVRLEAPGYEADDVLGTLAKKAEREGMEVCILTGDRDFFQLLSEKVSVLLPDGTLVTPKDVQEKYGVPPERWVDFRALTGDRSDNIPGVAGIGEKTALRLLAEWGSVENLLKNLDRVKPDSLRRKIEAHLEDLRLSLDLARIRTDLPLEVDFKALRRRTPDLEGLRAFLERLEFGSLLHEFGLLGGEKPREEAPWPPPEGAFVGFLLSRKEPMWAELLALAAAAEGRVHRATSPVEALADLKEARGFLAKDLAVLALREGVALDPTDDPLLVAYLLDPANTTPEGVARRYGGEFTEDAAERALLSERLFQTLFPRLSEKLLWLYQEVERPLSRVLAHMEARGVRLDVPLLEALSFELEKEMERLEGEVFRLAGHPFNLNSRDQLEKVLFDELGLTPVGKTEKTGKRSTAQGALEALRGAHPIVELILQYRELSKLKGTYIDPLPRLVHPRTGRLHTRFNQTATATGRLSSSDPNLQNIPVRTPLGQRIRKAFVAEEGWLLLAADYSQIELRVLAHLSGDENLKRVFREGKDIHTETAAWMFGLDPALVDPKMRRAAKTVNFGVLYGMSAHRLSQELGIDYKEAEAFIERYFQSFPKVRAWIERTLEEGRTRGYVETLFGRRRYVPDLASRVRSVREAAERMAFNMPVQGTAADLMKIAMVKLFPRLKPLGAHLLLQVHDELVLEVPEDRAEEAKALVKEVMENAYPLDVPLEVEVGVGRDWLEAKQD

SEQ ID NO: 103 - DNA, 2532 bp, synthetic construct
  misc_feature 1..2532: note = DNA Polymerase Variant
  source 1..2532: mol_type = other DNA
atgcaccatcatcatcatcatggcggtagcggcatgttaccgctgtttgatttggaagaaccaccaaaacgcgtgctgcttgttgacggccatcatctggcgtatcgtaccttctacgcactgagccttacgacctcacgtggtgagcctgtccagatggtgtatgggtttgctcgctccctgctgaaagccctgaaggaagatggtcaagccgtagtagtggttttcgatgcgaaagcaccgtcgtttcgtcacgaagcgtacgaggcctataaagctggccgcgcaccgaccccggaagactttccgcgtcagttagcgctcgtcaaacgcctcgtggatttgctgggattagttcgcttggaagctcctggctacgaggcggacgacgtgctcggtacactggccaagaaagcagaacgtgaaggcatggaggtctgcattcttaccggtgatcgcgatttcttccagctgctgtctgagaaagtgagcgttttgctgcccgatggcacgttagtaaccccgaaagatgtccaagagaaatatggagttccgccagaacgttgggtggactttcgcgcactgactggtgatcgttcagacaacatcccgggcgttgccgggattggtgaaaagacggcgctgcgcctgctggcagaatggggctcggtggaaaatctgctcaagaaccttgatcgtgtgaaacctgatagcttacgccgcaagatcgaagcccacctggaagacttgcgtctgagtctggatcttgcgcgtattcgcaccgatctgccgttggaagtagactttaaagctctgcgtcgtcgcacacccgatttagaggggttacgcgcgttcctcgaagaactggagtttggctccctgctgcatgaattcggtttgttgggcggagagaaaccgcgtgaagaagcaccatggccgccgcccgaaggtgcctttgtcggctttcttctgtcacgcaaagagccaatgtgggcggaactgttagctcttgcagccgccgcggaagggcgtgttcaccgcgcgacctctcctgtcgaggccctcgctgacctcaaagaagcacgtggtttcttggcgaaagatttagccgtgcttgcattacgcgaaggcgttgcgctcgatccgacggacgacccgcttttggtggcttatttgctcgatcctgcgaataccaacccggaaggtgtagcccgtcgttacggcggcgagtttactgaagatgcggcagaacgcgcgttgcttagcgaacgcctcttccagacgttatttccacgtctttcggagaaattactctggctctatcaggaagtcgaacgtccattgagtcgcgtgcttgcccatatggaggctcgcggtgtgcgcttagatgttccgttgttagaagcactcagcttcgagttggagaaagaaatggaacgtcttgaaggcgaagtctttcgtttagcggggcatcccttcaatctcaactctcgcgaccaattggagaaagtgctctttgatgaattaggtttaacccctgtaggacgcacagagaagaccggcaaacgttccactgctcagggagcattggaagcacttcgtggtgctcacccgatcgtcgaattgattttgcagtaccgcgagctcactaaactcaaaggcacctatctggatccgttacctcgtcttgttcatccacgtacgggtcgtttacacacccgcttcaatcaaacggcgacagccaccgggcgcttgtcgtcgagtgacccgaacctccagaatattccagtgcgcacgccgttaggccaacgcattcgtaaagcgtttgttgcggaagaaggttggttattacttgcggccgattactcccagatcgaacttcgtgtattggcgcatctctctggcgacgagaatcttaaacgcgtgtttcgcgaaggcaaggatattcacactgaaaccgcagcctggatgttcgggcttgacccagccttagtggaccccaagatgcgtcgtgccgccaagaccgtcaactttggcgtactctatggtatgtcagcacatcgtcttagtcaggaattgggcattgactacaaagaagctgaagcgtttatcgagcgctatttccaatcctttccgaaagttcgcgcgtggattgaacgtaccctcgaagaaggtcgcactcgcggctatgtggaaacgttattcgggcgtcgtcgctacgttccagatcttgcatctcgtgtccgctcagtgcgcgaagctgctgagcgtatggccttcaatatgcctgttcagggaacagcggcggacctcatgaagatcgccatggtgaaattgtttccgcgcttgaaacccttaggagcccaccttcttttacaggtgcatgatgaattggtcttggaagtacccgaggatcgcgcagaagaagccaaagcactcgtgaaagaggttatggaaaacgcgtatccgttagatgttccgttggaggtcgaagtgggtgtaggccgtgattggcttgaagcgaaacaagac

SEQ ID NO: 104 - protein, 844 aa, synthetic construct
  REGION 1..844: note = DNA Polymerase Variant
MHHHHHHGGSGMLPLFDLEEPPKRVLLVDGHHLAYRTFYALSLTTSRGEPVQMVYGFARSLLKALKEDGQAVVVVFDAKAPSFRHEAYEAYKAGRAPTPEDFPRQLALVKRLVDLLGLVRLEAPGYEADDVLGTLAKKAEREGMEVCILTGDRDFFQLLSEKVSVLLPDGTLVTPKDVQEKYGVPPERWVDFRALTGDRSDNIPGVAGIGEKTALRLLAEWGSVENLLKNLDRVKPDSLRRKIEAHLEDLRLSLDLARIRTDLPLEVDFKALRRRTPDLEGLRAFLEELEFGSLLHEFGLLGGEKPREEAPWPPPEGAFVGFLLSRKEPMWAELLALAAAAEGRVHRATSPVEALADLKEARGFLAKDLAVLALREGVALDPTDDPLLVAYLLDPANTNPEGVARRYGGEFTEDAAERALLSERLFQTLFPRLSEKLLWLYQEVERPLSRVLAHMEARGVRLDVPLLEALSFELEKEMERLEGEVFRLAGHPFNLNSRDQLEKVLFDELGLTPVGRTEKTGKRSTAQGALEALRGAHPIVELILQYRELTKLKGTYLDPLPRLVHPRTGRLHTRFNQTATATGRLSSSDPNLQNIPVRTPLGQRIRKAFVAEEGWLLLAADYSQIELRVLAHLSGDENLKRVFREGKDIHTETAAWMFGLDPALVDPKMRRAAKTVNFGVLYGMSAHRLSQELGIDYKEAEAFIERYFQSFPKVRAWIERTLEEGRTRGYVETLFGRRRYVPDLASRVRSVREAAERMAFNMPVQGTAADLMKIAMVKLFPRLKPLGAHLLLQVHDELVLEVPEDRAEEAKALVKEVMENAYPLDVPLEVEVGVGRDWLEAKQD

SEQ ID NO: 105 - DNA, 2532 bp, synthetic construct
  misc_feature 1..2532: note = DNA Polymerase Variant
  source 1..2532: mol_type = other DNA
atgcaccatcatcatcatcatggcggtagcggcatgttaccgctgtttgatttggaagaaccaccaaaacgcgtgctgcttgttgacggccatcatctggcgtatcgtaccttctacgcactgagccttacgacctcacgtggtgagcctgtccagatggtgtatgggtttgctcgctccctgctgaaagccctgaaggaagatggtcaagccgtagtagtggttttcgatgcgaaagcaccgtcgtttcgtcacgaagcgtacgaggcctataaagctggccgcgcaccgaccccggaagactttccgcgtcagttagcgctcgtcaaacgcctcgtggatttgctgggattagttcgcttggaagctcctggctacgaggcggacgacgtgctcggtacactggccaagaaagcagaacgtgaaggcatggaggtctgcattcttaccggtgatcgcgatttcttccagctgctgtctgagaaagtgagcgttttgctgcccgatggcacgttagtaaccccgaaagatgtccaagagaaatatggagttccgccagaacgttgggtggactttcgcgcactgactggtgatcgttcagacaacatcccgggcgttgccgggattggtgaaaagacggcgctgcgcctgctggcagaatggggctcggtggaaaatctgctcaagaaccttgatcgtgtgaaacctgatagcttacgccgcaagatcgaagcccacctggaagacttgcgtctgagtctggatcttgcgcgtattcgcaccgatctgccgttggaagtagactttaaagctctgcgtcgtcgcacacccgatttagaggggttacgcgcgttcctcgaacgtctggagtttggctccctgctgcatgaattcggtttgttgggcggagagaaaccgcgtgaagaagcaccatggccgccgcccgaaggtgcctttgtcggctttcttctgtcacgcaaagagccaatgtgggcggaactgttagctcttgcagccgccgcggaagggcgtgttcaccgcgcgacctctcctgtcgaggccctcgctgacctcaaagaagcacgtggtttcttggcgaaagatttagccgtgcttgcattacgcgaaggcgttgcgctcgatccgacggacgacccgcttttggtggcttatttgctcgatcctgcgaataccaatccggaaggtgtagcccgtcgttacggcggcgagtttactgaagatgcggcagaacgcgcgttgcttagcgaacgcctcttccagacgttatttccacgtctttcggagaaattactctggctctatcaggaagtcgaacgtccattgagtcgcgtgcttgcccatatggaggctcgcggtgtgcgcttagatgttccgttgttagaagcactcagcttcgagttggagaaagaaatggaacgtcttgaaggcgaagtctttcgtttagcggggcatcccttcaatctcaactctcgcgaccaattggagaaagtgctctttgatgaattaggtttaacccctgtaggacgcacagagaagaccggcaaacgttccactgctcagggagcattggaagcacttcgtggtgctcacccgatcgtcgaattgattttgcagtaccgcgagctcactaaactcaaaaacacctatctggatccgttacctcgtcttgttcatccacgtacgggtcgtttacacacccgcttcaatcaaacggcgacagccaccgggcgcttgtcgtcgagtgacccgaacctccagaatattccagtgcgcacgccgttaggccaacgcattcgtaaagcgtttgttgcggaagaaggttggttattacttgcggccgattactcccagatcgaacttcgtgtattggcgcatctctctggcgacgagaatcttaaacgcgtgtttcgcgaaggcaaggatattcacactgaaaccgcagcctggatgttcgggcttgacccagccttagtggaccccaagatgcgtcgtgccgccaagaccgtcaactttggcgtactctatggtatgtcagcacatcgtcttagtcaggaattgggcattgactacaaagaagctgaagcgtttatcgagcgctatttccaatcctttccgaaagttcgcgcgtggattgaacgtaccctcgaagaaggtcgcactcgcggctatgtggaaacgttattcgggcgtcgtcgctacgttccagatcttgcatctcgtgtccgctcagtgcgcgaagctgctgagcgtatggccttcaatatgcctgttcagggaacagcggcggacctcatgaagatcgccatggtgaaattgtttccgcgcttgaaacccttaggagcccaccttcttttacaggtgcatgatgaattggtcttggaagtacccgaggatcgcgcagaagaagccaaagcactcgtgaaagaggttatggaaaacgcgtatccgttagatgttccgttggaggtcgaagtgggtgtaggccgtgattggcttgaagcgaaacaagac

SEQ ID NO: 106 - protein, 844 aa, synthetic construct
  REGION 1..844: note = DNA Polymerase Variant
MHHHHHHGGSGMLPLFDLEEPPKRVLLVDGHHLAYRTFYALSLTTSRGEPVQMVYGFARSLLKALKEDGQAVVVVFDAKAPSFRHEAYEAYKAGRAPTPEDFPRQLALVKRLVDLLGLVRLEAPGYEADDVLGTLAKKAEREGMEVCILTGDRDFFQLLSEKVSVLLPDGTLVTPKDVQEKYGVPPERWVDFRALTGDRSDNIPGVAGIGEKTALRLLAEWGSVENLLKNLDRVKPDSLRRKIEAHLEDLRLSLDLARIRTDLPLEVDFKALRRRTPDLEGLRAFLERLEFGSLLHEFGLLGGEKPREEAPWPPPEGAFVGFLLSRKEPMWAELLALAAAAEGRVHRATSPVEALADLKEARGFLAKDLAVLALREGVALDPTDDPLLVAYLLDPANTNPEGVARRYGGEFTEDAAERALLSERLFQTLFPRLSEKLLWLYQEVERPLSRVLAHMEARGVRLDVPLLEALSFELEKEMERLEGEVFRLAGHPFNLNSRDQLEKVLFDELGLTPVGRTEKTGKRSTAQGALEALRGAHPIVELILQYRELTKLKNTYLDPLPRLVHPRTGRLHTRFNQTATATGRLSSSDPNLQNIPVRTPLGQRIRKAFVAEEGWLLLAADYSQIELRVLAHLSGDENLKRVFREGKDIHTETAAWMFGLDPALVDPKMRRAAKTVNFGVLYGMSAHRLSQELGIDYKEAEAFIERYFQSFPKVRAWIERTLEEGRTRGYVETLFGRRRYVPDLASRVRSVREAAERMAFNMPVQGTAADLMKIAMVKLFPRLKPLGAHLLLQVHDELVLEVPEDRAEEAKALVKEVMENAYPLDVPLEVEVGVGRDWLEAKQD

SEQ ID NO: 107 - DNA, 2532 bp, synthetic construct
  misc_feature 1..2532: note = DNA Polymerase Variant
  source 1..2532: mol_type = other DNA
atgcaccatcatcatcatcatggcggtagcggcatgttaccgctgtttgatttggaagaaccaccaaaacgcgtgctgcttgttgacggccatcatctggcgtatcgtaccttctacgcactgagccttacgacctcacgtggtgagcctgtccagatggtgtatgggtttgctcgctccctgctgaaagccctgaaggaagatggtcaagccgtagtagtggttttcgatgcgaaagcaccgtcgtttcgtcacgaagcgtacgaggcctataaagctggccgcgcaccgaccccggaagactttccgcgtcagttagcgctcgtcaaacgcctcgtggatttgctgggattagttcgcttggaagctcctggctacgaggcggacgacgtgctcggtacactggccaagaaagcagaacgtgaaggcatggaggtctgcattcttaccggtgatcgcgatttcttccagctgctgtctgagaaagtgagcgttttgctgcccgatggcacgttagtaaccccgaaagatgtccaagagaaatatggagttccgccagaacgttgggtggactttcgcgcactgactggtgatcgttcagacaacatcccgggcgttgccgggattggtgaaaagacggcgctgcgcctgctggcagaatggggctcggtggaaaatctgctcaagaaccttgatcgtgtgaaacctgatagcttacgccgcaagatcgaagcccacctggaagacttgcgtctgagtctggatcttgcgcgtattcgcaccgatctgccgttggaagtagactttaaagctctgcgtcgtcgcacacccgatttagaggggttacgcgcgttcctcgaacgtctggagtttggctccctgctgcatgaattcggtttgttgggcggagagaaaccgcgtgaagaagcaccatggccgccgcccgaaggtgcctttgtcggctttcttctgtcacgcaaagagccaatgtgggcggaactgttagctcttgcagccgccgcggaagggcgtgttcaccgcgcgacctctcctgtcgaggccctcgctgacctcaaagaagcacgtggtttcttggcgaaagatttagccgtgcttgcattacgcgaaggcgttgcgctcgatccgacggacgacccgcttttggtggcttatttgctcgatcctgcgaataccactccggaaggtgtagcccgtcgttacggcggcgagtttactgaagatgcggcagaacgcgcgttgcttagcgaacgcctcttccagacgttatttccacgtctttcggagaaattactctggctctatcaggaagtcgaacgtccattgagtcgcgtgcttgcccatatggaggctcgcggtgtgcgcttagatgttccgttgttagaagcactcagcttcgagttggagaaagaactggaacgtcttgaaggcgaagtctttcgtttagcggggcatcccttcaatctcaactctcgcgaccaattggagaaagtgctctttgatgaattaggtttaacccctgtcggaaaaacagagaagaccggcaaacgttccactgctcagggagcattggaagcacttcgtggtgctcacccgatcgtcgaattgattttgcagtaccgcgagctcactaaactcaaaaacacctatctggatccgttacctcgtcttgttcatccacgtacgggtcgtttacacacccgcttcaatcaaacggcgacagccaccgggcgcttgtcgtcgagtgacccgaacctccagaatattccagtgcgcacgccgttaggccaacgcattcgtaaagcgtttgttgcggaagaaggttggttattacttgcggccgattactcccagatcgaacttcgtgtattggcgcatctctctggcgacgagaatcttaaacgcgtgtttcgcgaaggcaaggatattcacactgaaaccgcagcctggatgttcgggcttgacccagccttagtggaccccaagatgcgtcgtgccgccaagaccgtcaactttggcgtactctatggtatgtcagcacatcgtcttagtcaggaattgggcattgactacaaagaagctgaagcgtttatcgagcgctatttccaatcctttccgaaagttcgcgcgtggattgaacgtaccctcgaagaaggtcgcactcgcggctatgtggaaacgttattcgggcgtcgtcgctacgttccagatcttgcatctcgtgtccgctcagtgcgcgaagctgctgagcgtatggccttcaatatgcctgttcagggaacagcggcggacctcatgaagatcgccatggtgaaattgtttccgcgcttgaaacccttaggagcccaccttcttttacaggtgcatgatgaattggtcttggaagtacccgaggatcgcgcagaagaagccaaagcactcgtgaaagaggttatggaaaacgcgtatccgttagatgttccgttggaggtcgaagtgggtgtaggccgtgattggcttgaagcgaaacaagac

SEQ ID NO: 108 - protein, 844 aa, synthetic construct
  REGION 1..844: note = DNA Polymerase Variant
MHHHHHHGGSGMLPLFDLEEPPKRVLLVDGHHLAYRTFYALSLTTSRGEPVQMVYGFARSLLKALKEDGQAVVVVFDAKAPSFRHEAYEAYKAGRAPTPEDFPRQLALVKRLVDLLGLVRLEAPGYEADDVLGTLAKKAEREGMEVCILTGDRDFFQLLSEKVSVLLPDGTLVTPKDVQEKYGVPPERWVDFRALTGDRSDNIPGVAGIGEKTALRLLAEWGSVENLLKNLDRVKPDSLRRKIEAHLEDLRLSLDLARIRTDLPLEVDFKALRRRTPDLEGLRAFLERLEFGSLLHEFGLLGGEKPREEAPWPPPEGAFVGFLLSRKEPMWAELLALAAAAEGRVHRATSPVEALADLKEARGFLAKDLAVLALREGVALDPTDDPLLVAYLLDPANTTPEGVARRYGGEFTEDAAERALLSERLFQTLFPRLSEKLLWLYQEVERPLSRVLAHMEARGVRLDVPLLEALSFELEKELERLEGEVFRLAGHPFNLNSRDQLEKVLFDELGLTPVGKTEKTGKRSTAQGALEALRGAHPIVELILQYRELTKLKNTYLDPLPRLVHPRTGRLHTRFNQTATATGRLSSSDPNLQNIPVRTPLGQRIRKAFVAEEGWLLLAADYSQIELRVLAHLSGDENLKRVFREGKDIHTETAAWMFGLDPALVDPKMRRAAKTVNFGVLYGMSAHRLSQELGIDYKEAEAFIERYFQSFPKVRAWIERTLEEGRTRGYVETLFGRRRYVPDLASRVRSVREAAERMAFNMPVQGTAADLMKIAMVKLFPRLKPLGAHLLLQVHDELVLEVPEDRAEEAKALVKEVMENAYPLDVPLEVEVGVGRDWLEAKQD

SEQ ID NO: 109 - DNA, 2532 bp, synthetic construct
  misc_feature 1..2532: note = DNA Polymerase Variant
  source 1..2532: mol_type = other DNA
atgcaccatcatcatcatcatggcggtagcggcatgttaccgctgtttgatttggaagaaccaccaaaacgcgtgctgcttgttgacggccatcatctggcgtatcgtaccttctacgcactgagccttacgacctcacgtggtgagcctgtccagatggtgtatgggtttgctcgctccctgctgaaagccctgaaggaagatggtcaagccgtagtagtggttttcgatgcgaaagcaccgtcgtttcgtcacgaagcgtacgaggcctataaagctggccgcgcaccgaccccggaagactttccgcgtcagttagcgctcgtcaaacgcctcgtggatttgctgggattagttcgcttggaagctcctggctacgaggcggacgacgtgctcggtacactggccaagaaagcagaacgtgaaggcatggaggtctgcattcttaccggtgatcgcgatttcttccagctgctgtctgagaaagtgagcgttttgctgcccgatggcacgttagtaaccccgaaagatgtccaagagaaatatggagttccgccagaacgttgggtggactttcgcgcactgactggtgatcgttcagacaacatcccgggcgttgccgggattggtgaaaagacggcgctgcgcctgctggcagaatggggctcggtggaaaatctgctcaagaaccttgatcgtgtgaaacctgatagcttacgccgcaagatcgaagcccacctggaagacttgcgtctgagtctggatcttgcgcgtattcgcaccgatctgccgttggaagtagactttaaagctctgcgtcgtcgcacacccgatttagaggggttacgcgcgttcctcgaagaactggagtttggctccctgctgcatgaattcggtttgttgggcggagagaaaccgcgtgaagaagcaccatggccgccgcccgaaggtgcctttgtcggctttcttctgtcacgcaaagagccaatgtgggcggaactgttagctcttgcagccgccgcggaagggcgtgttcaccgcgcgacctctcctgtcgaggccctcgctgacctcaaagaagcacgtggtttcttggcgaaagatttagccgtgcttgcattacgcgaaggcgttgcgctcgatccgacggacgacccgcttttggtggcttatttgctcgatcctgcgaataccactccggaaggtgtagcccgtcgttacggcggcgagtttactgaagatgcggcagaacgcgcgttgcttagcgaacgcctcttccagacgttatttccacgtctttcggagaaattactctggctctatcaggaagtcgaacgtccattgagtcgcgtgcttgcccatatggaggctcgcggtgtgcgcttagatgttccgttgttagaagcactcagcttcgagttggagaaagaaatggaacgtcttgaaggcgaagtctttcgtttagcggggcatcccttcaatctcaactctcgcgaccaattggagaaagtgctctttgatgaattaggtttaacccctatcggacgtacagagaagaccggcaaacgttccactgctcagggagcattggaagcacttcgtggtgctcacccgatcgtcgacttgattttgcagtaccgcgagctcactaaactcaaaggcacctatctggatccgttacctcgtcttgttcatccacgtacgggtcgtttacacacccgcttcaatcaaacggcgacagccaccgggcgcttgtcgtcgagtgacccgaacctccagaatattccagtgcgcacgccgttaggccaacgcattcgtaaagcgtttgttgcggaagaaggttggttattacttgcggccgattactcccagatcgaacttcgtgtattggcgcatctctctggcgacgagaatcttaaacgcgtgtttcgcgaaggcaaggatattcacactgaaaccgcagcctggatgttcgggcttgacccagccttagtggaccccaagatgcgtcgtgccgccaagaccgtcaactttggcgtactctatggtatgtcagcacatcgtcttagtcaggaattgggcattgactacaaagaagctgaagcgtttatcgagcgctatttccaatcctttccgaaagttcgcgcgtggattgaacgtaccctcgaagaaggtcgcactcgcggctatgtggaaacgttattcgggcgtcgtcgctacgttccagatcttgcatctcgtgtccgctcagtgcgcgaagctgctgagcgtatggccttcaatatgcctgttcagggaacagcggcggacctcatgaagatcgccatggtgaaattgtttccgcgcttgaaacccttaggagcccaccttcttttacaggtgcatgatgaattggtcttggaagtacccgaggatcgcgcagaagaagccaaagcactcgtgaaagaggttatggaaaacgcgtatccgttagatgttccgttggaggtcgaagtgggtgtaggccgtgattggcttgaagcgaaacaagac

SEQ ID NO: 110 - protein, 844 aa, synthetic construct
  REGION 1..844: note = DNA Polymerase Variant
MHHHHHHGGSGMLPLFDLEEPPKRVLLVDGHHLAYRTFYALSLTTSRGEPVQMVYGFARSLLKALKEDGQAVVVVFDAKAPSFRHEAYEAYKAGRAPTPEDFPRQLALVKRLVDLLGLVRLEAPGYEADDVLGTLAKKAEREGMEVCILTGDRDFFQLLSEKVSVLLPDGTLVTPKDVQEKYGVPPERWVDFRALTGDRSDNIPGVAGIGEKTALRLLAEWGSVENLLKNLDRVKPDSLRRKIEAHLEDLRLSLDLARIRTDLPLEVDFKALRRRTPDLEGLRAFLEELEFGSLLHEFGLLGGEKPREEAPWPPPEGAFVGFLLSRKEPMWAELLALAAAAEGRVHRATSPVEALADLKEARGFLAKDLAVLALREGVALDPTDDPLLVAYLLDPANTTPEGVARRYGGEFTEDAAERALLSERLFQTLFPRLSEKLLWLYQEVERPLSRVLAHMEARGVRLDVPLLEALSFELEKEMERLEGEVFRLAGHPFNLNSRDQLEKVLFDELGLTPIGRTEKTGKRSTAQGALEALRGAHPIVDLILQYRELTKLKGTYLDPLPRLVHPRTGRLHTRFNQTATATGRLSSSDPNLQNIPVRTPLGQRIRKAFVAEEGWLLLAADYSQIELRVLAHLSGDENLKRVFREGKDIHTETAAWMFGLDPALVDPKMRRAAKTVNFGVLYGMSAHRLSQELGIDYKEAEAFIERYFQSFPKVRAWIERTLEEGRTRGYVETLFGRRRYVPDLASRVRSVREAAERMAFNMPVQGTAADLMKIAMVKLFPRLKPLGAHLLLQVHDELVLEVPEDRAEEAKALVKEVMENAYPLDVPLEVEVGVGRDWLEAKQD

SEQ ID NO: 111 - DNA, 2532 bp, synthetic construct
  misc_feature 1..2532: note = DNA Polymerase Variant
  source 1..2532: mol_type = other DNA
atgcaccatcatcatcatcatggcggtagcggcatgttaccgctgtttgatttggaagaaccaccaaaacgcgtgctgcttgttgacggccatcatctggcgtatcgtaccttctacgcactgagccttacgacctcacgtggtgagcctgtccagatggtgtatgggtttgctcgctccctgctgaaagccctgaaggaagatggtcaagccgtagtagtggttttcgatgcgaaagcaccgtcgtttcgtcacgaagcgtacgaggcctataaagctggccgcgcaccgaccccggaagactttccgcgtcagttagcgctcgtcaaacgcctcgtggatttgctgggattagttcgcttggaagctcctggctacgaggcggacgacgtgctcggtacactggccaagaaagcagaacgtgaaggcatggaggtctgcattcttaccggtgatcgcgatttcttccagctgctgtctgagaaagtgagcgttttgctgcccgatggcacgttagtaaccccgaaagatgtccaagagaaatatggagttccgccagaacgttgggtggactttcgcgcactgactggtgatcgttcagacaacatcccgggcgttgccgggattggtgaaaagacggcgctgcgcctgctggcagaatggggctcggtggaaaatctgctcaagaaccttgatcgtgtgaaacctgatagcttacgccgcaagatcgaagcccacctggaagacttgcgtctgagtctggatcttgcgcgtattcgcaccgatctgccgttggaagtagactttaaagctctgcgtcgtcgcacacccgatttagaggggttacgcgcgttcctcgaacgtctggagtttggctccctgctgcatgaattcggtttgttgggcggagagaaaccgcgtgaagaagcaccatggccgccgcccgaaggtgcctttgtcggctttcttctgtcacgcaaagagccaatgtgggcagaactgttagctcttgcagccgccgcggaagggcgtgttcaccgcgcgacctctcctgtcgaggccctcgctgacctcaaagaagcacgtggtttcttggcgaaagatttagccgtgcttgcattacgcgaaggcgttgcgctcgatccgacggacgacccgcttttggtggcttatttgctcgatcctgcgaataccaatccggaaggtgtagcccgtcgttacggcggcgagtttactgaagatgcggcagaacgcgcgttgcttagcgaacgcctcttccagacgttatttccacgtctttcggagaaattactctggctctatcaggaagtcgaacgtccattgagtcgcgtgcttgcccatatggaggctcgcggtgtgcgcttagatgttccgttgttagaagcactcagcttcgagttggagaaagaactggaacgtcttgaaggcgaagtctttcgtttagcggggcatcccttcaatctcaactctcgcgaccaattggagaaagtgctctttgatgaattaggtttaacccctatcggacgtacagagaagaccggcaaacgttccactgctcagggagcattggaagcacttcgtggtgctcacccgatcgtcgagttgattttgcagtaccgcgagctcagtaaactcaaaaacacctatctggatccgttacctcgtcttgttcatccacgtacgggtcgtttacacacccgcttcaatcaaacggcgacagccaccgggcgcttgtcgtcgagtgacccgaacctccagaatattccagtgcgcacgccgttaggccaacgcattcgtaaagcgtttgttgcggaagaaggttggttattacttgcggccgattactcccagatcgaacttcgtgtattggcgcatctctctggcgacgagaatcttaaacgcgtgtttcgcgaaggcaaggatattcacactgaaaccgcagcctggatgttcgggcttgacccagccttagtggaccccaagatgcgtcgtgccgccaagaccgtcaactttggcgtactctatggtatgtcagcacatcgtcttagtcaggaattgggcattgactacaaagaagctgaagcgtttatcgagcgctatttccaatcctttccgaaagttcgcgcgtggattgaacgtaccctcgaagaaggtcgcactcgcggctatgtggaaacgttattcgggcgtcgtcgctacgttccagatcttgcatctcgtgtccgctcagtgcgcgaagctgctgagcgtatggccttcaatatgcctgttcagggaacagcggcggacctcatgaagatcgccatggtgaaattgtttccgcgcttgaaacccttaggagcccaccttcttttacaggtgcatgatgaattggtcttggaagtacccgaggatcgcgcagaagaagccaaagcactcgtgaaagaggttatggaaaacgcgtatccgttagatgttccgttggaggtcgaagtgggtgtaggccgtgattggcttgaagcgaaacaagac

SEQ ID NO: 112 - protein, 844 aa, synthetic construct
  REGION 1..844: note = DNA Polymerase Variant
MHHHHHHGGSGMLPLFDLEEPPKRVLLVDGHHLAYRTFYALSLTTSRGEPVQMVYGFARSLLKALKEDGQAVVVVFDAKAPSFRHEAYEAYKAGRAPTPEDFPRQLALVKRLVDLLGLVRLEAPGYEADDVLGTLAKKAEREGMEVCILTGDRDFFQLLSEKVSVLLPDGTLVTPKDVQEKYGVPPERWVDFRALTGDRSDNIPGVAGIGEKTALRLLAEWGSVENLLKNLDRVKPDSLRRKIEAHLEDLRLSLDLARIRTDLPLEVDFKALRRRTPDLEGLRAFLERLEFGSLLHEFGLLGGEKPREEAPWPPPEGAFVGFLLSRKEPMWAELLALAAAAEGRVHRATSPVEALADLKEARGFLAKDLAVLALREGVALDPTDDPLLVAYLLDPANTNPEGVARRYGGEFTEDAAERALLSERLFQTLFPRLSEKLLWLYQEVERPLSRVLAHMEARGVRLDVPLLEALSFELEKELERLEGEVFRLAGHPFNLNSRDQLEKVLFDELGLTPIGRTEKTGKRSTAQGALEALRGAHPIVELILQYRELSKLKNTYLDPLPRLVHPRTGRLHTRFNQTATATGRLSSSDPNLQNIPVRTPLGQRIRKAFVAEEGWLLLAADYSQIELRVLAHLSGDENLKRVFREGKDIHTETAAWMFGLDPALVDPKMRRAAKTVNFGVLYGMSAHRLSQELGIDYKEAEAFIERYFQSFPKVRAWIERTLEEGRTRGYVETLFGRRRYVPDLASRVRSVREAAERMAFNMPVQGTAADLMKIAMVKLFPRLKPLGAHLLLQVHDELVLEVPEDRAEEAKALVKEVMENAYPLDVPLEVEVGVGRDWLEAKQD

SEQ ID NO: 113 - DNA, 2532 bp, synthetic construct
  misc_feature 1..2532: note = DNA Polymerase Variant
  source 1..2532: mol_type = other DNA
atgcaccatcatcatcatcatggcggtagcggcatgttaccgctgtttgatttggaagaaccaccaaaacgcgtgctgcttgttgacggccatcatctggcgtatcgtaccttctatgcactgagccttacgacctcacgtggtgagcctgtccagatggtgtatgggtttgctcgctccctgctgaaagccctgaaggaagatggtcaagccgtagtagtggttttcgatgcgaaagcaccgtcgtttcgtcacgaagcgtacgaggcctataaagctggccgcgcaccgaccccggaagactttccgcgtcagttagcgctcgtcaaacgcctcgtggatttgctgggattagttcgcttggaagctcctggctacgaggcggacgacgtgctcggtacactggccaagaaagcagaacgtgaaggcatggaggtctgcattcttaccggtgatcgcgatttcttccagctgctgtctgagaaagtgagcgttttgctgcccgatggcacgttagtaaccccgaaagatgtccaagagaaatatggagttccgccagaacgttgggtggactttcgcgcactgactggtgatccttcagacaacatcccgggcgttgccgggattggtgaaaagacggcgctgcgcctgctggcagaatggggctcggtggaaaatctgctcaagaaccttgatcgtgtgaaacctgatagcttacgccgcaagatcgaagcccacctggaagacttgcgtctgagtctggatcttgcgcgtattcgcaccgatctgccgttggaagtagactttaaagctctgcgtcgtcgcacacccgatttagaggggttacgcgcgttcctcgaagaactggagtttggctccctgctgcatgaattcggtttgttgggcggagagaaaccgcgtgaagaagcaccatggccgccgcccgaaggtgcctttgtcggctttcttctgtcacgcaaagagccaatgtgggcggaactgttagctcttgcagccgccgcggaagggcgtgttcaccgcgcgacctctcctgtcgaggccctcgctgacctcaaagaagcacgtggtttcttggcgaaagatttagccgtgcttgcattacgcgaaggcgttgcgctcgatccgacggacgacccgcttttggtggcttatttgctcgatcctgcgaataccaacccggaaggtgtagcccgtcgttacggcggcgagtttactgaagatgcggcagaacgcgcgttgcttagcgaacgcctcttccagacgttatttccacgtctttcggagaaattactctggctctatcaggaagtcgaacgtccattgagtcgcgtgcttgcccatatggaggctcgcggtgtgcgcttagatgttccgttgttagaagcactcagcttcgagttggagaaagaaatggaacgtcttgaaggcgaagtctttcgtttagcggggcatcccttcaatctcaactctcgcgaccaattggagaaagtgctctttgatgaattaggtttaacccctgtaggacgcacagagaagaccggcaaacgttccactgctcagggagcattggaagcacttcgtggtgctcacccgatcgtcgagttgattttgcagtaccgcgagctcagcaaactcaaatcaacctatcttgatccgttacctcgtcttgttcatccacgtacgggtcgtttacacacccgcttcaatcaaacggcgacagccaccgggcgcttgtcgtcgagtgacccgaacctccagaatattccagtgcgcacgccgttaggccaacgcattcgtaaagcgtttgttgcggaagaaggttggttattacttgcggccgattactcccagatcgaacttcgtgtattggcgcatctctctggcgacgagaatcttaaacgcgtgtttcgcgaaggcaaggatattcacactgaaaccgcagcctggatgttcgggcttgacccagccttagtggaccccaagatgcgtcgtgccgccaagaccgtcaactttggcgtactctatggtatgtcagcacatcgtcttagtcaggaattgggcattgactacaaagaagctgaagcgtttatcgagcgctatttccaatcctttccgaaagttcgcgcgtggattgaacgtaccctcgaagaaggtcgcactcgcggctatgtggaaacgttattcgggcgtcgtcgctacgttccagatcttgcatctcgtgtccgctcagtgcgcgaagctgctgagcgtatggccttcaatatgcctgttcagggaacagcggcggacctcatgaagatcgccatggtgaaattgtttccgcgcttgaaacccttaggagcccaccttcttttacaggtgcatgatgaattggtcttggaagtacccgaggatcgcgcagaagaagccaaagcactcgtgaaagaggttatggaaaacgcgtatccgttagatgttccgttggaggtcgaagtgggtgtaggccgtgattggcttgaagcgaaacaagac

SEQ ID NO: 114 - protein, 844 aa, synthetic construct
  REGION 1..844: note = DNA Polymerase Variant
MHHHHHHGGSGMLPLFDLEEPPKRVLLVDGHHLAYRTFYALSLTTSRGEPVQMVYGFARSLLKALKEDGQAVVVVFDAKAPSFRHEAYEAYKAGRAPTPEDFPRQLALVKRLVDLLGLVRLEAPGYEADDVLGTLAKKAEREGMEVCILTGDRDFFQLLSEKVSVLLPDGTLVTPKDVQEKYGVPPERWVDFRALTGDPSDNIPGVAGIGEKTALRLLAEWGSVENLLKNLDRVKPDSLRRKIEAHLEDLRLSLDLARIRTDLPLEVDFKALRRRTPDLEGLRAFLEELEFGSLLHEFGLLGGEKPREEAPWPPPEGAFVGFLLSRKEPMWAELLALAAAAEGRVHRATSPVEALADLKEARGFLAKDLAVLALREGVALDPTDDPLLVAYLLDPANTNPEGVARRYGGEFTEDAAERALLSERLFQTLFPRLSEKLLWLYQEVERPLSRVLAHMEARGVRLDVPLLEALSFELEKEMERLEGEVFRLAGHPFNLNSRDQLEKVLFDELGLTPVGRTEKTGKRSTAQGALEALRGAHPIVELILQYRELSKLKSTYLDPLPRLVHPRTGRLHTRFNQTATATGRLSSSDPNLQNIPVRTPLGQRIRKAFVAEEGWLLLAADYSQIELRVLAHLSGDENLKRVFREGKDIHTETAAWMFGLDPALVDPKMRRAAKTVNFGVLYGMSAHRLSQELGIDYKEAEAFIERYFQSFPKVRAWIERTLEEGRTRGYVETLFGRRRYVPDLASRVRSVREAAERMAFNMPVQGTAADLMKIAMVKLFPRLKPLGAHLLLQVHDELVLEVPEDRAEEAKALVKEVMENAYPLDVPLEVEVGVGRDWLEAKQD

SEQ ID NO: 115 - DNA, 2532 bp, synthetic construct
  misc_feature 1..2532: note = DNA Polymerase Variant
  source 1..2532: mol_type = other DNA
atgcaccatcatcatcatcatggcggtagcggcatgttaccgctgtttgatttggaagaaccaccaaaacgcgtgctgcttgttgacggccatcatctggcgtatcgtaccttctacgcactgagccttacgacctcacgtggtgagcctgtccagatggtgtatgggtttgctcgctccctgctgaaagccctgaaggaagatggtcaagccgtagtagtggttttcgatgcgaaagcaccgtcgtttcgtcacgaagcgtacgaggcctataaagctggccgcgcaccgaccccggaagactttccgcgtcagttagcgctcgtcaaacgcctcgtggatttgctgggattagttcgcttggaagctcctggctacgaggcggacgacgtgctcggtacactggccaagaaagcagaacgtgaaggcatggaggtctgcattcttaccggtgatcgcgatttcttccagctgctgtctgagaaagtgagcgttttgctgcccgatggcacgttagtaaccccgaaagatgtccaagagaaatatggagttccgccagaacgttgggtggactttcgcgcactgactggtgatcgttcagacaacatcccgggcgttgccgggattggtgaaaagacggcgctgcgcctgctggcagaatggggctcggtggaaaatctgctcaagaaccttgatcgtgtgaaacctgatagcttacgccgcaagatcgaagcccacctggaagacttgcgtctgagtctggatcttgcgcgtattcgcaccgatctgccgttggaagtagactttaaagctctgcgtcgtcgcacacccgatttagaggggttacgcgcgttcctcgaacgtctggagtttggctccctgctgcatgaattcggtttgttgggcggagagaaaccgcgtgaagaagcaccatggccgccgcccgaaggtgcctttgtcggctttcttctgtcacgcaaagagccaatgtgggcggaactgttagctcttgcagccgccgcggaagggcgtgttcaccgcgcgacctctcctgtcgaggccctcgctgacctcaaagaagcacgtggtttcttggcgaaagatttagccgtgcttgcattacgcgaaggcgttgcgctcgatccgacggacgacccgcttttggtggcttatttgctcgatcctgcgaataccactccggaaggtgtagcccgtcgttacggcggcgagtttactgaagatgcggcagaacgcgcgttgcttagcgaacgcctcttccagacgttatttccacgtctttcggagaaattactctggctctatcaggaagtcgaacgtccattgagtcgcgtgcttgcccatatggaggctcgcggtgtgcgcttagatgttccgttgttagaagcactcagcttcgagttggagaaagaaatggaacgtcttgaaggcgaagtctttcgtttagcggggcatcccttcaatctcaactctcgcgaccaattggagaaagtgctctttgatgaattaggtttaacccctgtcggacgtacagagaagaccggcaaacgttccactgcgcaaggcgtcttggaagcacttcgtggtgctcacccgatcgtcgacttgattttgcagtaccgcgagctcagcaaactcaaatcaacctatcttgatccgttacctcgtcttgttcatccacgtacgggtcgtttacacacccgcttcaatcaaacggcgacagccaccgggcgcttgtcgtcgagtgacccgaacctccagaatattccagtgcgcacgccgttaggccaacgcattcgtaaagcgtttgttgcggaagaaggttggttattacttgcggccgattactcccagatcgaacttcgtgtattggcgcatctctctggcgacgagaatcttaaacgcgtgtttcgcgaaggcaaggatattcacactgaaaccgcagcctggatgttcgggcttgacccagccttagtggaccccaagatgcgtcgtgccgccaagaccgtcaactttggcgtactctatggtatgtcagcacatcgtcttagtcaggaattgggcattgactacaaagaagctgaagcgtttatcgagcgctatttccaatcctttccgaaagttcgcgcgtggattgaacgtaccctcgaagaaggtcgcactcgcggctatgtggaaacgttattcgggcgtcgtcgctacgttccagatcttgcatctcgtgtccgctcagtgcgcgaagctgctgagcgtatggccttcaatatgcctgttcagggaacagcggcggacctcatgaagatcgccatggtgaaattgtttccgcgcttgaaacccttaggagcccaccttcttttacaggtgcatgatgaattggtcttggaagtacccgaggatcgcgcagaagaagccaaagcactcgtgaaagaggttatggaaaacgcgtatccgttagatgttccgttggaggtcgaagtgggtgtaggccgtgattggcttgaagcgaaacaagac

SEQ ID NO: 116 - protein, 844 aa, synthetic construct
  REGION 1..844: note = DNA Polymerase Variant
MHHHHHHGGSGMLPLFDLEEPPKRVLLVDGHHLAYRTFYALSLTTSRGEPVQMVYGFARSLLKALKEDGQAVVVVFDAKAPSFRHEAYEAYKAGRAPTPEDFPRQLALVKRLVDLLGLVRLEAPGYEADDVLGTLAKKAEREGMEVCILTGDRDFFQLLSEKVSVLLPDGTLVTPKDVQEKYGVPPERWVDFRALTGDRSDNIPGVAGIGEKTALRLLAEWGSVENLLKNLDRVKPDSLRRKIEAHLEDLRLSLDLARIRTDLPLEVDFKALRRRTPDLEGLRAFLERLEFGSLLHEFGLLGGEKPREEAPWPPPEGAFVGFLLSRKEPMWAELLALAAAAEGRVHRATSPVEALADLKEARGFLAKDLAVLALREGVALDPTDDPLLVAYLLDPANTTPEGVARRYGGEFTEDAAERALLSERLFQTLFPRLSEKLLWLYQEVERPLSRVLAHMEARGVRLDVPLLEALSFELEKEMERLEGEVFRLAGHPFNLNSRDQLEKVLFDELGLTPVGRTEKTGKRSTAQGVLEALRGAHPIVDLILQYRELSKLKSTYLDPLPRLVHPRTGRLHTRFNQTATATGRLSSSDPNLQNIPVRTPLGQRIRKAFVAEEGWLLLAADYSQIELRVLAHLSGDENLKRVFREGKDIHTETAAWMFGLDPALVDPKMRRAAKTVNFGVLYGMSAHRLSQELGIDYKEAEAFIERYFQSFPKVRAWIERTLEEGRTRGYVETLFGRRRYVPDLASRVRSVREAAERMAFNMPVQGTAADLMKIAMVKLFPRLKPLGAHLLLQVHDELVLEVPEDRAEEAKALVKEVMENAYPLDVPLEVEVGVGRDWLEAKQD

SEQ ID NO: 117 - DNA, 2532 bp, synthetic construct
  misc_feature 1..2532: note = DNA Polymerase Variant
  source 1..2532: mol_type = other DNA
atgcaccatcatcatcatcatggcggtagcggcatgttaccgctgtttgatttggaagaaccaccaaaacgcgtgctgcttgttgacggccatcatctggcgtatcgtaccttctacgcactgagccttacgacctcacgtggtgagcctgtccagatggtgtatgggtttgctcgctccctgctgaaagccctgaaggaagatggtcaagccgtagtagtggttttcgatgcgaaagcaccgtcgtttcgtcacgaagcgtacgaggcctataaagctggccgcgcaccgaccccggaagactttccgcgtcagttagcgctcgtcaaacgcctcgtggatttgctgggattagttcgcttggaagctcctggctacgaggcggacgacgtgctcggtacactggccaagaaagcagaacgtgaaggcatggaggtctgcattcttaccggtgatcgcgatttcttccagctgctgtctgagaaagtgagcgttttgctgcccgatggcacgttagtaaccccgaaagatgtccaagagaaatatggagttccgccagaacgttgggtggactttcgcgcactgactggtgatcgttcagacaacatcccgggcgttgccgggattggtgaaaagacggcgctgcgcctgctggcagaatggggctcggtggaaaatctgctcaagaaccttgatcgtgtgaaacctgatagcttacgccgcaagatcgaagcccacctggaagacttgcgtctgagtctggatcttgcgcgtattcgcaccgatctgccgttggaagtagactttaaagctctgcgtcgtcgcacacccgatttagaggggttacgcgcgttcctcgaagaactggagtttggctccctgctgcatgaattcggtttgttgggcggagagaaaccgcgtgaagaagcaccatggccgccgcccgaaggtgcctttgtcggctttcttctgtcacgcaaagagccaatgtgggcggaactgttagctcttgcagccgccgcggaagggcgtgttcaccgcgcgacctctcctgtcgaggccctcgctgacctcaaagaagcacgtggtttcttggcgaaagatttagccgtgcttgcattacgcgaaggcgttgcgctcgatccgacggacgacccgcttttggtggcttatttgctcgatcctgcgaataccactccggaaggtgtagcccgtcgttacggcggcgagtttactgaagatgcggcagaacgcgcgttgcttagcgaacgcctcttccagacgttatttccacgtctttcggagaaattactctggctctatcaggaagtcgaacgtccattgagtcgcgtgcttgcccatatggaggctcgcggtgtgcgcttagatgttccgttgttagaagcactcagcttcgagttggagaaagaactggaacgtcttgaaggcgaagtctttcgtttagcggggcatcccttcaatctcaactctcgcgaccaattggagaaagtgctctttgatgaattaggtttaacccctgtcggacgtacagagaagaccggcaaacgttccactgcgcaaggcgccttggaagcacttcgtggtgctcacccgatcgtcgaattgattttgcagtaccgcgagctcagtaaactcaaaaacacctatctggatccgttacctcgtcttgttcatccacgtacgggtcgtttacacacccgcttcaatcaaacggcgacagccaccgggcgcttgtcgtcgagtgacccgaacctccagaatattccagtgcgcacgccgttaggccaacgcattcgtaaagcgtttgttgcggaagaaggttggttattacttgcggccgattactcccagatcgaacttcgtgtattggcgcatctctctggcgacgagaatcttaaacgcgtgtttcgcgaaggcaaggatattcacactgaaaccgcagcctggatgttcgggcttgacccagccttagtggaccccaagatgcgtcgtgccgccaagaccgtcaactttggcgtactctatggtatgtcagcacatcgtcttagtcaggaattgggcattgactacaaagaagctgaagcgtttatcgagcgctatttccaatcctttccgaaagttcgcgcgtggattgaacgtaccctcgaagaaggtcgcactcgcggctatgtggaaacgttattcgggcgtcgtcgctacgttccagatcttgcatctcgtgtccgctcagtgcgcgaagctgctgagcgtatggccttcaatatgcctgttcagggaacagcggcggacctcatgaagatcgccatggtgaaattgtttccgcgcttgaaacccttaggagcccaccttcttttacaggtgcatgatgaattggtcttggaagtacccgaggatcgcgcagaagaagccaaagcactcgtgaaagaggttatggaaaacgcgtatccgttagatgttccgttggaggtcgaagtgggtgtaggccgtgattggcttgaagcgaaacaagac

SEQ ID NO: 118 - protein, 844 aa, synthetic construct
  REGION 1..844: note = DNA Polymerase Variant
MHHHHHHGGSGMLPLFDLEEPPKRVLLVDGHHLAYRTFYALSLTTSRGEPVQMVYGFARSLLKALKEDGQAVVVVFDAKAPSFRHEAYEAYKAGRAPTPEDFPRQLALVKRLVDLLGLVRLEAPGYEADDVLGTLAKKAEREGMEVCILTGDRDFFQLLSEKVSVLLPDGTLVTPKDVQEKYGVPPERWVDFRALTGDRSDNIPGVAGIGEKTALRLLAEWGSVENLLKNLDRVKPDSLRRKIEAHLEDLRLSLDLARIRTDLPLEVDFKALRRRTPDLEGLRAFLEELEFGSLLHEFGLLGGEKPREEAPWPPPEGAFVGFLLSRKEPMWAELLALAAAAEGRVHRATSPVEALADLKEARGFLAKDLAVLALREGVALDPTDDPLLVAYLLDPANTTPEGVARRYGGEFTEDAAERALLSERLFQTLFPRLSEKLLWLYQEVERPLSRVLAHMEARGVRLDVPLLEALSFELEKELERLEGEVFRLAGHPFNLNSRDQLEKVLFDELGLTPVGRTEKTGKRSTAQGALEALRGAHPIVELILQYRELSKLKNTYLDPLPRLVHPRTGRLHTRFNQTATATGRLSSSDPNLQNIPVRTPLGQRIRKAFVAEEGWLLLAADYSQIELRVLAHLSGDENLKRVFREGKDIHTETAAWMFGLDPALVDPKMRRAAKTVNFGVLYGMSAHRLSQELGIDYKEAEAFIERYFQSFPKVRAWIERTLEEGRTRGYVETLFGRRRYVPDLASRVRSVREAAERMAFNMPVQGTAADLMKIAMVKLFPRLKPLGAHLLLQVHDELVLEVPEDRAEEAKALVKEVMENAYPLDVPLEVEVGVGRDWLEAKQD

SEQ ID NO: 119 - DNA, 2532 bp, synthetic construct
  misc_feature 1..2532: note = DNA Polymerase Variant
  source 1..2532: mol_type = other DNA
atgcaccatcatcatcatcatggcggtagcggcatgttaccgctgtttgatttggaagaaccaccaaaacgcgtgctgcttgttgacggccatcatctggcgtatcgtaccttctacgcactgagccttacgacctcacgtggtgagcctgtccagatggtgtatgggtttgctcgctccctgctgaaagccctgaaggaagatggtcaagccgtagtagtggttttcgatgcgaaagcaccgtcgtttcgtcacgaagcgtacgaggcctataaagctggccgcgcaccgaccccggaagactttccgcgtcagttagcgctcgtcaaacgcctcgtggatttgctgggattagttcgcttggaagctcctggctacgaggcggacgacgtgctcggtacactggccaagaaagcagaacgtgaaggcatggaggtctgcattcttaccggtgatcgcgatttcttccagctgctgtctgagaaagtgagcgttttgctgcccgatggcacgttagtaaccccgaaagatgtccaagagaaatatggagttccgccagaacgttgggtggactttcgcgcactgactggtgatcgttcagacaacatcccgggcgttgccgggattggtgaaaagacggcgctgcgcctgctggcagaatggggctcggtggaaaatctgctcaagaaccttgatcgtgtgaaacctgatagcttacgccgcaagatcgaagcccacctggaagacttgcgtctgagtctggatcttgcgcgtattcgcaccgatctgccgttggaagtagactttaaagctctgcgtcgtcgcacacccgatttagaggggttacgcgcgttcctcgaagaactggagtttggctccctgctgcatgaattcggtttgttgggcggagagaaaccgcgtgaagaagcaccatggccgccgcccgaaggtgcctttgtcggctttcttctgtcacgcaaagagccaatgtgggcggaactgttagctcttgcagccgccgcggaagggcgtgttcaccgcgcgacctctcctgtcgaggccctcgctgacctcaaagaagcacgtggtttcttggcgaaagatttagccgtgcttgcattacgcgaaggcgttgcgctcgatccgacggacgacccgcttttggtggcttatttgctcgatcctgcgaataccaacccggaaggtgtagcccgtcgttacggcggcgagtttactgaagatgcggcagaacgcgcgttgcttagcgaacgcctcttccagacgttatttccacgtctttcggagaaattactctggctctatcaggaagtcgaacgtccattgagtcgcgtgcttgcccatatggaggctcgcggtgtgcgcttagatgttccgttgttagaagcactcagcttcgagttggagaaagaaatggaacgtcttgaaggcgaagtctttcgtttagcggggcatcccttcaatctcaactctcgcgaccaattggagaaagtgctctttgatgaattaggtttaacccctgtcggaaaaacagagaagaccggcaaacgttccactgcgcaagccgccttggaagcacttcgtggtgctcacccgatcgtcgacttgattttgcagtaccgcgagctcagtaaactcaaaaacacctatattgatccgttacctcgtcttgttcatccacgtacgggtcgtttacacacccgcttcaatcaaacggcgacagccaccgggcgcttgtcgtcgagtgacccgaacctccagaatattccagtgcgcacgccgttaggccaacgcattcgtaaagcgtttgttgcggaagaaggttggttattacttgcggccgattactcccagatcgaacttcgtgtattggcgcatctctctggcgacgagaatcttaaacgcgtgtttcgcgaaggcaaggatattcacactgaaaccgcagcctggatgttcgggcttgacccagccttagtggaccccaagatgcgtcgtgccgccaagaccgtcaactttggcgtactctatggtatgtcagcacatcgtcttagtcaggaattgggcattgactacaaagaagctgaagcgtttatcgagcgctatttccaatcctttccgaaagttcgcgcgtggattgaacgtaccctcgaagaaggtcgcactcgcggctatgtggaaacgttattcgggcgtcgtcgctacgttccagatcttgcatctcgtgtccgctcagtgcgcgaagctgctgagcgtatggccttcaatatgcctgttcagggaacagcggcggacctcatgaagatcgccatggtgaaattgtttccgcgcttgaaacccttaggagcccaccttcttttacaggtgcatgatgaattggtcttggaagtacccgaggatcgcgcagaagaagccaaagcactcgtgaaagaggttatggaaaacgcgtatccgttagatgttccgttggaggtcgaagtgggtgtaggccgtgattggcttgaagcgaaacaagac

SEQ ID NO: 120 - protein, 844 aa, synthetic construct
  REGION 1..844: note = DNA Polymerase Variant
MHHHHHHGGSGMLPLFDLEEPPKRVLLVDGHHLAYRTFYALSLTTSRGEPVQMVYGFARSLLKALKEDGQAVVVVFDAKAPSFRHEAYEAYKAGRAPTPEDFPRQLALVKRLVDLLGLVRLEAPGYEADDVLGTLAKKAEREGMEVCILTGDRDFFQLLSEKVSVLLPDGTLVTPKDVQEKYGVPPERWVDFRALTGDRSDNIPGVAGIGEKTALRLLAEWGSVENLLKNLDRVKPDSLRRKIEAHLEDLRLSLDLARIRTDLPLEVDFKALRRRTPDLEGLRAFLEELEFGSLLHEFGLLGGEKPREEAPWPPPEGAFVGFLLSRKEPMWAELLALAAAAEGRVHRATSPVEALADLKEARGFLAKDLAVLALREGVALDPTDDPLLVAYLLDPANTNPEGVARRYGGEFTEDAAERALLSERLFQTLFPRLSEKLLWLYQEVERPLSRVLAHMEARGVRLDVPLLEALSFELEKEMERLEGEVFRLAGHPFNLNSRDQLEKVLFDELGLTPVGKTEKTGKRSTAQAALEALRGAHPIVDLILQYRELSKLKNTYIDPLPRLVHPRTGRLHTRFNQTATATGRLSSSDPNLQNIPVRTPLGQRIRKAFVAEEGWLLLAADYSQIELRVLAHLSGDENLKRVFREGKDIHTETAAWMFGLDPALVDPKMRRAAKTVNFGVLYGMSAHRLSQELGIDYKEAEAFIERYFQSFPKVRAWIERTLEEGRTRGYVETLFGRRRYVPDLASRVRSVREAAERMAFNMPVQGTAADLMKIAMVKLFPRLKPLGAHLLLQVHDELVLEVPEDRAEEAKALVKEVMENAYPLDVPLEVEVGVGRDWLEAKQD

SEQ ID NO: 121 - DNA, 2532 bp, synthetic construct
  misc_feature 1..2532: note = DNA Polymerase Variant
  source 1..2532: mol_type = other DNA
atgcaccatcatcatcatcatggcggtagcggcatgttaccgctgtttgatttggaagaaccaccaaaacgcgtgctgcttgttgacggccatcatctggcgtatcgtaccttctttgcactgagccttacgacctcacgtggtgagcctgtccagatggtgtatgggtttgctcgctccctgctgaaagccctgaaggaagatggtcaagccgtagtagtggttttcgatgcgaaagcaccgtcgtttcgtcacgaagcgtacgaggcctataaagctggccgcgcaccgaccccggaagactttccgcgtcagttagcgctcgtcaaacgcctcgtggatttgctgggattagttcgcttggaagctcctggctacgaggcggacgacgtgctcggtacactggccaagaaagcagaacgtgaaggcatggaggtctgcattcttaccggtgatcgcgatttcttccagctgctgtctgagaaagtgagcgttttgctgcccgatggcacgttagtaaccccgaaagatgtccaagagaaatatggagttccgccagaacgttgggtggactttcgcgcactgactggtgatccttcagacaacatcccgggcgttgccgggattggtgaaaagacggcgctgcgcctgctggcagaatggggctcggtggaaaatctgctcaagaaccttgatcgtgtgaaacctgatagcttacgccgtaagatcgaagcccacctggaagacttgcgtctgagtctggatcttgcgcgtattcgcaccgatctgccgttggaagtagactttaaagctctgcgtcgtcgcacacccgatttagaggggttacgcgcgttcctcgaagaactggagtttggctccctgctgcatgaattcggtttgttgggcggagagaaaccgcgtgaagaagcaccatggccgccgcccgaaggtgcctttgtcggctttcttctgtcacgcaaagagccaatgtgggcggaactgttagctcttgcagccgccgcggaagggcgtgttcaccgcgcgacctctcctgtcgaggccctcgctgacctcaaagaagcacgtggtttcttggcgaaagatttagccgtgcttgcattacgcgaaggcgttgcgctcgatccgacggacgacccgcttttggtggcttatttgctcgatcctgcgaataccaacccggaaggtgtagcccgtcgttacggcggcgagtttactgaagatgcggcagaacgcgcgttgcttagcgaacgcctcttccagacgttatttccacgtctttcggagaaattactctggctctatcaggaagtcgaacgtccattgagtcgcgtgcttgcccatatggaggctcgcggtgtgcgcttagatgttccgttgttagaagcactcagcttcgagttggagaaagaaatggaacgtcttgaaggcgaagtctttcgtttagcggggcatcccttcaatctcaactctcgcgaccaattggagaaagtgctctttgatgaattaggtttaaccccggtaggacgcacagagaagaccggcaaacgttccactgctcagggagcattggaagcacttcgtggtgctcacccgatcgtcgagttgattttgcagtaccgcgagctcagcaaactcaaatcaacctatcttgatccgttacctcgtcttgttcatccacgtacgggtcgtttacacacccgcttcaatcaaacggcgacagccaccgggcgcttgtcgtcgagtgacccgaacctccagaatattccagtgcgcacgccgttaggccaacgcattcgtaaagcgtttgttgcggaagaaggttggttattacttgcggccgattactcccagatcgaacttcgtgtattggcgcatctctctggcgacgagaatcttaaacgcgtgtttcgcgaaggcaaggatattcacactgaaaccgcagcctggatgttcgggcttgacccagccttagtggaccccaagatgcgtcgtgccgccaagaccgtcaactttggcgtactctatggtatgtcagcacatcgtcttagtcaggaattgggcattgactacgaggaagctgaagcgtttatcgagcgctatttccaatcctttccgaaagttcgcgcgtggattgaacgtaccctcgaagaaggtcgcactcgcggctatgtggaaacgttattcgggcgtcgtcgctacgttccagatcttgcatctcgtgtccgctcagtgcgcgaagctgctgagcgtatggccttcaatatgcctgttcagggaacagcggcggacctcatgaagatcgccatggtgaaattgtttccgcgcttgaaacccttaggagcccaccttcttttacaggtgcatgatgaattggtcttggaagtacccgaggatcgcgcagaagaagccaaagcactcgtgaaagaggttatggaaaacgcgtatccgttagatgttccgttggaggtcgaagtgggtgtaggccgtgattggcttgaagcgaaacaagac

SEQ ID NO: 122 - protein, 844 aa, synthetic construct
  REGION 1..844: note = DNA Polymerase Variant
MHHHHHHGGSGMLPLFDLEEPPKRVLLVDGHHLAYRTFFALSLTTSRGEPVQMVYGFARSLLKALKEDGQAVVVVFDAKAPSFRHEAYEAYKAGRAPTPEDFPRQLALVKRLVDLLGLVRLEAPGYEADDVLGTLAKKAEREGMEVCILTGDRDFFQLLSEKVSVLLPDGTLVTPKDVQEKYGVPPERWVDFRALTGDPSDNIPGVAGIGEKTALRLLAEWGSVENLLKNLDRVKPDSLRRKIEAHLEDLRLSLDLARIRTDLPLEVDFKALRRRTPDLEGLRAFLEELEFGSLLHEFGLLGGEKPREEAPWPPPEGAFVGFLLSRKEPMWAELLALAAAAEGRVHRATSPVEALADLKEARGFLAKDLAVLALREGVALDPTDDPLLVAYLLDPANTNPEGVARRYGGEFTEDAAERALLSERLFQTLFPRLSEKLLWLYQEVERPLSRVLAHMEARGVRLDVPLLEALSFELEKEMERLEGEVFRLAGHPFNLNSRDQLEKVLFDELGLTPVGRTEKTGKRSTAQGALEALRGAHPIVELILQYRELSKLKSTYLDPLPRLVHPRTGRLHTRFNQTATATGRLSSSDPNLQNIPVRTPLGQRIRKAFVAEEGWLLLAADYSQIELRVLAHLSGDENLKRVFREGKDIHTETAAWMFGLDPALVDPKMRRAAKTVNFGVLYGMSAHRLSQELGIDYEEAEAFIERYFQSFPKVRAWIERTLEEGRTRGYVETLFGRRRYVPDLASRVRSVREAAERMAFNMPVQGTAADLMKIAMVKLFPRLKPLGAHLLLQVHDELVLEVPEDRAEEAKALVKEVMENAYPLDVPLEVEVGVGRDWLEAKQD

SEQ ID NO: 123 - DNA, 2532 bp, synthetic construct
  misc_feature 1..2532: note = DNA Polymerase Variant
  source 1..2532: mol_type = other DNA
atgcaccatcatcatcatcatggcggtagcggcatgttaccgctgtttgatttggaagaaccaccaaaacgcgtgctgcttgttgacggccatcatctggcgtatcgtaccttctacgcactgagccttacgacctcacgtggtgagcctgtccagatggtgtatgggtttgctcgctccctgctgaaagccctgaaggaagatggtcaagccgtagtagtggttttcgatgcgaaagcaccgtcgtttcgtcacgaagcgtacgaggcctataaagctggccgcgcaccgaccccggaagactttccgcgtcagttagcgctcgtcaaacgcctcgtggatttgctgggattagttcgcttggaagctcctggctacgaggcggacgacgtgctcggtacactggccaagaaagcagaacgtgaaggcatggaggtctgcattcttaccggtgatcgcgatttcttccagctgctgtctgagaaagtgagcgttttgctgcccgatggcacgttagtaaccccgaaagatgtccaagagaaatatggagttccgccagaacgttgggtggactttcgcgcactgactggtgatcgttcagacaacatcccgggcgttgccgggattggtgaaaagacggcgctgcgcctgctggcagaatggggctcggtggaaaatctgctcaagaaccttgatcgtgtgaaacctgatagcttacgccgcaagatcgaagcccacctggaagacttgcgtctgagtctggatcttgcgcgtattcgcaccgatctgccgttggaagtagactttaaagctctgcgtcgtcgcacacccgatttagaggggttacgcgcgttcctcgaagaactggagtttggctccctgctgcatgaattcggtttgttgggcggagagaaaccgcgtgaagaagcaccatggccgccgcccgaaggtgcctttgtcggctttcttctgtcacgcaaagagccaatgtgggcggaactgttagctcttgcagccgccgcggaagggcgtgttcaccgcgcgacctctcctgtcgaggccctcgctgacctcaaagaagcacgtggtttcttggcgaaagatttagccgtgcttgcattacgcgaaggcgttgcgctcgatccgacggacgacccgcttttggtggcttatttgctcgatcctgcgaataccactccggaaggtgtagcccgtcgttacggcggcgagtttactgaagatgcggcagaacgcgcgttgcttagcgaacgcctcttccagacgttatttccacgtctttcggagaaattactctggctctatcaggaagtcgaacgtccattgagtcgcgtgcttgcccatatggaggctcgcggtgtgcgcttagatgttccgttgttagaagcactcagcttcgagttggagaaagaactggaacgtcttgaaggcgaagtctttcgtttagcggggcatcccttcaatctcaactctcgcgaccaattggagaaagtgctctttgatgaattaggtttaacccctgtaggacgcacagagaagaccggcaaacgttccacttcgcaaagtgtcttggaagcacttcgtggtgctcacccgatcgtcgagttgattttgcagtaccgcgagctcagcaaactcaaatcaacctatcttgatccgttacctcgtcttgttcatccacgtacgggtcgtttacacacccgcttcaatcaaacggcgacagccaccgggcgcttgtcgtcgagtgacccgaacctccagaatattccagtgcgcacgccgttaggccaacgcattcgtaaagcgtttgttgcggaagaaggttggttattacttgcggccgattactcccagatcgaacttcgtgtattggcgcatctctctggcgacgagaatcttaaacgcgtgtttcgcgaaggcaaggatattcacactgaaaccgcagcctggatgttcgggcttgacccagccttagtggaccccaagatgcgtcgtgccgccaagaccgtcaactttggcgtactctatggtatgtcagcacatcgtcttagtcaggaattgggcattgactacaaagaagctgaagcgtttatcgagcgctatttccaatcctttccgaaagttcgcgcgtggattgaacgtaccctcgaagaaggtcgcactcgcggctatgtggaaacgttattcgggcgtcgtcgctacgttccagatcttgcatctcgtgtccgctcagtgcgcgaagctgctgagcgtatggccttcaatatgcctgttcagggaacagcggcggacctcatgaagatcgccatggtgaaattgtttccgcgcttgaaacccttaggagcccaccttcttttacaggtgcatgatgaattggtcttggaagtacccgaggatcgcgcagaagaagccaaagcactcgtgaaagaggttatggaaaacgcgtatccgttagatgttccgttggaggtcgaagtgggtgtaggccgtgattggcttgaagcgaaacaagac

SEQ ID NO: 124 - protein, 844 aa, synthetic construct
  REGION 1..844: note = DNA Polymerase Variant
MHHHHHHGGSGMLPLFDLEEPPKRVLLVDGHHLAYRTFYALSLTTSRGEPVQMVYGFARSLLKALKEDGQAVVVVFDAKAPSFRHEAYEAYKAGRAPTPEDFPRQLALVKRLVDLLGLVRLEAPGYEADDVLGTLAKKAEREGMEVCILTGDRDFFQLLSEKVSVLLPDGTLVTPKDVQEKYGVPPERWVDFRALTGDRSDNIPGVAGIGEKTALRLLAEWGSVENLLKNLDRVKPDSLRRKIEAHLEDLRLSLDLARIRTDLPLEVDFKALRRRTPDLEGLRAFLEELEFGSLLHEFGLLGGEKPREEAPWPPPEGAFVGFLLSRKEPMWAELLALAAAAEGRVHRATSPVEALADLKEARGFLAKDLAVLALREGVALDPTDDPLLVAYLLDPANTTPEGVARRYGGEFTEDAAERALLSERLFQTLFPRLSEKLLWLYQEVERPLSRVLAHMEARGVRLDVPLLEALSFELEKELERLEGEVFRLAGHPFNLNSRDQLEKVLFDELGLTPVGRTEKTGKRSTSQSVLEALRGAHPIVELILQYRELSKLKSTYLDPLPRLVHPRTGRLHTRFNQTATATGRLSSSDPNLQNIPVRTPLGQRIRKAFVAEEGWLLLAADYSQIELRVLAHLSGDENLKRVFREGKDIHTETAAWMFGLDPALVDPKMRRAAKTVNFGVLYGMSAHRLSQELGIDYKEAEAFIERYFQSFPKVRAWIERTLEEGRTRGYVETLFGRRRYVPDLASRVRSVREAAERMAFNMPVQGTAADLMKIAMVKLFPRLKPLGAHLLLQVHDELVLEVPEDRAEEAKALVKEVMENAYPLDVPLEVEVGVGRDWLEAKQD

SEQ ID NO: 125 - DNA, 2532 bp, synthetic construct
  misc_feature 1..2532: note = DNA Polymerase Variant
  source 1..2532: mol_type = other DNA
atgcaccatcatcatcatcatggcggtagcggcatgttaccgctgtttgatttggaagaaccaccaaaacgcgtgctgcttgttgacggccatcatctggcgtatcgtaccttctacgcactgagccttacgacctcacgtggtgagcctgtccagatggtgtatgggtttgctcgctccctgctgaaagccctgaaggaagatggtcaagccgtagtagtggttttcgatgcgaaagcaccgtcgtttcgtcacgaagcgtacgaggcctataaagctggccgcgcaccgaccccggaagactttccgcgtcagttagcgctcgtcaaacgcctcgtggatttgctgggattagttcgcttggaagctcctggctacgaggcggacgacgtgctcggtacactggccaagaaagcagaacgtgaaggcatggaggtctgcattcttaccggtgatcgcgatttcttccagctgctgtctgagaaagtgagcgttttgctgcccgatggcacgttagtaaccccgaaagatgtccaagagaaatatggagttccgccagaacgttgggtggactttcgcgcactgactggtgatcgttcagacaacatcccgggcgttgccgggattggtgaaaagacggcgctgcgcctgctggcagaatggggctcggtggaaaatctgctcaagaaccttgatcgtgtgaaacctgatagcttacgccgcaagatcgaagcccacctggaagacttgcgtctgagtctggatcttgcgcgtattcgcaccgatctgccgttggaagtagactttaaagctctgcgtcgtcgcacacccgatttagaggggttacgcgcgttcctcgaacgtctggagtttggctccctgctgcatgaattcggtttgttgggcggagagaaaccgcgtgaagaagcaccatggccgccgcccgaaggtgcctttgtcggctttcttctgtcacgcaaagagccaatgtgggcggaactgttagctcttgcagccgccgcggaagggcgtgttcaccgcgcgacctctcctgtcgaggccctcgctgacctcaaagaagcacgtggtttcttggcgaaagatttagccgtgcttgcattacgcgaaggcgttgcgctcgatccgacggacgacccgcttttggtggcttatttgctcgatcctgcgaataccactccggaaggtgtagcccgtcgttacggcggcgagtttactgaagatgcggcagaacgcgcgttgcttagcgaacgcctcttccagacgttatttccacgtctttcggagaaattactctggctctatcaggaagtcgaacgtccattgagtcgcgtgcttgcccatatggaggctcgcggtgtgcgcttagatgttccgttgttagaagcactcagcttcgagttggagaaagaaatggaacgtcttgaaggcgaagtctttcgtttagcggggcatcccttcaatctcaactctcgcgaccaattggagaaagtgctctttgatgaattaggtttaacccctatcggacgtacagagaagaccggcaaacgttccactgctcagggagcattggaagcacttcgtggtgctcacccgatcgtcgacttgattttgcagtaccgcgagctcactaaactcaaaaacacctatctggatccgttacctcgtcttgttcatccacgtacgggtcgtttacacacccgcttcaatcaaacggcgacagccaccgggcgcttgtcgtcgagtgacccgaacctccagaatattccagtgcgcacgccgttaggccaacgcattcgtaaagcgtttgttgcggaagaaggttggttattacttgcggccgattactcccagatcgaacttcgtgtattggcgcatctctctggcgacgagaatcttaaacgcgtgtttcgcgaaggcaaggatattcacactgaaaccgcagcctggatgttcgggcttgacccagccttagtggaccccaagatgcgtcgtgccgccaagaccgtcaactttggcgtactctatggtatgtcagcacatcgtcttagtcaggaattgggcattgactacaaagaagctgaagcgtttatcgagcgctatttccaatcctttccgaaagttcgcgcgtggattgaacgtaccctcgaagaaggtcgcactcgcggctatgtggaaacgttattcgggcgtcgtcgctacgttccagatcttgcatctcgtgtccgctcagtgcgcgaagctgctgagcgtatggccttcaatatgcctgttcagggaacagcggcggacctcatgaagatcgccatggtgaaattgtttccgcgcttgaaacccttaggagcccaccttcttttacaggtgcatgatgaattggtcttggaagtacccgaggatcgcgcagaagaagccaaagcactcgtgaaagaggttatggaaaacgcgtatccgttagatgttccgttggaggtcgaagtgggtgtaggccgtgattggcttgaagcgaaacaagac

SEQ ID NO: 126 - protein, 844 aa, synthetic construct
  REGION 1..844: note = DNA Polymerase Variant
MHHHHHHGGSGMLPLFDLEEPPKRVLLVDGHHLAYRTFYALSLTTSRGEPVQMVYGFARSLLKALKEDGQAVVVVFDAKAPSFRHEAYEAYKAGRAPTPEDFPRQLALVKRLVDLLGLVRLEAPGYEADDVLGTLAKKAEREGMEVCILTGDRDFFQLLSEKVSVLLPDGTLVTPKDVQEKYGVPPERWVDFRALTGDRSDNIPGVAGIGEKTALRLLAEWGSVENLLKNLDRVKPDSLRRKIEAHLEDLRLSLDLARIRTDLPLEVDFKALRRRTPDLEGLRAFLERLEFGSLLHEFGLLGGEKPREEAPWPPPEGAFVGFLLSRKEPMWAELLALAAAAEGRVHRATSPVEALADLKEARGFLAKDLAVLALREGVALDPTDDPLLVAYLLDPANTTPEGVARRYGGEFTEDAAERALLSERLFQTLFPRLSEKLLWLYQEVERPLSRVLAHMEARGVRLDVPLLEALSFELEKEMERLEGEVFRLAGHPFNLNSRDQLEKVLFDELGLTPIGRTEKTGKRSTAQGALEALRGAHPIVDLILQYRELTKLKNTYLDPLPRLVHPRTGRLHTRFNQTATATGRLSSSDPNLQNIPVRTPLGQRIRKAFVAEEGWLLLAADYSQIELRVLAHLSGDENLKRVFREGKDIHTETAAWMFGLDPALVDPKMRRAAKTVNFGVLYGMSAHRLSQELGIDYKEAEAFIERYFQSFPKVRAWIERTLEEGRTRGYVETLFGRRRYVPDLASRVRSVREAAERMAFNMPVQGTAADLMKIAMVKLFPRLKPLGAHLLLQVHDELVLEVPEDRAEEAKALVKEVMENAYPLDVPLEVEVGVGRDWLEAKQD

SEQ ID NO: 127 - DNA, 2532 bp, synthetic construct
  misc_feature 1..2532: note = DNA Polymerase Variant
  source 1..2532: mol_type = other DNA
atgcaccatcatcatcatcatggcggtagcggcatgttaccgctgtttgatttggaagaaccaccaaaacgcgtgctgcttgttgacggccatcatctggcgtatcgtaccttctacgcactgagccttacgacctcacgtggtgagcctgtccagatggtgtatgggtttgctcgctccctgctgaaagccctgaaggaagatggtcaagccgtagtagtggttttcgatgcgaaagcaccgtcgtttcgtcacgaagcgtacgaggcctataaagctggccgcgcaccgaccccggaagactttccgcgtcagttagcgctcgtcaaacgcctcgtggatttgctgggattagttcgcttggaagctcctggctacgaggcggacgacgtgctcggtacactggccaagaaagcagaacgtgaaggcatggaggtctgcattcttaccggtgatcgcgatttcttccagctgctgtctgagaaagtgagcgttttgctgcccgatggcacgttagtaaccccgaaagatgtccaagagaaatatggagttccgccagaacgttgggtggactttcgcgcactgactggtgatcgttcagacaacatcccgggcgttgccgggattggtgaaaagacggcgctgcgcctgctggcagaatggggctcggtggaaaatctgctcaagaaccttgatcgtgtgaaacctgatagcttacgccgcaagatcgaagcccacctggaagacttgcgtctgagtctggatcttgcgcgtattcgcaccgatctgccgttggaagtagactttaaagctctgcgtcgtcgcacacccgatttagaggggttacgcgcgttcctcgaacgtctggagtttggctccctgctgcatgaattcggtttgttgggcggagagaaaccgcgtgaagaagcaccatggccgccgcccgaaggtgcctttgtcggctttcttctgtcacgcaaagagccaatgtgggcggaactgttagctcttgcagccgccgcggaagggcgtgttcaccgcgcgacctctcctgtcgaggccctcgctgacctcaaagaagcacgtggtttcttggcgaaagatttagccgtgcttgcattacgcgaaggcgttgcgctcgatccgacggacgacccgcttttggtggcttatttgctcgatcctgcgaataccaatccggaaggtgtagcccgtcgttacggcggcgagtttactgaagatgcggcagaacgcgcgttgcttagcgaacgcctcttccagacgttatttccacgtctttcggagaaattactctggctctatcaggaagtcgaacgtccattgagtcgcgtgcttgcccatatggaggctcgcggtgtgcgcttagatgttccgttgttagaagcactcagcttcgagttggagaaagaaatggaacgtcttgaaggcgaagtctttcgtttagcggggcatcccttcaatctcaactctcgcgaccaattggagaaagtgctctttgatgaattaggtttaacccctgtaggacgcacagagaagaccggcaaacgttccactgctcagggagcattggaagcacttcgtggtgctcacccgatcgtcgacttgattttgcagtaccgcgagctcagcaaactcaaatcaacctatcttgatccgttacctcgtcttgttcatccacgtacgggtcgtttacacacccgcttcaatcaaacggcgacagccaccgggcgcttgtcgtcgagtgacccgaacctccagaatattccagtgcgcacgccgttaggccaacgcattcgtaaagcgtttgttgcggaagaaggttggttattacttgcggccgattactcccagatcgaacttcgtgtattggcgcatctctctggcgacgagaatcttaaacgcgtgtttcgcgaaggcaaggatattcacactgaaaccgcagcctggatgttcgggcttgacccagccttagtggaccccaagatgcgtcgtgccgccaagaccgtcaactttggcgtactctatggtatgtcagcacatcgtcttagtcaggaattgggcattgactacaaagaagctgaagcgtttatcgagcgctatttccaatcctttccgaaagttcgcgcgtggattgaacgtaccctcgaagaaggtcgcactcgcggctatgtggaaacgttattcgggcgtcgtcgctacgttccagatcttgcatctcgtgtccgctcagtgcgcgaagctgctgagcgtatggccttcaatatgcctgttcagggaacagcggcggacctcatgaagatcgccatggtgaaattgtttccgcgcttgaaacccttaggagcccaccttcttttacaggtgcatgatgaattggtcttggaagtacccgaggatcgcgcagaagaagccaaagcactcgtgaaagaggttatggaaaacgcgtatccgttagatgttccgttggaggtcgaagtgggtgtaggccgtgattggcttgaagcgaaacaagac

SEQ ID NO: 128 - protein, 844 aa, synthetic construct
  REGION 1..844: note = DNA Polymerase Variant
MHHHHHHGGSGMLPLFDLEEPPKRVLLVDGHHLAYRTFYALSLTTSRGEPVQMVYGFARSLLKALKEDGQAVVVVFDAKAPSFRHEAYEAYKAGRAPTPEDFPRQLALVKRLVDLLGLVRLEAPGYEADDVLGTLAKKAEREGMEVCILTGDRDFFQLLSEKVSVLLPDGTLVTPKDVQEKYGVPPERWVDFRALTGDRSDNIPGVAGIGEKTALRLLAEWGSVENLLKNLDRVKPDSLRRKIEAHLEDLRLSLDLARIRTDLPLEVDFKALRRRTPDLEGLRAFLERLEFGSLLHEFGLLGGEKPREEAPWPPPEGAFVGFLLSRKEPMWAELLALAAAAEGRVHRATSPVEALADLKEARGFLAKDLAVLALREGVALDPTDDPLLVAYLLDPANTNPEGVARRYGGEFTEDAAERALLSERLFQTLFPRLSEKLLWLYQEVERPLSRVLAHMEARGVRLDVPLLEALSFELEKEMERLEGEVFRLAGHPFNLNSRDQLEKVLFDELGLTPVGRTEKTGKRSTAQGALEALRGAHPIVDLILQYRELSKLKSTYLDPLPRLVHPRTGRLHTRFNQTATATGRLSSSDPNLQNIPVRTPLGQRIRKAFVAEEGWLLLAADYSQIELRVLAHLSGDENLKRVFREGKDIHTETAAWMFGLDPALVDPKMRRAAKTVNFGVLYGMSAHRLSQELGIDYKEAEAFIERYFQSFPKVRAWIERTLEEGRTRGYVETLFGRRRYVPDLASRVRSVREAAERMAFNMPVQGTAADLMKIAMVKLFPRLKPLGAHLLLQVHDELVLEVPEDRAEEAKALVKEVMENAYPLDVPLEVEVGVGRDWLEAKQD

SEQ ID NO: 129 - DNA, 2532 bp, synthetic construct
  misc_feature 1..2532: note = DNA Polymerase Variant
  source 1..2532: mol_type = other DNA
atgcaccatcatcatcatcatggcggtagcggcatgttaccgctgtttgatttggaagaaccaccaaaacgcgtgctgcttgttgacggccatcatctggcgtatcgtaccttctacgcactgagccttacgacctcacgtggtgagcctgtccagatggtgtatgggtttgctcgctccctgctgaaagccctgaaggaagatggtcaagccgtagtagtggttttcgatgcgaaagcaccgtcgtttcgtcacgaagcgtacgaggcctataaagctggccgcgcaccgaccccggaagactttccgcgtcagttagcgctcgtcaaacgcctcgtggatttgctgggattagttcgcttggaagctcctggctacgaggcggacgacgtgctcggtacactggccaagaaagcagaacgtgaaggcatggaggtctgcattcttaccggtgatcgcgatttcttccagctgctgtctgagaaagtgagcgttttgctgcccgatggcacgttagtaaccccgaaagatgtccaagagaaatatggagttccgccagaacgttgggtggactttcgcgcactgactggtgatcgttcagacaacatcccgggcgttgccgggattggtgaaaagacggcgctgcgcctgctggcagaatggggctcggtggaaaatctgctcaagaaccttgatcgtgtgaaacctgatagcttacgccgcaagatcgaagcccacctggaagacttgcgtctgagtctggatcttgcgcgtattcgcaccgatctgccgttggaagtagactttaaagctctgcgtcgtcgcacacccgatttagaggggttacgcgcgttcctcgaacgtctggagtttggctccctgctgcatgaattcggtttgttgggcggagagaaaccgcgtgaagaagcaccatggccgccgcccgaaggtgcctttgtcggctttcttctgtcacgcaaagagccaatgtgggcggaactgttagctcttgcagccgccgcggaagggcgtgttcaccgcgcgacctctcctgtcgaggccctcgctgacctcaaagaagcacgtggtttcttggcgaaagatttagccgtgcttgcattacgcgaaggcgttgcgctcgatccgacggacgacccgcttttggtggcttatttgctcgatcctgcgaataccaatccggaaggtgtagcccgtcgttacggcggcgagtttactgaagatgcggcagaacgcgcgttgcttagcgaacgcctcttccagacgttatttccacgtctttcggagaaattactctggctctatcaggaagtcgaacgtccattgagtcgcgtgcttgcccatatggaggctcgcggtgtgcgcttagatgttccgttgttagaagcactcagcttcgagttggagaaagaaatcgaacgtcttgaaggcgaagtctttcgtttagcggggcatcccttcaatctcaactctcgcgaccaattggagaaagtgctctttgatgaattaggtttaacccctatcggacgtacagagaagaccggcaaacgttccactgctcagggagcattggaagcacttcgtggtgctcacccgatcgtcgagttgattttgcagtaccgcgagctcactaaactcaaaaacacctatattgatccgttacctcgtcttgttcatccacgtacgggtcgtttacacacccgcttcaatcaaacggcgacagccaccgggcgcttgtcgtcgagtgacccgaacctccagaatattccagtgcgcacgccgttaggccaacgcattcgtaaagcgtttgttgcggaagaaggttggttattacttgcggccgattactcccagatcgaacttcgtgtattggcgcatctctctggcgacgagaatcttaaacgcgtgtttcgcgaaggcaaggatattcacactgaaaccgcagcctggatgttcgggcttgacccagccttagtggaccccaagatgcgtcgtgccgccaagaccgtcaactttggcgtactctatggtatgtcagcacatcgtcttagtcaggaattgggcattgactacaaagaagctgaagcgtttatcgagcgctatttccaatcctttccgaaagttcgcgcgtggattgaacgtaccctcgaagaaggtcgcactcgcggctatgtggaaacgttattcgggcgtcgtcgctacgttccagatcttgcatctcgtgtccgctcagtgcgcgaagctgctgagcgtatggccttcaatatgcctgttcagggaacagcggcggacctcatgaagatcgccatggtgaaattgtttccgcgcttgaaacccttaggagcccaccttcttttacaggtgcatgatgaattggtcttggaagtacccgaggatcgcgcagaagaagccaaagcactcgtgaaagaggttatggaaaacgcgtatccgttagatgttccgttggaggtcgaagtgggtgtaggccgtgattggcttgaagcgaaacaagac

SEQ ID NO: 130 - protein, 844 aa, synthetic construct
  REGION 1..844: note = DNA Polymerase Variant
MHHHHHHGGSGMLPLFDLEEPPKRVLLVDGHHLAYRTFYALSLTTSRGEPVQMVYGFARSLLKALKEDGQAVVVVFDAKAPSFRHEAYEAYKAGRAPTPEDFPRQLALVKRLVDLLGLVRLEAPGYEADDVLGTLAKKAEREGMEVCILTGDRDFFQLLSEKVSVLLPDGTLVTPKDVQEKYGVPPERWVDFRALTGDRSDNIPGVAGIGEKTALRLLAEWGSVENLLKNLDRVKPDSLRRKIEAHLEDLRLSLDLARIRTDLPLEVDFKALRRRTPDLEGLRAFLERLEFGSLLHEFGLLGGEKPREEAPWPPPEGAFVGFLLSRKEPMWAELLALAAAAEGRVHRATSPVEALADLKEARGFLAKDLAVLALREGVALDPTDDPLLVAYLLDPANTNPEGVARRYGGEFTEDAAERALLSERLFQTLFPRLSEKLLWLYQEVERPLSRVLAHMEARGVRLDVPLLEALSFELEKEIERLEGEVFRLAGHPFNLNSRDQLEKVLFDELGLTPIGRTEKTGKRSTAQGALEALRGAHPIVELILQYRELTKLKNTYIDPLPRLVHPRTGRLHTRFNQTATATGRLSSSDPNLQNIPVRTPLGQRIRKAFVAEEGWLLLAADYSQIELRVLAHLSGDENLKRVFREGKDIHTETAAWMFGLDPALVDPKMRRAAKTVNFGVLYGMSAHRLSQELGIDYKEAEAFIERYFQSFPKVRAWIERTLEEGRTRGYVETLFGRRRYVPDLASRVRSVREAAERMAFNMPVQGTAADLMKIAMVKLFPRLKPLGAHLLLQVHDELVLEVPEDRAEEAKALVKEVMENAYPLDVPLEVEVGVGRDWLEAKQD

SEQ ID NO: 131 - DNA, 2532 bp, synthetic construct
  misc_feature 1..2532: note = DNA Polymerase Variant
  source 1..2532: mol_type = other DNA
atgcaccatcatcatcatcatggcggtagcggcatgttaccgctgtttgatttggaagaaccaccaaaacgcgtgctgcttgttgacggccatcatctggcgtatcgtaccttctacgcactgagccttacgacctcacgtggtgagcctgtccagatggtgtatgggtttgctcgctccctgctgaaagccctgaaggaagatggtcaagccgtagtagtggttttcgatgcgaaagcaccgtcgtttcgtcacgaagcgtacgaggcctataaagctggccgcgcaccgaccccggaagactttccgcgtcagttagcgctcgtcaaacgcctcgtggatttgctgggattagttcgcttggaagctcctggctacgaggcggacgacgtgctcggtacactggccaagaaagcagaacgtgaaggcatggaggtctgcattcttaccggtgatcgcgatttcttccagctgctgtctgagaaagtgagcgttttgctgcccgatggcacgttagtaaccccgaaagatgtccaagagaaatatggagttccgccagaacgttgggtggactttcgcgcactgactggtgatcgttcagacaacatcccgggcgttgccgggattggtgaaaagacggcgctgcgcctgctggcagaatggggctcggtggaaaatctgctcaagaaccttgatcgtgtgaaacctgatagcttacgccgcaagatcgaagcccacctggaagacttgcgtctgagtctggatcttgcgcgtattcgcaccgatctgccgttggaagtagactttaaagctctgcgtcgtcgcacacccgatttagaggggttacgcgcgttcctcgaacgtctggagtttggctccctgctgcatgaattcggtttgttgggcggagagaaaccgcgtgaagaagcaccatggccgccgcccgaaggtgcctttgtcggctttcttctgtcacgcaaagagccaatgtgggcggaactgttagctcttgcagccgccgcggaagggcgtgttcaccgcgcgacctctcctgtcgaggccctcgctgacctcaaagaagcacgtggtttcttggcgaaagatttagccgtgcttgcattacgcgaaggcgttgcgctcgatccgacggacgacccgcttttggtggcttatttgctcgatcctgcgaataccactccggaaggtgtagcccgtcgttacggcggcgagtttactgaagatgcggcagaacgcgcgttgcttagcgaacgcctcttccagacgttatttccacgtctttcggagaaattactctggctctatcaggaagtcgaacgtccattgagtcgcgtgcttgcccatatggaggctcgcggtgtgcgcttagatgttccgttgttagaagcactcagcttcgagttggagaaagaactggaacgtcttgaaggcgaagtctttcgtttagcggggcatcccttcaatctcaactctcgcgaccaattggagaaagtgctctttgatgaattaggtttaacccctgtcggaaaaacagagaagaccggcaaacgttccactgctcagggagcattggaagcacttcgtggtgctcacccgatcgtcgaattgattttgcagtaccgcgagctcagcaaactcaaatcaacctatcttgatccgttacctcgtcttgttcatccacgtacgggtcgtttacacacccgcttcaatcaaacggcgacagccaccgggcgcttgtcgtcgagtgacccgaacctccagaatattccagtgcgcacgccgttaggccaacgcattcgtaaagcgtttgttgcggaagaaggttggttattacttgcggccgattactcccagatcgaacttcgtgtattggcgcatctctctggcgacgagaatcttaaacgcgtgtttcgcgaaggcaaggatattcacactgaaaccgcagcctggatgttcgggcttgacccagccttagtggaccccaagatgcgtcgtgccgccaagaccgtcaactttggcgtactctatggtatgtcagcacatcgtcttagtcaggaattgggcattgactacaaagaagctgaagcgtttatcgagcgctatttccaatcctttccgaaagttcgcgcgtggattgaacgtaccctcgaagaaggtcgcactcgcggctatgtggaaacgttattcgggcgtcgtcgctacgttccagatcttgcatctcgtgtccgctcagtgcgcgaagctgctgagcgtatggccttcaatatgcctgttcagggaacagcggcggacctcatgaagatcgccatggtgaaattgtttccgcgcttgaaacccttaggagcccaccttcttttacaggtgcatgatgaattggtcttggaagtacccgaggatcgcgcagaagaagccaaagcactcgtgaaagaggttatggaaaacgcgtatccgttagatgttccgttggaggtcgaagtgggtgtaggccgtgattggcttgaagcgaaacaagac

SEQ ID NO: 132 - protein, 844 aa, synthetic construct
  REGION 1..844: note = DNA Polymerase Variant
MHHHHHHGGSGMLPLFDLEEPPKRVLLVDGHHLAYRTFYALSLTTSRGEPVQMVYGFARSLLKALKEDGQAVVVVFDAKAPSFRHEAYEAYKAGRAPTPEDFPRQLALVKRLVDLLGLVRLEAPGYEADDVLGTLAKKAEREGMEVCILTGDRDFFQLLSEKVSVLLPDGTLVTPKDVQEKYGVPPERWVDFRALTGDRSDNIPGVAGIGEKTALRLLAEWGSVENLLKNLDRVKPDSLRRKIEAHLEDLRLSLDLARIRTDLPLEVDFKALRRRTPDLEGLRAFLERLEFGSLLHEFGLLGGEKPREEAPWPPPEGAFVGFLLSRKEPMWAELLALAAAAEGRVHRATSPVEALADLKEARGFLAKDLAVLALREGVALDPTDDPLLVAYLLDPANTTPEGVARRYGGEFTEDAAERALLSERLFQTLFPRLSEKLLWLYQEVERPLSRVLAHMEARGVRLDVPLLEALSFELEKELERLEGEVFRLAGHPFNLNSRDQLEKVLFDELGLTPVGKTEKTGKRSTAQGALEALRGAHPIVELILQYRELSKLKSTYLDPLPRLVHPRTGRLHTRFNQTATATGRLSSSDPNLQNIPVRTPLGQRIRKAFVAEEGWLLLAADYSQIELRVLAHLSGDENLKRVFREGKDIHTETAAWMFGLDPALVDPKMRRAAKTVNFGVLYGMSAHRLSQELGIDYKEAEAFIERYFQSFPKVRAWIERTLEEGRTRGYVETLFGRRRYVPDLASRVRSVREAAERMAFNMPVQGTAADLMKIAMVKLFPRLKPLGAHLLLQVHDELVLEVPEDRAEEAKALVKEVMENAYPLDVPLEVEVGVGRDWLEAKQD

SEQ ID NO: 133 - DNA, 2532 bp, synthetic construct
  misc_feature 1..2532: note = DNA Polymerase Variant
  source 1..2532: mol_type = other DNA
atgcaccatcatcatcatcatggcggtagcggcatgttaccgctgtttgatttggaagaaccaccaaaacgcgtgctgcttgttgacggccatcatctggcgtatcgtaccttctacgcactgagccttacgacctcacgtggtgagcctgtccagatggtgtatgggtttgctcgctccctgctgaaagccctgaaggaagatggtcaagccgtagtagtggttttcgatgcgaaagcaccgtcgtttcgtcacgaagcgtacgaggcctataaagctggccgcgcaccgaccccggaagactttccgcgtcagttagcgctcgtcaaacgcctcgtggatttgctgggattagttcgcttggaagctcctggctacgaggcggacgacgtgctcggtacactggccaagaaagcagaacgtgaaggcatggaggtctgcattcttaccggtgatcgcgatttcttccagctgctgtctgagaaagtgagcgttttgctgcccgatggcacgttagtaaccccgaaagatgtccaagagaaatatggagttccgccagaacgttgggtggactttcgcgcactgactggtgatcgttcagacaacatcccgggcgttgccgggattggtgaaaagacggcgctgcgcctgctggcagaatggggctcggtggaaaatctgctcaagaaccttgatcgtgtgaaacctgatagcttacgccgcaagatcgaagcccacctggaagacttgcgtctgagtctggatcttgcgcgtattcgcaccgatctgccgttggaagtagactttaaagctctgcgtcgtcgcacacccgatttagaggggttacgcgcgttcctcgaagaactggagtttggctccctgctgcatgaattcggtttgttgggcggagagaaaccgcgtgaagaagcaccatggccgccgcccgaaggtgcctttgtcggctttcttctgtcacgcaaagagccaatgtgggcggaactgttagctcttgcagccgccgcggaagggcgtgttcaccgcgcgacctctcctgtcgaggccctcgctgacctcaaagaagcacgtggtttcttggcgaaagatttagccgtgcttgcattacgcgaaggcgttgcgctcgatccgacggacgacccgcttttggtggcttatttgctcgatcctgcgaataccaatccggaaggtgtagcccgtcgttacggcggcgagtttactgaagatgcggcagaacgcgcgttgcttagcgaacgcctcttccagacgttatttccacgtctttcggagaaattactctggctctatcaggaagtcgaacgtccattgagtcgcgtgcttgcccatatggaggctcgcggtgtgcgcttagatgttccgttgttagaagcactcagcttcgagttggagaaagaaatggaacgtcttgaaggcgaagtctttcgtttagcggggcatcccttcaatctcaactctcgcgaccaattggagaaagtgctctttgatgaattaggtttaacccctgtcggacgtacagagaagaccggcaaacgttccactgctcagggagcattggaagcacttcgtggtgctcacccgatcgtcgagttgattttgcagtaccgcgagctcactaaactcaaaaacacctatttggatccgttacctcgtcttgttcatccacgtacgggtcgtttacacacccgcttcaatcaaacggcgacagccaccgggcgcttgtcgtcgagtgacccgaacctccagaatattccagtgcgcacgccgttaggccaacgcattcgtaaagcgtttgttgcggaagaaggttggttattacttgcggccgattactcccagatcgaacttcgtgtattggcgcatctctctggcgacgagaatcttaaacgcgtgtttcgcgaaggcaaggatattcacactgaaaccgcagcctggatgttcgggcttgacccagccttagtggaccccaagatgcgtcgtgccgccaagaccgtcaactttggcgtactctatggtatgtcagcacatcgtcttagtcaggaattgggcattgactacaaagaagctgaagcgtttatcgagcgctatttccaatcctttccgaaagttcgcgcgtggattgaacgtaccctcgaagaaggtcgcactcgcggctatgtggaaacgttattcgggcgtcgtcgctacgttccagatcttgcatctcgtgtccgctcagtgcgcgaagctgctgagcgtatggccttcaatatgcctgttcagggaacagcggcggacctcatgaagatcgccatggtgaaattgtttccgcgcttgaaacccttaggagcccaccttcttttacaggtgcatgatgaattggtcttggaagtacccgaggatcgcgcagaagaagccaaagcactcgtgaaagaggttatggaaaacgcgtatccgttagatgttccgttggaggtcgaagtgggtgtaggccgtgattggcttgaagcgaaacaagac

SEQ ID NO: 134 - protein, 844 aa, synthetic construct
  REGION 1..844: note = DNA Polymerase Variant
MHHHHHHGGSGMLPLFDLEEPPKRVLLVDGHHLAYRTFYALSLTTSRGEPVQMVYGFARSLLKALKEDGQAVVVVFDAKAPSFRHEAYEAYKAGRAPTPEDFPRQLALVKRLVDLLGLVRLEAPGYEADDVLGTLAKKAEREGMEVCILTGDRDFFQLLSEKVSVLLPDGTLVTPKDVQEKYGVPPERWVDFRALTGDRSDNIPGVAGIGEKTALRLLAEWGSVENLLKNLDRVKPDSLRRKIEAHLEDLRLSLDLARIRTDLPLEVDFKALRRRTPDLEGLRAFLEELEFGSLLHEFGLLGGEKPREEAPWPPPEGAFVGFLLSRKEPMWAELLALAAAAEGRVHRATSPVEALADLKEARGFLAKDLAVLALREGVALDPTDDPLLVAYLLDPANTNPEGVARRYGGEFTEDAAERALLSERLFQTLFPRLSEKLLWLYQEVERPLSRVLAHMEARGVRLDVPLLEALSFELEKEMERLEGEVFRLAGHPFNLNSRDQLEKVLFDELGLTPVGRTEKTGKRSTAQGALEALRGAHPIVELILQYRELTKLKNTYLDPLPRLVHPRTGRLHTRFNQTATATGRLSSSDPNLQNIPVRTPLGQRIRKAFVAEEGWLLLAADYSQIELRVLAHLSGDENLKRVFREGKDIHTETAAWMFGLDPALVDPKMRRAAKTVNFGVLYGMSAHRLSQELGIDYKEAEAFIERYFQSFPKVRAWIERTLEEGRTRGYVETLFGRRRYVPDLASRVRSVREAAERMAFNMPVQGTAADLMKIAMVKLFPRLKPLGAHLLLQVHDELVLEVPEDRAEEAKALVKEVMENAYPLDVPLEVEVGVGRDWLEAKQD

SEQ ID NO: 135 - DNA, 2532 bp, synthetic construct
  misc_feature 1..2532: note = DNA Polymerase Variant
  source 1..2532: mol_type = other DNA
atgcaccatcatcatcatcatggcggtagcggcatgttaccgctgtttgatttggaagaaccaccaaaacgcgtgctgcttgttgacggccatcatctggcgtatcgtaccttctacgcactgagccttacgacctcacgtggtgagcctgtccagatggtgtatgggtttgctcgctccctgctgaaagccctgaaggaagatggtcaagccgtagtagtggttttcgatgcgaaagcaccgtcgtttcgtcacgaagcgtacgaggcctataaagctggccgcgcaccgaccccggaagactttccgcgtcagttagcgctcgtcaaacgcctcgtggatttgctgggattagttcgcttggaagctcctggctacgaggcggacgacgtgctcggtacactggccaagaaagcagaacgtgaaggcatggaggtctgcattcttaccggtgatcgcgatttcttccagctgctgtctgagaaagtgagcgttttgctgcccgatggcacgttagtaaccccgaaagatgtccaagagaaatatggagttccgccagaacgttgggtggactttcgcgcactgactggtgatcgttcagacaacatcccgggcgttgccgggattggtgaaaagacggcgctgcgcctgctggcagaatggggctcggtggaaaatctgctcaagaaccttgatcgtgtgaaacctgatagcttacgccgcaagatcgaagcccacctggaagacttgcgtctgagtctggatcttgcgcgtattcgcaccgatctgccgttggaagtagactttaaagctctgcgtcgtcgcacacccgatttagaggggttacgcgcgttcctcgaagaactggagtttggctccctgctgcatgaattcggtttgttgggcggagagaaaccgcgtgaagaagcaccatggccgccgcccgaaggtgcctttgtcggctttcttctgtcacgcaaagagccaatgtgggcggaactgttagctcttgcagccgccgcggaagggcgtgttcaccgcgcgacctctcctgtcgaggccctcgctgacctcaaagaagcacgtggtttcttggcgaaagatttagccgtgcttgcattacgcgaaggcgttgcgctcgatccgacggacgacccgcttttggtggcttatttgctcgatcctgcgaataccaacccggaaggtgtagcccgtcgttacggcggcgagtttactgaagatgcggcagaacgcgcgttgcttagcgaacgcctcttccagacgttatttccacgtctttcggagaaattactctggctctatcaggaagtcgaacgtccattgagtcgcgtgcttgcccatatggaggctcgcggtgtgcgcttagatgttccgttgttagaagcactcagcttcgagttggagaaagaaatggaacgtcttgaaggcgaagtctttcgtttagcggggcatcccttcaatctcaactctcgcgaccaattggagaaagtgctctttgatgaattaggtttaacccctgtaggacgcacagagaagaccggcaaacgttccacttcgcaaggcgtcttggaagcacttcgtggtgctcacccgatcgtcgagttgattttgcagtaccgcgagctcagtaaactcaaaggcacctatattgatccgttacctcgtcttgttcatccacgtacgggtcgtttacacacccgcttcaatcaaacggcgacagccaccgggcgcttgtcgtcgagtgacccgaacctccagaatattccagtgcgcacgccgttaggccaacgcattcgtaaagcgtttgttgcggaagaaggttggttattacttgcggccgattactcccagatcgaacttcgtgtattggcgcatctctctggcgacgagaatcttaaacgcgtgtttcgcgaaggcaaggatattcacactgaaaccgcagcctggatgttcgggcttgacccagccttagtggaccccaagatgcgtcgtgccgccaagaccgtcaactttggcgtactctatggtatgtcagcacatcgtcttagtcaggaattgggcattgactacaaagaagctgaagcgtttatcgagcgctatttccaatcctttccgaaagttcgcgcgtggattgaacgtaccctcgaagaaggtcgcactcgcggctatgtggaaacgttattcgggcgtcgtcgctacgttccagatcttgcatctcgtgtccgctcagtgcgcgaagctgctgagcgtatggccttcaatatgcctgttcagggaacagcggcggacctcatgaagatcgccatggtgaaattgtttccgcgcttgaaacccttaggagcccaccttcttttacaggtgcatgatgaattggtcttggaagtacccgaggatcgcgcagaagaagccaaagcactcgtgaaagaggttatggaaaacgcgtatccgttagatgttccgttggaggtcgaagtgggtgtaggccgtgattggcttgaagcgaaacaagac

SEQ ID NO: 136 - protein, 844 aa, synthetic construct
  REGION 1..844: note = DNA Polymerase Variant
MHHHHHHGGSGMLPLFDLEEPPKRVLLVDGHHLAYRTFYALSLTTSRGEPVQMVYGFARSLLKALKEDGQAVVVVFDAKAPSFRHEAYEAYKAGRAPTPEDFPRQLALVKRLVDLLGLVRLEAPGYEADDVLGTLAKKAEREGMEVCILTGDRDFFQLLSEKVSVLLPDGTLVTPKDVQEKYGVPPERWVDFRALTGDRSDNIPGVAGIGEKTALRLLAEWGSVENLLKNLDRVKPDSLRRKIEAHLEDLRLSLDLARIRTDLPLEVDFKALRRRTPDLEGLRAFLEELEFGSLLHEFGLLGGEKPREEAPWPPPEGAFVGFLLSRKEPMWAELLALAAAAEGRVHRATSPVEALADLKEARGFLAKDLAVLALREGVALDPTDDPLLVAYLLDPANTNPEGVARRYGGEFTEDAAERALLSERLFQTLFPRLSEKLLWLYQEVERPLSRVLAHMEARGVRLDVPLLEALSFELEKEMERLEGEVFRLAGHPFNLNSRDQLEKVLFDELGLTPVGRTEKTGKRSTSQGVLEALRGAHPIVELILQYRELSKLKGTYIDPLPRLVHPRTGRLHTRFNQTATATGRLSSSDPNLQNIPVRTPLGQRIRKAFVAEEGWLLLAADYSQIELRVLAHLSGDENLKRVFREGKDIHTETAAWMFGLDPALVDPKMRRAAKTVNFGVLYGMSAHRLSQELGIDYKEAEAFIERYFQSFPKVRAWIERTLEEGRTRGYVETLFGRRRYVPDLASRVRSVREAAERMAFNMPVQGTAADLMKIAMVKLFPRLKPLGAHLLLQVHDELVLEVPEDRAEEAKALVKEVMENAYPLDVPLEVEVGVGRDWLEAKQD

SEQ ID NO: 137 - DNA, 2532 bp, synthetic construct
  misc_feature 1..2532: note = DNA Polymerase Variant
  source 1..2532: mol_type = other DNA
atgcaccatcatcatcatcatggcggtagcggcatgttaccgctgtttgatttggaagaaccaccaaaacgcgtgctgcttgttgacggccatcatctggcgtatcgtaccttctacgcactgagccttacgacctcacgtggtgagcctgtccagatggtgtatgggtttgctcgctccctgctgaaagccctgaaggaagatggtcaagccgtagtagtggttttcgatgcgaaagcaccgtcgtttcgtcacgaagcgtacgaggcctataaagctggccgcgcaccgaccccggaagactttccgcgtcagttagcgctcgtcaaacgcctcgtggatttgctgggattagttcgcttggaagctcctggctacgaggcggacgacgtgctcggtacactggccaagaaagcagaacgtgaaggcatggaggtctgcattcttaccggtgatcgcgatttcttccagctgctgtctgagaaagtgagcgttttgctgcccgatggcacgttagtaaccccgaaagatgtccaagagaaatatggagttccgccagaacgttgggtggactttcgcgcactgactggtgatcgttcagacaacatcccgggcgttgccgggattggtgaaaagacggcgctgcgcctgctggcagaatggggctcggtggaaaatctgctcaagaaccttgatcgtgtgaaacctgatagcttacgccgcaagatcgaagcccacctggaagacttgcgtctgagtctggatcttgcgcgtattcgcaccgatctgccgttggaagtagactttaaagctctgcgtcgtcgcacacccgatttagaggggttacgcgcgttcctcgaacgtctggagtttggctccctgctgcatgaattcggtttgttgggcggagagaaaccgcgtgaagaagcaccatggccgccgcccgaaggtgcctttgtcggctttcttctgtcacgcaaagagccaatgtgggcggaactgttagctcttgcagccgccgcggaagggcgtgttcaccgcgcgacctctcctgtcgaggccctcgctgacctcaaagaagcacgtggtttcttggcgaaagatttagccgtgcttgcattacgcgaaggcgttgcgctcgatccgacggacgacccgcttttggtggcttatttgctcgatcctgcgaataccaatccggaaggtgtagcccgtcgttacggcggcgagtttactgaagatgcggcagaacgcgcgttgcttagcgaacgcctcttccagacgttatttccacgtctttcggagaaattactctggctctatcaggaagtcgaacgtccattgagtcgcgtgcttgcccatatggaggctcgcggtgtgcgcttagatgttccgttgttagaagcactcagcttcgagttggagaaagaaatcgaacgtcttgaaggcgaagtctttcgtttagcggggcatcccttcaatctcaactctcgcgaccaattggagaaagtgctctttgatgaattaggtttaacccctgtcggacgtacagagaagaccggcaaacgttccactgctcagggagcattggaagcacttcgtggtgctcacccgatcgtcgaattgattttgcagtaccgcgagctcagtaaactcaaaagcacctatattgatccgttacctcgtcttgttcatccacgtacgggtcgtttacacacccgcttcaatcaaacggcgacagccaccgggcgcttgtcgtcgagtgacccgaacctccagaatattccagtgcgcacgccgttaggccaacgcattcgtaaagcgtttgttgcggaagaaggttggttattacttgcggccgattactcccagatcgaacttcgtgtattggcgcatctctctggcgacgagaatcttaaacgcgtgtttcgcgaaggcaaggatattcacactgaaaccgcagcctggatgttcgggcttgacccagccttagtggaccccaagatgcgtcgtgccgccaagaccgtcaactttggcgtactctatggtatgtcagcacatcgtcttagtcaggaattgggcattgactacaaagaagctgaagcgtttatcgagcgctatttccaatcctttccgaaagttcgcgcgtggattgaacgtaccctcgaagaaggtcgcactcgcggctatgtggaaacgttattcgggcgtcgtcgctacgttccagatcttgcatctcgtgtccgctcagtgcgcgaagctgctgagcgtatggccttcaatatgcctgttcagggaacagcggcggacctcatgaagatcgccatggtgaaattgtttccgcgcttgaaacccttaggagcccaccttcttttacaggtgcatgatgaattggtcttggaagtacccgaggatcgcgcagaagaagccaaagcactcgtgaaagaggttatggaaaacgcgtatccgttagatgttccgttggaggtcgaagtgggtgtaggccgtgattggcttgaagcgaaacaagac

SEQ ID NO: 138 - protein, 844 aa, synthetic construct
  REGION 1..844: note = DNA Polymerase Variant
MHHHHHHGGSGMLPLFDLEEPPKRVLLVDGHHLAYRTFYALSLTTSRGEPVQMVYGFARSLLKALKEDGQAVVVVFDAKAPSFRHEAYEAYKAGRAPTPEDFPRQLALVKRLVDLLGLVRLEAPGYEADDVLGTLAKKAEREGMEVCILTGDRDFFQLLSEKVSVLLPDGTLVTPKDVQEKYGVPPERWVDFRALTGDRSDNIPGVAGIGEKTALRLLAEWGSVENLLKNLDRVKPDSLRRKIEAHLEDLRLSLDLARIRTDLPLEVDFKALRRRTPDLEGLRAFLERLEFGSLLHEFGLLGGEKPREEAPWPPPEGAFVGFLLSRKEPMWAELLALAAAAEGRVHRATSPVEALADLKEARGFLAKDLAVLALREGVALDPTDDPLLVAYLLDPANTNPEGVARRYGGEFTEDAAERALLSERLFQTLFPRLSEKLLWLYQEVERPLSRVLAHMEARGVRLDVPLLEALSFELEKEIERLEGEVFRLAGHPFNLNSRDQLEKVLFDELGLTPVGRTEKTGKRSTAQGALEALRGAHPIVELILQYRELSKLKSTYIDPLPRLVHPRTGRLHTRFNQTATATGRLSSSDPNLQNIPVRTPLGQRIRKAFVAEEGWLLLAADYSQIELRVLAHLSGDENLKRVFREGKDIHTETAAWMFGLDPALVDPKMRRAAKTVNFGVLYGMSAHRLSQELGIDYKEAEAFIERYFQSFPKVRAWIERTLEEGRTRGYVETLFGRRRYVPDLASRVRSVREAAERMAFNMPVQGTAADLMKIAMVKLFPRLKPLGAHLLLQVHDELVLEVPEDRAEEAKALVKEVMENAYPLDVPLEVEVGVGRDWLEAKQD

SEQ ID NO: 139 - DNA, 2532 bp, synthetic construct
  misc_feature 1..2532: note = DNA Polymerase Variant
  source 1..2532: mol_type = other DNA
atgcaccatcatcatcatcatggcggtagcggcatgttaccgctgtttgatttggaagaaccaccaaaacgcgtgctgcttgttgacggccatcatctggcgtatcgtaccttctacgcactgagccttacgacctcacgtggtgagcctgtccagatggtgtatgggtttgctcgctccctgctgaaagccctgaaggaagatggtcaagccgtagtagtggttttcgatgcgaaagcaccgtcgtttcgtcacgaagcgtacgaggcctataaagctggccgcgcaccgaccccggaagactttccgcgtcagttagcgctcgtcaaacgcctcgtggatttgctgggattagttcgcttggaagctcctggctacgaggcggacgacgtgctcggtacactggccaagaaagcagaacgtgaaggcatggaggtctgcattcttaccggtgatcgcgatttcttccagctgctgtctgagaaagtgagcgttttgctgcccgatggcacgttagtaaccccgaaagatgtccaagagaaatatggagttccgccagaacgttgggtggactttcgcgcactgactggtgatcgttcagacaacatcccgggcgttgccgggattggtgaaaagacggcgctgcgcctgctggcagaatggggctcggtggaaaatctgctcaagaaccttgatcgtgtgaaacctgatagcttacgccgcaagatcgaagcccacctggaagacttgcgtctgagtctggatcttgcgcgtattcgcaccgatctgccgttggaagtagactttaaagctctgcgtcgtcgcacacccgatttagaggggttacgcgcgttcctcgaacgtctggagtttggctccctgctgcatgaattcggtttgttgggcggagagaaaccgcgtgaagaagcaccatggccgccgcccgaaggtgcctttgtcggctttcttctgtcacgcaaagagccaatgtgggcggaactgttagctcttgcagccgccgcggaagggcgtgttcaccgcgcgacctctcctgtcgaggccctcgctgacctcaaagaagcacgtggtttcttggcgaaagatttagccgtgcttgcattacgcgaaggcgttgcgctcgatccgacggacgacccgcttttggtggcttatttgctcgatcctgcgaataccaatccggaaggtgtagcccgtcgttacggcggcgagtttactgaagatgcggcagaacgcgcgttgcttagcgaacgcctcttccagacgttatttccacgtctttcggagaaattactctggctctatcaggaagtcgaacgtccattgagtcgcgtgcttgcccatatggaggctcgcggtgtgcgcttagatgttccgttgttagaagcactcagcttcgagttggagaaagaactggaacgtcttgaaggcgaagtctttcgtttagcggggcatcccttcaatctcaactctcgcgaccaattggagaaagtgctctttgatgaattaggtttaacccctatcggacgtacagagaagaccggcaaacgttccactgctcagggagcattggaagcacttcgtggtgctcacccgatcgtcgaattgattttgcagtaccgcgagctcactaaactcaaaaacacctatctggatccgttacctcgtcttgttcatccacgtacgggtcgtttacacacccgcttcaatcaaacggcgacagccaccgggcgcttgtcgtcgagtgacccgaacctccagaatattccagtgcgcacgccgttaggccaacgcattcgtaaagcgtttgttgcggaagaaggttggttattacttgcggccgattactcccagatcgaacttcgtgtattggcgcatctctctggcgacgagaatcttaaacgcgtgtttcgcgaaggcaaggatattcacactgaaaccgcagcctggatgttcgggcttgacccagccttagtggaccccaagatgcgtcgtgccgccaagaccgtcaactttggcgtactctatggtatgtcagcacatcgtcttagtcaggaattgggcattgactacaaagaagctgaagcgtttatcgagcgctatttccaatcctttccgaaagttcgcgcgtggattgaacgtaccctcgaagaaggtcgcactcgcggctatgtggaaacgttattcgggcgtcgtcgctacgttccagatcttgcatctcgtgtccgctcagtgcgcgaagctgctgagcgtatggccttcaatatgcctgttcagggaacagcggcggacctcatgaagatcgccatggtgaaattgtttccgcgcttgaaacccttaggagcccaccttcttttacaggtgcatgatgaattggtcttggaagtacccgaggatcgcgcagaagaagccaaagcactcgtgaaagaggttatggaaaacgcgtatccgttagatgttccgttggaggtcgaagtgggtgtaggccgtgattggcttgaagcgaaacaagac

SEQ ID NO: 140 - protein, 844 aa, synthetic construct
  REGION 1..844: note = DNA Polymerase Variant
MHHHHHHGGSGMLPLFDLEEPPKRVLLVDGHHLAYRTFYALSLTTSRGEPVQMVYGFARSLLKALKEDGQAVVVVFDAKAPSFRHEAYEAYKAGRAPTPEDFPRQLALVKRLVDLLGLVRLEAPGYEADDVLGTLAKKAEREGMEVCILTGDRDFFQLLSEKVSVLLPDGTLVTPKDVQEKYGVPPERWVDFRALTGDRSDNIPGVAGIGEKTALRLLAEWGSVENLLKNLDRVKPDSLRRKIEAHLEDLRLSLDLARIRTDLPLEVDFKALRRRTPDLEGLRAFLERLEFGSLLHEFGLLGGEKPREEAPWPPPEGAFVGFLLSRKEPMWAELLALAAAAEGRVHRATSPVEALADLKEARGFLAKDLAVLALREGVALDPTDDPLLVAYLLDPANTNPEGVARRYGGEFTEDAAERALLSERLFQTLFPRLSEKLLWLYQEVERPLSRVLAHMEARGVRLDVPLLEALSFELEKELERLEGEVFRLAGHPFNLNSRDQLEKVLFDELGLTPIGRTEKTGKRSTAQGALEALRGAHPIVELILQYRELTKLKNTYLDPLPRLVHPRTGRLHTRFNQTATATGRLSSSDPNLQNIPVRTPLGQRIRKAFVAEEGWLLLAADYSQIELRVLAHLSGDENLKRVFREGKDIHTETAAWMFGLDPALVDPKMRRAAKTVNFGVLYGMSAHRLSQELGIDYKEAEAFIERYFQSFPKVRAWIERTLEEGRTRGYVETLFGRRRYVPDLASRVRSVREAAERMAFNMPVQGTAADLMKIAMVKLFPRLKPLGAHLLLQVHDELVLEVPEDRAEEAKALVKEVMENAYPLDVPLEVEVGVGRDWLEAKQD

SEQ ID NO: 141 - DNA, 2532 bp, synthetic construct
  misc_feature 1..2532: note = DNA Polymerase Variant
  source 1..2532: mol_type = other DNA
atgcaccatcatcatcatcatggcggtagcggcatgttaccgctgtttgatttggaagaaccaccaaaacgcgtgctgcttgttgacggccatcatctggcgtatcgtaccttctacgcactgagccttacgacctcacgtggtgagcctgtccagatggtgtatgggtttgctcgctccctgctgaaagccctgaaggaagatggtcaagccgtagtagtggttttcgatgcgaaagcaccgtcgtttcgtcacgaagcgtacgaggcctataaagctggccgcgcaccgaccccggaagactttccgcgtcagttagcgctcgtcaaacgcctcgtggatttgctgggattagttcgcttggaagctcctggctacgaggcggacgacgtgctcggtacactggccaagaaagcagaacgtgaaggcatggaggtctgcattcttaccggtgatcgcgatttcttccagctgctgtctgagaaagtgagcgttttgctgcccgatggcacgttagtaaccccgaaagatgtccaagagaaatatggagttccgccagaacgttgggtggactttcgcgcactgactggtgatcgttcagacaacatcccgggcgttgccgggattggtgaaaagacggcgctgcgcctgctggcagaatggggctcggtggaaaatctgctcaagaaccttgatcgtgtgaaacctgatagcttacgccgcaagatcgaagcccacctggaagacttgcgtctgagtctggatcttgcgcgtattcgcaccgatctgccgttggaagtagactttaaagctctgcgtcgtcgcacacccgatttagaggggttacgcgcgttcctcgaagaactggagtttggctccctgctgcatgaattcggtttgttgggcggagagaaaccgcgtgaagaagcaccatggccgccgcccgaaggtgcctttgtcggctttcttctgtcacgcaaagagccaatgtgggcggaactgttagctcttgcagccgccgcggaagggcgtgttcaccgcgcgacctctcctgtcgaggccctcgctgacctcaaagaagcacgtggtttcttggcgaaagatttagccgtgcttgcattacgcgaaggcgttgcgctcgatccgacggacgacccgcttttggtggcttatttgctcgatcctgcgaataccaacccggaaggtgtagcccgtcgttacggcggcgagtttactgaagatgcggcagaacgcgcgttgcttagcgaacgcctcttccagacgttatttccacgtctttcggagaaattactctggctctatcaggaagtcgaacgtccattgagtcgcgtgcttgcccatatggaggctcgcggtgtgcgcttagatgttccgttgttagaagcactcagcttcgagttggagaaagaactggaacgtcttgaaggcgaagtctttcgtttagcggggcatcccttcaatctcaactctcgcgaccaattggagaaagtgctctttgatgaattaggtttaacccctgtcggacgtacagagaagaccggcaaacgttccactgctcagggagcattggaagcacttcgtggtgctcacccgatcgtcgacttgattttgcagtaccgcgagctcactaaactcaaaaacacctatctggatccgttacctcgtcttgttcatccacgtacgggtcgtttacacacccgcttcaatcaaacggcgacagccaccgggcgcttgtcgtcgagtgacccgaacctccagaatattccagtgcgcacgccgttaggccaacgcattcgtaaagcgtttgttgcggaagaaggttggttattacttgcggccgattactcccagatcgaacttcgtgtattggcgcatctctctggcgacgagaatcttaaacgcgtgtttcgcgaaggcaaggatattcacactgaaaccgcagcctggatgttcgggcttgacccagccttagtggaccccaagatgcgtcgtgccgccaagaccgtcaactttggcgtactctatggtatgtcagcacatcgtcttagtcaggaattgggcattgactacaaagaagctgaagcgtttatcgagcgctatttccaatcctttccgaaagttcgcgcgtggattgaacgtaccctcgaagaaggtcgcactcgcggctatgtggaaacgttattcgggcgtcgtcgctacgttccagatcttgcatctcgtgtccgctcagtgcgcgaagctgctgagcgtatggccttcaatatgcctgttcagggaacagcggcggacctcatgaagatcgccatggtgaaattgtttccgcgcttgaaacccttaggagcccaccttcttttacaggtgcatgatgaattggtcttggaagtacccgaggatcgcgcagaagaagccaaagcactcgtgaaagaggttatggaaaacgcgtatccgttagatgttccgttggaggtcgaagtgggtgtaggccgtgattggcttgaagcgaaacaagac

SEQ ID NO: 142 - protein, 844 aa, synthetic construct
  REGION 1..844: note = DNA Polymerase Variant
MHHHHHHGGSGMLPLFDLEEPPKRVLLVDGHHLAYRTFYALSLTTSRGEPVQMVYGFARSLLKALKEDGQAVVVVFDAKAPSFRHEAYEAYKAGRAPTPEDFPRQLALVKRLVDLLGLVRLEAPGYEADDVLGTLAKKAEREGMEVCILTGDRDFFQLLSEKVSVLLPDGTLVTPKDVQEKYGVPPERWVDFRALTGDRSDNIPGVAGIGEKTALRLLAEWGSVENLLKNLDRVKPDSLRRKIEAHLEDLRLSLDLARIRTDLPLEVDFKALRRRTPDLEGLRAFLEELEFGSLLHEFGLLGGEKPREEAPWPPPEGAFVGFLLSRKEPMWAELLALAAAAEGRVHRATSPVEALADLKEARGFLAKDLAVLALREGVALDPTDDPLLVAYLLDPANTNPEGVARRYGGEFTEDAAERALLSERLFQTLFPRLSEKLLWLYQEVERPLSRVLAHMEARGVRLDVPLLEALSFELEKELERLEGEVFRLAGHPFNLNSRDQLEKVLFDELGLTPVGRTEKTGKRSTAQGALEALRGAHPIVDLILQYRELTKLKNTYLDPLPRLVHPRTGRLHTRFNQTATATGRLSSSDPNLQNIPVRTPLGQRIRKAFVAEEGWLLLAADYSQIELRVLAHLSGDENLKRVFREGKDIHTETAAWMFGLDPALVDPKMRRAAKTVNFGVLYGMSAHRLSQELGIDYKEAEAFIERYFQSFPKVRAWIERTLEEGRTRGYVETLFGRRRYVPDLASRVRSVREAAERMAFNMPVQGTAADLMKIAMVKLFPRLKPLGAHLLLQVHDELVLEVPEDRAEEAKALVKEVMENAYPLDVPLEVEVGVGRDWLEAKQD

SEQ ID NO: 143 - DNA, 2532 bp, synthetic construct
  misc_feature 1..2532: note = DNA Polymerase Variant
  source 1..2532: mol_type = other DNA
atgcaccatcatcatcatcatggcggtagcggcatgttaccgctgtttgatttggaagaaccaccaaaacgcgtgctgcttgttgacggccatcatctggcgtatcgtaccttctacgcactgagccttacgacctcacgtggtgagcctgtccagatggtgtatgggtttgctcgctccctgctgaaagccctgaaggaagatggtcaagccgtagtagtggttttcgatgcgaaagcaccgtcgtttcgtcacgaagcgtacgaggcctataaagctggccgcgcaccgaccccggaagactttccgcgtcagttagcgctcgtcaaacgcctcgtggatttgctgggattagttcgcttggaagctcctggctacgaggcggacgacgtgctcggtacactggccaagaaagcagaacgtgaaggcatggaggtctgcattcttaccggtgatcgcgatttcttccagctgctgtctgagaaagtgagcgttttgctgcccgatggcacgttagtaaccccgaaagatgtccaagagaaatatggagttccgccagaacgttgggtggactttcgcgcactgactggtgatcgttcagacaacatcccgggcgttgccgggattggtgaaaagacggcgctgcgcctgctggcagaatggggctcggtggaaaatctgctcaagaaccttgatcgtgtgaaacctgatagcttacgccgcaagatcgaagcccacctggaagacttgcgtctgagtctggatcttgcgcgtattcgcaccgatctgccgttggaagtagactttaaagctctgcgtcgtcgcacacccgatttagaggggttacgcgcgttcctcgaagaactggagtttggctccctgctgcatgaattcggtttgttgggcggagagaaaccgcgtgaagaagcaccatggccgccgcccgaaggtgcctttgtcggctttcttctgtcacgcaaagagccaatgtgggcggaactgttagctcttgcagccgccgcggaagggcgtgttcaccgcgcgacctctcctgtcgaggccctcgctgacctcaaagaagcacgtggtttcttggcgaaagatttagccgtgcttgcattacgcgaaggcgttgcgctcgatccgacggacgacccgcttttggtggcttatttgctcgatcctgcgaataccaacccggaaggtgtagcccgtcgttacggcggcgagtttactgaagatgcggcagaacgcgcgttgcttagcgaacgcctcttccagacgttatttccacgtctttcggagaaattactctggctctatcaggaagtcgaacgtccattgagtcgcgtgcttgcccatatggaggctcgcggtgtgcgcttagatgttccgttgttagaagcactcagcttcgagttggagaaagaaatggaacgtcttgaaggcgaagtctttcgtttagcggggcatcccttcaatctcaactctcgcgaccaattggagaaagtgctctttgatgaattaggtttaacccctgtcggaaaaacagagaagaccggcaaacgttccacttcgcaaagtgccttggaagcacttcgtggtgctcacccgatcgtcgaattgattttgcagtaccgcgagctcagtaaactcaaatcaacctatcttgatccgttacctcgtcttgttcatccacgtacgggtcgtttacacacccgcttcaatcaaacggcgacagccaccgggcgcttgtcgtcgagtgacccgaacctccagaatattccagtgcgcacgccgttaggccaacgcattcgtaaagcgtttgttgcggaagaaggttggttattacttgcggccgattactcccagatcgaacttcgtgtattggcgcatctctctggcgacgagaatcttaaacgcgtgtttcgcgaaggcaaggatattcacactgaaaccgcagcctggatgttcgggcttgacccagccttagtggaccccaagatgcgtcgtgccgccaagaccgtcaactttggcgtactctatggtatgtcagcacatcgtcttagtcaggaattgggcattgactacaaagaagctgaagcgtttatcgagcgctatttccaatcctttccgaaagttcgcgcgtggattgaacgtaccctcgaagaaggtcgcactcgcggctatgtggaaacgttattcgggcgtcgtcgctacgttccagatcttgcatctcgtgtccgctcagtgcgcgaagctgctgagcgtatggccttcaatatgcctgttcagggaacagcggcggacctcatgaagatcgccatggtgaaattgtttccgcgcttgaaacccttaggagcccaccttcttttacaggtgcatgatgaattggtcttggaagtacccgaggatcgcgcagaagaagccaaagcactcgtgaaagaggttatggaaaacgcgtatccgttagatgttccgttggaggtcgaagtgggtgtaggccgtgattggcttgaagcgaaacaagac

SEQ ID NO: 144 - protein, 844 aa, synthetic construct
  REGION 1..844: note = DNA Polymerase Variant
MHHHHHHGGSGMLPLFDLEEPPKRVLLVDGHHLAYRTFYALSLTTSRGEPVQMVYGFARSLLKALKEDGQAVVVVFDAKAPSFRHEAYEAYKAGRAPTPEDFPRQLALVKRLVDLLGLVRLEAPGYEADDVLGTLAKKAEREGMEVCILTGDRDFFQLLSEKVSVLLPDGTLVTPKDVQEKYGVPPERWVDFRALTGDRSDNIPGVAGIGEKTALRLLAEWGSVENLLKNLDRVKPDSLRRKIEAHLEDLRLSLDLARIRTDLPLEVDFKALRRRTPDLEGLRAFLEELEFGSLLHEFGLLGGEKPREEAPWPPPEGAFVGFLLSRKEPMWAELLALAAAAEGRVHRATSPVEALADLKEARGFLAKDLAVLALREGVALDPTDDPLLVAYLLDPANTNPEGVARRYGGEFTEDAAERALLSERLFQTLFPRLSEKLLWLYQEVERPLSRVLAHMEARGVRLDVPLLEALSFELEKEMERLEGEVFRLAGHPFNLNSRDQLEKVLFDELGLTPVGKTEKTGKRSTSQSALEALRGAHPIVELILQYRELSKLKSTYLDPLPRLVHPRTGRLHTRFNQTATATGRLSSSDPNLQNIPVRTPLGQRIRKAFVAEEGWLLLAADYSQIELRVLAHLSGDENLKRVFREGKDIHTETAAWMFGLDPALVDPKMRRAAKTVNFGVLYGMSAHRLSQELGIDYKEAEAFIERYFQSFPKVRAWIERTLEEGRTRGYVETLFGRRRYVPDLASRVRSVREAAERMAFNMPVQGTAADLMKIAMVKLFPRLKPLGAHLLLQVHDELVLEVPEDRAEEAKALVKEVMENAYPLDVPLEVEVGVGRDWLEAKQD

SEQ ID NO: 145 - DNA, 2532 bp, synthetic construct
  misc_feature 1..2532: note = DNA Polymerase Variant
  source 1..2532: mol_type = other DNA
atgcaccatcatcatcatcatggcggtagcggcatgttaccgctgtttgatttggaagaaccaccaaaacgcgtgctgcttgttgacggccatcatctggcgtatcgtaccttctacgcactgagccttacgacctcacgtggtgagcctgtccagatggtgtatgggtttgctcgctccctgctgaaagccctgaaggaagatggtcaagccgtagtagtggttttcgatgcgaaagcaccgtcgtttcgtcacgaagcgtacgaggcctataaagctggccgcgcaccgaccccggaagactttccgcgtcagttagcgctcgtcaaacgcctcgtggatttgctgggattagttcgcttggaagctcctggctacgaggcggacgacgtgctcggtacactggccaagaaagcagaacgtgaaggcatggaggtctgcattcttaccggtgatcgcgatttcttccagctgctgtctgagaaagtgagcgttttgctgcccgatggcacgttagtaaccccgaaagatgtccaagagaaatatggagttccgccagaacgttgggtggactttcgcgcactgactggtgatcgttcagacaacatcccgggcgttgccgggattggtgaaaagacggcgctgcgcctgctggcagaatggggctcggtggaaaatctgctcaagaaccttgatcgtgtgaaacctgatagcttacgccgcaagatcgaagcccacctggaagacttgcgtctgagtctggatcttgcgcgtattcgcaccgatctgccgttggaagtagactttaaagctctgcgtcgtcgcacacccgatttagaggggttacgcgcgttcctcgaacgtctggagtttggctccctgctgcatgaattcggtttgttgggcggagagaaaccgcgtgaagaagcaccatggccgccgcccgaaggtgcctttgtcggctttcttctgtcacgcaaagagccaatgtgggcggaactgttagctcttgcagccgccgcggaagggcgtgttcaccgcgcgacctctcctgtcgaggccctcgctgacctcaaagaagcacgtggtttcttggcgaaagatttagccgtgcttgcattacgcgaaggcgttgcgctcgatccgacggacgacccgcttttggtggcttatttgctcgatcctgcgaataccaatccggaaggtgtagcccgtcgttacggcggcgagtttactgaagatgcggcagaacgcgcgttgcttagcgaacgcctcttccagacgttatttccacgtctttcggagaaattactctggctctatcaggaagtcgaacgtccattgagtcgcgtgcttgcccatatggaggctcgcggtgtgcgcttagatgttccgttgttagaagcactcagcttcgagttggagaaagaaatggaacgtcttgaaggcgaagtctttcgtttagcggggcatcccttcaatctcaactctcgcgaccaattggagaaagtgctctttgatgaattaggtttaacccctgtaggacgcacagagaagaccggcaaacgttccacttcgcaaagtgccttggaagcacttcgtggtgctcacccgatcgtcgagttgattttgcagtaccgcgagctcactaaactcaaaaacacctatattgatccgttacctcgtcttgttcatccacgtacgggtcgtttacacacccgcttcaatcaaacggcgacagccaccgggcgcttgtcgtcgagtgacccgaacctccagaatattccagtgcgcacgccgttaggccaacgcattcgtaaagcgtttgttgcggaagaaggttggttattacttgcggccgattactcccagatcgaacttcgtgtattggcgcatctctctggcgacgagaatcttaaacgcgtgtttcgcgaaggcaaggatattcacactgaaaccgcagcctggatgttcgggcttgacccagccttagtggaccccaagatgcgtcgtgccgccaagaccgtcaactttggcgtactctatggtatgtcagcacatcgtcttagtcaggaattgggcattgactacaaagaagctgaagcgtttatcgagcgctatttccaatcctttccgaaagttcgcgcgtggattgaacgtaccctcgaagaaggtcgcactcgcggctatgtggaaacgttattcgggcgtcgtcgctacgttccagatcttgcatctcgtgtccgctcagtgcgcgaagctgctgagcgtatggccttcaatatgcctgttcagggaacagcggcggacctcatgaagatcgccatggtgaaattgtttccgcgcttgaaacccttaggagcccaccttcttttacaggtgcatgatgaattggtcttggaagtacccgaggatcgcgcagaagaagccaaagcactcgtgaaagaggttatggaaaacgcgtatccgttagatgttccgttggaggtcgaagtgggtgtaggccgtgattggcttgaagcgaaacaagac

SEQ ID NO: 146 - protein, 844 aa, synthetic construct
  REGION 1..844: note = DNA Polymerase Variant
MHHHHHHGGSGMLPLFDLEEPPKRVLLVDGHHLAYRTFYALSLTTSRGEPVQMVYGFARSLLKALKEDGQAVVVVFDAKAPSFRHEAYEAYKAGRAPTPEDFPRQLALVKRLVDLLGLVRLEAPGYEADDVLGTLAKKAEREGMEVCILTGDRDFFQLLSEKVSVLLPDGTLVTPKDVQEKYGVPPERWVDFRALTGDRSDNIPGVAGIGEKTALRLLAEWGSVENLLKNLDRVKPDSLRRKIEAHLEDLRLSLDLARIRTDLPLEVDFKALRRRTPDLEGLRAFLERLEFGSLLHEFGLLGGEKPREEAPWPPPEGAFVGFLLSRKEPMWAELLALAAAAEGRVHRATSPVEALADLKEARGFLAKDLAVLALREGVALDPTDDPLLVAYLLDPANTNPEGVARRYGGEFTEDAAERALLSERLFQTLFPRLSEKLLWLYQEVERPLSRVLAHMEARGVRLDVPLLEALSFELEKEMERLEGEVFRLAGHPFNLNSRDQLEKVLFDELGLTPVGRTEKTGKRSTSQSALEALRGAHPIVELILQYRELTKLKNTYIDPLPRLVHPRTGRLHTRFNQTATATGRLSSSDPNLQNIPVRTPLGQRIRKAFVAEEGWLLLAADYSQIELRVLAHLSGDENLKRVFREGKDIHTETAAWMFGLDPALVDPKMRRAAKTVNFGVLYGMSAHRLSQELGIDYKEAEAFIERYFQSFPKVRAWIERTLEEGRTRGYVETLFGRRRYVPDLASRVRSVREAAERMAFNMPVQGTAADLMKIAMVKLFPRLKPLGAHLLLQVHDELVLEVPEDRAEEAKALVKEVMENAYPLDVPLEVEVGVGRDWLEAKQD

SEQ ID NO: 147 - DNA, 2532 bp, synthetic construct
  misc_feature 1..2532: note = DNA Polymerase Variant
  source 1..2532: mol_type = other DNA
atgcaccatcatcatcatcatggcggtagcggcatgttaccgctgtttgatttggaagaaccaccaaaacgcgtgctgcttgttgacggccatcatctggcgtatcgtaccttctacgcactgagccttacgacctcacgtggtgagcctgtccagatggtgtatgggtttgctcgctccctgctgaaagccctgaaggaagatggtcaagccgtagtagtggttttcgatgcgaaagcaccgtcgtttcgtcacgaagcgtacgaggcctataaagctggccgcgcaccgaccccggaagactttccgcgtcagttagcgctcgtcaaacgcctcgtggatttgctgggattagttcgcttggaagctcctggctacgaggcggacgacgtgctcggtacactggccaagaaagcagaacgtgaaggcatggaggtctgcattcttaccggtgatcgcgatttcttccagctgctgtctgagaaagtgagcgttttgctgcccgatggcacgttagtaaccccgaaagatgtccaagagaaatatggagttccgccagaacgttgggtggactttcgcgcactgactggtgatccttcagacaacatcccgggcgttgccgggattggtgaaaagacggcgctgcgtctgctggcagaatggggctcggtggaaaatctgctcaagaaccttgatcgtgtgaaacctgatagcttacgccgcaagatcgaagcccacctggaagacttgcgtctgagtctggatcttgcgcgtattcgcaccgatctgccgttggaagtagactttaaagctctgcgtcgtcgcacacccgatttagaggggttacgcgcgttcctcgaagaactggagtttggctccctgctgcatgaattcggtttgttgggcggagagaaaccgcgtgaagaagcaccatggccgccgcccgaaggtgcctttgtcggctttcttctgtcacgcaaagagccaatgtgggcggaactgttagctcttgcagccgccgcggaagggcgtgttcaccgcgcgacctctcctgtcgaggccctcgctgacctcaaagaagcacgtggtttcttggcgaaagatttagccgtgcttgcattacgcgaaggcgttgcgctcgatccgacggacgacccgcttttggtggcttatttgctcgatcctgcgaataccaacccggaaggtgtagcccgtcgttacggcggcgagtttactgaagatgcggcagaacgcgcgttgcttagcgaacgcctcttccagacgttatttccacgtctttcggagaaattactctggctctatcaggaagtcgaacgtccattgagtcgcgtgcttgcccatatggaggctcgcggtgtgcgcttagatgttccgttgttagaagcactcagcttcgagttggagaaagaaatggaacgtcttgaaggcgaagtctttcgtttagcggggcatcccttcaatctcaactctcgcgaccaattggagaaagtgctctttgatgaattaggtttaacccctgtaggacgcacagagaagaccggcaaacgttccactgctcagggagcattggaagcacttcgtggtgctcacccgatcgtcgagttgattttgcagtaccgcgagctcagcaaactcaaatcaacctatcttgatccgttacctcgtcttgttcatccacgtacgggtcgtttacacacccgcttcaatcaaacggcgacagccaccgggcgcttgtcgtcgagtgacccgaacctccagaatattccagtgcgcacgccgttaggccaacgcattcgtaaagcgtttgttgcggaagaaggttggttattacttgcggccgattactcccagatcgaacttcgtgtattggcgcatctctctggcgacgagaatcttaaacgcgtgtttcgcgaaggcaaggatattcacactgaaaccgcagcctggatgttcgggcttgacccagcggctgtggaccccaagatgcgtcgtgccgccaagaccgtcaactttggcgtactctatggtatgtcagcacatcgtcttagtcaggaattgggcattgactacgaggaagctgaagcgtttatcgagcgctatttccaatcctttccgaaagttcgcgcgtggattgaacgtaccctcgaagaaggtcgcactcgcggctatgtggaaacgttattcgggcgtcgtcgctacgttccagatcttgcatctcgtgtccgctcagtgcgcgaagctgctgagcgtatggccttcaatatgcctgttcagggaacagcggcggacctcatgaagatcgccatggtgaaattgtttccgcgcttgaaacccttaggagcccaccttcttttacaggtgcatgatgaattggtcttggaagtacccgaggatcgcgcagaagaagccaaagcactcgtgaaagaggttatggaaaacgcgtatccgttagatgttccgttggaggtcgaagtgggtgtaggccgtgattggcttgaagcgaaacaagac

SEQ ID NO: 148 - protein, 844 aa, synthetic construct
  REGION 1..844: note = DNA Polymerase Variant
MHHHHHHGGSGMLPLFDLEEPPKRVLLVDGHHLAYRTFYALSLTTSRGEPVQMVYGFARSLLKALKEDGQAVVVVFDAKAPSFRHEAYEAYKAGRAPTPEDFPRQLALVKRLVDLLGLVRLEAPGYEADDVLGTLAKKAEREGMEVCILTGDRDFFQLLSEKVSVLLPDGTLVTPKDVQEKYGVPPERWVDFRALTGDPSDNIPGVAGIGEKTALRLLAEWGSVENLLKNLDRVKPDSLRRKIEAHLEDLRLSLDLARIRTDLPLEVDFKALRRRTPDLEGLRAFLEELEFGSLLHEFGLLGGEKPREEAPWPPPEGAFVGFLLSRKEPMWAELLALAAAAEGRVHRATSPVEALADLKEARGFLAKDLAVLALREGVALDPTDDPLLVAYLLDPANTNPEGVARRYGGEFTEDAAERALLSERLFQTLFPRLSEKLLWLYQEVERPLSRVLAHMEARGVRLDVPLLEALSFELEKEMERLEGEVFRLAGHPFNLNSRDQLEKVLFDELGLTPVGRTEKTGKRSTAQGALEALRGAHPIVELILQYRELSKLKSTYLDPLPRLVHPRTGRLHTRFNQTATATGRLSSSDPNLQNIPVRTPLGQRIRKAFVAEEGWLLLAADYSQIELRVLAHLSGDENLKRVFREGKDIHTETAAWMFGLDPAAVDPKMRRAAKTVNFGVLYGMSAHRLSQELGIDYEEAEAFIERYFQSFPKVRAWIERTLEEGRTRGYVETLFGRRRYVPDLASRVRSVREAAERMAFNMPVQGTAADLMKIAMVKLFPRLKPLGAHLLLQVHDELVLEVPEDRAEEAKALVKEVMENAYPLDVPLEVEVGVGRDWLEAKQD

SEQ ID NO: 149 - DNA, 2532 bp, synthetic construct
  misc_feature 1..2532: note = DNA Polymerase Variant
  source 1..2532: mol_type = other DNA
atgcaccatcatcatcatcatggcggtagcggcatgttaccgctgtttgatttggaagaaccaccaaaacgcgtgctgcttgttgacggccatcatctggcgtatcgtaccttctacgcactgagccttacgacctcacgtggtgagcctgtccagatggtgtatgggtttgctcgctccctgctgaaagccctgaaggaagatggtcaagccgtagtagtggttttcgatgcgaaagcaccgtcgtttcgtcacgaagcgtacgaggcctataaagctggccgcgcaccgaccccggaagactttccgcgtcagttagcgctcgtcaaacgcctcgtggatttgctgggattagttcgcttggaagctcctggctacgaggcggacgacgtgctcggtacactggccaagaaagcagaacgtgaaggcatggaggtctgcattcttaccggtgatcgcgatttcttccagctgctgtctgagaaagtgagcgttttgctgcccgatggcacgttagtaaccccgaaagatgtccaagagaaatatggagttccgccagaacgttgggtggactttcgcgcactgactggtgatcgttcagacaacatcccgggcgttgccgggattggtgaaaagacggcgctgcgcctgctggcagaatggggctcggtggaaaatctgctcaagaaccttgatcgtgtgaaacctgatagcttacgccgcaagatcgaagcccacctggaagacttgcgtctgagtctggatcttgcgcgtattcgcaccgatctgccgttggaagtagactttaaagctctgcgtcgtcgcacacccgatttagaggggttacgcgcgttcctcgaagaactggagtttggctccctgctgcatgaattcggtttgttgggcggagagaaaccgcgtgaagaagcaccatggccgccgcccgaaggtgcctttgtcggctttcttctgtcacgcaaagagccaatgtgggcggaactgttagctcttgcagccgccgcggaagggcgtgttcaccgcgcgacctctcctgtcgaggccctcgctgacctcaaagaagcacgtggtttcttggcgaaagatttagccgtgcttgcattacgcgaaggcgttgcgctcgatccgacggacgacccgcttttggtggcttatttgctcgatcctgcgaataccaatccggaaggtgtagcccgtcgttacggcggcgagtttactgaagatgcggcagaacgcgcgttgcttagcgaacgcctcttccagacgttatttccacgtctttcggagaaattactctggctctatcaggaagtcgaacgtccattgagtcgcgtgcttgcccatatggaggctcgcggtgtgcgcttagatgttccgttgttagaagcactcagcttcgagttggagaaagaaatggaacgtcttgaaggcgaagtctttcgtttagcggggcatcccttcaatctcaactctcgcgaccaattggagaaagtgctctttgatgaattaggtttaacccctatcggacgtacagagaagaccggcaaacgttccacttcgcaaagtgtcttggaagcacttcgtggtgctcacccgatcgtcgaattgattttgcagtaccgcgagctcactaaactcaaaagcacctatattgatccgttacctcgtcttgttcatccacgtacgggtcgtttacacacccgcttcaatcaaacggcgacagccaccgggcgcttgtcgtcgagtgacccgaacctccagaatattccagtgcgcacgccgttaggccaacgcattcgtaaagcgtttgttgcggaagaaggttggttattacttgcggccgattactcccagatcgaacttcgtgtattggcgcatctctctggcgacgagaatcttaaacgcgtgtttcgcgaaggcaaggatattcacactgaaaccgcagcctggatgttcgggcttgacccagccttagtggaccccaagatgcgtcgtgccgccaagaccgtcaactttggcgtactctatggtatgtcagcacatcgtcttagtcaggaattgggcattgactacaaagaagctgaagcgtttatcgagcgctatttccaatcctttccgaaagttcgcgcgtggattgaacgtaccctcgaagaaggtcgcactcgcggctatgtggaaacgttattcgggcgtcgtcgctacgttccagatcttgcatctcgtgtccgctcagtgcgcgaagctgctgagcgtatggccttcaatatgcctgttcagggaacagcggcggacctcatgaagatcgccatggtgaaattgtttccgcgcttgaaacccttaggagcccaccttcttttacaggtgcatgatgaattggtcttggaagtacccgaggatcgcgcagaagaagccaaagcactcgtgaaagaggttatggaaaacgcgtatccgttagatgttccgttggaggtcgaagtgggtgtaggccgtgattggcttgaagcgaaacaagac

SEQ ID NO: 150 - protein, 844 aa, synthetic construct
  REGION 1..844: note = DNA Polymerase Variant
MHHHHHHGGSGMLPLFDLEEPPKRVLLVDGHHLAYRTFYALSLTTSRGEPVQMVYGFARSLLKALKEDGQAVVVVFDAKAPSFRHEAYEAYKAGRAPTPEDFPRQLALVKRLVDLLGLVRLEAPGYEADDVLGTLAKKAEREGMEVCILTGDRDFFQLLSEKVSVLLPDGTLVTPKDVQEKYGVPPERWVDFRALTGDRSDNIPGVAGIGEKTALRLLAEWGSVENLLKNLDRVKPDSLRRKIEAHLEDLRLSLDLARIRTDLPLEVDFKALRRRTPDLEGLRAFLEELEFGSLLHEFGLLGGEKPREEAPWPPPEGAFVGFLLSRKEPMWAELLALAAAAEGRVHRATSPVEALADLKEARGFLAKDLAVLALREGVALDPTDDPLLVAYLLDPANTNPEGVARRYGGEFTEDAAERALLSERLFQTLFPRLSEKLLWLYQEVERPLSRVLAHMEARGVRLDVPLLEALSFELEKEMERLEGEVFRLAGHPFNLNSRDQLEKVLFDELGLTPIGRTEKTGKRSTSQSVLEALRGAHPIVELILQYRELTKLKSTYIDPLPRLVHPRTGRLHTRFNQTATATGRLSSSDPNLQNIPVRTPLGQRIRKAFVAEEGWLLLAADYSQIELRVLAHLSGDENLKRVFREGKDIHTETAAWMFGLDPALVDPKMRRAAKTVNFGVLYGMSAHRLSQELGIDYKEAEAFIERYFQSFPKVRAWIERTLEEGRTRGYVETLFGRRRYVPDLASRVRSVREAAERMAFNMPVQGTAADLMKIAMVKLFPRLKPLGAHLLLQVHDELVLEVPEDRAEEAKALVKEVMENAYPLDVPLEVEVGVGRDWLEAKQD

SEQ ID NO: 151 - DNA, 2532 bp, synthetic construct
  misc_feature 1..2532: note = DNA Polymerase Variant
  source 1..2532: mol_type = other DNA
atgcaccatcatcatcatcatggcggtagcggcatgttaccgctgtttgatttggaagaaccaccaaaacgcgtgctgcttgttgacggccatcatctggcgtatcgtaccttctacgcactgagccttacgacctcacgtggtgagcctgtccagatggtgtatgggtttgctcgctccctgctgaaagccctgaaggaagatggtcaagccgtagtagtggttttcgatgcgaaagcaccgtcgtttcgtcacgaagcgtacgaggcctataaagctggccgcgcaccgaccccggaagactttccgcgtcagttagcgctcgtcaaacgcctcgtggatttgctgggattagttcgcttggaagctcctggctacgaggcggacgacgtgctcggtacactggccaagaaagcagaacgtgaaggcatggaggtctgcattcttaccggtgatcgcgatttcttccagctgctgtctgagaaagtgagcgttttgctgcccgatggcacgttagtaaccccgaaagatgtccaagagaaatatggagttccgccagaacgttgggtggactttcgcgcactgactggtgatcgttcagacaacatcccgggcgttgccgggattggtgaaaagacggcgctgcgcctgctggcagaatggggctcggtggaaaatctgctcaagaaccttgatcgtgtgaaacctgatagcttacgccgcaagatcgaagcccacctggaagacttgcgtctgagtctggatcttgcgcgtattcgcaccgatctgccgttggaagtagactttaaagctctgcgtcgtcgcacacccgatttagaggggttacgcgcgttcctcgaacgtctggagtttggctccctgctgcatgaattcggtttgttgggcggagagaaaccgcgtgaagaagcaccatggccgccgcccgaaggtgcctttgtcggctttcttctgtcacgcaaagagccaatgtgggcggaactgttagctcttgcagccgccgcggaagggcgtgttcaccgcgcgacctctcctgtcgaggccctcgctgacctcaaagaagcacgtggtttcttggcgaaagatttagccgtgcttgcattacgcgaaggcgttgcgctcgatccgacggacgacccgcttttggtggcttatttgctcgatcctgcgaataccaacccggaaggtgtagcccgtcgttacggcggcgagtttactgaagatgcggcagaacgcgcgttgcttagcgaacgcctcttccagacgttatttccacgtctttcggagaaattactctggctctatcaggaagtcgaacgtccattgagtcgcgtgcttgcccatatggaggctcgcggtgtgcgcttagatgttccgttgttagaagcactcagcttcgagttggagaaagaaatggaacgtcttgaaggcgaagtctttcgtttagcggggcatcccttcaatctcaactctcgcgaccaattggagaaagtgctctttgatgaattaggtttaacccctgtaggacgcacagagaagaccggcaaacgttccactgctcagggagcattggaagcacttcgtggtgctcacccgatcgtcgagttgattttgcagtaccgcgagctcagcaaactcaaatcaacctatcttgatccgttacctcgtcttgttcatccacgtacgggtcgtttacacacccgcttcaatcaaacggcgacagccaccgggcgcttgtcgtcgagtgacccgaacctccagaatattccagtgcgcacgccgttaggccaacgcattcgtaaagcgtttgttgcggaagaaggttggttattacttgcggccgattactcccagatcgaacttcgtgtattggcgcatctctctggcgacgagaatcttaaacgcgtgtttcgcgaaggcaaggatattcacactgaaaccgcagcctggatgttcgggcttgacccagccttagtggaccccaagatgcgtcgtgccgccaagaccgtcaactttggcgtactctatggtatgtcagcacatcgtcttagtcaggaattgggcattgactacaaagaagctgaagcgtttatcgagcgctatttccaatcctttccgaaagttcgcgcgtggattgaacgtaccctcgaagaaggtcgcactcgcggctatgtggaaacgttattcgggcgtcgtcgctacgttccagatcttgcatctcgtgtccgctcagtgcgcgaagctgctgagcgtatggccttcaatatgcctgttcagggaacagcggcggacctcatgaagatcgccatggtgaaattgtttccgcgcttgaaacccttaggagcccaccttcttttacaggtgcatgatgaattggtcttggaagtacccgaggatcgcgcagaagaagccaaagcactcgtgaaagaggttatggaaaacgcgtatccgttagatgttccgttggaggtcgaagtgggtgtaggccgtgattggcttgaagcgaaacaagac

SEQ ID NO: 152 - protein, 844 aa, synthetic construct
  REGION 1..844: note = DNA Polymerase Variant
MHHHHHHGGSGMLPLFDLEEPPKRVLLVDGHHLAYRTFYALSLTTSRGEPVQMVYGFARSLLKALKEDGQAVVVVFDAKAPSFRHEAYEAYKAGRAPTPEDFPRQLALVKRLVDLLGLVRLEAPGYEADDVLGTLAKKAEREGMEVCILTGDRDFFQLLSEKVSVLLPDGTLVTPKDVQEKYGVPPERWVDFRALTGDRSDNIPGVAGIGEKTALRLLAEWGSVENLLKNLDRVKPDSLRRKIEAHLEDLRLSLDLARIRTDLPLEVDFKALRRRTPDLEGLRAFLERLEFGSLLHEFGLLGGEKPREEAPWPPPEGAFVGFLLSRKEPMWAELLALAAAAEGRVHRATSPVEALADLKEARGFLAKDLAVLALREGVALDPTDDPLLVAYLLDPANTNPEGVARRYGGEFTEDAAERALLSERLFQTLFPRLSEKLLWLYQEVERPLSRVLAHMEARGVRLDVPLLEALSFELEKEMERLEGEVFRLAGHPFNLNSRDQLEKVLFDELGLTPVGRTEKTGKRSTAQGALEALRGAHPIVELILQYRELSKLKSTYLDPLPRLVHPRTGRLHTRFNQTATATGRLSSSDPNLQNIPVRTPLGQRIRKAFVAEEGWLLLAADYSQIELRVLAHLSGDENLKRVFREGKDIHTETAAWMFGLDPALVDPKMRRAAKTVNFGVLYGMSAHRLSQELGIDYKEAEAFIERYFQSFPKVRAWIERTLEEGRTRGYVETLFGRRRYVPDLASRVRSVREAAERMAFNMPVQGTAADLMKIAMVKLFPRLKPLGAHLLLQVHDELVLEVPEDRAEEAKALVKEVMENAYPLDVPLEVEVGVGRDWLEAKQD

SEQ ID NO: 153 - DNA, 2532 bp, synthetic construct
  misc_feature 1..2532: note = DNA Polymerase Variant
  source 1..2532: mol_type = other DNA
atgcaccatcatcatcatcatggcggtagcggcatgttaccgctgtttgatttggaagaaccaccaaaacgcgtgctgcttgttgacggccatcatctggcgtatcgtaccttctacgcactgagccttacgacctcacgtggtgagcctgtccagatggtgtatgggtttgctcgctccctgctgaaagccctgaaggaagatggtcaagccgtagtagtggttttcgatgcgaaagcaccgtcgtttcgtcacgaagcgtacgaggcctataaagctggccgcgcaccgaccccggaagactttccgcgtcagttagcgctcgtcaaacgcctcgtggatttgctgggattagttcgcttggaagctcctggctacgaggcggacgacgtgctcggtacactggccaagaaagcagaacgtgaaggcatggaggtctgcattcttaccggtgatcgcgatttcttccagctgctgtctgagaaagtgagcgttttgctgcccgatggcacgttagtaaccccgaaagatgtccaagagaaatatggagttccgccagaacgttgggtggactttcgcgcactgactggtgatcgttcagacaacatcccgggcgttgccgggattggtgaaaagacggcgctgcgcctgctggcagaatggggctcggtggaaaatctgctcaagaaccttgatcgtgtgaaacctgatagcttacgccgcaagatcgaagcccacctggaagacttgcgtctgagtctggatcttgcgcgtattcgcaccgatctgccgttggaagtagactttaaagctctgcgtcgtcgcacacccgatttagaggggttacgcgcgttcctcgaagaactggagtttggctccctgctgcatgaattcggtttgttgggcggagagaaaccgcgtgaagaagcaccatggccgccgcccgaaggtgcctttgtcggctttcttctgtcacgcaaagagccaatgtgggcggaactgttagctcttgcagccgccgcggaagggcgtgttcaccgcgcgacctctcctgtcgaggccctcgctgacctcaaagaagcacgtggtttcttggcgaaagatttagccgtgcttgcattacgcgaaggcgttgcgctcgatccgacggacgacccgcttttggtggcttatttgctcgatcctgcgaataccactccggaaggtgtagcccgtcgttacggcggcgagtttactgaagatgcggcagaacgcgcgttgcttagcgaacgcctcttccagacgttatttccacgtctttcggagaaattactctggctctatcaggaagtcgaacgtccattgagtcgcgtgcttgcccatatggaggctcgcggtgtgcgcttagatgttccgttgttagaagcactcagcttcgagttggagaaagaaatggaacgtcttgaaggcgaagtctttcgtttagcggggcatcccttcaatctcaactctcgcgaccaattggagaaagtgctctttgatgaattaggtttaacccctgtcggacgtacagagaagaccggcaaacgttccactgctcagggagcattggaagcacttcgtggtgctcacccgatcgtcgagttgattttgcagtaccgcgagctcagtaaactcaaaaacacctatattgatccgttacctcgtcttgttcatccacgtacgggtcgtttacacacccgcttcaatcaaacggcgacagccaccgggcgcttgtcgtcgagtgacccgaacctccagaatattccagtgcgcacgccgttaggccaacgcattcgtaaagcgtttgttgcggaagaaggttggttattacttgcggccgattactcccagatcgaacttcgtgtattggcgcatctctctggcgacgagaatcttaaacgcgtgtttcgcgaaggcaaggatattcacactgaaaccgcagcctggatgttcgggcttgacccagccttagtggaccccaagatgcgtcgtgccgccaagaccgtcaactttggcgtactctatggtatgtcagcacatcgtcttagtcaggaattgggcattgactacaaagaagctgaagcgtttatcgagcgctatttccaatcctttccgaaagttcgcgcgtggattgaacgtaccctcgaagaaggtcgcactcgcggctatgtggaaacgttattcgggcgtcgtcgctacgttccagatcttgcatctcgtgtccgctcagtgcgcgaagctgctgagcgtatggccttcaatatgcctgttcagggaacagcggcggacctcatgaagatcgccatggtgaaattgtttccgcgcttgaaacccttaggagcccaccttcttttacaggtgcatgatgaattggtcttggaagtacccgaggatcgcgcagaagaagccaaagcactcgtgaaagaggttatggaaaacgcgtatccgttagatgttccgttggaggtcgaagtgggtgtaggccgtgattggcttgaagcgaaacaagac

SEQ ID NO: 154 - protein, 844 aa, synthetic construct
  REGION 1..844: note = DNA Polymerase Variant
MHHHHHHGGSGMLPLFDLEEPPKRVLLVDGHHLAYRTFYALSLTTSRGEPVQMVYGFARSLLKALKEDGQAVVVVFDAKAPSFRHEAYEAYKAGRAPTPEDFPRQLALVKRLVDLLGLVRLEAPGYEADDVLGTLAKKAEREGMEVCILTGDRDFFQLLSEKVSVLLPDGTLVTPKDVQEKYGVPPERWVDFRALTGDRSDNIPGVAGIGEKTALRLLAEWGSVENLLKNLDRVKPDSLRRKIEAHLEDLRLSLDLARIRTDLPLEVDFKALRRRTPDLEGLRAFLEELEFGSLLHEFGLLGGEKPREEAPWPPPEGAFVGFLLSRKEPMWAELLALAAAAEGRVHRATSPVEALADLKEARGFLAKDLAVLALREGVALDPTDDPLLVAYLLDPANTTPEGVARRYGGEFTEDAAERALLSERLFQTLFPRLSEKLLWLYQEVERPLSRVLAHMEARGVRLDVPLLEALSFELEKEMERLEGEVFRLAGHPFNLNSRDQLEKVLFDELGLTPVGRTEKTGKRSTAQGALEALRGAHPIVELILQYRELSKLKNTYIDPLPRLVHPRTGRLHTRFNQTATATGRLSSSDPNLQNIPVRTPLGQRIRKAFVAEEGWLLLAADYSQIELRVLAHLSGDENLKRVFREGKDIHTETAAWMFGLDPALVDPKMRRAAKTVNFGVLYGMSAHRLSQELGIDYKEAEAFIERYFQSFPKVRAWIERTLEEGRTRGYVETLFGRRRYVPDLASRVRSVREAAERMAFNMPVQGTAADLMKIAMVKLFPRLKPLGAHLLLQVHDELVLEVPEDRAEEAKALVKEVMENAYPLDVPLEVEVGVGRDWLEAKQD

SEQ ID NO: 155 - DNA, 2532 bp, synthetic construct
  misc_feature 1..2532: note = DNA Polymerase Variant
  source 1..2532: mol_type = other DNA
atgcaccatcatcatcatcatggcggtagcggcatgttaccgctgtttgatttggaagaaccaccaaaacgcgtgctgcttgttgacggccatcatctggcgtatcgtaccttctacgcactgagccttacgacctcacgtggtgagcctgtccagatggtgtatgggtttgctcgctccctgctgaaagccctgaaggaagatggtcaagccgtagtagtggttttcgatgcgaaagcaccgtcgtttcgtcacgaagcgtacgaggcctataaagctggccgcgcaccgaccccggaagactttccgcgtcagttagcgctcgtcaaacgcctcgtggatttgctgggattagttcgcttggaagctcctggctacgaggcggacgacgtgctcggtacactggccaagaaagcagaacgtgaaggcatggaggtctgcattcttaccggtgatcgcgatttcttccagctgctgtctgagaaagtgagcgttttgctgcccgatggcacgttagtaaccccgaaagatgtccaagagaaatatggagttccgccagaacgttgggtggactttcgcgcactgactggtgatcgttcagacaacatcccgggcgttgccgggattggtgaaaagacggcgctgcgcctgctggcagaatggggctcggtggaaaatctgctcaagaaccttgatcgtgtgaaacctgatagcttacgccgcaagatcgaagcccacctggaagacttgcgtctgagtctggatcttgcgcgtattcgcaccgatctgccgttggaagtagactttaaagctctgcgtcgtcgcacacccgatttagaggggttacgcgcgttcctcgaacgtctggagtttggctccctgctgcatgaattcggtttgttgggcggagagaaaccgcgtgaagaagcaccatggccgccgcccgaaggtgcctttgtcggctttcttctgtcacgcaaagagccaatgtgggcggaactgttagctcttgcagccgccgcggaagggcgtgttcaccgcgcgacctctcctgtcgaggccctcgctgacctcaaagaagcacgtggtttcttggcgaaagatttagccgtgcttgcattacgcgaaggcgttgcgctcgatccgacggacgacccgcttttggtggcttatttgctcgatcctgcgaataccaatccggaaggtgtagcccgtcgttacggcggcgagtttactgaagatgcggcagaacgcgcgttgcttagcgaacgcctcttccagacgttatttccacgtctttcggagaaattactctggctctatcaggaagtcgaacgtccattgagtcgcgtgcttgcccatatggaggctcgcggtgtgcgcttagatgttccgttgttagaagcactcagcttcgagttggagaaagaaatggaacgtcttgaaggcgaagtctttcgtttagcggggcatcccttcaatctcaactctcgcgaccaattggagaaagtgctctttgatgaattaggtttaacccctgtcggacgtacagagaagaccggcaaacgttccactgctcagggagcattggaagcacttcgtggtgctcacccgatcgtcgagttgattttgcagtaccgcgagctcagtaaactcaaaggcacctatattgatccgttacctcgtcttgttcatccacgtacgggtcgtttacacacccgcttcaatcaaacggcgacagccaccgggcgcttgtcgtcgagtgacccgaacctccagaatattccagtgcgcacgccgttaggccaacgcattcgtaaagcgtttgttgcggaagaaggttggttattacttgcggccgattactcccagatcgaacttcgtgtattggcgcatctctctggcgacgagaatcttaaacgcgtgtttcgcgaaggcaaggatattcacactgaaaccgcagcctggatgttcgggcttgacccagccttagtggaccccaagatgcgtcgtgccgccaagaccgtcaactttggcgtactctatggtatgtcagcacatcgtcttagtcaggaattgggcattgactacaaagaagctgaagcgtttatcgagcgctatttccaatcctttccgaaagttcgcgcgtggattgaacgtaccctcgaagaaggtcgcactcgcggctatgtggaaacgttattcgggcgtcgtcgctacgttccagatcttgcatctcgtgtccgctcagtgcgcgaagctgctgagcgtatggccttcaatatgcctgttcagggaacagcggcggacctcatgaagatcgccatggtgaaattgtttccgcgcttgaaacccttaggagcccaccttcttttacaggtgcatgatgaattggtcttggaagtacccgaggatcgcgcagaagaagccaaagcactcgtgaaagaggttatggaaaacgcgtatccgttagatgttccgttggaggtcgaagtgggtgtaggccgtgattggcttgaagcgaaacaagac

SEQ ID NO: 156 - protein, 844 aa, synthetic construct
  REGION 1..844: note = DNA Polymerase Variant
MHHHHHHGGSGMLPLFDLEEPPKRVLLVDGHHLAYRTFYALSLTTSRGEPVQMVYGFARSLLKALKEDGQAVVVVFDAKAPSFRHEAYEAYKAGRAPTPEDFPRQLALVKRLVDLLGLVRLEAPGYEADDVLGTLAKKAEREGMEVCILTGDRDFFQLLSEKVSVLLPDGTLVTPKDVQEKYGVPPERWVDFRALTGDRSDNIPGVAGIGEKTALRLLAEWGSVENLLKNLDRVKPDSLRRKIEAHLEDLRLSLDLARIRTDLPLEVDFKALRRRTPDLEGLRAFLERLEFGSLLHEFGLLGGEKPREEAPWPPPEGAFVGFLLSRKEPMWAELLALAAAAEGRVHRATSPVEALADLKEARGFLAKDLAVLALREGVALDPTDDPLLVAYLLDPANTNPEGVARRYGGEFTEDAAERALLSERLFQTLFPRLSEKLLWLYQEVERPLSRVLAHMEARGVRLDVPLLEALSFELEKEMERLEGEVFRLAGHPFNLNSRDQLEKVLFDELGLTPVGRTEKTGKRSTAQGALEALRGAHPIVELILQYRELSKLKGTYIDPLPRLVHPRTGRLHTRFNQTATATGRLSSSDPNLQNIPVRTPLGQRIRKAFVAEEGWLLLAADYSQIELRVLAHLSGDENLKRVFREGKDIHTETAAWMFGLDPALVDPKMRRAAKTVNFGVLYGMSAHRLSQELGIDYKEAEAFIERYFQSFPKVRAWIERTLEEGRTRGYVETLFGRRRYVPDLASRVRSVREAAERMAFNMPVQGTAADLMKIAMVKLFPRLKPLGAHLLLQVHDELVLEVPEDRAEEAKALVKEVMENAYPLDVPLEVEVGVGRDWLEAKQD

SEQ ID NO: 157 - DNA, 2532 bp, synthetic construct
  misc_feature 1..2532: note = DNA Polymerase Variant
  source 1..2532: mol_type = other DNA
atgcaccatcatcatcatcatggcggtagcggcatgttaccgctgtttgatttggaagaaccaccaaaacgcgtgctgcttgttgacggccatcatctggcgtatcgtaccttctacgcactgagccttacgacctcacgtggtgagcctgtccagatggtgtatgggtttgctcgctccctgctgaaagccctgaaggaagatggtcaagccgtagtagtggttttcgatgcgaaagcaccgtcgtttcgtcacgaagcgtacgaggcctataaagctggccgcgcaccgaccccggaagactttccgcgtcagttagcgctcgtcaaacgcctcgtggatttgctgggattagttcgcttggaagctcctggctacgaggcggacgacgtgctcggtacactggccaagaaagcagaacgtgaaggcatggaggtctgcattcttaccggtgatcgcgatttcttccagctgctgtctgagaaagtgagcgttttgctgcccgatggcacgttagtaaccccgaaagatgtccaagagaaatatggagttccgccagaacgttgggtggactttcgcgcactgactggtgatcgttcagacaacatcccgggcgttgccgggattggtgaaaagacggcgctgcgcctgctggcagaatggggctcggtggaaaatctgctcaagaaccttgatcgtgtgaaacctgatagcttacgccgcaagatcgaagcccacctggaagacttgcgtctgagtctggatcttgcgcgtattcgcaccgatctgccgttggaagtagactttaaagctctgcgtcgtcgcacacccgatttagaggggttacgcgcgttcctcgaagaactggagtttggctccctgctgcatgaattcggtttgttgggcggagagaaaccgcgtgaagaagcaccatggccgccgcccgaaggtgcctttgtcggctttcttctgtcacgcaaagagccaatgtgggcggaactgttagctcttgcagccgccgcggaagggcgtgttcaccgcgcgacctctcctgtcgaggccctcgctgacctcaaagaagcacgtggtttcttggcgaaagatttagccgtgcttgcattacgcgaaggcgttgcgctcgatccgacggacgacccgcttttggtggcttatttgctcgatcctgcgaataccactccggaaggtgtagcccgtcgttacggcggcgagtttactgaagatgcggcagaacgcgcgttgcttagcgaacgcctcttccagacgttatttccacgtctttcggagaaattactctggctctatcaggaagtcgaacgtccattgagtcgcgtgcttgcccatatggaggctcgcggtgtgcgcttagatgttccgttgttagaagcactcagcttcgagttggagaaagaaatggaacgtcttgaaggcgaagtctttcgtttagcggggcatcccttcaatctcaactctcgcgaccaattggagaaagtgctctttgatgaattaggtttaacccctatcggacgtacagagaagaccggcaaacgttccactgctcagggagcattggaagcacttcgtggtgctcacccgatcgtcgacttgattttgcagtaccgcgagctcagcaaactcaaaagcacctatctggatccgttacctcgtcttgttcatccacgtacgggtcgtttacacacccgcttcaatcaaacggcgacagccaccgggcgcttgtcgtcgagtgacccgaacctccagaatattccagtgcgcacgccgttaggccaacgcattcgtaaagcgtttgttgcggaagaaggttggttattacttgcggccgattactcccagatcgaacttcgtgtattggcgcatctctctggcgacgagaatcttaaacgcgtgtttcgcgaaggcaaggatattcacactgaaaccgcagcctggatgttcgggcttgacccagccttagtggaccccaagatgcgtcgtgccgccaagaccgtcaactttggcgtactctatggtatgtcagcacatcgtcttagtcaggaattgggcattgactacaaagaagctgaagcgtttatcgagcgctatttccaatcctttccgaaagttcgcgcgtggattgaacgtaccctcgaagaaggtcgcactcgcggctatgtggaaacgttattcgggcgtcgtcgctacgttccagatcttgcatctcgtgtccgctcagtgcgcgaagctgctgagcgtatggccttcaatatgcctgttcagggaacagcggcggacctcatgaagatcgccatggtgaaattgtttccgcgcttgaaacccttaggagcccaccttcttttacaggtgcatgatgaattggtcttggaagtacccgaggatcgcgcagaagaagccaaagcactcgtgaaagaggttatggaaaacgcgtatccgttagatgttccgttggaggtcgaagtgggtgtaggccgtgattggcttgaagcgaaacaagac

SEQ ID NO: 158 - protein, 844 aa, synthetic construct
  REGION 1..844: note = DNA Polymerase Variant
MHHHHHHGGSGMLPLFDLEEPPKRVLLVDGHHLAYRTFYALSLTTSRGEPVQMVYGFARSLLKALKEDGQAVVVVFDAKAPSFRHEAYEAYKAGRAPTPEDFPRQLALVKRLVDLLGLVRLEAPGYEADDVLGTLAKKAEREGMEVCILTGDRDFFQLLSEKVSVLLPDGTLVTPKDVQEKYGVPPERWVDFRALTGDRSDNIPGVAGIGEKTALRLLAEWGSVENLLKNLDRVKPDSLRRKIEAHLEDLRLSLDLARIRTDLPLEVDFKALRRRTPDLEGLRAFLEELEFGSLLHEFGLLGGEKPREEAPWPPPEGAFVGFLLSRKEPMWAELLALAAAAEGRVHRATSPVEALADLKEARGFLAKDLAVLALREGVALDPTDDPLLVAYLLDPANTTPEGVARRYGGEFTEDAAERALLSERLFQTLFPRLSEKLLWLYQEVERPLSRVLAHMEARGVRLDVPLLEALSFELEKEMERLEGEVFRLAGHPFNLNSRDQLEKVLFDELGLTPIGRTEKTGKRSTAQGALEALRGAHPIVDLILQYRELSKLKSTYLDPLPRLVHPRTGRLHTRFNQTATATGRLSSSDPNLQNIPVRTPLGQRIRKAFVAEEGWLLLAADYSQIELRVLAHLSGDENLKRVFREGKDIHTETAAWMFGLDPALVDPKMRRAAKTVNFGVLYGMSAHRLSQELGIDYKEAEAFIERYFQSFPKVRAWIERTLEEGRTRGYVETLFGRRRYVPDLASRVRSVREAAERMAFNMPVQGTAADLMKIAMVKLFPRLKPLGAHLLLQVHDELVLEVPEDRAEEAKALVKEVMENAYPLDVPLEVEVGVGRDWLEAKQD

SEQ ID NO: 159 - DNA, 2532 bp, synthetic construct
  misc_feature 1..2532: note = DNA Polymerase Variant
  source 1..2532: mol_type = other DNA
atgcaccatcatcatcatcatggcggtagcggcatgttaccgctgtttgatttggaagaaccaccaaaacgcgtgctgcttgttgacggccatcatctggcgtatcgtaccttctacgcactgagccttacgacctcacgtggtgagcctgtccagatggtgtatgggtttgctcgctccctgctgaaagccctgaaggaagatggtcaagccgtagtagtggttttcgatgcgaaagcaccgtcgtttcgtcacgaagcgtacgaggcctataaagctggccgcgcaccgaccccggaagactttccgcgtcagttagcgctcgtcaaacgcctcgtggatttgctgggattagttcgcttggaagctcctggctacgaggcggacgacgtgctcggtacactggccaagaaagcagaacgtgaaggcatggaggtctgcattcttaccggtgatcgcgatttcttccagctgctgtctgagaaagtgagcgttttgctgcccgatggcacgttagtaaccccgaaagatgtccaagagaaatatggagttccgccagaacgttgggtggactttcgcgcactgactggtgatcgttcagacaacatcccgggcgttgccgggattggtgaaaagacggcgctgcgcctgctggcagaatggggctcggtggaaaatctgctcaagaaccttgatcgtgtgaaacctgatagcttacgccgcaagatcgaagcccacctggaagacttgcgtctgagtctggatcttgcgcgtattcgcaccgatctgccgttggaagtagactttaaagctctgcgtcgtcgcacacccgatttagaggggttacgcgcgttcctcgaacgtctggagtttggctccctgctgcatgaattcggtttgttgggcggagagaaaccgcgtgaagaagcaccatggccgccgcccgaaggtgcctttgtcggctttcttctgtcacgcaaagagccaatgtgggcggaactgttagctcttgcagccgccgcggaagggcgtgttcaccgcgcgacctctcctgtcgaggccctcgctgacctcaaagaagcacgtggtttcttggcgaaagatttagccgtgcttgcattacgcgaaggcgttgcgctcgatccgacggacgacccgcttttggtggcttatttgctcgatcctgcgaataccaatccggaaggtgtagcccgtcgttacggcggcgagtttactgaagatgcggcagaacgcgcgttgcttagcgaacgcctcttccagacgttatttccacgtctttcggagaaattactctggctctatcaggaagtcgaacgtccattgagtcgcgtgcttgcccatatggaggctcgcggtgtgcgcttagatgttccgttgttagaagcactcagcttcgagttggagaaagaactggaacgtcttgaaggcgaagtctttcgtttagcggggcatcccttcaatctcaactctcgcgaccaattggagaaagtgctctttgatgaattaggtttaacccctatcggacgtacagagaagaccggcaaacgttccactgcggcaggcgccttggaagcacttcgtggtgctcacccgatcgtcgagttgattttgcagtaccgcgagctcagtaaactcaaaaacacctatattgatccgttacctcgtcttgttcatccacgtacgggtcgtttacacacccgcttcaatcaaacggcgacagccaccgggcgcttgtcgtcgagtgacccgaacctccagaatattccagtgcgcacgccgttaggccaacgcattcgtaaagcgtttgttgcggaagaaggttggttattacttgcggccgattactcccagatcgaacttcgtgtattggcgcatctctctggcgacgagaatcttaaacgcgtgtttcgcgaaggcaaggatattcacactgaaaccgcagcctggatgttcgggcttgacccagccttagtggaccccaagatgcgtcgtgccgccaagaccgtcaactttggcgtactctatggtatgtcagcacatcgtcttagtcaggaattgggcattgactacaaagaagctgaagcgtttatcgagcgctatttccaatcctttccgaaagttcgcgcgtggattgaacgtaccctcgaagaaggtcgcactcgcggctatgtggaaacgttattcgggcgtcgtcgctacgttccagatcttgcatctcgtgtccgctcagtgcgcgaagctgctgagcgtatggccttcaatatgcctgttcagggaacagcggcggacctcatgaagatcgccatggtgaaattgtttccgcgcttgaaacccttaggagcccaccttcttttacaggtgcatgatgaattggtcttggaagtacccgaggatcgcgcagaagaagccaaagcactcgtgaaagaggttatggaaaacgcgtatccgttagatgttccgttggaggtcgaagtgggtgtaggccgtgattggcttgaagcgaaacaagac

SEQ ID NO: 160 - protein, 844 aa, synthetic construct
  REGION 1..844: note = DNA Polymerase Variant
MHHHHHHGGSGMLPLFDLEEPPKRVLLVDGHHLAYRTFYALSLTTSRGEPVQMVYGFARSLLKALKEDGQAVVVVFDAKAPSFRHEAYEAYKAGRAPTPEDFPRQLALVKRLVDLLGLVRLEAPGYEADDVLGTLAKKAEREGMEVCILTGDRDFFQLLSEKVSVLLPDGTLVTPKDVQEKYGVPPERWVDFRALTGDRSDNIPGVAGIGEKTALRLLAEWGSVENLLKNLDRVKPDSLRRKIEAHLEDLRLSLDLARIRTDLPLEVDFKALRRRTPDLEGLRAFLERLEFGSLLHEFGLLGGEKPREEAPWPPPEGAFVGFLLSRKEPMWAELLALAAAAEGRVHRATSPVEALADLKEARGFLAKDLAVLALREGVALDPTDDPLLVAYLLDPANTNPEGVARRYGGEFTEDAAERALLSERLFQTLFPRLSEKLLWLYQEVERPLSRVLAHMEARGVRLDVPLLEALSFELEKELERLEGEVFRLAGHPFNLNSRDQLEKVLFDELGLTPIGRTEKTGKRSTAAGALEALRGAHPIVELILQYRELSKLKNTYIDPLPRLVHPRTGRLHTRFNQTATATGRLSSSDPNLQNIPVRTPLGQRIRKAFVAEEGWLLLAADYSQIELRVLAHLSGDENLKRVFREGKDIHTETAAWMFGLDPALVDPKMRRAAKTVNFGVLYGMSAHRLSQELGIDYKEAEAFIERYFQSFPKVRAWIERTLEEGRTRGYVETLFGRRRYVPDLASRVRSVREAAERMAFNMPVQGTAADLMKIAMVKLFPRLKPLGAHLLLQVHDELVLEVPEDRAEEAKALVKEVMENAYPLDVPLEVEVGVGRDWLEAKQD

SEQ ID NO: 161 - DNA, 2532 bp, synthetic construct
  misc_feature 1..2532: note = DNA Polymerase Variant
  source 1..2532: mol_type = other DNA
atgcaccatcatcatcatcatggcggtagcggcatgttaccgctgtttgatttggaagaaccaccaaaacgcgtgctgcttgttgacggccatcatctggcgtatcgtaccttctacgcactgagccttacgacctcacgtggtgagcctgtccagatggtgtatgggtttgctcgctccctgctgaaagccctgaaggaagatggtcaagccgtagtagtggttttcgatgcgaaagcaccgtcgtttcgtcacgaagcgtacgaggcctataaagctggccgcgcaccgaccccggaagactttccgcgtcagttagcgctcgtcaaacgcctcgtggatttgctgggattagttcgcttggaagctcctggctacgaggcggacgacgtgctcggtacactggccaagaaagcagaacgtgaaggcatggaggtctgcattcttaccggtgatcgcgatttcttccagctgctgtctgagaaagtgagcgttttgctgcccgatggcacgttagtaaccccgaaagatgtccaagagaaatatggagttccgccagaacgttgggtggactttcgcgcactgactggtgatcgttcagacaacatcccgggcgttgccgggattggtgaaaagacggcgctgcgcctgctggcagaatggggctcggtggaaaatctgctcaagaaccttgatcgtgtgaaacctgatagcttacgccgcaagatcgaagcccacctggaagacttgcgtctgagtctggatcttgcgcgtattcgcaccgatctgccgttggaagtagactttaaagctctgcgtcgtcgcacacccgatttagaggggttacgcgcgttcctcgaagaactggagtttggctccctgctgcatgaattcggtttgttgggcggagagaaaccgcgtgaagaagcaccatggccgccgcccgaaggtgcctttgtcggctttcttctgtcacgcaaagagccaatgtgggcggaactgttagctcttgcagccgccgcggaagggcgtgttcaccgcgcgacctctcctgtcgaggccctcgctgacctcaaagaagcacgtggtttcttggcgaaagatttagccgtgcttgcattacgcgaaggcgttgcgctcgatccgacggacgacccgcttttggtggcttatttgctcgatcctgcgaataccactccggaaggtgtagcccgtcgttacggcggcgagtttactgaagatgcggcagaacgcgcgttgcttagcgaacgcctcttccagacgttatttccacgtctttcggagaaattactctggctctatcaggaagtcgaacgtccattgagtcgcgtgcttgcccatatggaggctcgcggtgtgcgcttagatgttccgttgttagaagcactcagcttcgagttggagaaagaaatcgaacgtcttgaaggcgaagtctttcgtttagcggggcatcccttcaatctcaactctcgcgaccaattggagaaagtgctctttgatgaattaggtttaacccctgtcggaaaaacagagaagaccggcaaacgttccactgctcagggagcattggaagcacttcgtggtgctcacccgatcgtcgacttgattttgcagtaccgcgagctcagtaaactcaaaaacacctatctggatccgttacctcgtcttgttcatccacgtacgggtcgtttacacacccgcttcaatcaaacggcgacagccaccgggcgcttgtcgtcgagtgacccgaacctccagaatattccagtgcgcacgccgttaggccaacgcattcgtaaagcgtttgttgcggaagaaggttggttattacttgcggccgattactcccagatcgaacttcgtgtattggcgcatctctctggcgacgagaatcttaaacgcgtgtttcgcgaaggcaaggatattcacactgaaaccgcagcctggatgttcgggcttgacccagccttagtggaccccaagatgcgtcgtgccgccaagaccgtcaactttggcgtactctatggtatgtcagcacatcgtcttagtcaggaattgggcattgactacaaagaagctgaagcgtttatcgagcgctatttccaatcctttccgaaagttcgcgcgtggattgaacgtaccctcgaagaaggtcgcactcgcggctatgtggaaacgttattcgggcgtcgtcgctacgttccagatcttgcatctcgtgtccgctcagtgcgcgaagctgctgagcgtatggccttcaatatgcctgttcagggaacagcggcggacctcatgaagatcgccatggtgaaattgtttccgcgcttgaaacccttaggagcccaccttcttttacaggtgcatgatgaattggtcttggaagtacccgaggatcgcgcagaagaagccaaagcactcgtgaaagaggttatggaaaacgcgtatccgttagatgttccgttggaggtcgaagtgggtgtaggccgtgattggcttgaagcgaaacaagac

SEQ ID NO: 162 - protein, 844 aa, synthetic construct
  REGION 1..844: note = DNA Polymerase Variant
MHHHHHHGGSGMLPLFDLEEPPKRVLLVDGHHLAYRTFYALSLTTSRGEPVQMVYGFARSLLKALKEDGQAVVVVFDAKAPSFRHEAYEAYKAGRAPTPEDFPRQLALVKRLVDLLGLVRLEAPGYEADDVLGTLAKKAEREGMEVCILTGDRDFFQLLSEKVSVLLPDGTLVTPKDVQEKYGVPPERWVDFRALTGDRSDNIPGVAGIGEKTALRLLAEWGSVENLLKNLDRVKPDSLRRKIEAHLEDLRLSLDLARIRTDLPLEVDFKALRRRTPDLEGLRAFLEELEFGSLLHEFGLLGGEKPREEAPWPPPEGAFVGFLLSRKEPMWAELLALAAAAEGRVHRATSPVEALADLKEARGFLAKDLAVLALREGVALDPTDDPLLVAYLLDPANTTPEGVARRYGGEFTEDAAERALLSERLFQTLFPRLSEKLLWLYQEVERPLSRVLAHMEARGVRLDVPLLEALSFELEKEIERLEGEVFRLAGHPFNLNSRDQLEKVLFDELGLTPVGKTEKTGKRSTAQGALEALRGAHPIVDLILQYRELSKLKNTYLDPLPRLVHPRTGRLHTRFNQTATATGRLSSSDPNLQNIPVRTPLGQRIRKAFVAEEGWLLLAADYSQIELRVLAHLSGDENLKRVFREGKDIHTETAAWMFGLDPALVDPKMRRAAKTVNFGVLYGMSAHRLSQELGIDYKEAEAFIERYFQSFPKVRAWIERTLEEGRTRGYVETLFGRRRYVPDLASRVRSVREAAERMAFNMPVQGTAADLMKIAMVKLFPRLKPLGAHLLLQVHDELVLEVPEDRAEEAKALVKEVMENAYPLDVPLEVEVGVGRDWLEAKQD

SEQ ID NO: 163 - DNA, 2532 bp, synthetic construct
  misc_feature 1..2532: note = DNA Polymerase Variant
  source 1..2532: mol_type = other DNA
atgcaccatcatcatcatcatggcggtagcggcatgttaccgctgtttgatttggaagaaccaccaaaacgcgtgctgcttgttgacggccatcatctggcgtatcgtaccttctacgcactgagccttacgacctcacgtggtgagcctgtccagatggtgtatgggtttgctcgctccctgctgaaagccctgaaggaagatggtcaagccgtagtagtggttttcgatgcgaaagcaccgtcgtttcgtcacgaagtgtacgaggcctataaagctggccgcgcaccgaccccggaagactttccgcgtcagttagcgctcgtcaaacgcctcgtggatttgctgggattagttcgcttggaagctcctggctacgaggcggacgacgtgctcggtacactggccaagaaagcagaacgtgaaggcatggaggtctgcattcttaccggtgatcgcgatttcttccagctgctgtctgagaaagtgagcgttttgctgcccgatggcacgttagtaaccccgaaagatgtccaagagaaatatggagttccgccagaacgttgggtggactttcgcgcactgactggtgatcgttcagacaacatcccgggcgttgccgggattggtgaaaagacggcgctgcgcctgctggcagaatggggctcggtggaaaatctgctcaagaaccttgatcgtgtgaaacctgatagcttacgccgcaagatcgaagcccacctggaagacttgcgtctgagtctggatcttgcgcgtattcgcaccgatctgccgttggaagtagactttaaagctctgcgtcgtcgcacacccgatttagaggggttacgcgcgttcctcgaagaactggagtttggctccctgctgcatgaattcggtttgttgggcggagagaaaccgcgtgaagaagcaccatggccgccgcccgaaggtgcctttgtcggctttcttctgtcacgcaaagagccaatgtgggcggaactgttagctcttgcagccgccgcggaagggcgtgttcaccgcgcgacctctcctgtcgaggccctcgctgacctcaaagaagcacgtggtttcttggcgaaagatttagccgtgcttgcattacgcgaaggcgttgcgctcgatccgacggacgacccgcttttggtggcttatttgctcgatcctgcgaataccaatccggaaggtgtagcccgtcgttacggcggcgagtttactgaagatgcggcagaacgcgcgttgcttagcgaacgcctcttccagacgttatttccacgtctttcggagaaattactctggctctatcaggaagtcgaacgtccattgagtcgcgtgcttgcccatatggaggctcgcggtgtgcgcttagatgttccgttgttagaagcactcagcttcgagttggagaaagaaatggaacgtcttgaaggcgaagtctttcgtttagcggggcatcccttcaatctcaactctcgcgaccaattggagaaagtgctctttgatgaattaggtttaacccctgtaggacgcacagagaagaccggcaaacgttccactgctcagggagcattggaagcacttcgtggtgctcacccgatcgtcgacttgattttgcagtaccgcgagctcagtaaactcaaaaacacctatctggatccgttacctcgtcttgttcatccacgtacgggtcgtttacacacccgcttcaatcaaacggcgacagccaccgggcgcttgtcgtcgagtgacccgaacctccagaatattccagtgcgcacgccgttaggccaacgcattcgtaaagcgtttgttgcggaagaaggttggttattacttgcggccgattactcccagatcgaacttcgtgtattggcgcatctctctggcgacgagaatcttaaacgcgtgtttcgcgaaggcaaggatattcacactgaaaccgcagcctggatgttcgggcttgacccagccttagtggaccccaagatgcgtcgtgccgccaagaccgtcaactttggcgtactctatggtatgtcagcacatcgtcttagtcaggaattgggcattgactacaaagaagctgaagcgtttatcgagcgctatttccaatcctttccgaaagttcgcgcgtggattgaacgtaccctcgaagaaggtcgcactcgcggctatgtggaaacgttattcgggcgtcgtcgctacgttccagatcttgcatctcgtgtccgctcagtgcgcgaagctgctgagcgtatggccttcaatatgcctgttcagggaacagcggcggacctcatgaagatcgccatggtgaaattgtttccgcgcttgaaacccttaggagcccaccttcttttacaggtgcatgatgaattggtcttggaagtacccgaggatcgcgcagaagaagccaaagcactcgtgaaagaggttatggaaaacgcgtatccgttagatgttccgttggaggtcgaagtgggtgtaggccgtgattggcttgaagcgaaacaagac

SEQ ID NO: 164 - protein, 844 aa, synthetic construct
  REGION 1..844: note = DNA Polymerase Variant
MHHHHHHGGSGMLPLFDLEEPPKRVLLVDGHHLAYRTFYALSLTTSRGEPVQMVYGFARSLLKALKEDGQAVVVVFDAKAPSFRHEVYEAYKAGRAPTPEDFPRQLALVKRLVDLLGLVRLEAPGYEADDVLGTLAKKAEREGMEVCILTGDRDFFQLLSEKVSVLLPDGTLVTPKDVQEKYGVPPERWVDFRALTGDRSDNIPGVAGIGEKTALRLLAEWGSVENLLKNLDRVKPDSLRRKIEAHLEDLRLSLDLARIRTDLPLEVDFKALRRRTPDLEGLRAFLEELEFGSLLHEFGLLGGEKPREEAPWPPPEGAFVGFLLSRKEPMWAELLALAAAAEGRVHRATSPVEALADLKEARGFLAKDLAVLALREGVALDPTDDPLLVAYLLDPANTNPEGVARRYGGEFTEDAAERALLSERLFQTLFPRLSEKLLWLYQEVERPLSRVLAHMEARGVRLDVPLLEALSFELEKEMERLEGEVFRLAGHPFNLNSRDQLEKVLFDELGLTPVGRTEKTGKRSTAQGALEALRGAHPIVDLILQYRELSKLKNTYLDPLPRLVHPRTGRLHTRFNQTATATGRLSSSDPNLQNIPVRTPLGQRIRKAFVAEEGWLLLAADYSQIELRVLAHLSGDENLKRVFREGKDIHTETAAWMFGLDPALVDPKMRRAAKTVNFGVLYGMSAHRLSQELGIDYKEAEAFIERYFQSFPKVRAWIERTLEEGRTRGYVETLFGRRRYVPDLASRVRSVREAAERMAFNMPVQGTAADLMKIAMVKLFPRLKPLGAHLLLQVHDELVLEVPEDRAEEAKALVKEVMENAYPLDVPLEVEVGVGRDWLEAKQD

SEQ ID NO: 165 - DNA, 2532 bp, synthetic construct
  misc_feature 1..2532: note = DNA Polymerase Variant
  source 1..2532: mol_type = other DNA
atgcaccatcatcatcatcatggcggtagcggcatgttaccgctgtttgatttggaagaaccaccaaaacgcgtgctgcttgttgacggccatcatctggcgtatcgtaccttctacgcactgagccttacgacctcacgtggtgagcctgtccagatggtgtatgggtttgctcgctccctgctgaaagccctgaaggaagatggtcaagccgtagtagtggttttcgatgcgaaagcaccgtcgtttcgtcacgaagcgtacgaggcctataaagctggccgcgcaccgaccccggaagactttccgcgtcagttagcgctcgtcaaacgcctcgtggatttgctgggattagttcgcttggaagctcctggctacgaggcggacgacgtgctcggtacactggccaagaaagcagaacgtgaaggcatggaggtctgcattcttaccggtgatcgcgatttcttccagctgctgtctgagaaagtgagcgttttgctgcccgatggcacgttagtaaccccgaaagatgtccaagagaaatatggagttccgccagaacgttgggtggactttcgcgcactgactggtgatcgttcagacaacatcccgggcgttgccgggattggtgaaaagacggcgctgcgcctgctggcagaatggggctcggtggaaaatctgctcaagaaccttgatcgtgtgaaacctgatagcttacgccgcaagatcgaagcccacctggaagacttgcgtctgagtctggatcttgcgcgtattcgcaccgatctgccgttggaagtagactttaaagctctgcgtcgtcgcacacccgatttagaggggttacgcgcgttcctcgaacgtctggagtttggctccctgctgcatgaattcggtttgttgggcggagagaaaccgcgtgaagaagcaccatggccgccgcccgaaggtgcctttgtcggctttcttctgtcacgcaaagagccaatgtgggcggaactgttagctcttgcagccgccgcggaagggcgtgttcaccgcgcgacctctcctgtcgaggccctcgctgacctcaaagaagcacgtggtttcttggcgaaagatttagccgtgcttgcattacgcgaaggcgttgcgctcgatccgacggacgacccgcttttggtggcttatttgctcgatcctgcgaataccaacccggaaggtgtagcccgtcgttacggcggcgagtttactgaagatgcggcagaacgcgcgttgcttagcgaacgcctcttccagacgttatttccacgtctttcggagaaattactctggctctatcaggaagtcgaacgtccattgagtcgcgtgcttgcccatatggaggctcgcggtgtgcgcttagatgttccgttgttagaagcactcagcttcgagttggagaaagaaatggaacgtcttgaaggcgaagtctttcgtttagcggggcatcccttcaatctcaactctcgcgaccaattggagaaagtgctctttgatgaattaggtttaacccctgtcggacgtacagagaagaccggcaaacgttccactgctcagggagcattggaagcacttcgtggtgctcacccgatcgtcgaattgattttgcagtaccgcgagctcactaaactcaaaaacacctatattgatccgttacctcgtcttgttcatccacgtacgggtcgtttacacacccgcttcaatcaaacggcgacagccaccgggcgcttgtcgtcgagtgacccgaacctccagaatattccagtgcgcacgccgttaggccaacgcattcgtaaagcgtttgttgcggaagaaggttggttattacttgcggccgattactcccagatcgaacttcgtgtattggcgcatctctctggcgacgagaatcttaaacgcgtgtttcgcgaaggcaaggatattcacactgaaaccgcagcctggatgttcgggcttgacccagccttagtggaccccaagatgcgtcgtgccgccaagaccgtcaactttggcgtactctatggtatgtcagcacatcgtcttagtcaggaattgggcattgactacaaagaagctgaagcgtttatcgagcgctatttccaatcctttccgaaagttcgcgcgtggattgaacgtaccctcgaagaaggtcgcactcgcggctatgtggaaacgttattcgggcgtcgtcgctacgttccagatcttgcatctcgtgtccgctcagtgcgcgaagctgctgagcgtatggccttcaatatgcctgttcagggaacagcggcggacctcatgaagatcgccatggtgaaattgtttccgcgcttgaaacccttaggagcccaccttcttttacaggtgcatgatgaattggtcttggaagtacccgaggatcgcgcagaagaagccaaagcactcgtgaaagaggttatggaaaacgcgtatccgttagatgttccgttggaggtcgaagtgggtgtaggccgtgattggcttgaagcgaaacaagac

SEQ ID NO: 166 - protein, 844 aa, synthetic construct
  REGION 1..844: note = DNA Polymerase Variant
MHHHHHHGGSGMLPLFDLEEPPKRVLLVDGHHLAYRTFYALSLTTSRGEPVQMVYGFARSLLKALKEDGQAVVVVFDAKAPSFRHEAYEAYKAGRAPTPEDFPRQLALVKRLVDLLGLVRLEAPGYEADDVLGTLAKKAEREGMEVCILTGDRDFFQLLSEKVSVLLPDGTLVTPKDVQEKYGVPPERWVDFRALTGDRSDNIPGVAGIGEKTALRLLAEWGSVENLLKNLDRVKPDSLRRKIEAHLEDLRLSLDLARIRTDLPLEVDFKALRRRTPDLEGLRAFLERLEFGSLLHEFGLLGGEKPREEAPWPPPEGAFVGFLLSRKEPMWAELLALAAAAEGRVHRATSPVEALADLKEARGFLAKDLAVLALREGVALDPTDDPLLVAYLLDPANTNPEGVARRYGGEFTEDAAERALLSERLFQTLFPRLSEKLLWLYQEVERPLSRVLAHMEARGVRLDVPLLEALSFELEKEMERLEGEVFRLAGHPFNLNSRDQLEKVLFDELGLTPVGRTEKTGKRSTAQGALEALRGAHPIVELILQYRELTKLKNTYIDPLPRLVHPRTGRLHTRFNQTATATGRLSSSDPNLQNIPVRTPLGQRIRKAFVAEEGWLLLAADYSQIELRVLAHLSGDENLKRVFREGKDIHTETAAWMFGLDPALVDPKMRRAAKTVNFGVLYGMSAHRLSQELGIDYKEAEAFIERYFQSFPKVRAWIERTLEEGRTRGYVETLFGRRRYVPDLASRVRSVREAAERMAFNMPVQGTAADLMKIAMVKLFPRLKPLGAHLLLQVHDELVLEVPEDRAEEAKALVKEVMENAYPLDVPLEVEVGVGRDWLEAKQD

SEQ ID NO: 167 - DNA, 2532 bp, synthetic construct
  misc_feature 1..2532: note = DNA Polymerase Variant
  source 1..2532: mol_type = other DNA
atgcaccatcatcatcatcatggcggtagcggcatgttaccgctgtttgatttggaagaaccaccaaaacgcgtgctgcttgttgacggccatcatctggcgtatcgtaccttctacgcactgagccttacgacctcacgtggtgagcctgtccagatggtgtatgggtttgctcgctccctgctgaaagccctgaaggaagatggtcaagccgtagtagtggttttcgatgcgaaagcaccgtcgtttcgtcacgaagcgtacgaggcctataaagctggccgcgcaccgaccccggaagactttccgcgtcagttagcgctcgtcaaacgcctcgtggatttgctgggattagttcgcttggaagctcctggctacgaggcggacgacgtgctcggtacactggccaagaaagcagaacgtgaaggcatggaggtctgcattcttaccggtgatcgcgatttcttccagctgctgtctgagaaagtgagcgttttgctgcccgatggcacgttagtaaccccgaaagatgtccaagagaaatatggagttccgccagaacgttgggtggactttcgcgcactgactggtgatcgttcagacaacatcccgggcgttgccgggattggtgaaaagacggcgctgcgcctgctggcagaatggggctcggtggaaaatctgctcaagaaccttgatcgtgtgaaacctgatagcttacgccgcaagatcgaagcccacctggaagacttgcgtctgagtctggatcttgcgcgtattcgcaccgatctgccgttggaagtagactttaaagctctgcgtcgtcgcacacccgatttagaggggttacgcgcgttcctcgaagaactggagtttggctccctgctgcatgaattcggtttgttgggcggagagaaaccgcgtgaagaagcaccatggccgccgcccgaaggtgcctttgtcggctttcttctgtcacgcaaagagccaatgtgggcggaactgttagctcttgcagccgccgcggaagggcgtgttcaccgcgcgacctctcctgtcgaggccctcgctgacctcaaagaagcacgtggtttcttggcgaaagatttagccgtgcttgcattacgcgaaggcgttgcgctcgatccgacggacgacccgcttttggtggcttatttgctcgatcctgcgaataccaatccggaaggtgtagcccgtcgttacggcggcgagtttactgaagatgcggcagaacgcgcgttgcttagcgaacgcctcttccagacgttatttccacgtctttcggagaaattactctggctctatcaggaagtcgaacgtccattgagtcgcgtgcttgcccatatggaggctcgcggtgtgcgcttagatgttccgttgttagaagcactcagcttcgagttggagaaagaaatggaacgtcttgaaggcgaagtctttcgtttagcggggcatcccttcaatctcaactctcgcgaccaattggagaaagtgctctttgatgaattaggtttaacccctgtcggacgtacagagaagaccggcaaacgttccactgcggcaggcgtcttggaagcacttcgtggtgctcacccgatcgtcgacttgattttgcagtaccgcgagctcagtaaactcaaaagcacctatctggatccgttacctcgtcttgttcatccacgtacgggtcgtttacacacccgcttcaatcaaacggcgacagccaccgggcgcttgtcgtcgagtgacccgaacctccagaatattccagtgcgcacgccgttaggccaacgcattcgtaaagcgtttgttgcggaagaaggttggttattacttgcggccgattactcccagatcgaacttcgtgtattggcgcatctctctggcgacgagaatcttaaacgcgtgtttcgcgaaggcaaggatattcacactgaaaccgcagcctggatgttcgggcttgacccagccttagtggaccccaagatgcgtcgtgccgccaagaccgtcaactttggcgtactctatggtatgtcagcacatcgtcttagtcaggaattgggcattgactacaaagaagctgaagcgtttatcgagcgctatttccaatcctttccgaaagttcgcgcgtggattgaacgtaccctcgaagaaggtcgcactcgcggctatgtggaaacgttattcgggcgtcgtcgctacgttccagatcttgcatctcgtgtccgctcagtgcgcgaagctgctgagcgtatggccttcaatatgcctgttcagggaacagcggcggacctcatgaagatcgccatggtgaaattgtttccgcgcttgaaacccttaggagcccaccttcttttacaggtgcatgatgaattggtcttggaagtacccgaggatcgcgcagaagaagccaaagcactcgtgaaagaggttatggaaaacgcgtatccgttagatgttccgttggaggtcgaagtgggtgtaggccgtgattggcttgaagcgaaacaagac

SEQ ID NO: 168 - protein, 844 aa, synthetic construct
  REGION 1..844: note = DNA Polymerase Variant
MHHHHHHGGSGMLPLFDLEEPPKRVLLVDGHHLAYRTFYALSLTTSRGEPVQMVYGFARSLLKALKEDGQAVVVVFDAKAPSFRHEAYEAYKAGRAPTPEDFPRQLALVKRLVDLLGLVRLEAPGYEADDVLGTLAKKAEREGMEVCILTGDRDFFQLLSEKVSVLLPDGTLVTPKDVQEKYGVPPERWVDFRALTGDRSDNIPGVAGIGEKTALRLLAEWGSVENLLKNLDRVKPDSLRRKIEAHLEDLRLSLDLARIRTDLPLEVDFKALRRRTPDLEGLRAFLEELEFGSLLHEFGLLGGEKPREEAPWPPPEGAFVGFLLSRKEPMWAELLALAAAAEGRVHRATSPVEALADLKEARGFLAKDLAVLALREGVALDPTDDPLLVAYLLDPANTNPEGVARRYGGEFTEDAAERALLSERLFQTLFPRLSEKLLWLYQEVERPLSRVLAHMEARGVRLDVPLLEALSFELEKEMERLEGEVFRLAGHPFNLNSRDQLEKVLFDELGLTPVGRTEKTGKRSTAAGVLEALRGAHPIVDLILQYRELSKLKSTYLDPLPRLVHPRTGRLHTRFNQTATATGRLSSSDPNLQNIPVRTPLGQRIRKAFVAEEGWLLLAADYSQIELRVLAHLSGDENLKRVFREGKDIHTETAAWMFGLDPALVDPKMRRAAKTVNFGVLYGMSAHRLSQELGIDYKEAEAFIERYFQSFPKVRAWIERTLEEGRTRGYVETLFGRRRYVPDLASRVRSVREAAERMAFNMPVQGTAADLMKIAMVKLFPRLKPLGAHLLLQVHDELVLEVPEDRAEEAKALVKEVMENAYPLDVPLEVEVGVGRDWLEAKQD

SEQ ID NO: 169 - DNA, 2532 bp, synthetic construct
  misc_feature 1..2532: note = DNA Polymerase Variant
  source 1..2532: mol_type = other DNA
atgcaccatcatcatcatcatggcggtagcggcatgttaccgctgtttgatttggaagaaccaccaaaacgcgtgctgcttgttgacggccatcatctggcgtatcgtaccttctacgcactgagccttacgacctcacgtggtgagcctgtccagatggtgtatgggtttgctcgctccctgctgaaagccctgaaggaagatggtcaagccgtagtagtggttttcgatgcgaaagcaccgtcgtttcgtcacgaagcgtacgaggcctataaagctggccgcgcaccgaccccggaagactttccgcgtcagttagcgctcgtcaaacgcctcgtggatttgctgggattagttcgcttggaagctcctggctacgaggcggacgacgtgctcggtacactggccaagaaagcagaacgtgaaggcatggaggtctgcattcttaccggtgatcgcgatttcttccagctgctgtctgagaaagtgagcgttttgctgcccgatggcacgttagtaaccccgaaagatgtccaagagaaatatggagttccgccagaacgttgggtggactttcgcgcactgactggtgatcgttcagacaacatcccgggcgttgccgggattggtgaaaagacggcgctgcgcctgctggcagaatggggctcggtggaaaatctgctcaagaaccttgatcgtgtgaaacctgatagcttacgccgcaagatcgaagcccacctggaagacttgcgtctgagtctggatcttgcgcgtattcgcaccgatctgccgttggaagtagactttaaagctctgcgtcgtcgcacacccgatttagaggggttacgcgcgttcctcgaagaactggagtttggctccctgctgcatgaattcggtttgttgggcggagagaaaccgcgtgaagaagcaccatggccgccgcccgaaggtgcctttgtcggctttcttctgtcacgcaaagagccaatgtgggcggaactgttagctcttgcagccgccgcggaagggcgtgttcaccgcgcgacctctcctgtcgaggccctcgctgacctcaaagaagcacgtggtttcttggcgaaagatttagccgtgcttgcattacgcgaaggcgttgcgctcgatccgacggacgacccgcttttggtggcttatttgctcgatcctgcgaataccaatccggaaggtgtagcccgtcgttacggcggcgagtttactgaagatgcggcagaacgcgcgttgcttagcgaacgcctcttccagacgttatttccacgtctttcggagaaattactctggctctatcaggaagtcgaacgtccattgagtcgcgtgcttgcccatatggaggctcgcggtgtgcgcttagatgttccgttgttagaagcactcagcttcgagttggagaaagaaatggaacgtcttgaaggcgaagtctttcgtttagcggggcatcccttcaatctcaactctcgcgaccaattggagaaagtgctctttgatgaattaggtttaacccctgtaggacgcacagagaagaccggcaaacgttccactgcgcaaagtgtcttggaagcacttcgtggtgctcacccgatcgtcgagttgattttgcagtaccgcgagctcagtaaactcaaaaacacctatctggatccgttacctcgtcttgttcatccacgtacgggtcgtttacacacccgcttcaatcaaacggcgacagccaccgggcgcttgtcgtcgagtgacccgaacctccagaatattccagtgcgcacgccgttaggccaacgcattcgtaaagcgtttgttgcggaagaaggttggttattacttgcggccgattactcccagatcgaacttcgtgtattggcgcatctctctggcgacgagaatcttaaacgcgtgtttcgcgaaggcaaggatattcacactgaaaccgcagcctggatgttcgggcttgacccagccttagtggaccccaagatgcgtcgtgccgccaagaccgtcaactttggcgtactctatggtatgtcagcacatcgtcttagtcaggaattgggcattgactacaaagaagctgaagcgtttatcgagcgctatttccaatcctttccgaaagttcgcgcgtggattgaacgtaccctcgaagaaggtcgcactcgcggctatgtggaaacgttattcgggcgtcgtcgctacgttccagatcttgcatctcgtgtccgctcagtgcgcgaagctgctgagcgtatggccttcaatatgcctgttcagggaacagcggcggacctcatgaagatcgccatggtgaaattgtttccgcgcttgaaacccttaggagcccaccttcttttacaggtgcatgatgaattggtcttggaagtacccgaggatcgcgcagaagaagccaaagcactcgtgaaagaggttatggaaaacgcgtatccgttagatgttccgttggaggtcgaagtgggtgtaggccgtgattggcttgaagcgaaacaagac

SEQ ID NO: 170 - protein, 844 aa, synthetic construct
  REGION 1..844: note = DNA Polymerase Variant
MHHHHHHGGSGMLPLFDLEEPPKRVLLVDGHHLAYRTFYALSLTTSRGEPVQMVYGFARSLLKALKEDGQAVVVVFDAKAPSFRHEAYEAYKAGRAPTPEDFPRQLALVKRLVDLLGLVRLEAPGYEADDVLGTLAKKAEREGMEVCILTGDRDFFQLLSEKVSVLLPDGTLVTPKDVQEKYGVPPERWVDFRALTGDRSDNIPGVAGIGEKTALRLLAEWGSVENLLKNLDRVKPDSLRRKIEAHLEDLRLSLDLARIRTDLPLEVDFKALRRRTPDLEGLRAFLEELEFGSLLHEFGLLGGEKPREEAPWPPPEGAFVGFLLSRKEPMWAELLALAAAAEGRVHRATSPVEALADLKEARGFLAKDLAVLALREGVALDPTDDPLLVAYLLDPANTNPEGVARRYGGEFTEDAAERALLSERLFQTLFPRLSEKLLWLYQEVERPLSRVLAHMEARGVRLDVPLLEALSFELEKEMERLEGEVFRLAGHPFNLNSRDQLEKVLFDELGLTPVGRTEKTGKRSTAQSVLEALRGAHPIVELILQYRELSKLKNTYLDPLPRLVHPRTGRLHTRFNQTATATGRLSSSDPNLQNIPVRTPLGQRIRKAFVAEEGWLLLAADYSQIELRVLAHLSGDENLKRVFREGKDIHTETAAWMFGLDPALVDPKMRRAAKTVNFGVLYGMSAHRLSQELGIDYKEAEAFIERYFQSFPKVRAWIERTLEEGRTRGYVETLFGRRRYVPDLASRVRSVREAAERMAFNMPVQGTAADLMKIAMVKLFPRLKPLGAHLLLQVHDELVLEVPEDRAEEAKALVKEVMENAYPLDVPLEVEVGVGRDWLEAKQD

SEQ ID NO: 171 - DNA, 2532 bp, synthetic construct
  misc_feature 1..2532: note = DNA Polymerase Variant
  source 1..2532: mol_type = other DNA
atgcaccatcatcatcatcatggcggtagcggcatgttaccgctgtttgatttggaagaaccaccaaaacgcgtgctgcttgttgacggccatcatctggcgtatcgtaccttctacgcactgagccttacgacctcacgtggtgagcctgtccagatggtgtatgggtttgctcgctccctgctgaaagccctgaaggaagatggtcaagccgtagtagtggttttcgatgcgaaagcaccgtcgtttcgtcacgaagcgtacgaggcctataaagctggccgcgcaccgaccccggaagactttccgcgtcagttagcgctcgtcaaacgcctcgtggatttgctgggattagttcgcttggaagctcctggctacgaggcggacgacgtgctcggtacactggccaagaaagcagaacgtgaaggcatggaggtctgcattcttaccggtgatcgcgatttcttccagctgctgtctgagaaagtgagcgttttgctgcccgatggcacgttagtaaccccgaaagatgtccaagagaaatatggagttccgccagaacgttgggtggactttcgcgcactgactggtgatcgttcagacaacatcccgggcgttgccgggattggtgaaaagacggcgctgcgcctgctggcagaatggggctcggtggaaaatctgctcaagaaccttgatcgtgtgaaacctgatagcttacgccgcaagatcgaagcccacctggaagacttgcgtctgagtctggatcttgcgcgtattcgcaccgatctgccgttggaagtagactttaaagctctgcgtcgtcgcacacccgatttagaggggttacgcgcgttcctcgaagaactggagtttggctccctgctgcatgaattcggtttgttgggcggagagaaaccgcgtgaagaagcaccatggccgccgcccgaaggtgcctttgtcggctttcttctgtcacgcaaagagccaatgtgggcggaactgttagctcttgcagccgccgcggaagggcgtgttcaccgcgcgacctctcctgtcgaggccctcgctgacctcaaagaagcacgtggtttcttggcgaaagatttagccgtgcttgcattacgcgaaggcgttgcgctcgatccgacggacgacccgcttttggtggcttatttgctcgatcctgcgaataccaacccggaaggtgtagcccgtcgttacggcggcgagtttactgaagatgcggcagaacgcgcgttgcttagcgaacgcctcttccagacgttatttccacgtctttcggagaaattactctggctctatcaggaagtcgaacgtccattgagtcgcgtgcttgcccatatggaggctcgcggtgtgcgcttagatgttccgttgttagaagcactcagcttcgagttggagaaagaactggaacgtcttgaaggcgaagtctttcgtttagcggggcatcccttcaatctcaactctcgcgaccaattggagaaagtgctctttgatgaattaggtttaacccctgtaggacgcacagagaagaccggcaaacgttccactgctcagggagcattggaagcacttcgtggtgctcacccgatcgtcgaattgattttgcagtaccgcgagctcagtaaactcaaaggcacctatattgatccgttacctcgtcttgttcatccacgtacgggtcgtttacacacccgcttcaatcaaacggcgacagccaccgggcgcttgtcgtcgagtgacccgaacctccagaatattccagtgcgcacgccgttaggccaacgcattcgtaaagcgtttgttgcggaagaaggttggttattacttgcggccgattactcccagatcgaacttcgtgtattggcgcatctctctggcgacgagaatcttaaacgcgtgtttcgcgaaggcaaggatattcacactgaaaccgcagcctggatgttcgggcttgacccagccttagtggaccccaagatgcgtcgtgccgccaagaccgtcaactttggcgtactctatggtatgtcagcacatcgtcttagtcaggaattgggcattgactacaaagaagctgaagcgtttatcgagcgctatttccaatcctttccgaaagttcgcgcgtggattgaacgtaccctcgaagaaggtcgcactcgcggctatgtggaaacgttattcgggcgtcgtcgctacgttccagatcttgcatctcgtgtccgctcagtgcgcgaagctgctgagcgtatggccttcaatatgcctgttcagggaacagcggcggacctcatgaagatcgccatggtgaaattgtttccgcgcttgaaacccttaggagcccaccttcttttacaggtgcatgatgaattggtcttggaagtacccgaggatcgcgcagaagaagccaaagcactcgtgaaagaggttatggaaaacgcgtatccgttagatgttccgttggaggtcgaagtgggtgtaggccgtgattggcttgaagcgaaacaagac

SEQ ID NO: 172 - protein, 844 aa, synthetic construct
  REGION 1..844: note = DNA Polymerase Variant
MHHHHHHGGSGMLPLFDLEEPPKRVLLVDGHHLAYRTFYALSLTTSRGEPVQMVYGFARSLLKALKEDGQAVVVVFDAKAPSFRHEAYEAYKAGRAPTPEDFPRQLALVKRLVDLLGLVRLEAPGYEADDVLGTLAKKAEREGMEVCILTGDRDFFQLLSEKVSVLLPDGTLVTPKDVQEKYGVPPERWVDFRALTGDRSDNIPGVAGIGEKTALRLLAEWGSVENLLKNLDRVKPDSLRRKIEAHLEDLRLSLDLARIRTDLPLEVDFKALRRRTPDLEGLRAFLEELEFGSLLHEFGLLGGEKPREEAPWPPPEGAFVGFLLSRKEPMWAELLALAAAAEGRVHRATSPVEALADLKEARGFLAKDLAVLALREGVALDPTDDPLLVAYLLDPANTNPEGVARRYGGEFTEDAAERALLSERLFQTLFPRLSEKLLWLYQEVERPLSRVLAHMEARGVRLDVPLLEALSFELEKELERLEGEVFRLAGHPFNLNSRDQLEKVLFDELGLTPVGRTEKTGKRSTAQGALEALRGAHPIVELILQYRELSKLKGTYIDPLPRLVHPRTGRLHTRFNQTATATGRLSSSDPNLQNIPVRTPLGQRIRKAFVAEEGWLLLAADYSQIELRVLAHLSGDENLKRVFREGKDIHTETAAWMFGLDPALVDPKMRRAAKTVNFGVLYGMSAHRLSQELGIDYKEAEAFIERYFQSFPKVRAWIERTLEEGRTRGYVETLFGRRRYVPDLASRVRSVREAAERMAFNMPVQGTAADLMKIAMVKLFPRLKPLGAHLLLQVHDELVLEVPEDRAEEAKALVKEVMENAYPLDVPLEVEVGVGRDWLEAKQD

SEQ ID NO: 173 - DNA, 2532 bp, synthetic construct
  misc_feature 1..2532: note = DNA Polymerase Variant
  source 1..2532: mol_type = other DNA
atgcaccatcatcatcatcatggcggtagcggcatgttaccgctgtttgatttggaagaaccaccaaaacgcgtgctgcttgttgacggccatcatctggcgtatcgtaccttctacgcactgagccttacgacctcacgtggtgagcctgtccagatggtgtatgggtttgctcgctccctgctgaaagccctgaaggaagatggtcaagccgtagtagtggttttcgatgcgaaagcaccgtcgtttcgtcacgaagcgtacgaggcctataaagctggccgcgcaccgaccccggaagactttccgcgtcagttagcgctcgtcaaacgcctcgtggatttgctgggattagttcgcttggaagctcctggctacgaggcggacgacgtgctcggtacactggccaagaaagcagaacgtgaaggcatggaggtctgcattcttaccggtgatcgcgatttcttccagctgctgtctgagaaagtgagcgttttgctgcccgatggcacgttagtaaccccgaaagatgtccaagagaaatatggagttccgccagaacgttgggtggactttcgcgcactgactggtgatcgttcagacaacatcccgggcgttgccgggattggtgaaaagacggcgctgcgcctgctggcagaatggggctcggtggaaaatctgctcaagaaccttgatcgtgtgaaacctgatagcttacgccgcaagatcgaagcccacctggaagacttgcgtctgagtctggatcttgcgcgtattcgcaccgatctgccgttggaagtagactttaaagctctgcgtcgtcgcacacccgatttagaggggttacgcgcgttcctcgaagaactggagtttggctccctgctgcatgaattcggtttgttgggcggagagaaaccgcgtgaagaagcaccatggccgccgcccgaaggtgcctttgtcggctttcttctgtcacgcaaagagccaatgtgggcggaactgttagctcttgcagccgccgcggaagggcgtgttcaccgcgcgacctctcctgtcgaggccctcgctgacctcaaagaagcacgtggtttcttggcgaaagatttagccgtgcttgcattacgcgaaggcgttgcgctcgatccgacggacgacccgcttttggtggcttatttgctcgatcctgcgaataccaatccggaaggtgtagcccgtcgttacggcggcgagtttactgaagatgcggcagaacgcgcgttgcttagcgaacgcctcttccagacgttatttccacgtctttcggagaaattactctggctctatcaggaagtcgaacgtccattgagtcgcgtgcttgcccatatggaggctcgcggtgtgcgcttagatgttccgttgttagaagcactcagcttcgagttggagaaagaactggaacgtcttgaaggcgaagtctttcgtttagcggggcatcccttcaatctcaactctcgcgaccaattggagaaagtgctctttgatgaattaggtttaacccctatcggaaaaacagagaagaccggcaaacgttccactgctcagggagcattggaagcacttcgtggtgctcacccgatcgtcgacttgattttgcagtaccgcgagctcactaaactcaaaggcacctatattgatccgttacctcgtcttgttcatccacgtacgggtcgtttacacacccgcttcaatcaaacggcgacagccaccgggcgcttgtcgtcgagtgacccgaacctccagaatattccagtgcgcacgccgttaggccaacgcattcgtaaagcgtttgttgcggaagaaggttggttattacttgcggccgattactcccagatcgaacttcgtgtattggcgcatctctctggcgacgagaatcttaaacgcgtgtttcgcgaaggcaaggatattcacactgaaaccgcagcctggatgttcgggcttgacccagccttagtggaccccaagatgcgtcgtgccgccaagaccgtcaactttggcgtactctatggtatgtcagcacatcgtcttagtcaggaattgggcattgactacaaagaagctgaagcgtttatcgagcgctatttccaatcctttccgaaagttcgcgcgtggattgaacgtaccctcgaagaaggtcgcactcgcggctatgtggaaacgttattcgggcgtcgtcgctacgttccagatcttgcatctcgtgtccgctcagtgcgcgaagctgctgagcgtatggccttcaatatgcctgttcagggaacagcggcggacctcatgaagatcgccatggtgaaattgtttccgcgcttgaaacccttaggagcccaccttcttttacaggtgcatgatgaattggtcttggaagtacccgaggatcgcgcagaagaagccaaagcactcgtgaaagaggttatggaaaacgcgtatccgttagatgttccgttggaggtcgaagtgggtgtaggccgtgattggcttgaagcgaaacaagac

SEQ ID NO: 174 - protein, 844 aa, synthetic construct
  REGION 1..844: note = DNA Polymerase Variant
MHHHHHHGGSGMLPLFDLEEPPKRVLLVDGHHLAYRTFYALSLTTSRGEPVQMVYGFARSLLKALKEDGQAVVVVFDAKAPSFRHEAYEAYKAGRAPTPEDFPRQLALVKRLVDLLGLVRLEAPGYEADDVLGTLAKKAEREGMEVCILTGDRDFFQLLSEKVSVLLPDGTLVTPKDVQEKYGVPPERWVDFRALTGDRSDNIPGVAGIGEKTALRLLAEWGSVENLLKNLDRVKPDSLRRKIEAHLEDLRLSLDLARIRTDLPLEVDFKALRRRTPDLEGLRAFLEELEFGSLLHEFGLLGGEKPREEAPWPPPEGAFVGFLLSRKEPMWAELLALAAAAEGRVHRATSPVEALADLKEARGFLAKDLAVLALREGVALDPTDDPLLVAYLLDPANTNPEGVARRYGGEFTEDAAERALLSERLFQTLFPRLSEKLLWLYQEVERPLSRVLAHMEARGVRLDVPLLEALSFELEKELERLEGEVFRLAGHPFNLNSRDQLEKVLFDELGLTPIGKTEKTGKRSTAQGALEALRGAHPIVDLILQYRELTKLKGTYIDPLPRLVHPRTGRLHTRFNQTATATGRLSSSDPNLQNIPVRTPLGQRIRKAFVAEEGWLLLAADYSQIELRVLAHLSGDENLKRVFREGKDIHTETAAWMFGLDPALVDPKMRRAAKTVNFGVLYGMSAHRLSQELGIDYKEAEAFIERYFQSFPKVRAWIERTLEEGRTRGYVETLFGRRRYVPDLASRVRSVREAAERMAFNMPVQGTAADLMKIAMVKLFPRLKPLGAHLLLQVHDELVLEVPEDRAEEAKALVKEVMENAYPLDVPLEVEVGVGRDWLEAKQD

SEQ ID NO: 175 - DNA, 2532 bp, synthetic construct
  misc_feature 1..2532: note = DNA Polymerase Variant
  source 1..2532: mol_type = other DNA
atgcaccatcatcatcatcatggcggtagcggcatgttaccgctgtttgatttggaagaaccaccaaaacgcgtgctgcttgttgacggccatcatctggcgtatcgtaccttctatgcactgagccttacgacctcacgtggtgagcctgtccagatggtgtatgggtttgctcgctccctgctgaaagccctgaaggaagatggtcaagccgtagtagtggttttcgatgcgaaagcaccgtcgtttcgtcacgaagcgtacgaggcctataaagctggccgcgcaccgaccccggaagactttccgcgtcagttagcgctcgtcaaacgcctcgtggatttgctgggattagttcgcttggaagctcctggctacgaggcggacgacgtgctcggtacactggccaagaaagcagaacgtgaaggcatggaggtctgcattcttaccggtgatcgcgatttcttccagctgctgtctgagaaagtgagcgttttgctgcccgatggcacgttagtaaccccgaaagatgtccaagagaaatatggagttccgccagaacgttgggtggactttcgcgcactgactggtgatccttcagacaacatcccgggcgttgccgggattggtgaaaagacggcgctgaagctgctggcagaatggggctcggtggaaaatctgctcaagaaccttgatcgtgtgaaacctgatagcttacgccgtaagatcgaagcccacctggaagacttgcgtctgagtctggatcttgcgcgtattcgcaccgatctgccgttggaagtagactttaaagctctgcgtcgtcgcacacccgatttagaggggttacgcgcgttcctcgaagaactggagtttggctccctgctgcatgaattcggtttgttgggcggagagaaaccgcgtgaagaagcaccatggccgccgcccgaaggtgcctttgtcggctttcttctgtcacgcaaagagccaatgtgggcggaactgttagctcttgcagccgccgcggaagggcgtgttcaccgcgcgacctctcctgtcgaggccctcgctgacctcaaagaagcacgtggtttcttggcgaaagatttagccgtgcttgcattacgcgaaggcgttgcgctcgatccgacggacgacccgcttttggtggcttatttgctcgatcctgcgaataccaacccggaaggtgtagcccgtcgttacggcggcgagtttactgaagatgcggcagaacgcgcgttgcttagcgaacgcctcttccagacgttatttccacgtctttcggagaaattactctggctctatcaggaagtcgaacgtccattgagtcgcgtgcttgcccatatggaggctcgcggtgtgcgcttagatgttccgttgttagaagcactcagcttcgagttggagaaagaaatggaacgtcttgaaggcgaagtctttcgtttagcggggcatcccttcaatctcaactctcgcgaccaattggagaaagtgctctttgatgaattaggtttaaccccggtaggacgcacagagaagaccggcaaacgttccactgctcagggagcattggaagcacttcgtggtgctcacccgatcgtcgagttgattttgcagtaccgcgagctcagcaaactcaaatcaacctatcttgatccgttacctcgtcttgttcatccacgtacgggtcgtttacacacccgcttcaatcaaacggcgacagccaccgggcgcttgtcgtcgagtgacccgaacctccagaatattccagtgcgcacgccgttaggccaacgcattcgtaaagcgtttgttgcggaagaaggttggttattacttgcggccgattactcccagatcgaacttcgtgtattggcgcatctctctggcgacgagaatcttaaacgcgtgtttcaggaaggcaaggatattcacactgaaaccgcagcctggatgttcgggcttgacccagcggctgtggaccccaagatgcgtcgtgccgccaagaccgtcaactttggcgtactctatggtatgtcagcacatcgtcttagtcaggaattgggcattgactacaaggaagctgaagcgtttatcgagcgctatttccaatcctttccgaaagttcgcgcgtggattgaacgtaccctcgaagaaggtcgcactcgcggctatgtggaaacgttattcgggcgtcgtcgctacgttccagatcttgcatctcgtgtccgctcagtgcgcgaagctgctgagcgtatggccttcaatatgcctgttcagggaacagcggcggacctcatgaagatcgccatggtgaaattgtttccgcgcttgaaacccttaggagcccaccttcttttacaggtgcatgatgaattggtcttggaagtacccgaggatcgcgcagaagaagccaaagcactcgtgaaagaggttatggaaaacgcgtatccgttagatgttccgttggaggtcgaagtgggtgtaggccgtgattggcttgaagcgaaacaagac

SEQ ID NO: 176 - protein, 844 aa, synthetic construct
  REGION 1..844: note = DNA Polymerase Variant
MHHHHHHGGSGMLPLFDLEEPPKRVLLVDGHHLAYRTFYALSLTTSRGEPVQMVYGFARSLLKALKEDGQAVVVVFDAKAPSFRHEAYEAYKAGRAPTPEDFPRQLALVKRLVDLLGLVRLEAPGYEADDVLGTLAKKAEREGMEVCILTGDRDFFQLLSEKVSVLLPDGTLVTPKDVQEKYGVPPERWVDFRALTGDPSDNIPGVAGIGEKTALKLLAEWGSVENLLKNLDRVKPDSLRRKIEAHLEDLRLSLDLARIRTDLPLEVDFKALRRRTPDLEGLRAFLEELEFGSLLHEFGLLGGEKPREEAPWPPPEGAFVGFLLSRKEPMWAELLALAAAAEGRVHRATSPVEALADLKEARGFLAKDLAVLALREGVALDPTDDPLLVAYLLDPANTNPEGVARRYGGEFTEDAAERALLSERLFQTLFPRLSEKLLWLYQEVERPLSRVLAHMEARGVRLDVPLLEALSFELEKEMERLEGEVFRLAGHPFNLNSRDQLEKVLFDELGLTPVGRTEKTGKRSTAQGALEALRGAHPIVELILQYRELSKLKSTYLDPLPRLVHPRTGRLHTRFNQTATATGRLSSSDPNLQNIPVRTPLGQRIRKAFVAEEGWLLLAADYSQIELRVLAHLSGDENLKRVFQEGKDIHTETAAWMFGLDPAAVDPKMRRAAKTVNFGVLYGMSAHRLSQELGIDYKEAEAFIERYFQSFPKVRAWIERTLEEGRTRGYVETLFGRRRYVPDLASRVRSVREAAERMAFNMPVQGTAADLMKIAMVKLFPRLKPLGAHLLLQVHDELVLEVPEDRAEEAKALVKEVMENAYPLDVPLEVEVGVGRDWLEAKQD

SEQ ID NO: 177 - DNA, 2532 bp, synthetic construct
  misc_feature 1..2532: note = DNA Polymerase Variant
  source 1..2532: mol_type = other DNA
atgcaccatcatcatcatcatggcggtagcggcatgttaccgctgtttgatttggaagaaccaccaaaacgcgtgctgcttgttgacggccatcatctggcgtatcgtaccttctacgcactgagccttacgacctcacgtggtgagcctgtccagatggtgtatgggtttgctcgctccctgctgaaagccctgaaggaagatggtcaagccgtagtagtggttttcgatgcgaaagcaccgtcgtttcgtcacgaagcgtacgaggcctataaagctggccgcgcaccgaccccggaagactttccgcgtcagttagcgctcgtcaaacgcctcgtggatttgctgggattagttcgcttggaagctcctggctacgaggcggacgacgtgctcggtacactggccaagaaagcagaacgtgaaggcatggaggtctgcattcttaccggtgatcgcgatttcttccagctgctgtctgagaaagtgagcgttttgctgcccgatggcacgttagtaaccccgaaagatgtccaagagaaatatggagttccgccagaacgttgggtggactttcgcgcactgactggtgatcgttcagacaacatcccgggcgttgccgggattggtgaaaagacggcgctgcgcctgctggcagaatggggctcggtggaaaatctgctcaagaaccttgatcgtgtgaaacctgatagcttacgccgcaagatcgaagcccacctggaagacttgcgtctgagtctggatcttgcgcgtattcgcaccgatctgccgttggaagtagactttaaagctctgcgtcgtcgcacacccgatttagaggggttacgcgcgttcctcgaagaactggagtttggctccctgctgcatgaattcggtttgttgggcggagagaaaccgcgtgaagaagcaccatggccgccgcccgaaggtgcctttgtcggctttcttctgtcacgcaaagagccaatgtgggcggaactgttagctcttgcagccgccgcggaagggcgtgttcaccgcgcgacctctcctgtcgaggccctcgctgacctcaaagaagcacgtggtttcttggcgaaagatttagccgtgcttgcattacgcgaaggcgttgcgctcgatccgacggacgacccgcttttggtggcttatttgctcgatccttcgaataccaatccggaaggtgtagcccgtcgttacggcggcgagtttactgaagatgcggcagaacgcgcgttgcttagcgaacgcctcttccagacgttatttccacgtctttcggagaaattactctggctctatcaggaagtcgaacgtccattgagtcgcgtgcttgcccatatggaggctcgcggtgtgcgcttagatgttccgttgttagaagcactcagcttcgagttggagaaagaaatcgaacgtcttgaaggcgaagtctttcgtttagcggggcatcccttcaatctcaactctcgcgaccaattggagaaagtgctctttgatgaattaggtttaacccctatcggacgtacagagaagaccggcaaacgttccactgctcagggagcattggaagcacttcgtggtgctcacccgatcgtcgaattgattttgcagtaccgcgagctcagtaaactcaaaggcacctatattgatccgttacctcgtcttgttcatccacgtacgggtcgtttacacacccgcttcaatcaaacggcgacagccaccgggcgcttgtcgtcgagtgacccgaacctccagaatattccagtgcgcacgccgttaggccaacgcattcgtaaagcgtttgttgcggaagaaggttggttattacttgcggccgattactcccagatcgaacttcgtgtattggcgcatctctctggcgacgagaatcttaaacgcgtgtttcgcgaaggcaaggatattcacactgaaaccgcagcctggatgttcgggcttgacccagccttagtggaccccaagatgcgtcgtgccgccaagaccgtcaactttggcgtactctatggtatgtcagcacatcgtcttagtcaggaattggacattgactacaaagaagctgaagcgtttatcgagcgctatttccaatcctttccgaaagttcgcgcgtggattgaacgtaccctcgaagaaggtcgcactcgcggctatgtggaaacgttattcgggcgtcgtcgctacgttccagatcttgcatctcgtgtccgctcagtgcgcgaagctgctgagcgtatggccttcaatatgcctgttcagggaacagcggcggacctcatgaagatcgccatggtgaaattgtttccgcgcttgaaacccttaggagcccaccttcttttacaggtgcatgatgaattggtcttggaagtacccgaggatcgcgcagaagaagccaaagcactcgtgaaagaggttatggaaaacgcgtatccgttagatgttccgttggaggtcgaagtgggtgtaggccgtgattggcttgaagcgaaacaagac

SEQ ID NO: 178 - protein, 844 aa, synthetic construct
  REGION 1..844: note = DNA Polymerase Variant
MHHHHHHGGSGMLPLFDLEEPPKRVLLVDGHHLAYRTFYALSLTTSRGEPVQMVYGFARSLLKALKEDGQAVVVVFDAKAPSFRHEAYEAYKAGRAPTPEDFPRQLALVKRLVDLLGLVRLEAPGYEADDVLGTLAKKAEREGMEVCILTGDRDFFQLLSEKVSVLLPDGTLVTPKDVQEKYGVPPERWVDFRALTGDRSDNIPGVAGIGEKTALRLLAEWGSVENLLKNLDRVKPDSLRRKIEAHLEDLRLSLDLARIRTDLPLEVDFKALRRRTPDLEGLRAFLEELEFGSLLHEFGLLGGEKPREEAPWPPPEGAFVGFLLSRKEPMWAELLALAAAAEGRVHRATSPVEALADLKEARGFLAKDLAVLALREGVALDPTDDPLLVAYLLDPSNTNPEGVARRYGGEFTEDAAERALLSERLFQTLFPRLSEKLLWLYQEVERPLSRVLAHMEARGVRLDVPLLEALSFELEKEIERLEGEVFRLAGHPFNLNSRDQLEKVLFDELGLTPIGRTEKTGKRSTAQGALEALRGAHPIVELILQYRELSKLKGTYIDPLPRLVHPRTGRLHTRFNQTATATGRLSSSDPNLQNIPVRTPLGQRIRKAFVAEEGWLLLAADYSQIELRVLAHLSGDENLKRVFREGKDIHTETAAWMFGLDPALVDPKMRRAAKTVNFGVLYGMSAHRLSQELDIDYKEAEAFIERYFQSFPKVRAWIERTLEEGRTRGYVETLFGRRRYVPDLASRVRSVREAAERMAFNMPVQGTAADLMKIAMVKLFPRLKPLGAHLLLQVHDELVLEVPEDRAEEAKALVKEVMENAYPLDVPLEVEVGVGRDWLEAKQD

SEQ ID NO: 179 - DNA, 2532 bp, synthetic construct
  misc_feature 1..2532: note = DNA Polymerase Variant
  source 1..2532: mol_type = other DNA
atgcaccatcatcatcatcatggcggtagcggcatgttaccgctgtttgatttggaagaaccaccaaaacgcgtgctgcttgttgacggccatcatctggcgtatcgtaccttctacgcactgagccttacgacctcacgtggtgagcctgtccagatggtgtatgggtttgctcgctccctgctgaaagccctgaaggaagatggtcaagccgtagtagtggttttcgatgcgaaagcaccgtcgtttcgtcacgaagcgtacgaggcctataaagctggccgcgcaccgaccccggaagactttccgcgtcagttagcgctcgtcaaacgcctcgtggatttgctgggattagttcgcttggaagctcctggctacgaggcggacgacgtgctcggtacactggccaagaaagcagaacgtgaaggcatggaggtctgcattcttaccggtgatcgcgatttcttccagctgctgtctgagaaagtgagcgttttgctgcccgatggcacgttagtaaccccgaaagatgtccaagagaaatatggagttccgccagaacgttgggtggactttcgcgcactgactggtgatcgttcagacaacatcccgggcgttgccgggattggtgaaaagacggcgctgcgcctgctggcagaatggggctcggtggaaaatctgctcaagaaccttgatcgtgtgaaacctgatagcttacgccgcaagatcgaagcccacctggaagacttgcgtctgagtctggatcttgcgcgtattcgcaccgatctgccgttggaagtagactttaaagctctgcgtcgtcgcacacccgatttagaggggttacgcgcgttcctcgaagaactggagtttggctccctgctgcatgaattcggtttgttgggcggagagaaaccgcgtgaagaagcaccatggccgccgcccgaaggtgcctttgtcggctttcttctgtcacgcaaagagccaatgtgggcggaactgttagctcttgcagccgccgcggaagggcgtgttcaccgcgcgacctctcctgtcgaggccctcgctgacctcaaagaagcacgtggtttcttggcgaaagatttagccgtgcttgcattacgcgaaggcgttgcgctcgatccgacggacgacccgcttttggtggcttatttgctcgatcctgcgaataccaatccggaaggtgtagcccgtcgttacggcggcgagtttactgaagatgcggcagaacgcgcgttgcttagcgaacgcctcttccagacgttatttccacgtctttcggagaaattactctggctctatcaggaagtcgaacgtccattgagtcgcgtgcttgcccatatggaggctcgcggtgtgcgcttagatgttccgttgttagaagcactcagcttcgagttggagaaagaaatcgaacgtcttgaaggcgaagtctttcgtttagcggggcatcccttcaatctcaactctcgcgaccaattggagaaagtgctctttgatgaattaggtttaacccctgtaggacgcacagagaagaccggcaaacgttccactgctcagggagcattggaagcacttcgtggtgctcacccgatcgtcgaattgattttgcagtaccgcgagctcagcaaactcaaatcaacctatcttgatccgttacctcgtcttgttcatccacgtacgggtcgtttacacacccgcttcaatcaaacggcgacagccaccgggcgcttgtcgtcgagtgacccgaacctccagaatattccagtgcgcacgccgttaggccaacgcattcgtaaagcgtttgttgcggaagaaggttggttattacttgcggccgattactcccagatcgaacttcgtgtattggcgcatctctctggcgacgagaatcttaaacgcgtgtttcgcgaaggcaaggatattcacactgaaaccgcagcctggatgttcgggcttgacccagccttagtggaccccaagatgcgtcgtgccgccaagaccgtcaactttggcgtactctatggtatgtcagcacatcgtcttagtcaggaattgggcattgactacaaagaagctgaagcgtttatcgagcgctatttccaatcctttccgaaagttcgcgcgtggattgaacgtaccctcgaagaaggtcgcactcgcggctatgtggaaacgttattcgggcgtcgtcgctacgttccagatcttgcatctcgtgtccgctcagtgcgcgaagctgctgagcgtatggccttcaatatgcctgttcagggaacagcggcggacctcatgaagatcgccatggtgaaattgtttccgcgcttgaaacccttaggagcccaccttcttttacaggtgcatgatgaattggtcttggaagtacccgaggatcgcgcagaagaagccaaagcactcgtgaaagaggttatggaaaacgcgtatccgttagatgttccgttggaggtcgaagtgggtgtaggccgtgattggcttgaagcgaaacaagac

SEQ ID NO: 180 - protein, 844 aa, synthetic construct
  REGION 1..844: note = DNA Polymerase Variant
MHHHHHHGGSGMLPLFDLEEPPKRVLLVDGHHLAYRTFYALSLTTSRGEPVQMVYGFARSLLKALKEDGQAVVVVFDAKAPSFRHEAYEAYKAGRAPTPEDFPRQLALVKRLVDLLGLVRLEAPGYEADDVLGTLAKKAEREGMEVCILTGDRDFFQLLSEKVSVLLPDGTLVTPKDVQEKYGVPPERWVDFRALTGDRSDNIPGVAGIGEKTALRLLAEWGSVENLLKNLDRVKPDSLRRKIEAHLEDLRLSLDLARIRTDLPLEVDFKALRRRTPDLEGLRAFLEELEFGSLLHEFGLLGGEKPREEAPWPPPEGAFVGFLLSRKEPMWAELLALAAAAEGRVHRATSPVEALADLKEARGFLAKDLAVLALREGVALDPTDDPLLVAYLLDPANTNPEGVARRYGGEFTEDAAERALLSERLFQTLFPRLSEKLLWLYQEVERPLSRVLAHMEARGVRLDVPLLEALSFELEKEIERLEGEVFRLAGHPFNLNSRDQLEKVLFDELGLTPVGRTEKTGKRSTAQGALEALRGAHPIVELILQYRELSKLKSTYLDPLPRLVHPRTGRLHTRFNQTATATGRLSSSDPNLQNIPVRTPLGQRIRKAFVAEEGWLLLAADYSQIELRVLAHLSGDENLKRVFREGKDIHTETAAWMFGLDPALVDPKMRRAAKTVNFGVLYGMSAHRLSQELGIDYKEAEAFIERYFQSFPKVRAWIERTLEEGRTRGYVETLFGRRRYVPDLASRVRSVREAAERMAFNMPVQGTAADLMKIAMVKLFPRLKPLGAHLLLQVHDELVLEVPEDRAEEAKALVKEVMENAYPLDVPLEVEVGVGRDWLEAKQD

SEQ ID NO: 181 - DNA, 2532 bp, synthetic construct
  misc_feature 1..2532: note = DNA Polymerase Variant
  source 1..2532: mol_type = other DNA
atgcaccatcatcatcatcatggcggtagcggcatgttaccgctgtttgatttggaagaaccaccaaaacgcgtgctgcttgttgacggccatcatctggcgtatcgtaccttctacgcactgagccttacgacctcacgtggtgagcctgtccagatggtgtatgggtttgctcgctccctgctgaaagccctgaaggaagatggtcaagccgtagtagtggttttcgatgcgaaagcaccgtcgtttcgtcacgaagcgtacgaggcctataaagctggccgcgcaccgaccccggaagactttccgcgtcagttagcgctcgtcaaacgcctcgtggatttgctgggattagttcgcttggaagctcctggctacgaggcggacgacgtgctcggtacactggccaagaaagcagaacgtgaaggcatggaggtctgcattcttaccggtgatcgcgatttcttccagctgctgtctgagaaagtgagcgttttgctgcccgatggcacgttagtaaccccgaaagatgtccaagagaaatatggagttccgccagaacgttgggtggactttcgcgcactgactggtgatcgttcagacaacatcccgggcgttgccgggattggtgaaaagacggcgctgcgcctgctggcagaatggggctcggtggaaaatctgctcaagaaccttgatcgtgtgaaacctgatagcttacgcgagaagatcgaagcccacctggaagacttgcgtctgagtctggatcttgcgcgtattcgcaccgatctgccgttggaagtagactttaaagctctgcgtcgtcgcacacccgatttagaggggttacgcgcgttcctcgaagaactggagtttggctccctgctgcatgaattcggtttgttgggcggagagaaaccgcgtgaagaagcaccatggccgccgcccgaaggtgcctttgtcggctttcttctgtcacgcaaagagccaatgtgggcggaactgttagctcttgcagccgccgcggaagggcgtgttcaccgcgcgacctctcctgtcgaggccctcgctgacctcaaagaagcacgtggtttcttggcgaaagatttagccgtgcttgcattacgcgaaggcgttgcgctcgatccgacggacgacccgcttttggtggcttatttgctcgatcctgcgaataccaacccggaaggtgtagcccgtcgttacggcggcgagtttactgaagatgcggcagaacgcgcgttgcttagcgaacgcctcttccagacgttatttccacgtctttcggagaaattactctggctctatcaggaagtcgaacgtccattgagtcgcgtgcttgcccatatggaggctcgcggtgtgcgcttagatgttccgttgttagaagcactcagcttcgagttggagaaagaaatggaacgtcttgaaggcgaagtctttcgtttagcggggcatcccttcaatctcaactctcgcgaccaattggagaaagtgctctttgatgaattaggtttaaccccggtaggacgcacagagaagaccggcaaacgttccactgctcagggagcattggaagcacttcgtggtgctcacccgatcgtcgagttgattttgcagtaccgcgagctcagcaaactcaaatcaacctatcttgatccgttacctcgtcttgttcatccacgtacgggtcgtttacacacccgcttcaatcaaacggcgacagccaccgggcgcttgtcgtcgagtgacccgaacctccagaatattccagtgcgcacgccgttaggccaacgcattcgtaaagcgtttgttgcggaagaaggttggttattacttgcggccgattactcccagatcgaacttcgtgtattggcgcatctctctggcgacgagaatcttaaacgcgtgtttcaggaaggcaaggatattcacactgaaaccgcagcctggatgttcgggcttgacccagaggctgtggaccccaagatgcgtcgtgccgccaagaccgtcaactttggcgtactctatggtatgtcagcacatcgtcttagtcaggaattgggcattgactacaaggaagctgaagcgtttatcgagcgctatttccaatcctttccgaaagttcgcgcgtggattgaacgtaccctcgaagaaggtcgcactcgcggctatgtggaaacgttattcgggcgtcgtcgctacgttccagatcttgcatctcgtgtccgctcagtgcgcgaagctgctgagcgtatggccttcaatatgcctgttcagggaacagcggcggacctcatgaagatcgccatggtgaaattgtttccgcgcttgaaacccttaggagcccaccttcttttacaggtgcatgatgaattggtcttggaagtacccgaggatcgcgcagaagaagccaaagcactcgtgaaagaggttatggaaaacgcgtatccgttagatgttccgttggaggtcgaagtgggtgtaggccgtgattggcttgaagcgaaacaagac

SEQ ID NO: 182 - protein, 844 aa, synthetic construct
  REGION 1..844: note = DNA Polymerase Variant
MHHHHHHGGSGMLPLFDLEEPPKRVLLVDGHHLAYRTFYALSLTTSRGEPVQMVYGFARSLLKALKEDGQAVVVVFDAKAPSFRHEAYEAYKAGRAPTPEDFPRQLALVKRLVDLLGLVRLEAPGYEADDVLGTLAKKAEREGMEVCILTGDRDFFQLLSEKVSVLLPDGTLVTPKDVQEKYGVPPERWVDFRALTGDRSDNIPGVAGIGEKTALRLLAEWGSVENLLKNLDRVKPDSLREKIEAHLEDLRLSLDLARIRTDLPLEVDFKALRRRTPDLEGLRAFLEELEFGSLLHEFGLLGGEKPREEAPWPPPEGAFVGFLLSRKEPMWAELLALAAAAEGRVHRATSPVEALADLKEARGFLAKDLAVLALREGVALDPTDDPLLVAYLLDPANTNPEGVARRYGGEFTEDAAERALLSERLFQTLFPRLSEKLLWLYQEVERPLSRVLAHMEARGVRLDVPLLEALSFELEKEMERLEGEVFRLAGHPFNLNSRDQLEKVLFDELGLTPVGRTEKTGKRSTAQGALEALRGAHPIVELILQYRELSKLKSTYLDPLPRLVHPRTGRLHTRFNQTATATGRLSSSDPNLQNIPVRTPLGQRIRKAFVAEEGWLLLAADYSQIELRVLAHLSGDENLKRVFQEGKDIHTETAAWMFGLDPEAVDPKMRRAAKTVNFGVLYGMSAHRLSQELGIDYKEAEAFIERYFQSFPKVRAWIERTLEEGRTRGYVETLFGRRRYVPDLASRVRSVREAAERMAFNMPVQGTAADLMKIAMVKLFPRLKPLGAHLLLQVHDELVLEVPEDRAEEAKALVKEVMENAYPLDVPLEVEVGVGRDWLEAKQD

SEQ ID NO: 183 - DNA, 2532 bp, synthetic construct
  misc_feature 1..2532: note = DNA Polymerase Variant
  source 1..2532: mol_type = other DNA
atgcaccatcatcatcatcatggcggtagcggcatgttaccgctgtttgatttggaagaaccaccaaaacgcgtgctgcttgttgacggccatcatctggcgtatcgtaccttctacgcactgagccttacgacctcacgtggtgagcctgtccagatggtgtatgggtttgctcgctccctgctgaaagccctgaaggaagatggtcaagccgtagtagtggttttcgatgcgaaagcaccgtcgtttcgtcacgaagcgtacgaggcctataaagctggccgcgcaccgaccccggaagactttccgcgtcagttagcgctcgtcaaacgcctcgtggatttgctgggattagttcgcttggaagctcctggctacgaggcggacgacgtgctcggtacactggccaagaaagcagaacgtgaaggcatggaggtctgcattcttaccggtgatcgcgatttcttccagctgctgtctgagaaagtgagcgttttgctgcccgatggcacgttagtaaccccgaaagatgtccaagagaaatatggagttccgccagaacgttgggtggactttcgcgcactgactggtgatcgttcagacaacatcccgggcgttgccgggattggtgaaaagacggcgctgcgcctgctggcagaatggggctcggtggaaaatctgctcaagaaccttgatcgtgtgaaacctgatagcttacgccgcaagatcgaagcccacctggaagacttgcgtctgagtctggatcttgcgcgtattcgcaccgatctgccgttggaagtagactttaaagctctgcgtcgtcgcacacccgatttagaggggttacgcgcgttcctcgaagaactggagtttggctccctgctgcatgaattcggtttgttgggcggagagaaaccgcgtgaagaagcaccatggccgccgcccgaaggtgcctttgtcggctttcttctgtcacgcaaagagccaatgtgggcggaactgttagctcttgcagccgccgcggaagggcgtgttcaccgcgcgacctctcctgtcgaggccctcgctgacctcaaagaagcacgtggtttcttggcgaaagatttagccgtgcttgcattacgcgaaggcgttgcgctcgatccgacggacgacccgcttttggtggcttatttgctcgatcctgcgaataccactccggaaggtgtagcccgtcgttacggcggcgagtttactgaagatgcggcagaacgcgcgttgcttagcgaacgcctcttccagacgttatttccacgtctttcggagaaattactctggctctatcaggaagtcgaacgtccattgagtcgcgtgcttgcccatatggaggctcgcggtgtgcgcttagatgttccgttgttagaagcactcagcttcgagttggagaaagaaatcgaacgtcttgaaggcgaagtctttcgtttagcggggcatcccttcaatctcaactctcgcgaccaattggagaaagtgctctttgatgaattaggtttaacccctgtaggacgtacagagaagaccggcaaacgttccactgctcagggagcattggaagcacttcgtggtgctcacccgatcgtcgaattgattttgcagtaccgcgagctcagtaaactcaaaaacacctatattgatccgttacctcgtcttgttcatccacgtacgggtcgtttacacacccgcttcaatcaaacggcgacagccaccgggcgcttgtcgtcgagtgacccgaacctccagaatattccagtgcgcacgccgttaggccaacgcattcgtaaagcgtttgttgcggaagaaggttggttattacttgcggccgattactcccagatcgaacttcgtgtattggcgcatctctctggcgacgagaatcttaaacgcgtgtttcgcgaaggcaaggatattcacactgaaaccgcagcctggatgttcgggcttgacccagccttagtggaccccaagatgcgtcgtgccgccaagaccgtcaactttggcgtactctatggtatgtcagcacatcgtcttagtcaggaattgggcattgactacaaagaagctgaagcgtttatcgagcgctatttccaatcctttccgaaagttcgcgcgtggattgaacgtaccctcgaagaaggtcgcactcgcggctatgtggaaacgttattcgggcgtcgtcgctacgttccagatcttgcatctcgtgtccgctcagtgcgcgaagctgctgagcgtatggccttcaatatgcctgttcagggaacagcggcggacctcatgaagatcgccatggtgaaattgtttccgcgcttgaaacccttaggagcccaccttcttttacaggtgcatgatgaattggtcttggaagtacccgaggatcgcgcagaagaagccaaagcactcgtgaaagaggttatggaaaacgcgtatccgttagatgttccgttggaggtcgaagtgggtgtaggccgtgattggcttgaagcgaaacaagac

SEQ ID NO: 184 - protein, 844 aa, synthetic construct
  REGION 1..844: note = DNA Polymerase Variant
MHHHHHHGGSGMLPLFDLEEPPKRVLLVDGHHLAYRTFYALSLTTSRGEPVQMVYGFARSLLKALKEDGQAVVVVFDAKAPSFRHEAYEAYKAGRAPTPEDFPRQLALVKRLVDLLGLVRLEAPGYEADDVLGTLAKKAEREGMEVCILTGDRDFFQLLSEKVSVLLPDGTLVTPKDVQEKYGVPPERWVDFRALTGDRSDNIPGVAGIGEKTALRLLAEWGSVENLLKNLDRVKPDSLRRKIEAHLEDLRLSLDLARIRTDLPLEVDFKALRRRTPDLEGLRAFLEELEFGSLLHEFGLLGGEKPREEAPWPPPEGAFVGFLLSRKEPMWAELLALAAAAEGRVHRATSPVEALADLKEARGFLAKDLAVLALREGVALDPTDDPLLVAYLLDPANTTPEGVARRYGGEFTEDAAERALLSERLFQTLFPRLSEKLLWLYQEVERPLSRVLAHMEARGVRLDVPLLEALSFELEKEIERLEGEVFRLAGHPFNLNSRDQLEKVLFDELGLTPVGRTEKTGKRSTAQGALEALRGAHPIVELILQYRELSKLKNTYIDPLPRLVHPRTGRLHTRFNQTATATGRLSSSDPNLQNIPVRTPLGQRIRKAFVAEEGWLLLAADYSQIELRVLAHLSGDENLKRVFREGKDIHTETAAWMFGLDPALVDPKMRRAAKTVNFGVLYGMSAHRLSQELGIDYKEAEAFIERYFQSFPKVRAWIERTLEEGRTRGYVETLFGRRRYVPDLASRVRSVREAAERMAFNMPVQGTAADLMKIAMVKLFPRLKPLGAHLLLQVHDELVLEVPEDRAEEAKALVKEVMENAYPLDVPLEVEVGVGRDWLEAKQD

SEQ ID NO: 185 - DNA, 2532 bp, synthetic construct
  misc_feature 1..2532: note = DNA Polymerase Variant
  source 1..2532: mol_type = other DNA
atgcaccatcatcatcatcatggcggtagcggcatgttaccgctgtttgatttggaagaaccaccaaaacgcgtgctgcttgttgacggccatcatctggcgtatcgtaccttctacgcactgagccttacgacctcacgtggtgagcctgtccagatggtgtatgggtttgctcgctccctgctgaaagccctgaaggaagatggtcaagccgtagtagtggttttcgatgcgaaagcaccgtcgtttcgtcacgaagcgtacgaggcctataaagctggccgcgcaccgaccccggaagactttccgcgtcagttagcgctcgtcaaacgcctcgtggatttgctgggattagttcgcttggaagctcctggctacgaggcggacgacgtgctcggtacactggccaagaaagcagaacgtgaaggcatggaggtctgcattcttaccggtgatcgcgatttcttccagctgctgtctgagaaagtgagcgttttgctgcccgatggcacgttagtaaccccgaaagatgtccaagagaaatatggagttccgccagaacgttgggtggactttcgcgcactgactggtgatcgttcagacaacatcccgggcgttgccgggattggtgaaaagacggcgctgcgcctgctggcagaatggggctcggtggaaaatctgctcaagaaccttgatcgtgtgaaacctgatagcttacgccgcaagatcgaagcccacctggaagacttgcgtctgagtctggatcttgcgcgtattcgcaccgatctgccgttggaagtagactttaaagctctgcgtcgtcgcacacccgatttagaggggttacgcgcgttcctcgaacgtctggagtttggctccctgctgcatgaattcggtttgttgggcggagagaaaccgcgtgaagaagcaccatggccgccgcccgaaggtgcctttgtcggctttcttctgtcacgcaaagagccaatgtgggcggaactgttagctcttgcagccgccgcggaagggcgtgttcaccgcgcgacctctcctgtcgaggccctcgctgacctcaaagaagcacgtggtttcttggcgaaagatttagccgtgcttgcattacgcgaaggcgttgcgctcgatccgacggacgacccgcttttggtggcttatttgctcgatcctgcgaataccactccggaaggtgtagcccgtcgttacggcggcgagtttactgaagatgcggcagaacgcgcgttgcttagcgaacgcctcttccagacgttatttccacgtctttcggagaaattactctggctctatcaggaagtcgaacgtccattgagtcgcgtgcttgcccatatggaggctcgcggtgtgcgcttagatgttccgttgttagaagcactcagcttcgagttggagaaagaaatggaacgtcttgaaggcgaagtctttcgtttagcggggcatcccttcaatctcaactctcgcgaccaattggagaaagtgctctttgatgaattaggtttaacccctgtaggacgcacagagaagaccggcaaacgttccactgctcagggagcattggaagcacttcgtggtgctcacccgatcgtcgaattgattttgcagtaccgcgagctcactaaactcaaaagcacctatctggatccgttacctcgtcttgttcatccacgtacgggtcgtttacacacccgcttcaatcaaacggcgacagccaccgggcgcttgtcgtcgagtgacccgaacctccagaatattccagtgcgcacgccgttaggccaacgcattcgtaaagcgtttgttgcggaagaaggttggttattacttgcggccgattactcccagatcgaacttcgtgtattggcgcatctctctggcgacgagaatcttaaacgcgtgtttcgcgaaggcaaggatattcacactgaaaccgcagcctggatgttcgggcttgacccagccttagtggaccccaagatgcgtcgtgccgccaagaccgtcaactttggcgtactctatggtatgtcagcacatcgtcttagtcaggaattgggcattgactacaaagaagctgaagcgtttatcgagcgctatttccaatcctttccgaaagttcgcgcgtggattgaacgtaccctcgaagaaggtcgcactcgcggctatgtggaaacgttattcgggcgtcgtcgctacgttccagatcttgcatctcgtgtccgctcagtgcgcgaagctgctgagcgtatggccttcaatatgcctgttcagggaacagcggcggacctcatgaagatcgccatggtgaaattgtttccgcgcttgaaacccttaggagcccaccttcttttacaggtgcatgatgaattggtcttggaagtacccgaggatcgcgcagaagaagccaaagcactcgtgaaagaggttatggaaaacgcgtatccgttagatgttccgttggaggtcgaagtgggtgtaggccgtgattggcttgaagcgaaacaagac

SEQ ID NO: 186 - protein, 844 aa, synthetic construct
  REGION 1..844: note = DNA Polymerase Variant
MHHHHHHGGSGMLPLFDLEEPPKRVLLVDGHHLAYRTFYALSLTTSRGEPVQMVYGFARSLLKALKEDGQAVVVVFDAKAPSFRHEAYEAYKAGRAPTPEDFPRQLALVKRLVDLLGLVRLEAPGYEADDVLGTLAKKAEREGMEVCILTGDRDFFQLLSEKVSVLLPDGTLVTPKDVQEKYGVPPERWVDFRALTGDRSDNIPGVAGIGEKTALRLLAEWGSVENLLKNLDRVKPDSLRRKIEAHLEDLRLSLDLARIRTDLPLEVDFKALRRRTPDLEGLRAFLERLEFGSLLHEFGLLGGEKPREEAPWPPPEGAFVGFLLSRKEPMWAELLALAAAAEGRVHRATSPVEALADLKEARGFLAKDLAVLALREGVALDPTDDPLLVAYLLDPANTTPEGVARRYGGEFTEDAAERALLSERLFQTLFPRLSEKLLWLYQEVERPLSRVLAHMEARGVRLDVPLLEALSFELEKEMERLEGEVFRLAGHPFNLNSRDQLEKVLFDELGLTPVGRTEKTGKRSTAQGALEALRGAHPIVELILQYRELTKLKSTYLDPLPRLVHPRTGRLHTRFNQTATATGRLSSSDPNLQNIPVRTPLGQRIRKAFVAEEGWLLLAADYSQIELRVLAHLSGDENLKRVFREGKDIHTETAAWMFGLDPALVDPKMRRAAKTVNFGVLYGMSAHRLSQELGIDYKEAEAFIERYFQSFPKVRAWIERTLEEGRTRGYVETLFGRRRYVPDLASRVRSVREAAERMAFNMPVQGTAADLMKIAMVKLFPRLKPLGAHLLLQVHDELVLEVPEDRAEEAKALVKEVMENAYPLDVPLEVEVGVGRDWLEAKQD

SEQ ID NO: 187 - DNA, 2532 bp, synthetic construct
  misc_feature 1..2532: note = DNA Polymerase Variant
  source 1..2532: mol_type = other DNA
atgcaccatcatcatcatcatggcggtagcggcatgttaccgctgtttgatttggaagaaccaccaaaacgcgtgctgcttgttgacggccatcatctggcgtatcgtaccttctacgcactgagccttacgacctcacgtggtgagcctgtccagatggtgtatgggtttgctcgctccctgctgaaagccctgaaggaagatggtcaagccgtagtagtggttttcgatgcgaaagcaccgtcgtttcgtcacgaagcgtacgaggcctataaagctggccgcgcaccgaccccggaagactttccgcgtcagttagcgctcgtcaaacgcctcgtggatttgctgggattagttcgcttggaagctcctggctacgaggcggacgacgtgctcggtacactggccaagaaagcagaacgtgaaggcatggaggtctgcattcttaccggtgatcgcgatttcttccagctgctgtctgagaaagtgagcgttttgctgcccgatggcacgttagtaaccccgaaagatgtccaagagaaatatggagttccgccagaacgttgggtggactttcgcgcactgactggtgatcgttcagacaacatcccgggcgttgccgggattggtgaaaagacggcgctgcgcctgctggcagaatggggctcggtggaaaatctgctcaagaaccttgatcgtgtgaaacctgatagcttacgccgcaagatcgaagcccacctggaagacttgcgtctgagtctggatcttgcgcgtattcgcaccgatctgccgttggaagtagactttaaagctctgcgtcgtcgcacacccgatttagaggggttacgcgcgttcctcgaacgtctggagtttggctccctgctgcatgaattcggtttgttgggcggagagaaaccgcgtgaagaagcaccatggccgccgcccgaaggtgcctttgtcggctttcttctgtcacgcaaagagccaatgtgggcggaactgttagctcttgcagccgccgcggaagggcgtgttcaccgcgcgacctctcctgtcgaggccctcgctgacctcaaagaagcacgtggtttcttggcgaaagatttagccgtgcttgcattacgcgaaggcgttgcgctcgatccgacggacgacccgcttttggtggcttatttgctcgatcctgcgaataccaacccggaaggtgtagcccgtcgttacggcggcgagtttactgaagatgcggcagaacgcgcgttgcttagcgaacgcctcttccagacgttatttccacgtctttcggagaaattactctggctctatcaggaagtcgaacgtccattgagtcgcgtgcttgcccatatggaggctcgcggtgtgcgcttagatgttccgttgttagaagcactcagcttcgagttggagaaagaaatggaacgtcttgaaggcgaagtctttcgtttagcggggcatcccttcaatctcaactctcgcgaccaattggagaaagtgctctttgatgaattaggtttaacccctgtcggaaaaacagagaagaccggcaaacgttccacttcggcagccgccttggaagcacttcgtggtgctcacccgatcgtcgaattgattttgcagtaccgcgagctcagtaaactcaaaagcacctatattgatccgttacctcgtcttgttcatccacgtacgggtcgtttacacacccgcttcaatcaaacggcgacagccaccgggcgcttgtcgtcgagtgacccgaacctccagaatattccagtgcgcacgccgttaggccaacgcattcgtaaagcgtttgttgcggaagaaggttggttattacttgcggccgattactcccagatcgaacttcgtgtattggcgcatctctctggcgacgagaatcttaaacgcgtgtttcgcgaaggcaaggatattcacactgaaaccgcagcctggatgttcgggcttgacccagccttagtggaccccaagatgcgtcgtgccgccaagaccgtcaactttggcgtactctatggtatgtcagcacatcgtcttagtcaggaattgggcattgactacaaagaagctgaagcgtttatcgagcgctatttccaatcctttccgaaagttcgcgcgtggattgaacgtaccctcgaagaaggtcgcactcgcggctatgtggaaacgttattcgggcgtcgtcgctacgttccagatcttgcatctcgtgtccgctcagtgcgcgaagctgctgagcgtatggccttcaatatgcctgttcagggaacagcggcggacctcatgaagatcgccatggtgaaattgtttccgcgcttgaaacccttaggagcccaccttcttttacaggtgcatgatgaattggtcttggaagtacccgaggatcgcgcagaagaagccaaagcactcgtgaaagaggttatggaaaacgcgtatccgttagatgttccgttggaggtcgaagtgggtgtaggccgtgattggcttgaagcgaaacaagac

SEQ ID NO: 188 - protein, 844 aa, synthetic construct
  REGION 1..844: note = DNA Polymerase Variant
MHHHHHHGGSGMLPLFDLEEPPKRVLLVDGHHLAYRTFYALSLTTSRGEPVQMVYGFARSLLKALKEDGQAVVVVFDAKAPSFRHEAYEAYKAGRAPTPEDFPRQLALVKRLVDLLGLVRLEAPGYEADDVLGTLAKKAEREGMEVCILTGDRDFFQLLSEKVSVLLPDGTLVTPKDVQEKYGVPPERWVDFRALTGDRSDNIPGVAGIGEKTALRLLAEWGSVENLLKNLDRVKPDSLRRKIEAHLEDLRLSLDLARIRTDLPLEVDFKALRRRTPDLEGLRAFLERLEFGSLLHEFGLLGGEKPREEAPWPPPEGAFVGFLLSRKEPMWAELLALAAAAEGRVHRATSPVEALADLKEARGFLAKDLAVLALREGVALDPTDDPLLVAYLLDPANTNPEGVARRYGGEFTEDAAERALLSERLFQTLFPRLSEKLLWLYQEVERPLSRVLAHMEARGVRLDVPLLEALSFELEKEMERLEGEVFRLAGHPFNLNSRDQLEKVLFDELGLTPVGKTEKTGKRSTSAAALEALRGAHPIVELILQYRELSKLKSTYIDPLPRLVHPRTGRLHTRFNQTATATGRLSSSDPNLQNIPVRTPLGQRIRKAFVAEEGWLLLAADYSQIELRVLAHLSGDENLKRVFREGKDIHTETAAWMFGLDPALVDPKMRRAAKTVNFGVLYGMSAHRLSQELGIDYKEAEAFIERYFQSFPKVRAWIERTLEEGRTRGYVETLFGRRRYVPDLASRVRSVREAAERMAFNMPVQGTAADLMKIAMVKLFPRLKPLGAHLLLQVHDELVLEVPEDRAEEAKALVKEVMENAYPLDVPLEVEVGVGRDWLEAKQD

SEQ ID NO: 189 - DNA, 2532 bp, synthetic construct
  misc_feature 1..2532: note = DNA Polymerase Variant
  source 1..2532: mol_type = other DNA
atgcaccatcatcatcatcatggcggtagcggcatgttaccgctgtttgatttggaagaaccaccaaaacgcgtgctgcttgttgacggccatcatctggcgtatcgtaccttctacgcactgagccttacgacctcacgtggtgagcctgtccagatggtgtatgggtttgctcgctccctgctgaaagccctgaaggaagatggtcaagccgtagtagtggttttcgatgcgaaagcaccgtcgtttcgtcacgaagcgtacgaggcctataaagctggccgcgcaccgaccccggaagactttccgcgtcagttagcgctcgtcaaacgcctcgtggatttgctgggattagttcgcttggaagctcctggctacgaggcggacgacgtgctcggtacactggccaagaaagcagaacgtgaaggcatggaggtctgcattcttaccggtgatcgcgatttcttccagctgctgtctgagaaagtgagcgttttgctgcccgatggcacgttagtaaccccgaaagatgtccaagagaaatatggagttccgccagaacgttgggtggactttcgcgcactgactggtgatcgttcagacaacatcccgggcgttgccgggattggtgaaaagacggcgctgcgcctgctggcagaatggggctcggtggaaaatctgctcaagaaccttgatcgtgtgaaacctgatagcttacgccgcaagatcgaagcccacctggaagacttgcgtctgagtctggatcttgcgcgtattcgcaccgatctgccgttggaagtagactttaaagctctgcgtcgtcgcacacccgatttagaggggttacgcgcgttcctcgaagaactggagtttggctccctgctgcatgaattcggtttgttgggcggagagaaaccgcgtgaagaagcaccatggccgccgcccgaaggtgcctttgtcggctttcttctgtcacgcaaagagccaatgtgggcggaactgttagctcttgcagccgccgcggaagggcgtgttcaccgcgcgacctctcctgtcgaggccctcgctgacctcaaagaagcacgtggtttcttggcgaaagatttagccgtgcttgcattacgcgaaggcgttgcgctcgatccgacggacgacccgcttttggtggcttatttgctcgatcctgcgaataccactccggaaggtgtagcccgtcgttacggcggcgagtttactgaagatgcggcagaacgcgcgttgcttagcgaacgcctcttccagacgttatttccacgtctttcggagaaattactctggctctatcaggaagtcgaacgtccattgagtcgcgtgcttgcccatatggaggctcgcggtgtgcgcttagatgttccgttgttagaagcactcagcttcgagttggagaaagaaatggaacgtcttgaaggcgaagtctttcgtttagcggggcatcccttcaatctcaactctcgcgaccaattggagaaagtgctctttgatgaattaggtttaacccctgtcggacgtacagagaagaccggcaaacgttccacttcggcaagtgtcttggaagcacttcgtggtgctcacccgatcgtcgaattgattttgcagtaccgcgagctcagcaaactcaaatcaacctatcttgatccgttacctcgtcttgttcatccacgtacgggtcgtttacacacccgcttcaatcaaacggcgacagccaccgggcgcttgtcgtcgagtgacccgaacctccagaatattccagtgcgcacgccgttaggccaacgcattcgtaaagcgtttgttgcggaagaaggttggttattacttgcggccgattactcccagatcgaacttcgtgtattggcgcatctctctggcgacgagaatcttaaacgcgtgtttcgcgaaggcaaggatattcacactgaaaccgcagcctggatgttcgggcttgacccagccttagtggaccccaagatgcgtcgtgccgccaagaccgtcaactttggcgtactctatggtatgtcagcacatcgtcttagtcaggaattgggcattgactacaaagaagctgaagcgtttatcgagcgctatttccaatcctttccgaaagttcgcgcgtggattgaacgtaccctcgaagaaggtcgcactcgcggctatgtggaaacgttattcgggcgtcgtcgctacgttccagatcttgcatctcgtgtccgctcagtgcgcgaagctgctgagcgtatggccttcaatatgcctgttcagggaacagcggcggacctcatgaagatcgccatggtgaaattgtttccgcgcttgaaacccttaggagcccaccttcttttacaggtgcatgatgaattggtcttggaagtacccgaggatcgcgcagaagaagccaaagcactcgtgaaagaggttatggaaaacgcgtatccgttagatgttccgttggaggtcgaagtgggtgtaggccgtgattggcttgaagcgaaacaagac

SEQ ID NO: 190 - protein, 844 aa, synthetic construct
  REGION 1..844: note = DNA Polymerase Variant
MHHHHHHGGSGMLPLFDLEEPPKRVLLVDGHHLAYRTFYALSLTTSRGEPVQMVYGFARSLLKALKEDGQAVVVVFDAKAPSFRHEAYEAYKAGRAPTPEDFPRQLALVKRLVDLLGLVRLEAPGYEADDVLGTLAKKAEREGMEVCILTGDRDFFQLLSEKVSVLLPDGTLVTPKDVQEKYGVPPERWVDFRALTGDRSDNIPGVAGIGEKTALRLLAEWGSVENLLKNLDRVKPDSLRRKIEAHLEDLRLSLDLARIRTDLPLEVDFKALRRRTPDLEGLRAFLEELEFGSLLHEFGLLGGEKPREEAPWPPPEGAFVGFLLSRKEPMWAELLALAAAAEGRVHRATSPVEALADLKEARGFLAKDLAVLALREGVALDPTDDPLLVAYLLDPANTTPEGVARRYGGEFTEDAAERALLSERLFQTLFPRLSEKLLWLYQEVERPLSRVLAHMEARGVRLDVPLLEALSFELEKEMERLEGEVFRLAGHPFNLNSRDQLEKVLFDELGLTPVGRTEKTGKRSTSASVLEALRGAHPIVELILQYRELSKLKSTYLDPLPRLVHPRTGRLHTRFNQTATATGRLSSSDPNLQNIPVRTPLGQRIRKAFVAEEGWLLLAADYSQIELRVLAHLSGDENLKRVFREGKDIHTETAAWMFGLDPALVDPKMRRAAKTVNFGVLYGMSAHRLSQELGIDYKEAEAFIERYFQSFPKVRAWIERTLEEGRTRGYVETLFGRRRYVPDLASRVRSVREAAERMAFNMPVQGTAADLMKIAMVKLFPRLKPLGAHLLLQVHDELVLEVPEDRAEEAKALVKEVMENAYPLDVPLEVEVGVGRDWLEAKQD

SEQ ID NO: 191 - DNA, 2532 bp, synthetic construct
  misc_feature 1..2532: note = DNA Polymerase Variant
  source 1..2532: mol_type = other DNA
atgcaccatcatcatcatcatggcggtagcggcatgttaccgctgtttgatttggaagaaccaccaaaacgcgtgctgcttgttgacggccatcatctggcgtatcgtaccttctacgcactgagccttacgacctcacgtggtgagcctgtccagatggtgtatgggtttgctcgctccctgctgaaagccctgaaggaagatggtcaagccgtagtagtggttttcgatgcgaaagcaccgtcgtttcgtcacgaagcgtacgaggcctataaagctggccgcgcaccgaccccggaagactttccgcgtcagttagcgctcgtcaaacgcctcgtggatttgctgggattagttcgcttggaagctcctggctacgaggcggacgacgtgctcggtacactggccaagaaagcagaacgtgaaggcatggaggtctgcattcttaccggtgatcgcgatttcttccagctgctgtctgagaaagtgagcgttttgctgcccgatggcacgttagtaaccccgaaagatgtccaagagaaatatggagttccgccagaacgttgggtggactttcgcgcactgactggtgatcgttcagacaacatcccgggcgttgccgggattggtgaaaagacggcgctgcgcctgctggcagaatggggctcggtggaaaatctgctcaagaaccttgatcgtgtgaaacctgatagcttacgccgcaagatcgaagcccacctggaagacttgcgtctgagtctggatcttgcgcgtattcgcaccgatctgccgttggaagtagactttaaagctctgcgtcgtcgcacacccgatttagaggggttacgcgcgttcctcgaacgtctggagtttggctccctgctgcatgaattcggtttgttgggcggagagaaaccgcgtgaagaagcaccatggccgccgcccgaaggtgcctttgtcggctttcttctgtcacgcaaagagccaatgtgggcggaactgttagctcttgcagccgccgcggaagggcgtgttcaccgcgcgacctctcctgtcgaggccctcgctgacctcaaagaagcacgtggtttcttggcgaaagatttagccgtgcttgcattacgcgaaggcgttgcgctcgatccgacggacgacccgcttttggtggcttatttgctcgatcctgcgaataccaatccggaaggtgtagcccgtcgttacggcggcgagtttactgaagatgcggcagaacgcgcgttgcttagcgaacgcctcttccagacgttatttccacgtctttcggagaaattactctggctctatcaggaagtcgaacgtccattgagtcgcgtgcttgcccatatggaggctcgcggtgtgcgcttagatgttccgttgttagaagcactcagcttcgagttggagaaagaactggaacgtcttgaaggcgaagtctttcgtttagcggggcatcccttcaatctcaactctcgcgaccaattggagaaagtgctctttgatgaattaggtttaacccctgtaggacgcacagagaagaccggcaaacgttccacttcgcaaggcgccttggaagcacttcgtggtgctcacccgatcgtcgaattgattttgcagtaccgcgagctcagcaaactcaaatcaacctatcttgatccgttacctcgtcttgttcatccacgtacgggtcgtttacacacccgcttcaatcaaacggcgacagccaccgggcgcttgtcgtcgagtgacccgaacctccagaatattccagtgcgcacgccgttaggccaacgcattcgtaaagcgtttgttgcggaagaaggttggttattacttgcggccgattactcccagatcgaacttcgtgtattggcgcatctctctggcgacgagaatcttaaacgcgtgtttcgcgaaggcaaggatattcacactgaaaccgcagcctggatgttcgggcttgacccagccttagtggaccccaagatgcgtcgtgccgccaagaccgtcaactttggcgtactctatggtatgtcagcacatcgtcttagtcaggaattgggcattgactacaaagaagctgaagcgtttatcgagcgctatttccaatcctttccgaaagttcgcgcgtggattgaacgtaccctcgaagaaggtcgcactcgcggctatgtggaaacgttattcgggcgtcgtcgctacgttccagatcttgcatctcgtgtccgctcagtgcgcgaagctgctgagcgtatggccttcaatatgcctgttcagggaacagcggcggacctcatgaagatcgccatggtgaaattgtttccgcgcttgaaacccttaggagcccaccttcttttacaggtgcatgatgaattggtcttggaagtacccgaggatcgcgcagaagaagccaaagcactcgtgaaagaggttatggaaaacgcgtatccgttagatgttccgttggaggtcgaagtgggtgtaggccgtgattggcttgaagcgaaacaagac

SEQ ID NO: 192 - protein, 844 aa, synthetic construct
  REGION 1..844: note = DNA Polymerase Variant
MHHHHHHGGSGMLPLFDLEEPPKRVLLVDGHHLAYRTFYALSLTTSRGEPVQMVYGFARSLLKALKEDGQAVVVVFDAKAPSFRHEAYEAYKAGRAPTPEDFPRQLALVKRLVDLLGLVRLEAPGYEADDVLGTLAKKAEREGMEVCILTGDRDFFQLLSEKVSVLLPDGTLVTPKDVQEKYGVPPERWVDFRALTGDRSDNIPGVAGIGEKTALRLLAEWGSVENLLKNLDRVKPDSLRRKIEAHLEDLRLSLDLARIRTDLPLEVDFKALRRRTPDLEGLRAFLERLEFGSLLHEFGLLGGEKPREEAPWPPPEGAFVGFLLSRKEPMWAELLALAAAAEGRVHRATSPVEALADLKEARGFLAKDLAVLALREGVALDPTDDPLLVAYLLDPANTNPEGVARRYGGEFTEDAAERALLSERLFQTLFPRLSEKLLWLYQEVERPLSRVLAHMEARGVRLDVPLLEALSFELEKELERLEGEVFRLAGHPFNLNSRDQLEKVLFDELGLTPVGRTEKTGKRSTSQGALEALRGAHPIVELILQYRELSKLKSTYLDPLPRLVHPRTGRLHTRFNQTATATGRLSSSDPNLQNIPVRTPLGQRIRKAFVAEEGWLLLAADYSQIELRVLAHLSGDENLKRVFREGKDIHTETAAWMFGLDPALVDPKMRRAAKTVNFGVLYGMSAHRLSQELGIDYKEAEAFIERYFQSFPKVRAWIERTLEEGRTRGYVETLFGRRRYVPDLASRVRSVREAAERMAFNMPVQGTAADLMKIAMVKLFPRLKPLGAHLLLQVHDELVLEVPEDRAEEAKALVKEVMENAYPLDVPLEVEVGVGRDWLEAKQD

SEQ ID NO: 193 - DNA, 2532 bp, synthetic construct
  misc_feature 1..2532: note = DNA Polymerase Variant
  source 1..2532: mol_type = other DNA
atgcaccatcatcatcatcatggcggtagcggcatgttaccgctgtttgatttggaagaaccaccaaaacgcgtgctgcttgttgacggccatcatctggcgtatcgtaccttctacgcactgagccttacgacctcacgtggtgagcctgtccagatggtgtatgggtttgctcgctccctgctgaaagccctgaaggaagatggtcaagccgtagtagtggttttcgatgcgaaagcaccgtcgtttcgtcacgaagcgtacgaggcctataaagctggccgcgcaccgaccccggaagactttccgcgtcagttagcgctcgtcaaacgcctcgtggatttgctgggattagttcgcttggaagctcctggctacgaggcggacgacgtgctcggtacactggccaagaaagcagaacgtgaaggcatggaggtctgcattcttaccggtgatcgcgatttcttccagctgctgtctgagaaagtgagcgttttgctgcccgatggcacgttagtaaccccgaaagatgtccaagagaaatatggagttccgccagaacgttgggtggactttcgcgcactgactggtgatcgttcagacaacatcccgggcgttgccgggattggtgaaaagacggcgctgcgcctgctggcagaatggggctcggtggaaaatctgctcaagaaccttgatcgtgtgaaacctgatagcttacgccgcaagatcgaagcccacctggaagacttgcgtctgagtctggatcttgcgcgtattcgcaccgatctgccgttggaagtagactttaaagctctgcgtcgtcgcacacccgatttagaggggttacgcgcgttcctcgaagaactggagtttggctccctgctgcatgaattcggtttgttgggcggagagaaaccgcgtgaagaagcaccatggccgccgcccgaaggtgcctttgtcggctttcttctgtcacgcaaagagccaatgtgggcggaactgttagctcttgcagccgccgcggaagggcgtgttcaccgcgcgacctctcctgtcgaggccctcgctgacctcaaagaagcacgtggtttcttggcgaaagatttagccgtgcttgcattacgcgaaggcgttgcgctcgatccgacggacgacccgcttttggtggcttatttgctcgatcctgcgaataccactccggaaggtgtagcccgtcgttacggcggcgagtttactgaagatgcggcagaacgcgcgttgcttagcgaacgcctcttccagacgttatttccacgtctttcggagaaattactctggctctatcaggaagtcgaacgtccattgagtcgcgtgcttgcccatatggaggctcgcggtgtgcgcttagatgttccgttgttagaagcactcagcttcgagttggagaaagaactggaacgtcttgaaggcgaagtctttcgtttagcggggcatcccttcaatctcaactctcgcgaccaattggagaaagtgctctttgatgaattaggtttaacccctatcggaaaaacagagaagaccggcaaacgttccacttcggcaagtgtcttggaagcacttcgtggtgctcacccgatcgtcgacttgattttgcagtaccgcgagctcagcaaactcaaatcaacctatcttgatccgttacctcgtcttgttcatccacgtacgggtcgtttacacacccgcttcaatcaaacggcgacagccaccgggcgcttgtcgtcgagtgacccgaacctccagaatattccagtgcgcacgccgttaggccaacgcattcgtaaagcgtttgttgcggaagaaggttggttattacttgcggccgattactcccagatcgaacttcgtgtattggcgcatctctctggcgacgagaatcttaaacgcgtgtttcgcgaaggcaaggatattcacactgaaaccgcagcctggatgttcgggcttgacccagccttagtggaccccaagatgcgtcgtgccgccaagaccgtcaactttggcgtactctatggtatgtcagcacatcgtcttagtcaggaattgggcattgactacaaagaagctgaagcgtttatcgagcgctatttccaatcctttccgaaagttcgcgcgtggattgaacgtaccctcgaagaaggtcgcactcgcggctatgtggaaacgttattcgggcgtcgtcgctacgttccagatcttgcatctcgtgtccgctcagtgcgcgaagctgctgagcgtatggccttcaatatgcctgttcagggaacagcggcggacctcatgaagatcgccatggtgaaattgtttccgcgcttgaaacccttaggagcccaccttcttttacaggtgcatgatgaattggtcttggaagtacccgaggatcgcgcagaagaagccaaagcactcgtgaaagaggttatggaaaacgcgtatccgttagatgttccgttggaggtcgaagtgggtgtaggccgtgattggcttgaagcgaaacaagac

SEQ ID NO: 194 - protein, 844 aa, synthetic construct
  REGION 1..844: note = DNA Polymerase Variant
MHHHHHHGGSGMLPLFDLEEPPKRVLLVDGHHLAYRTFYALSLTTSRGEPVQMVYGFARSLLKALKEDGQAVVVVFDAKAPSFRHEAYEAYKAGRAPTPEDFPRQLALVKRLVDLLGLVRLEAPGYEADDVLGTLAKKAEREGMEVCILTGDRDFFQLLSEKVSVLLPDGTLVTPKDVQEKYGVPPERWVDFRALTGDRSDNIPGVAGIGEKTALRLLAEWGSVENLLKNLDRVKPDSLRRKIEAHLEDLRLSLDLARIRTDLPLEVDFKALRRRTPDLEGLRAFLEELEFGSLLHEFGLLGGEKPREEAPWPPPEGAFVGFLLSRKEPMWAELLALAAAAEGRVHRATSPVEALADLKEARGFLAKDLAVLALREGVALDPTDDPLLVAYLLDPANTTPEGVARRYGGEFTEDAAERALLSERLFQTLFPRLSEKLLWLYQEVERPLSRVLAHMEARGVRLDVPLLEALSFELEKELERLEGEVFRLAGHPFNLNSRDQLEKVLFDELGLTPIGKTEKTGKRSTSASVLEALRGAHPIVDLILQYRELSKLKSTYLDPLPRLVHPRTGRLHTRFNQTATATGRLSSSDPNLQNIPVRTPLGQRIRKAFVAEEGWLLLAADYSQIELRVLAHLSGDENLKRVFREGKDIHTETAAWMFGLDPALVDPKMRRAAKTVNFGVLYGMSAHRLSQELGIDYKEAEAFIERYFQSFPKVRAWIERTLEEGRTRGYVETLFGRRRYVPDLASRVRSVREAAERMAFNMPVQGTAADLMKIAMVKLFPRLKPLGAHLLLQVHDELVLEVPEDRAEEAKALVKEVMENAYPLDVPLEVEVGVGRDWLEAKQD

SEQ ID NO: 195 - DNA, 2532 bp, synthetic construct
  misc_feature 1..2532: note = DNA Polymerase Variant
  source 1..2532: mol_type = other DNA
atgcaccatcatcatcatcatggcggtagcggcatgttaccgctgtttgatttggaagaaccaccaaaacgcgtgctgcttgttgacggccatcatctggcgtatcgtaccttctacgcactgagccttacgacctcacgtggtgagcctgtccagatggtgtatgggtttgctcgctccctgctgaaagccctgaaggaagatggtcaagccgtagtagtggttttcgatgcgaaagcaccgtcgtttcgtcacgaagcgtacgaggcctataaagctggccgcgcaccgaccccggaagactttccgcgtcagttagcgctcgtcaaacgcctcgtggatttgctgggattagttcgcttggaagctcctggctacgaggcggacgacgtgctcggtacactggccaagaaagcagaacgtgaaggcatggaggtctgcattcttaccggtgatcgcgatttcttccagctgctgtctgagaaagtgagcgttttgctgcccgatggcacgttagtaaccccgaaagatgtccaagagaaatatggagttccgccagaacgttgggtggactttcgcgcactgactggtgatcgttcagacaacatcccgggcgttgccgggattggtgaaaagacggcgctgcgcctgctggcagaatggggctcggtggaaaatctgctcaagaaccttgatcgtgtgaaacctgatagcttacgccgcaagatcgaagcccacctggaagacttgcgtctgagtctggatcttgcgcgtattcgcaccgatctgccgttggaagtagactttaaagctctgcgtcgtcgcacacccgatttagaggggttacgcgcgttcctcgaacgtctggagtttggctccctgctgcatgaattcggtttgttgggcggagagaaaccgcgtgaagaagcaccatggccgccgcccgaaggtgcctttgtcggctttcttctgtcacgcaaagagccaatgtgggcggaactgttagctcttgcagccgccgcggaagggcgtgttcaccgcgcgacctctcctgtcgaggccctcgctgacctcaaagaagcacgtggtttcttggcgaaagatttagccgtgcttgcattacgcgaaggcgttgcgctcgatccgacggacgacccgcttttggtggcttatttgctcgatcctgcgaataccactccggaaggtgtagcccgtcgttacggcggcgagtttactgaagatgcggcagaacgcgcgttgcttagcgaacgcctcttccagacgttatttccacgtctttcggagaaattactctggctctatcaggaagtcgaacgtccattgagtcgcgtgcttgcccatatggaggctcgcggtgtgcgcttagatgttccgttgttagaagcactcagcttcgagttggagaaagaaatcgaacgtcttgaaggcgaagtctttcgtttagcggggcatcccttcaatctcaactctcgcgaccaattggagaaagtgctctttgatgaattaggtttaacccctatcggacgtacagagaagaccggcaaacgttccactgctcagggagcattggaagcacttcgtggtgctcacccgatcgtcgaattgattttgcagtaccgcgagctcagtaaactcaaaggcacctatattgatccgttacctcgtcttgttcatccacgtacgggtcgtttacacacccgcttcaatcaaacggcgacagccaccgggcgcttgtcgtcgagtgacccgaacctccagaatattccagtgcgcacgccgttaggccaacgcattcgtaaagcgtttgttgcggaagaaggttggttattacttgcggccgattactcccagatcgaacttcgtgtattggcgcatctctctggcgacgagaatcttaaacgcgtgtttcgcgaaggcaaggatattcacactgaaaccgcagcctggatgttcgggcttgacccagccttagtggaccccaagatgcgtcgtgccgccaagaccgtcaactttggcgtactctatggtatgtcagcacatcgtcttagtcaggaattgggcattgactacaaagaagctgaagcgtttatcgagcgctatttccaatcctttccgaaagttcgcgcgtggattgaacgtaccctcgaagaaggtcgcactcgcggctatgtggaaacgttattcgggcgtcgtcgctacgttccagatcttgcatctcgtgtccgctcagtgcgcgaagctgctgagcgtatggccttcaatatgcctgttcagggaacagcggcggacctcatgaagatcgccatggtgaaattgtttccgcgcttgaaacccttaggagcccaccttcttttacaggtgcatgatgaattggtcttggaagtacccgaggatcgcgcagaagaagccaaagcactcgtgaaagaggttatggaaaacgcgtatccgttagatgttccgttggaggtcgaagtgggtgtaggccgtgattggcttgaagcgaaacaagac

SEQ ID NO: 196 - protein, 844 aa, synthetic construct
  REGION 1..844: note = DNA Polymerase Variant
MHHHHHHGGSGMLPLFDLEEPPKRVLLVDGHHLAYRTFYALSLTTSRGEPVQMVYGFARSLLKALKEDGQAVVVVFDAKAPSFRHEAYEAYKAGRAPTPEDFPRQLALVKRLVDLLGLVRLEAPGYEADDVLGTLAKKAEREGMEVCILTGDRDFFQLLSEKVSVLLPDGTLVTPKDVQEKYGVPPERWVDFRALTGDRSDNIPGVAGIGEKTALRLLAEWGSVENLLKNLDRVKPDSLRRKIEAHLEDLRLSLDLARIRTDLPLEVDFKALRRRTPDLEGLRAFLERLEFGSLLHEFGLLGGEKPREEAPWPPPEGAFVGFLLSRKEPMWAELLALAAAAEGRVHRATSPVEALADLKEARGFLAKDLAVLALREGVALDPTDDPLLVAYLLDPANTTPEGVARRYGGEFTEDAAERALLSERLFQTLFPRLSEKLLWLYQEVERPLSRVLAHMEARGVRLDVPLLEALSFELEKEIERLEGEVFRLAGHPFNLNSRDQLEKVLFDELGLTPIGRTEKTGKRSTAQGALEALRGAHPIVELILQYRELSKLKGTYIDPLPRLVHPRTGRLHTRFNQTATATGRLSSSDPNLQNIPVRTPLGQRIRKAFVAEEGWLLLAADYSQIELRVLAHLSGDENLKRVFREGKDIHTETAAWMFGLDPALVDPKMRRAAKTVNFGVLYGMSAHRLSQELGIDYKEAEAFIERYFQSFPKVRAWIERTLEEGRTRGYVETLFGRRRYVPDLASRVRSVREAAERMAFNMPVQGTAADLMKIAMVKLFPRLKPLGAHLLLQVHDELVLEVPEDRAEEAKALVKEVMENAYPLDVPLEVEVGVGRDWLEAKQD

SEQ ID NO: 197 - DNA, 2532 bp, synthetic construct
  misc_feature 1..2532: note = DNA Polymerase Variant
  source 1..2532: mol_type = other DNA
atgcaccatcatcatcatcatggcggtagcggcatgttaccgctgtttgatttggaagaaccaccaaaacgcgtgctgcttgttgacggccatcatctggcgtatcgtaccttctacgcactgagccttacgacctcacgtggtgagcctgtccagatggtgtatgggtttgctcgctccctgctgaaagccctgaaggaagatggtcaagccgtagtagtggttttcgatgcgaaagcaccgtcgtttcgtcacgaagcgtacgaggcctataaagctggccgcgcaccgaccccggaagactttccgcgtcagttagcgctcgtcaaacgcctcgtggatttgctgggattagttcgcttggaagctcctggctacgaggcggacgacgtgctcggtacactggccaagaaagcagaacgtgaaggcatggaggtctgcattcttaccggtgatcgcgatttcttccagctgctgtctgagaaagtgagcgttttgctgcccgatggcacgttagtaaccccgaaagatgtccaagagaaatatggagttccgccagaacgttgggtggactttcgcgcactgactggtgatcgttcagacaacatcccgggcgttgccgggattggtgaaaagacggcgctgcgcctgctggcagaatggggctcggtggaaaatctgctcaagaaccttgatcgtgtgaaacctgatagcttacgccgcaagatcgaagcccacctggaagacttgcgtctgagtctggatcttgcgcgtattcgcaccgatctgccgttggaagtagactttaaagctctgcgtcgtcgcacacccgatttagaggggttacgcgcgttcctcgaacgtctggagtttggctccctgctgcatgaattcggtttgttgggcggagagaaaccgcgtgaagaagcaccatggccgccgcccgaaggtgcctttgtcggctttcttctgtcacgcaaagagccaatgtgggcggaactgttagctcttgcagccgccgcggaagggcgtgttcaccgcgcgacctctcctgtcgaggccctcgctgacctcaaagaagcacgtggtttcttggcgaaagatttagccgtgcttgcattacgcgaaggcgttgcgctcgatccgacggacgacccgcttttggtggcttatttgctcgatcctgcgaataccactccggaaggtgtagcccgtcgttacggcggcgagtttactgaagatgcggcagaacgcgcgttgcttagcgaacgcctcttccagacgttatttccacgtctttcggagaaattactctggctctatcaggaagtcgaacgtccattgagtcgcgtgcttgcccatatggaggctcgcggtgtgcgcttagatgttccgttgttagaagcactcagcttcgagttggagaaagaaatggaacgtcttgaaggcgaagtctttcgtttagcggggcatcccttcaatctcaactctcgcgaccaattggagaaagtgctctttgatgaattaggtttaacccctatcggaaaaacagagaagaccggcaaacgttccactgcgcaaagtgccttggaagcacttcgtggtgctcacccgatcgtcgaattgattttgcagtaccgcgagctcagcaaactcaaatcaacctatcttgatccgttacctcgtcttgttcatccacgtacgggtcgtttacacacccgcttcaatcaaacggcgacagccaccgggcgcttgtcgtcgagtgacccgaacctccagaatattccagtgcgcacgccgttaggccaacgcattcgtaaagcgtttgttgcggaagaaggttggttattacttgcggccgattactcccagatcgaacttcgtgtattggcgcatctctctggcgacgagaatcttaaacgcgtgtttcgcgaaggcaaggatattcacactgaaaccgcagcctggatgttcgggcttgacccagccttagtggaccccaagatgcgtcgtgccgccaagaccgtcaactttggcgtactctatggtatgtcagcacatcgtcttagtcaggaattgggcattgactacaaagaagctgaagcgtttatcgagcgctatttccaatcctttccgaaagttcgcgcgtggattgaacgtaccctcgaagaaggtcgcactcgcggctatgtggaaacgttattcgggcgtcgtcgctacgttccagatcttgcatctcgtgtccgctcagtgcgcgaagctgctgagcgtatggccttcaatatgcctgttcagggaacagcggcggacctcatgaagatcgccatggtgaaattgtttccgcgcttgaaacccttaggagcccaccttcttttacaggtgcatgatgaattggtcttggaagtacccgaggatcgcgcagaagaagccaaagcactcgtgaaagaggttatggaaaacgcgtatccgttagatgttccgttggaggtcgaagtgggtgtaggccgtgattggcttgaagcgaaacaagac

SEQ ID NO: 198 - protein, 844 aa, synthetic construct
  REGION 1..844: note = DNA Polymerase Variant
MHHHHHHGGSGMLPLFDLEEPPKRVLLVDGHHLAYRTFYALSLTTSRGEPVQMVYGFARSLLKALKEDGQAVVVVFDAKAPSFRHEAYEAYKAGRAPTPEDFPRQLALVKRLVDLLGLVRLEAPGYEADDVLGTLAKKAEREGMEVCILTGDRDFFQLLSEKVSVLLPDGTLVTPKDVQEKYGVPPERWVDFRALTGDRSDNIPGVAGIGEKTALRLLAEWGSVENLLKNLDRVKPDSLRRKIEAHLEDLRLSLDLARIRTDLPLEVDFKALRRRTPDLEGLRAFLERLEFGSLLHEFGLLGGEKPREEAPWPPPEGAFVGFLLSRKEPMWAELLALAAAAEGRVHRATSPVEALADLKEARGFLAKDLAVLALREGVALDPTDDPLLVAYLLDPANTTPEGVARRYGGEFTEDAAERALLSERLFQTLFPRLSEKLLWLYQEVERPLSRVLAHMEARGVRLDVPLLEALSFELEKEMERLEGEVFRLAGHPFNLNSRDQLEKVLFDELGLTPIGKTEKTGKRSTAQSALEALRGAHPIVELILQYRELSKLKSTYLDPLPRLVHPRTGRLHTRFNQTATATGRLSSSDPNLQNIPVRTPLGQRIRKAFVAEEGWLLLAADYSQIELRVLAHLSGDENLKRVFREGKDIHTETAAWMFGLDPALVDPKMRRAAKTVNFGVLYGMSAHRLSQELGIDYKEAEAFIERYFQSFPKVRAWIERTLEEGRTRGYVETLFGRRRYVPDLASRVRSVREAAERMAFNMPVQGTAADLMKIAMVKLFPRLKPLGAHLLLQVHDELVLEVPEDRAEEAKALVKEVMENAYPLDVPLEVEVGVGRDWLEAKQD

SEQ ID NO: 199 - DNA, 2532 bp, synthetic construct
  misc_feature 1..2532: note = DNA Polymerase Variant
  source 1..2532: mol_type = other DNA
atgcaccatcatcatcatcatggcggtagcggcatgttaccgctgtttgatttggaagaaccaccaaaacgcgtgctgcttgttgacggccatcatctggcgtatcgtaccttctacgcactgagccttacgacctcacgtggtgagcctgtccagatggtgtatgggtttgctcgctccctgctgaaagccctgaaggaagatggtcaagccgtagtagtggttttcgatgcgaaagcaccgtcgtttcgtcacgaagcgtacgaggcctataaagctggccgcgcaccgaccccggaagactttccgcgtcagttagcgctcgtcaaacgcctcgtggatttgctgggattagttcgcttggaagctcctggctacgaggcggacgacgtgctcggtacactggccaagaaagcagaacgtgaaggcatggaggtctgcattcttaccggtgatcgcgatttcttccagctgctgtctgagaaagtgagcgttttgctgcccgatggcacgttagtaaccccgaaagatgtccaagagaaatatggagttccgccagaacgttgggtggactttcgcgcactgactggtgatcgttcagacaacatcccgggcgttgccgggattggtgaaaagacggcgctgcgcctgctggcagaatggggctcggtggaaaatctgctcaagaaccttgatcgtgtgaaacctgatagcttacgccgcaagatcgaagcccacctggaagacttgcgtctgagtctggatcttgcgcgtattcgcaccgatctgccgttggaagtagactttaaagctctgcgtcgtcgcacacccgatttagaggggttacgcgcgttcctcgaagaactggagtttggctccctgctgcatgaattcggtttgttgggcggagagaaaccgcgtgaagaagcaccatggccgccgcccgaaggtgcctttgtcggctttcttctgtcacgcaaagagccaatgtgggcggaactgttagctcttgcagccgccgcggaagggcgtgttcaccgcgcgacctctcctgtcgaggccctcgctgacctcaaagaagcacgtggtttcttggcgaaagatttagccgtgcttgcattacgcgaaggcgttgcgctcgatccgacggacgacccgcttttggtggcttatttgctcgatcctgcgaataccaatccggaaggtgtagcccgtcgttacggcggcgagtttactgaagatgcggcagaacgcgcgttgcttagcgaacgcctcttccagacgttatttccacgtctttcggagaaattactctggctctatcaggaagtcgaacgtccattgagtcgcgtgcttgcccatatggaggctcgcggtgtgcgcttagatgttccgttgttagaagcactcagcttcgagttggagaaagaactggaacgtcttgaaggcgaagtctttcgtttagcggggcatcccttcaatctcaactctcgcgaccaattggagaaagtgctctttgatgaattaggtttaacccctgtaggacgtacagagaagaccggcaaacgttccactgctcagggagcattggaagcacttcgtggtgctcacccgatcgtcgagttgattttgcagtaccgcgagctcagtaaactcaaaaacacctatctggatccgttacctcgtcttgttcatccacgtacgggtcgtttacacacccgcttcaatcaaacggcgacagccaccgggcgcttgtcgtcgagtgacccgaacctccagaatattccagtgcgcacgccgttaggccaacgcattcgtaaagcgtttgttgcggaagaaggttggttattacttgcggccgattactcccagatcgaacttcgtgtattggcgcatctctctggcgacgagaatcttaaacgcgtgtttcgcgaaggcaaggatattcacactgaaaccgcagcctggatgttcgggcttgacccagccttagtggaccccaagatgcgtcgtgccgccaagaccgtcaactttggcgtactctatggtatgtcagcacatcgtcttagtcaggaattgggcattgactacaaagaagctgaagcgtttatcgagcgctatttccaatcctttccgaaagttcgcgcgtggattgaacgtaccctcgaagaaggtcgcactcgcggctatgtggaaacgttattcgggcgtcgtcgctacgttccagatcttgcatctcgtgtccgctcagtgcgcgaagctgctgagcgtatggccttcaatatgcctgttcagggaacagcggcggacctcatgaagatcgccatggtgaaattgtttccgcgcttgaaacccttaggagcccaccttcttttacaggtgcatgatgaattggtcttggaagtacccgaggatcgcgcagaagaagccaaagcactcgtgaaagaggttatggaaaacgcgtatccgttagatgttccgttggaggtcgaagtgggtgtaggccgtgattggcttgaagcgaaacaagac

SEQ ID NO: 200 - protein, 844 aa, synthetic construct
  REGION 1..844: note = DNA Polymerase Variant
MHHHHHHGGSGMLPLFDLEEPPKRVLLVDGHHLAYRTFYALSLTTSRGEPVQMVYGFARSLLKALKEDGQAVVVVFDAKAPSFRHEAYEAYKAGRAPTPEDFPRQLALVKRLVDLLGLVRLEAPGYEADDVLGTLAKKAEREGMEVCILTGDRDFFQLLSEKVSVLLPDGTLVTPKDVQEKYGVPPERWVDFRALTGDRSDNIPGVAGIGEKTALRLLAEWGSVENLLKNLDRVKPDSLRRKIEAHLEDLRLSLDLARIRTDLPLEVDFKALRRRTPDLEGLRAFLEELEFGSLLHEFGLLGGEKPREEAPWPPPEGAFVGFLLSRKEPMWAELLALAAAAEGRVHRATSPVEALADLKEARGFLAKDLAVLALREGVALDPTDDPLLVAYLLDPANTNPEGVARRYGGEFTEDAAERALLSERLFQTLFPRLSEKLLWLYQEVERPLSRVLAHMEARGVRLDVPLLEALSFELEKELERLEGEVFRLAGHPFNLNSRDQLEKVLFDELGLTPVGRTEKTGKRSTAQGALEALRGAHPIVELILQYRELSKLKNTYLDPLPRLVHPRTGRLHTRFNQTATATGRLSSSDPNLQNIPVRTPLGQRIRKAFVAEEGWLLLAADYSQIELRVLAHLSGDENLKRVFREGKDIHTETAAWMFGLDPALVDPKMRRAAKTVNFGVLYGMSAHRLSQELGIDYKEAEAFIERYFQSFPKVRAWIERTLEEGRTRGYVETLFGRRRYVPDLASRVRSVREAAERMAFNMPVQGTAADLMKIAMVKLFPRLKPLGAHLLLQVHDELVLEVPEDRAEEAKALVKEVMENAYPLDVPLEVEVGVGRDWLEAKQD

SEQ ID NO: 201 - DNA, 2532 bp, synthetic construct
  misc_feature 1..2532: note = DNA Polymerase Variant
  source 1..2532: mol_type = other DNA
atgcaccatcatcatcatcatggcggtagcggcatgttaccgctgtttgatttggaagaaccaccaaaacgcgtgctgcttgttgacggccatcatctggcgtatcgtaccttctacgcactgagccttacgacctcacgtggtgagcctgtccagatggtgtatgggtttgctcgctccctgctgaaagccctgaaggaagatggtcaagccgtagtagtggttttcgatgcgaaagcaccgtcgtttcgtcacgaagcgtacgaggcctataaagctggccgcgcaccgaccccggaagactttccgcgtcagttagcgctcgtcaaacgcctcgtggatttgctgggattagttcgcttggaagctcctggctacgaggcggacgacgtgctcggtacactggccaagaaagcagaacgtgaaggcatggaggtctgcattcttaccggtgatcgcgatttcttccagctgctgtctgagaaagtgagcgttttgctgcccgatggcacgttagtaaccccgaaagatgtccaagagaaatatggagttccgccagaacgttgggtggactttcgcgcactgactggtgatcgttcagacaacatcccgggcgttgccgggattggtgaaaagacggcgctgcgcctgctggcagaatggggctcggtggaaaatctgctcaagaaccttgatcgtgtgaaacctgatagcttacgccgcaagatcgaagcccacctggaagacttgcgtctgagtctggatcttgcgcgtattcgcaccgatctgccgttggaagtagactttaaagctctgcgtcgtcgcacacccgatttagaggggttacgcgcgttcctcgaagaactggagtttggctccctgctgcatgaattcggtttgttgggcggagagaaaccgcgtgaagaagcaccatggccgccgcccgaaggtgcctttgtcggctttcttctgtcacgcaaagagccaatgtgggcggaactgttagctcttgcagccgccgcggaagggcgtgttcaccgcgcgacctctcctgtcgaggccctcgctgacctcaaagaagcacgtggtttcttggcgaaagatttagccgtgcttgcattacgcgaaggcgttgcgctcgatccgacggacgacccgcttttggtggcttatttgctcgatcctgcgaataccactccggaaggtgtagcccgtcgttacggcggcgagtttactgaagatgcggcagaacgcgcgttgcttagcgaacgcctcttccagacgttatttccacgtctttcggagaaattactctggctctatcaggaagtcgaacgtccattgagtcgcgtgcttgcccatatggaggctcgcggtgtgcgcttagatgttccgttgttagaagcactcagcttcgagttggagaaagaaatggaacgtcttgaaggcgaagtctttcgtttagcggggcatcccttcaatctcaactctcgcgaccaattggagaaagtgctctttgatgaattaggtttaacccctatcggaaaaacagagaagaccggcaaacgttccactgctcagggagcattggaagcacttcgtggtgctcacccgatcgtcgaattgattttgcagtaccgcgagctcagcaaactcaaatcaacctatcttgatccgttacctcgtcttgttcatccacgtacgggtcgtttacacacccgcttcaatcaaacggcgacagccaccgggcgcttgtcgtcgagtgacccgaacctccagaatattccagtgcgcacgccgttaggccaacgcattcgtaaagcgtttgttgcggaagaaggttggttattacttgcggccgattactcccagatcgaacttcgtgtattggcgcatctctctggcgacgagaatcttaaacgcgtgtttcgcgaaggcaaggatattcacactgaaaccgcagcctggatgttcgggcttgacccagccttagtggaccccaagatgcgtcgtgccgccaagaccgtcaactttggcgtactctatggtatgtcagcacatcgtcttagtcaggaattgggcattgactacaaagaagctgaagcgtttatcgagcgctatttccaatcctttccgaaagttcgcgcgtggattgaacgtaccctcgaagaaggtcgcactcgcggctatgtggaaacgttattcgggcgtcgtcgctacgttccagatcttgcatctcgtgtccgctcagtgcgcgaagctgctgagcgtatggccttcaatatgcctgttcagggaacagcggcggacctcatgaagatcgccatggtgaaattgtttccgcgcttgaaacccttaggagcccaccttcttttacaggtgcatgatgaattggtcttggaagtacccgaggatcgcgcagaagaagccaaagcactcgtgaaagaggttatggaaaacgcgtatccgttagatgttccgttggaggtcgaagtgggtgtaggccgtgattggcttgaagcgaaacaagac

SEQ ID NO: 202 - protein, 844 aa, synthetic construct
  REGION 1..844: note = DNA Polymerase Variant
MHHHHHHGGSGMLPLFDLEEPPKRVLLVDGHHLAYRTFYALSLTTSRGEPVQMVYGFARSLLKALKEDGQAVVVVFDAKAPSFRHEAYEAYKAGRAPTPEDFPRQLALVKRLVDLLGLVRLEAPGYEADDVLGTLAKKAEREGMEVCILTGDRDFFQLLSEKVSVLLPDGTLVTPKDVQEKYGVPPERWVDFRALTGDRSDNIPGVAGIGEKTALRLLAEWGSVENLLKNLDRVKPDSLRRKIEAHLEDLRLSLDLARIRTDLPLEVDFKALRRRTPDLEGLRAFLEELEFGSLLHEFGLLGGEKPREEAPWPPPEGAFVGFLLSRKEPMWAELLALAAAAEGRVHRATSPVEALADLKEARGFLAKDLAVLALREGVALDPTDDPLLVAYLLDPANTTPEGVARRYGGEFTEDAAERALLSERLFQTLFPRLSEKLLWLYQEVERPLSRVLAHMEARGVRLDVPLLEALSFELEKEMERLEGEVFRLAGHPFNLNSRDQLEKVLFDELGLTPIGKTEKTGKRSTAQGALEALRGAHPIVELILQYRELSKLKSTYLDPLPRLVHPRTGRLHTRFNQTATATGRLSSSDPNLQNIPVRTPLGQRIRKAFVAEEGWLLLAADYSQIELRVLAHLSGDENLKRVFREGKDIHTETAAWMFGLDPALVDPKMRRAAKTVNFGVLYGMSAHRLSQELGIDYKEAEAFIERYFQSFPKVRAWIERTLEEGRTRGYVETLFGRRRYVPDLASRVRSVREAAERMAFNMPVQGTAADLMKIAMVKLFPRLKPLGAHLLLQVHDELVLEVPEDRAEEAKALVKEVMENAYPLDVPLEVEVGVGRDWLEAKQD

SEQ ID NO: 203 - DNA, 2532 bp, synthetic construct
  misc_feature 1..2532: note = DNA Polymerase Variant
  source 1..2532: mol_type = other DNA
atgcaccatcatcatcatcatggcggtagcggcatgttaccgctgtttgatttggaagaaccaccaaaacgcgtgctgcttgttgacggccatcatctggcgtatcgtaccttctacgcactgagccttacgacctcacgtggtgagcctgtccagatggtgtatgggtttgctcgctccctgctgaaagccctgaaggaagatggtcaagccgtagtagtggttttcgatgcgaaagcaccgtcgtttcgtcacgaagcgtacgaggcctataaagctggccgcgcaccgaccccggaagactttccgcgtcagttagcgctcgtcaaacgcctcgtggatttgctgggattagttcgcttggaagctcctggctacgaggcggacgacgtgctcggtacactggccaagaaagcagaacgtgaaggcatggaggtctgcattcttaccggtgatcgcgatttcttccagctgctgtctgagaaagtgagcgttttgctgcccgatggcacgttagtaaccccgaaagatgtccaagagaaatatggagttccgccagaacgttgggtggactttcgcgcactgactggtgatcgttcagacaacatcccgggcgttgccgggattggtgaaaagacggcgctgcgcctgctggcagaatggggctcggtggaaaatctgctcaagaaccttgatcgtgtgaaacctgatagcttacgccgcaagatcgaagcccacctggaagacttgcgtctgagtctggatcttgcgcgtattcgcaccgatctgccgttggaagtagactttaaagctctgcgtcgtcgcacacccgatttagaggggttacgcgcgttcctcgaagaactggagtttggctccctgctgcatgaattcggtttgttgggcggagagaaaccgcgtgaagaagcaccatggccgccgcccgaaggtgcctttgtcggctttcttctgtcacgcaaagagccaatgtgggcggaactgttagctcttgcagccgccgcggaagggcgtgttcaccgcgcgacctctcctgtcgaggccctcgctgacctcaaagaagcacgtggtttcttggcgaaagatttagccgtgcttgcattacgcgaaggcgttgcgctcgatccgacggacgacccgcttttggtggcttatttgctcgatcctgcgaataccaatccggaaggtgtagcccgtcgttacggcggcgagtttactgaagatgcggcagaacgcgcgttgcttagcgaacgcctcttccagacgttatttccacgtctttcggagaaattactctggctctatcaggaagtcgaacgtccattgagtcgcgtgcttgcccatatggaggctcgcggtgtgcgcttagatgttccgttgttagaagcactcagcttcgagttggagaaagaaatggaacgtcttgaaggcgaagtctttcgtttagcggggcatcccttcaatctcaactctcgcgaccaattggagaaagtgctctttgatgaattaggtttaacccctatcggacgtacagagaagaccggcaaacgttccactgctcagggagcattggaagcacttcgtggtgctcacccgatcgtcgaattgattttgcagtaccgcgagctcagcaaactcaaatcaacctatcttgatccgttacctcgtcttgttcatccacgtacgggtcgtttacacacccgcttcaatcaaacggcgacagccaccgggcgcttgtcgtcgagtgacccgaacctccagaatattccagtgcgcacgccgttaggccaacgcattcgtaaagcgtttgttgcggaagaaggttggttattacttgcggccgattactcccagatcgaacttcgtgtattggcgcatctctctggcgacgagaatcttaaacgcgtgtttcgcgaaggcaaggatattcacactgaaaccgcagcctggatgttcgggcttgacccagccttagtggaccccaagatgcgtcgtgccgccaagaccgtcaactttggcgtactctatggtatgtcagcacatcgtcttagtcaggaattgggcattgactacaaagaagctgaagcgtttatcgagcgctatttccaatcctttccgaaagttcgcgcgtggattgaacgtaccctcgaagaaggtcgcactcgcggctatgtggaaacgttattcgggcgtcgtcgctacgttccagatcttgcatctcgtgtccgctcagtgcgcgaagctgctgagcgtatggccttcaatatgcctgttcagggaacagcggcggacctcatgaagatcgccatggtgaaattgtttccgcgcttgaaacccttaggagcccaccttcttttacaggtgcatgatgaattggtcttggaagtacccgaggatcgcgcagaagaagccaaagcactcgtgaaagaggttatggaaaacgcgtatccgttagatgttccgttggaggtcgaagtgggtgtaggccgtgattggcttgaagcgaaacaagac

SEQ ID NO: 204 - protein, 844 aa, synthetic construct
  REGION 1..844: note = DNA Polymerase Variant
MHHHHHHGGSGMLPLFDLEEPPKRVLLVDGHHLAYRTFYALSLTTSRGEPVQMVYGFARSLLKALKEDGQAVVVVFDAKAPSFRHEAYEAYKAGRAPTPEDFPRQLALVKRLVDLLGLVRLEAPGYEADDVLGTLAKKAEREGMEVCILTGDRDFFQLLSEKVSVLLPDGTLVTPKDVQEKYGVPPERWVDFRALTGDRSDNIPGVAGIGEKTALRLLAEWGSVENLLKNLDRVKPDSLRRKIEAHLEDLRLSLDLARIRTDLPLEVDFKALRRRTPDLEGLRAFLEELEFGSLLHEFGLLGGEKPREEAPWPPPEGAFVGFLLSRKEPMWAELLALAAAAEGRVHRATSPVEALADLKEARGFLAKDLAVLALREGVALDPTDDPLLVAYLLDPANTNPEGVARRYGGEFTEDAAERALLSERLFQTLFPRLSEKLLWLYQEVERPLSRVLAHMEARGVRLDVPLLEALSFELEKEMERLEGEVFRLAGHPFNLNSRDQLEKVLFDELGLTPIGRTEKTGKRSTAQGALEALRGAHPIVELILQYRELSKLKSTYLDPLPRLVHPRTGRLHTRFNQTATATGRLSSSDPNLQNIPVRTPLGQRIRKAFVAEEGWLLLAADYSQIELRVLAHLSGDENLKRVFREGKDIHTETAAWMFGLDPALVDPKMRRAAKTVNFGVLYGMSAHRLSQELGIDYKEAEAFIERYFQSFPKVRAWIERTLEEGRTRGYVETLFGRRRYVPDLASRVRSVREAAERMAFNMPVQGTAADLMKIAMVKLFPRLKPLGAHLLLQVHDELVLEVPEDRAEEAKALVKEVMENAYPLDVPLEVEVGVGRDWLEAKQD

SEQ ID NO: 205 - DNA, 2532 bp, synthetic construct
  misc_feature 1..2532: note = DNA Polymerase Variant
  source 1..2532: mol_type = other DNA
atgcaccatcatcatcatcatggcggtagcggcatgttaccgctgtttgatttggaagaaccaccaaaacgcgtgctgcttgttgacggccatcatctggcgtatcgtaccttctacgcactgagccttacgacctcacgtggtgagcctgtccagatggtgtatgggtttgctcgctccctgctgaaagccctgaaggaagatggtcaagccgtagtagtggttttcgatgcgaaagcaccgtcgtttcgtcacgaagcgtacgaggcctataaagctggccgcgcaccgaccccggaagactttccgcgtcagttagcgctcgtcaaacgcctcgtggatttgctgggattagttcgcttggaagctcctggctacgaggcggacgacgtgctcggtacactggccaagaaagcagaacgtgaaggcatggaggtctgcattcttaccggtgatcgcgatttcttccagctgctgtctgagaaagtgagcgttttgctgcccgatggcacgttagtaaccccgaaagatgtccaagagaaatatggagttccgccagaacgttgggtggactttcgcgcactgactggtgatcgttcagacaacatcccgggcgttgccgggattggtgaaaagacggcgctgcgcctgctggcagaatggggctcggtggaaaatctgctcaagaaccttgatcgtgtgaaacctgatagcttacgccgcaagatcgaagcccacctggaagacttgcgtctgagtctggatcttgcgcgtattcgcaccgatctgccgttggaagtagactttaaagctctgcgtcgtcgcacacccgatttagaggggttacgcgcgttcctcgaagaactggagtttggctccctgctgcatgaattcggtttgttgggcggagagaaaccgcgtgaagaagcaccatggccgccgcccgaaggtgcctttgtcggctttcttctgtcacgcaaagagccaatgtgggcggaactgttagctcttgcagccgccgcggaagggcgtgttcaccgcgcgacctctcctgtcgaggccctcgctgacctcaaagaagcacgtggtttcttggcgaaagatttagccgtgcttgcattacgcgaaggcgttgcgctcgatccgacggacgacccgcttttggtggcttatttgctcgatcctgcgaataccactccggaaggtgtagcccgtcgttacggcggcgagtttactgaagatgcggcagaacgcgcgttgcttagcgaacgcctcttccagacgttatttccacgtctttcggagaaattactctggctctatcaggaagtcgaacgtccattgagtcgcgtgcttgcccatatggaggctcgcggtgtgcgcttagatgttccgttgttagaagcactcagcttcgagttggagaaagaaatggaacgtcttgaaggcgaagtctttcgtttagcggggcatcccttcaatctcaactctcgcgaccaattggagaaagtgctctttgatgaattaggtttaacccctgtaggacgcacagagaagaccggcaaacgttccactgctcagggagcattggaagcacttcgtggtgctcacccgatcgtcgagttgattttgcagtaccgcgagctcactaaactcaaaaacacctatctggatccgttacctcgtcttgttcatccacgtacgggtcgtttacacacccgcttcaatcaaacggcgacagccaccgggcgcttgtcgtcgagtgacccgaacctccagaatattccagtgcgcacgccgttaggccaacgcattcgtaaagcgtttgttgcggaagaaggttggttattacttgcggccgattactcccagatcgaacttcgtgtattggcgcatctctctggcgacgagaatcttaaacgcgtgtttcgcgaaggcaaggatattcacactgaaaccgcagcctggatgttcgggcttgacccagccttagtggaccccaagatgcgtcgtgccgccaagaccgtcaactttggcgtactctatggtatgtcagcacatcgtcttagtcaggaattgggcattgactacaaagaagctgaagcgtttatcgagcgctatttccaatcctttccgaaagttcgcgcgtggattgaacgtaccctcgaagaaggtcgcactcgcggctatgtggaaacgttattcgggcgtcgtcgctacgttccagatcttgcatctcgtgtccgctcagtgcgcgaagctgctgagcgtatggccttcaatatgcctgttcagggaacagcggcggacctcatgaagatcgccatggtgaaattgtttccgcgcttgaaacccttaggagcccaccttcttttacaggtgcatgatgaattggtcttggaagtacccgaggatcgcgcagaagaagccaaagcactcgtgaaagaggttatggaaaacgcgtatccgttagatgttccgttggaggtcgaagtgggtgtaggccgtgattggcttgaagcgaaacaagac

SEQ ID NO: 206 - protein, 844 aa, synthetic construct
  REGION 1..844: note = DNA Polymerase Variant
MHHHHHHGGSGMLPLFDLEEPPKRVLLVDGHHLAYRTFYALSLTTSRGEPVQMVYGFARSLLKALKEDGQAVVVVFDAKAPSFRHEAYEAYKAGRAPTPEDFPRQLALVKRLVDLLGLVRLEAPGYEADDVLGTLAKKAEREGMEVCILTGDRDFFQLLSEKVSVLLPDGTLVTPKDVQEKYGVPPERWVDFRALTGDRSDNIPGVAGIGEKTALRLLAEWGSVENLLKNLDRVKPDSLRRKIEAHLEDLRLSLDLARIRTDLPLEVDFKALRRRTPDLEGLRAFLEELEFGSLLHEFGLLGGEKPREEAPWPPPEGAFVGFLLSRKEPMWAELLALAAAAEGRVHRATSPVEALADLKEARGFLAKDLAVLALREGVALDPTDDPLLVAYLLDPANTTPEGVARRYGGEFTEDAAERALLSERLFQTLFPRLSEKLLWLYQEVERPLSRVLAHMEARGVRLDVPLLEALSFELEKEMERLEGEVFRLAGHPFNLNSRDQLEKVLFDELGLTPVGRTEKTGKRSTAQGALEALRGAHPIVELILQYRELTKLKNTYLDPLPRLVHPRTGRLHTRFNQTATATGRLSSSDPNLQNIPVRTPLGQRIRKAFVAEEGWLLLAADYSQIELRVLAHLSGDENLKRVFREGKDIHTETAAWMFGLDPALVDPKMRRAAKTVNFGVLYGMSAHRLSQELGIDYKEAEAFIERYFQSFPKVRAWIERTLEEGRTRGYVETLFGRRRYVPDLASRVRSVREAAERMAFNMPVQGTAADLMKIAMVKLFPRLKPLGAHLLLQVHDELVLEVPEDRAEEAKALVKEVMENAYPLDVPLEVEVGVGRDWLEAKQD

SEQ ID NO: 207 - DNA, 2532 bp, synthetic construct
  misc_feature 1..2532: note = DNA Polymerase Variant
  source 1..2532: mol_type = other DNA
atgcaccatcatcatcatcatggcggtagcggcatgttaccgctgtttgatttggaagaaccaccaaaacgcgtgctgcttgttgacggccatcatctggcgtatcgtaccttctacgcactgagccttacgacctcacgtggtgagcctgtccagatggtgtatgggtttgctcgctccctgctgaaagccctgaaggaagatggtcaagccgtagtagtggttttcgatgcgaaagcaccgtcgtttcgtcacgaagcgtacgaggcctataaagctggccgcgcaccgaccccggaagactttccgcgtcagttagcgctcgtcaaacgcctcgtggatttgctgggattagttcgcttggaagctcctggctacgaggcggacgacgtgctcggtacactggccaagaaagcagaacgtgaaggcatggaggtctgcattcttaccggtgatcgcgatttcttccagctgctgtctgagaaagtgagcgttttgctgcccgatggcacgttagtaaccccgaaagatgtccaagagaaatatggagttccgccagaacgttgggtggactttcgcgcactgactggtgatcgttcagacaacatcccgggcgttgccgggattggtgaaaagacggcgctgcgcctgctggcagaatggggctcggtggaaaatctgctcaagaaccttgatcgtgtgaaacctgatagcttacgccgcaagatcgaagcccacctggaagacttgcgtctgagtctggatcttgcgcgtattcgcaccgatctgccgttggaagtagactttaaagctctgcgtcgtcgcacacccgatttagaggggttacgcgcgttcctcgaagaactggagtttggctccctgctgcatgaattcggtttgttgggcggagagaaaccgcgtgaagaagcaccatggccgccgcccgaaggtgcctttgtcggctttcttctgtcacgcaaagagccaatgtgggcggaactgttagctcttgcagccgccgcggaagggcgtgttcaccgcgcgacctctcctgtcgaggccctcgctgacctcaaagaagcacgtggtttcttggcgaaagatttagccgtgcttgcattacgcgaaggcgttgcgctcgatccgacggacgacccgcttttggtggcttatttgctcgatcctgcgaataccaacccggaaggtgtagcccgtcgttacggcggcgagtttactgaagatgcggcagaacgcgcgttgcttagcgaacgcctcttccagacgttatttccacgtctttcggagaaattactctggctctatcaggaagtcgaacgtccattgagtcgcgtgcttgcccatatggaggctcgcggtgtgcgcttagatgttccgttgttagaagcactcagcttcgagttggagaaagaaatcgaacgtcttgaaggcgaagtctttcgtttagcggggcatcccttcaatctcaactctcgcgaccaattggagaaagtgctctttgatgaattaggtttaacccctgtcggaaaaacagagaagaccggcaaacgttccactgctcagggagcattggaagcacttcgtggtgctcacccgatcgtcgaattgattttgcagtaccgcgagctcagcaaactcaaatcaacctatcttgatccgttacctcgtcttgttcatccacgtacgggtcgtttacacacccgcttcaatcaaacggcgacagccaccgggcgcttgtcgtcgagtgacccgaacctccagaatattccagtgcgcacgccgttaggccaacgcattcgtaaagcgtttgttgcggaagaaggttggttattacttgcggccgattactcccagatcgaacttcgtgtattggcgcatctctctggcgacgagaatcttaaacgcgtgtttcgcgaaggcaaggatattcacactgaaaccgcagcctggatgttcgggcttgacccagccttagtggaccccaagatgcgtcgtgccgccaagaccgtcaactttggcgtactctatggtatgtcagcacatcgtcttagtcaggaattgggcattgactacaaagaagctgaagcgtttatcgagcgctatttccaatcctttccgaaagttcgcgcgtggattgaacgtaccctcgaagaaggtcgcactcgcggctatgtggaaacgttattcgggcgtcgtcgctacgttccagatcttgcatctcgtgtccgctcagtgcgcgaagctgctgagcgtatggccttcaatatgcctgttcagggaacagcggcggacctcatgaagatcgccatggtgaaattgtttccgcgcttgaaacccttaggagcccaccttcttttacaggtgcatgatgaattggtcttggaagtacccgaggatcgcgcagaagaagccaaagcactcgtgaaagaggttatggaaaacgcgtatccgttagatgttccgttggaggtcgaagtgggtgtaggccgtgattggcttgaagcgaaacaagac

SEQ ID NO: 208 - protein, 844 aa, synthetic construct
  REGION 1..844: note = DNA Polymerase Variant
MHHHHHHGGSGMLPLFDLEEPPKRVLLVDGHHLAYRTFYALSLTTSRGEPVQMVYGFARSLLKALKEDGQAVVVVFDAKAPSFRHEAYEAYKAGRAPTPEDFPRQLALVKRLVDLLGLVRLEAPGYEADDVLGTLAKKAEREGMEVCILTGDRDFFQLLSEKVSVLLPDGTLVTPKDVQEKYGVPPERWVDFRALTGDRSDNIPGVAGIGEKTALRLLAEWGSVENLLKNLDRVKPDSLRRKIEAHLEDLRLSLDLARIRTDLPLEVDFKALRRRTPDLEGLRAFLEELEFGSLLHEFGLLGGEKPREEAPWPPPEGAFVGFLLSRKEPMWAELLALAAAAEGRVHRATSPVEALADLKEARGFLAKDLAVLALREGVALDPTDDPLLVAYLLDPANTNPEGVARRYGGEFTEDAAERALLSERLFQTLFPRLSEKLLWLYQEVERPLSRVLAHMEARGVRLDVPLLEALSFELEKEIERLEGEVFRLAGHPFNLNSRDQLEKVLFDELGLTPVGKTEKTGKRSTAQGALEALRGAHPIVELILQYRELSKLKSTYLDPLPRLVHPRTGRLHTRFNQTATATGRLSSSDPNLQNIPVRTPLGQRIRKAFVAEEGWLLLAADYSQIELRVLAHLSGDENLKRVFREGKDIHTETAAWMFGLDPALVDPKMRRAAKTVNFGVLYGMSAHRLSQELGIDYKEAEAFIERYFQSFPKVRAWIERTLEEGRTRGYVETLFGRRRYVPDLASRVRSVREAAERMAFNMPVQGTAADLMKIAMVKLFPRLKPLGAHLLLQVHDELVLEVPEDRAEEAKALVKEVMENAYPLDVPLEVEVGVGRDWLEAKQD

SEQ ID NO: 209 - DNA, 2532 bp, synthetic construct
  misc_feature 1..2532: note = DNA Polymerase Variant
  source 1..2532: mol_type = other DNA
atgcaccatcatcatcatcatggcggtagcggcatgttaccgctgtttgatttggaagaaccaccaaaacgcgtgctgcttgttgacggccatcatctggcgtatcgtaccttctacgcactgagccttacgacctcacgtggtgagcctgtccagatggtgtatgggtttgctcgctccctgctgaaagccctgaaggaagatggtcaagccgtagtagtggttttcgatgcgaaagcaccgtcgtttcgtcacgaagcgtacgaggcctataaagctggccgcgcaccgaccccggaagactttccgcgtcagttagcgctcgtcaaacgcctcgtggatttgctgggattagttcgcttggaagctcctggctacgaggcggacgacgtgctcggtacactggccaagaaagcagaacgtgaaggcatggaggtctgcattcttaccggtgatcgcgatttcttccagctgctgtctgagaaagtgagcgttttgctgcccgatggcacgttagtaaccccgaaagatgtccaagagaaatatggagttccgccagaacgttgggtggactttcgcgcactgactggtgatcgttcagacaacatcccgggcgttgccgggattggtgaaaagacggcgctgcgcctgctggcagaatggggctcggtggaaaatctgctcaagaaccttgatcgtgtgaaacctgatagcttacgccgcaagatcgaagcccacctggaagacttgcgtctgagtctggatcttgcgcgtattcgcaccgatctgccgttggaagtagactttaaagctctgcgtcgtcgcacacccgatttagaggggttacgcgcgttcctcgaacgtctggagtttggctccctgctgcatgaattcggtttgttgggcggagagaaaccgcgtgaagaagcaccatggccgccgcccgaaggtgcctttgtcggctttcttctgtcacgcaaagagccaatgtgggcggaactgttagctcttgcagccgccgcggaagggcgtgttcaccgcgcgacctctcctgtcgaggccctcgctgacctcaaagaagcacgtggtttcttggcgaaagatttagccgtgcttgcattacgcgaaggcgttgcgctcgatccgacggacgacccgcttttggtggcttatttgctcgatcctgcgaataccaatccggaaggtgtagcccgtcgttacggcggcgagtttactgaagatgcggcagaacgcgcgttgcttagcgaacgcctcttccagacgttatttccacgtctttcggagaaattactctggctctatcaggaagtcgaacgtccattgagtcgcgtgcttgcccatatggaggctcgcggtgtgcgcttagatgttccgttgttagaagcactcagcttcgagttggagaaagaactggaacgtcttgaaggcgaagtctttcgtttagcggggcatcccttcaatctcaactctcgcgaccaattggagaaagtgctctttgatgaattaggtttaacccctatcggacgtacagagaagaccggcaaacgttccactgcgcaagccgccttggaagcacttcgtggtgctcacccgatcgtcgacttgattttgcagtaccgcgagctcagtaaactcaaaaacacctatctggatccgttacctcgtcttgttcatccacgtacgggtcgtttacacacccgcttcaatcaaacggcgacagccaccgggcgcttgtcgtcgagtgacccgaacctccagaatattccagtgcgcacgccgttaggccaacgcattcgtaaagcgtttgttgcggaagaaggttggttattacttgcggccgattactcccagatcgaacttcgtgtattggcgcatctctctggcgacgagaatcttaaacgcgtgtttcgcgaaggcaaggatattcacactgaaaccgcagcctggatgttcgggcttgacccagccttagtggaccccaagatgcgtcgtgccgccaagaccgtcaactttggcgtactctatggtatgtcagcacatcgtcttagtcaggaattgggcattgactacaaagaagctgaagcgtttatcgagcgctatttccaatcctttccgaaagttcgcgcgtggattgaacgtaccctcgaagaaggtcgcactcgcggctatgtggaaacgttattcgggcgtcgtcgctacgttccagatcttgcatctcgtgtccgctcagtgcgcgaagctgctgagcgtatggccttcaatatgcctgttcagggaacagcggcggacctcatgaagatcgccatggtgaaattgtttccgcgcttgaaacccttaggagcccaccttcttttacaggtgcatgatgaattggtcttggaagtacccgaggatcgcgcagaagaagccaaagcactcgtgaaagaggttatggaaaacgcgtatccgttagatgttccgttggaggtcgaagtgggtgtaggccgtgattggcttgaagcgaaacaagac

SEQ ID NO: 210 - protein, 844 aa, synthetic construct
  REGION 1..844: note = DNA Polymerase Variant
MHHHHHHGGSGMLPLFDLEEPPKRVLLVDGHHLAYRTFYALSLTTSRGEPVQMVYGFARSLLKALKEDGQAVVVVFDAKAPSFRHEAYEAYKAGRAPTPEDFPRQLALVKRLVDLLGLVRLEAPGYEADDVLGTLAKKAEREGMEVCILTGDRDFFQLLSEKVSVLLPDGTLVTPKDVQEKYGVPPERWVDFRALTGDRSDNIPGVAGIGEKTALRLLAEWGSVENLLKNLDRVKPDSLRRKIEAHLEDLRLSLDLARIRTDLPLEVDFKALRRRTPDLEGLRAFLERLEFGSLLHEFGLLGGEKPREEAPWPPPEGAFVGFLLSRKEPMWAELLALAAAAEGRVHRATSPVEALADLKEARGFLAKDLAVLALREGVALDPTDDPLLVAYLLDPANTNPEGVARRYGGEFTEDAAERALLSERLFQTLFPRLSEKLLWLYQEVERPLSRVLAHMEARGVRLDVPLLEALSFELEKELERLEGEVFRLAGHPFNLNSRDQLEKVLFDELGLTPIGRTEKTGKRSTAQAALEALRGAHPIVDLILQYRELSKLKNTYLDPLPRLVHPRTGRLHTRFNQTATATGRLSSSDPNLQNIPVRTPLGQRIRKAFVAEEGWLLLAADYSQIELRVLAHLSGDENLKRVFREGKDIHTETAAWMFGLDPALVDPKMRRAAKTVNFGVLYGMSAHRLSQELGIDYKEAEAFIERYFQSFPKVRAWIERTLEEGRTRGYVETLFGRRRYVPDLASRVRSVREAAERMAFNMPVQGTAADLMKIAMVKLFPRLKPLGAHLLLQVHDELVLEVPEDRAEEAKALVKEVMENAYPLDVPLEVEVGVGRDWLEAKQD

SEQ ID NO: 211 - DNA, 2532 bp, synthetic construct
  misc_feature 1..2532: note = DNA Polymerase Variant
  source 1..2532: mol_type = other DNA
atgcaccatcatcatcatcatggcggtagcggcatgttaccgctgtttgatttggaagaaccaccaaaacgcgtgctgcttgttgacggccatcatctggcgtatcgtaccttctacgcactgagccttacgacctcacgtggtgagcctgtccagatggtgtatgggtttgctcgctccctgctgaaagccctgaaggaagatggtcaagccgtagtagtggttttcgatgcgaaagcaccgtcgtttcgtcacgaagcgtacgaggcctataaagctggccgcgcaccgaccccggaagactttccgcgtcagttagcgctcgtcaaacgcctcgtggatttgctgggattagttcgcttggaagctcctggctacgaggcggacgacgtgctcggtacactggccaagaaagcagaacgtgaaggcatggaggtctgcattcttaccggtgatcgcgatttcttccagctgctgtctgagaaagtgagcgttttgctgcccgatggcacgttagtaaccccgaaagatgtccaagagaaatatggagttccgccagaacgttgggtggactttcgcgcactgactggtgatcgttcagacaacatcccgggcgttgccgggattggtgaaaagacggcgctgcgcctgctggcagaatggggctcggtggaaaatctgctcaagaaccttgatcgtgtgaaacctgatagcttacgccgcaagatcgaagcccacctggaagacttgcgtctgagtctggatcttgcgcgtattcgcaccgatctgccgttggaagtagactttaaagctctgcgtcgtcgcacacccgatttagaggggttacgcgcgttcctcgaagaactggagtttggctccctgctgcatgaattcggtttgttgggcggagagaaaccgcgtgaagaagcaccatggccgccgcccgaaggtgcctttgtcggctttcttctgtcacgcaaagagccaatgtgggcggaactgttagctcttgcagccgccgcggaagggcgtgttcaccgcgcgacctctcctgtcgaggccctcgctgacctcaaagaagcacgtggtttcttggcgaaagatttagccgtgcttgcattacgcgaaggcgttgcgctcgatccgacggacgacccgcttttggtggcttatttgctcgatcctgcgaataccaatccggaaggtgtagcccgtcgttacggcggcgagtttactgaagatgcggcagaacgcgcgttgcttagcgaacgcctcttccagacgttatttccacgtctttcggagaaattactctggctctatcaggaagtcgaacgtccattgagtcgcgtgcttgcccatatggaggctcgcggtgtgcgcttagatgttccgttgttagaagcactcagcttcgagttggagaaagaaatcgaacgtcttgaaggcgaagtctttcgtttagcggggcatcccttcaatctcaactctcgcgaccaattggagaaagtgctctttgatgaattaggtttaacccctatcggaaaaacagagaagaccggcaaacgttccactgctcagggagcattggaagcacttcgtggtgctcacccgatcgtcgaattgattttgcagtaccgcgagctcagtaaactcaaaaacacctatctggatccgttacctcgtcttgttcatccacgtacgggtcgtttacacacccgcttcaatcaaacggcgacagccaccgggcgcttgtcgtcgagtgacccgaacctccagaatattccagtgcgcacgccgttaggccaacgcattcgtaaagcgtttgttgcggaagaaggttggttattacttgcggccgattactcccagatcgaacttcgtgtattggcgcatctctctggcgacgagaatcttaaacgcgtgtttcgcgaaggcaaggatattcacactgaaaccgcagcctggatgttcgggcttgacccagccttagtggaccccaagatgcgtcgtgccgccaagaccgtcaactttggcgtactctatggtatgtcagcacatcgtcttagtcaggaattgggcattgactacaaagaagctgaagcgtttatcgagcgctatttccaatcctttccgaaagttcgcgcgtggattgaacgtaccctcgaagaaggtcgcactcgcggctatgtggaaacgttattcgggcgtcgtcgctacgttccagatcttgcatctcgtgtccgctcagtgcgcgaagctgctgagcgtatggccttcaatatgcctgttcagggaacagcggcggacctcatgaagatcgccatggtgaaattgtttccgcgcttgaaacccttaggagcccaccttcttttacaggtgcatgatgaattggtcttggaagtacccgaggatcgcgcagaagaagccaaagcactcgtgaaagaggttatggaaaacgcgtatccgttagatgttccgttggaggtcgaagtgggtgtaggccgtgattggcttgaagcgaaacaagac

SEQ ID NO: 212 - protein, 844 aa, synthetic construct
  REGION 1..844: note = DNA Polymerase Variant
MHHHHHHGGSGMLPLFDLEEPPKRVLLVDGHHLAYRTFYALSLTTSRGEPVQMVYGFARSLLKALKEDGQAVVVVFDAKAPSFRHEAYEAYKAGRAPTPEDFPRQLALVKRLVDLLGLVRLEAPGYEADDVLGTLAKKAEREGMEVCILTGDRDFFQLLSEKVSVLLPDGTLVTPKDVQEKYGVPPERWVDFRALTGDRSDNIPGVAGIGEKTALRLLAEWGSVENLLKNLDRVKPDSLRRKIEAHLEDLRLSLDLARIRTDLPLEVDFKALRRRTPDLEGLRAFLEELEFGSLLHEFGLLGGEKPREEAPWPPPEGAFVGFLLSRKEPMWAELLALAAAAEGRVHRATSPVEALADLKEARGFLAKDLAVLALREGVALDPTDDPLLVAYLLDPANTNPEGVARRYGGEFTEDAAERALLSERLFQTLFPRLSEKLLWLYQEVERPLSRVLAHMEARGVRLDVPLLEALSFELEKEIERLEGEVFRLAGHPFNLNSRDQLEKVLFDELGLTPIGKTEKTGKRSTAQGALEALRGAHPIVELILQYRELSKLKNTYLDPLPRLVHPRTGRLHTRFNQTATATGRLSSSDPNLQNIPVRTPLGQRIRKAFVAEEGWLLLAADYSQIELRVLAHLSGDENLKRVFREGKDIHTETAAWMFGLDPALVDPKMRRAAKTVNFGVLYGMSAHRLSQELGIDYKEAEAFIERYFQSFPKVRAWIERTLEEGRTRGYVETLFGRRRYVPDLASRVRSVREAAERMAFNMPVQGTAADLMKIAMVKLFPRLKPLGAHLLLQVHDELVLEVPEDRAEEAKALVKEVMENAYPLDVPLEVEVGVGRDWLEAKQD

SEQ ID NO: 213 - DNA, 2532 bp, synthetic construct
  misc_feature 1..2532: note = DNA Polymerase Variant
  source 1..2532: mol_type = other DNA
atgcaccatcatcatcatcatggcggtagcggcatgttaccgctgtttgatttggaagaaccaccaaaacgcgtgctgcttgttgacggccatcatctggcgtatcgtaccttctacgcactgagccttacgacctcacgtggtgagcctgtccagatggtgtatgggtttgctcgctccctgctgaaagccctgaaggaagatggtcaagccgtagtagtggttttcgatgcgaaagcaccgtcgtttcgtcacgaagcgtacgaggcctataaagctggccgcgcaccgaccccggaagactttccgcgtcagttagcgctcgtcaaacgcctcgtggatttgctgggattagttcgcttggaagctcctggctacgaggcggacgacgtgctcggtacactggccaagaaagcagaacgtgaaggcatggaggtctgcattcttaccggtgatcgcgatttcttccagctgctgtctgagaaagtgagcgttttgctgcccgatggcacgttagtaaccccgaaagatgtccaagagaaatatggagttccgccagaacgttgggtggactttcgcgcactgactggtgatcgttcagacaacatcccgggcgttgccgggattggtgaaaagacggcgctgcgcctgctggcagaatggggctcggtggaaaatctgctcaagaaccttgatcgtgtgaaacctgatagcttacgccgcaagatcgaagcccacctggaagacttgcgtctgagtctggatcttgcgcgtattcgcaccgatctgccgttggaagtagactttaaagctctgcgtcgtcgcacacccgatttagaggggttacgcgcgttcctcgaagaactggagtttggctccctgctgcatgaattcggtttgttgggcggagagaaaccgcgtgaagaagcaccatggccgccgcccgaaggtgcctttgtcggctttcttctgtcacgcaaagagccaatgtgggcggaactgttagctcttgcagccgccgcggaagggcgtgttcaccgcgcgacctctcctgtcgaggccctcgctgacctcaaagaagcacgtggtttcttggcgaaagatttagccgtgcttgcattacgcgaaggcgttgcgctcgatccgacggacgacccgcttttggtggcttatttgctcgatcctgcgaataccaatccggaaggtgtagcccgtcgttacggcggcgagtttactgaagatgcggcagaacgcgcgttgcttagcgaacgcctcttccagacgttatttccacgtctttcggagaaattactctggctctatcaggaagtcgaacgtccattgagtcgcgtgcttgcccatatggaggctcgcggtgtgcgcttagatgttccgttgttagaagcactcagcttcgagttggagaaagaactggaacgtcttgaaggcgaagtctttcgtttagcggggcatcccttcaatctcaactctcgcgaccaattggagaaagtgctctttgatgaattaggtttaacccctatcggacgtacagagaagaccggcaaacgttccactgctcagggagcattggaagcacttcgtggtgctcacccgatcgtcgacttgattttgcagtaccgcgagctcagcaaactcaaatcaacctatcttgatccgttacctcgtcttgttcatccacgtacgggtcgtttacacacccgcttcaatcaaacggcgacagccaccgggcgcttgtcgtcgagtgacccgaacctccagaatattccagtgcgcacgccgttaggccaacgcattcgtaaagcgtttgttgcggaagaaggttggttattacttgcggccgattactcccagatcgaacttcgtgtattggcgcatctctctggcgacgagaatcttaaacgcgtgtttcgcgaaggcaaggatattcacactgaaaccgcagcctggatgttcgggcttgacccagccttagtggaccccaagatgcgtcgtgccgccaagaccgtcaactttggcgtactctatggtatgtcagcacatcgtcttagtcaggaattgggcattgactacaaagaagctgaagcgtttatcgagcgctatttccaatcctttccgaaagttcgcgcgtggattgaacgtaccctcgaagaaggtcgcactcgcggctatgtggaaacgttattcgggcgtcgtcgctacgttccagatcttgcatctcgtgtccgctcagtgcgcgaagctgctgagcgtatggccttcaatatgcctgttcagggaacagcggcggacctcatgaagatcgccatggtgaaattgtttccgcgcttgaaacccttaggagcccaccttcttttacaggtgcatgatgaattggtcttggaagtacccgaggatcgcgcagaagaagccaaagcactcgtgaaagaggttatggaaaacgcgtatccgttagatgttccgttggaggtcgaagtgggtgtaggccgtgattggcttgaagcgaaacaagac

SEQ ID NO: 214 - protein, 844 aa, synthetic construct
  REGION 1..844: note = DNA Polymerase Variant
MHHHHHHGGSGMLPLFDLEEPPKRVLLVDGHHLAYRTFYALSLTTSRGEPVQMVYGFARSLLKALKEDGQAVVVVFDAKAPSFRHEAYEAYKAGRAPTPEDFPRQLALVKRLVDLLGLVRLEAPGYEADDVLGTLAKKAEREGMEVCILTGDRDFFQLLSEKVSVLLPDGTLVTPKDVQEKYGVPPERWVDFRALTGDRSDNIPGVAGIGEKTALRLLAEWGSVENLLKNLDRVKPDSLRRKIEAHLEDLRLSLDLARIRTDLPLEVDFKALRRRTPDLEGLRAFLEELEFGSLLHEFGLLGGEKPREEAPWPPPEGAFVGFLLSRKEPMWAELLALAAAAEGRVHRATSPVEALADLKEARGFLAKDLAVLALREGVALDPTDDPLLVAYLLDPANTNPEGVARRYGGEFTEDAAERALLSERLFQTLFPRLSEKLLWLYQEVERPLSRVLAHMEARGVRLDVPLLEALSFELEKELERLEGEVFRLAGHPFNLNSRDQLEKVLFDELGLTPIGRTEKTGKRSTAQGALEALRGAHPIVDLILQYRELSKLKSTYLDPLPRLVHPRTGRLHTRFNQTATATGRLSSSDPNLQNIPVRTPLGQRIRKAFVAEEGWLLLAADYSQIELRVLAHLSGDENLKRVFREGKDIHTETAAWMFGLDPALVDPKMRRAAKTVNFGVLYGMSAHRLSQELGIDYKEAEAFIERYFQSFPKVRAWIERTLEEGRTRGYVETLFGRRRYVPDLASRVRSVREAAERMAFNMPVQGTAADLMKIAMVKLFPRLKPLGAHLLLQVHDELVLEVPEDRAEEAKALVKEVMENAYPLDVPLEVEVGVGRDWLEAKQD

SEQ ID NO: 215 - DNA, 2532 bp, synthetic construct
  misc_feature 1..2532: note = DNA Polymerase Variant
  source 1..2532: mol_type = other DNA
atgcaccatcatcatcatcatggcggtagcggcatgttaccgctgtttgatttggaagaaccaccaaaacgcgtgctgcttgttgacggccatcatctggcgtatcgtaccttctacgcactgagccttacgacctcacgtggtgagcctgtccagatggtgtatgggtttgctcgctccctgctgaaagccctgaaggaagatggtcaagccgtagtagtggttttcgatgcgaaagcaccgtcgtttcgtcacgaagcgtacgaggcctataaagctggccgcgcaccgaccccggaagactttccgcgtcagttagcgctcgtcaaacgcctcgtggatttgctgggattagttcgcttggaagctcctggctacgaggcggacgacgtgctcggtacactggccaagaaagcagaacgtgaaggcatggaggtctgcattcttaccggtgatcgcgatttcttccagctgctgtctgagaaagtgagcgttttgctgcccgatggcacgttagtaaccccgaaagatgtccaagagaaatatggagttccgccagaacgttgggtggactttcgcgcactgactggtgatcgttcagacaacatcccgggcgttgccgggattggtgaaaagacggcgctgcgcctgctggcagaatggggctcggtggaaaatctgctcaagaaccttgatcgtgtgaaacctgatagcttacgccgcaagatcgaagcccacctggaagacttgcgtctgagtctggatcttgcgcgtattcgcaccgatctgccgttggaagtagactttaaagctctgcgtcgtcgcacacccgatttagaggggttacgcgcgttcctcgaacgtctggagtttggctccctgctgcatgaattcggtttgttgggcggagagaaaccgcgtgaagaagcaccatggccgccgcccgaaggtgcctttgtcggctttcttctgtcacgcaaagagccaatgtgggcggaactgttagctcttgcagccgccgcggaagggcgtgttcaccgcgcgacctctcctgtcgaggccctcgctgacctcaaagaagcacgtggtttcttggcgaaagatttagccgtgcttgcattacgcgaaggcgttgcgctcgatccgacggacgacccgcttttggtggcttatttgctcgatcctgcgaataccaatccggaaggtgtagcccgtcgttacggcggcgagtttactgaagatgcggcagaacgcgcgttgcttagcgaacgcctcttccagacgttatttccacgtctttcggagaaattactctggctctatcaggaagtcgaacgtccattgagtcgcgtgcttgcccatatggaggctcgcggtgtgcgcttagatgttccgttgttagaagcactcagcttcgagttggagaaagaaatggaacgtcttgaaggcgaagtctttcgtttagcggggcatcccttcaatctcaactctcgcgaccaattggagaaagtgctctttgatgaattaggtttaacccctgtaggacgcacagagaagaccggcaaacgttccactgctcagggagcattggaagcacttcgtggtgctcacccgatcgtcgacttgattttgcagtaccgcgagctcagtaaactcaaaaacacctatattgatccgttacctcgtcttgttcatccacgtacgggtcgtttacacacccgcttcaatcaaacggcgacagccaccgggcgcttgtcgtcgagtgacccgaacctccagaatattccagtgcgcacgccgttaggccaacgcattcgtaaagcgtttgttgcggaagaaggttggttattacttgcggccgattactcccagatcgaacttcgtgtattggcgcatctctctggcgacgagaatcttaaacgcgtgtttcgcgaaggcaaggatattcacactgaaaccgcagcctggatgttcgggcttgacccagccttagtggaccccaagatgcgtcgtgccgccaagaccgtcaactttggcgtactctatggtatgtcagcacatcgtcttagtcaggaattgggcattgactacaaagaagctgaagcgtttatcgagcgctatttccaatcctttccgaaagttcgcgcgtggattgaacgtaccctcgaagaaggtcgcactcgcggctatgtggaaacgttattcgggcgtcgtcgctacgttccagatcttgcatctcgtgtccgctcagtgcgcgaagctgctgagcgtatggccttcaatatgcctgttcagggaacagcggcggacctcatgaagatcgccatggtgaaattgtttccgcgcttgaaacccttaggagcccaccttcttttacaggtgcatgatgaattggtcttggaagtacccgaggatcgcgcagaagaagccaaagcactcgtgaaagaggttatggaaaacgcgtatccgttagatgttccgttggaggtcgaagtgggtgtaggccgtgattggcttgaagcgaaacaagac

SEQ ID NO: 216 - protein, 844 aa, synthetic construct
  REGION 1..844: note = DNA Polymerase Variant
MHHHHHHGGSGMLPLFDLEEPPKRVLLVDGHHLAYRTFYALSLTTSRGEPVQMVYGFARSLLKALKEDGQAVVVVFDAKAPSFRHEAYEAYKAGRAPTPEDFPRQLALVKRLVDLLGLVRLEAPGYEADDVLGTLAKKAEREGMEVCILTGDRDFFQLLSEKVSVLLPDGTLVTPKDVQEKYGVPPERWVDFRALTGDRSDNIPGVAGIGEKTALRLLAEWGSVENLLKNLDRVKPDSLRRKIEAHLEDLRLSLDLARIRTDLPLEVDFKALRRRTPDLEGLRAFLERLEFGSLLHEFGLLGGEKPREEAPWPPPEGAFVGFLLSRKEPMWAELLALAAAAEGRVHRATSPVEALADLKEARGFLAKDLAVLALREGVALDPTDDPLLVAYLLDPANTNPEGVARRYGGEFTEDAAERALLSERLFQTLFPRLSEKLLWLYQEVERPLSRVLAHMEARGVRLDVPLLEALSFELEKEMERLEGEVFRLAGHPFNLNSRDQLEKVLFDELGLTPVGRTEKTGKRSTAQGALEALRGAHPIVDLILQYRELSKLKNTYIDPLPRLVHPRTGRLHTRFNQTATATGRLSSSDPNLQNIPVRTPLGQRIRKAFVAEEGWLLLAADYSQIELRVLAHLSGDENLKRVFREGKDIHTETAAWMFGLDPALVDPKMRRAAKTVNFGVLYGMSAHRLSQELGIDYKEAEAFIERYFQSFPKVRAWIERTLEEGRTRGYVETLFGRRRYVPDLASRVRSVREAAERMAFNMPVQGTAADLMKIAMVKLFPRLKPLGAHLLLQVHDELVLEVPEDRAEEAKALVKEVMENAYPLDVPLEVEVGVGRDWLEAKQD

SEQ ID NO: 217 - DNA, 2532 bp, synthetic construct
  misc_feature 1..2532: note = DNA Polymerase Variant
  source 1..2532: mol_type = other DNA
atgcaccatcatcatcatcatggcggtagcggcatgttaccgctgtttgatttggaagaaccaccaaaacgcgtgctgcttgttgacggccatcatctggcgtatcgtaccttctatgcactgagccttacgacctcacgtggtgagcctgtccagatggtgtatgggtttgctcgctccctgctgaaagccctgaaggaagatggtcaagccgtagtagtggttttcgatgcgaaagcaccgtcgtttcgtcacgaagcgtacgaggcctataaagctggccgcgcaccgaccccggaagactttccgcgtcagttagcgctcgtcaaacgcctcgtggatttgctgggattagttcgcttggaagctcctggctacgaggcggacgacgtgctcggtacactggccaagaaagcagaacgtgaaggcatggaggtctgcattcttaccggtgatcgcgatttcttccagctgctgtctgagaaagtgagcgttttgctgcccgatggcacgttagtaaccccgaaagatgtccaagagaaatatggagttccgccagaacgttgggtggactttcgcgcactgactggtgatcgttcagacaacatcccgggcgttgccgggattggtgaaaagacggcgctgcgcctgctggcagaatggggctcggtggaaaatctgctcaagaaccttgatcgtgtgaaacctgatagcttacgccgcaagatcgaagcccacctggaagacttgcgtctgagtctggatcttgcgcgtattcgcaccgatctgccgttggaagtagactttaaagctctgcgtcgtcgcacccccgatctggaggggttacgcgcgttcctcgaagaactggagtttggctccctgctgcatgaattcggtttgttgggcggagagaaaccgcgtgaagaagcaccatggccgccgcccgaaggtgcctttgtcggctttcttctgtcacgcaaagagccaatgtgggcggaactgttagctcttgcagccgccgcggaagggcgtgttcaccgcgcgacctctcctgtcgaggccctcgctgacctcaaagaagcacgtggtttcttggcgaaagatttagccgtgcttgcattacgcgaaggcgttgcgctcgatccgacggacgacccgcttttggtggcttatttgctcgatcctgcgaataccaacccggaaggtgtagcccgtcgttacggcggcgagtttactgaagatgcggcagaacgcgcgttgcttagcgaacgcctcttccagacgttatttccacgtctttcggagaaattactctggctctatcaggaagtcgaacgtccattgagtcgcgtgcttgcccatatggaggctcgcggtgtgcgcttagatgttccgttgttagaagcactcagcttcgagttggagaaagaaatggaacgtcttgaaggcgaagtctttcgtttagcggggcatcccttcaatctcaactctcgcgaccaattggagaaagtgctctttgatgaattaggtttaacccctgtaggacgcacagagaagaccggcaaacgttccactgctcagggagcattggaagcacttcgtggtgctcacccgatcgtcgagttgattttgcagtaccgcgagctcagcaaactcaaatcaacctatcttgatccgttacctcgtcttgttcatccacgtacgggtcgtttacacacccgcttcaatcaaacggcgacagccaccgggcgcttgtcgtcgagtgacccgaacctccagaatattccagtgcgcacgccgttaggccaacgcattcgtaaagcgtttgttgcggaagaaggttggttattacttgcggccgattactcccagatcgaacttcgtgtattggcgcatctctctggcgacgagaatcttaaacgcgtgtttcgcgaaggcaaggatattcacactgaaaccgcagcctggatgttcgggcttgacccagcgctggtggaccccaagatgcgtcgtgccgccaagaccgtcaactttggcgtactctatggtatgtcagcacatcgtcttagtcaggaattgggcattgactacgaggaagctgaagcgtttatcgagcgctatttccaatcctttccgaaagttcgcgcgtggattgaacgtaccctcgaagaaggtcgcactcgcggctatgtggaaacgttattcgggcgtcgtcgctacgttccagatcttgcatctcgtgtccgctcagtgcgcgaagctgctgagcgtatggccttcaatatgcctgttcagggaacagcggcggacctcatgaagatcgccatggtgaaattgtttccgcgcttgaaacccttaggagcccaccttcttttacaggtgcatgatgaattggtcttggaagtacccgaggatcgcgcagaagaagccaaagcactcgtgaaagaggttatggaaaacgcgtatccgttagatgttccgttggaggtcgaagtgggtgtaggccgtgattggcttgaagcgaaacaagac

SEQ ID NO: 218 - protein, 844 aa, synthetic construct
  REGION 1..844: note = DNA Polymerase Variant
MHHHHHHGGSGMLPLFDLEEPPKRVLLVDGHHLAYRTFYALSLTTSRGEPVQMVYGFARSLLKALKEDGQAVVVVFDAKAPSFRHEAYEAYKAGRAPTPEDFPRQLALVKRLVDLLGLVRLEAPGYEADDVLGTLAKKAEREGMEVCILTGDRDFFQLLSEKVSVLLPDGTLVTPKDVQEKYGVPPERWVDFRALTGDRSDNIPGVAGIGEKTALRLLAEWGSVENLLKNLDRVKPDSLRRKIEAHLEDLRLSLDLARIRTDLPLEVDFKALRRRTPDLEGLRAFLEELEFGSLLHEFGLLGGEKPREEAPWPPPEGAFVGFLLSRKEPMWAELLALAAAAEGRVHRATSPVEALADLKEARGFLAKDLAVLALREGVALDPTDDPLLVAYLLDPANTNPEGVARRYGGEFTEDAAERALLSERLFQTLFPRLSEKLLWLYQEVERPLSRVLAHMEARGVRLDVPLLEALSFELEKEMERLEGEVFRLAGHPFNLNSRDQLEKVLFDELGLTPVGRTEKTGKRSTAQGALEALRGAHPIVELILQYRELSKLKSTYLDPLPRLVHPRTGRLHTRFNQTATATGRLSSSDPNLQNIPVRTPLGQRIRKAFVAEEGWLLLAADYSQIELRVLAHLSGDENLKRVFREGKDIHTETAAWMFGLDPALVDPKMRRAAKTVNFGVLYGMSAHRLSQELGIDYEEAEAFIERYFQSFPKVRAWIERTLEEGRTRGYVETLFGRRRYVPDLASRVRSVREAAERMAFNMPVQGTAADLMKIAMVKLFPRLKPLGAHLLLQVHDELVLEVPEDRAEEAKALVKEVMENAYPLDVPLEVEVGVGRDWLEAKQD

SEQ ID NO: 219 - DNA, 2538 bp, synthetic construct
  misc_feature 1..2538: note = DNA Polymerase Variant
  source 1..2538: mol_type = other DNA
atgcaccatcatcatcatcatggcggtagcggcatgttaccgctgtttgatttggaagaaccaccaaaacgcgtgctgcttgttgacggccatcatctggcgtatcgtaccttctacgcactgagccttacgacctcacgtggtgagcctgtccagatggtgtatgggtttgctcgctccctgctgaaagccctgaaggaagatggtcaagccgtagtagtggttttcgatgcgaaagcaccgtcgtttcgtcacgaagcgtacgaggcctataaagctggccgcgcaccgaccccggaagactttccgcgtcagttagcgctcgtcaaacgcctcgtggatttgctgggattagttcgcttggaagctcctggctacgaggcggacgacgtgctcggtacactggccaagaaagcagaacgtgaaggcatggaggtctgcattcttaccggtgatcgcgatttcttccagctgctgtctgagaaagtgagcgttttgctgcccgatggcacgttagtaaccccgaaagatgtccaagagaaatatggagttccgccagaacgttgggtggactttcgcgcactgactggtgatcgttcagacaacatcccgggcgttgccgggattggtgaaaagacggcgctgcgcctgctggcagaatggggctcggtggaaaatctgctcaagaaccttgatcgtgtgaaacctgatagcttacgccgcaagatcgaagcccacctggaagacttgcgtctgagtctggatcttgcgcgtattcgcaccgatctgccgttggaagtagactttaaagctctgcgtcgtcgcacacccgatttagaggggttacgcgcgttcctcgaagaactggagtttggctccctgctgcatgaattcggtttgttgggcggagagaaaccgcgtgaagaagcaccatggccgccgcccgaaggtgcctttgtcggctttcttctgtcacgcaaagagccaatgtgggcggaactgttagctcttgcagccgccgcggaagggcgtgttcaccgcgcgacctctcctgtcgaggccctcgctgacctcaaagaagcacgtggtttcttggcgaaagatttagccgtgcttgcattacgcgaaggcgttgcgctcgatccgacggacgacccgcttttggtggcttatttgctcgatcctgcgaataccaacccggaaggtgtagcccgtcgttacggcggcgagtttactgaagatgcggcagaacgcgcgttgcttagcgaacgcctcttccagacgttatttccacgtctttcggagaaattactctggctctatcaggaagtcgaacgtccattgagtcgcgtgcttgcccatatggaggctcgcggtgtgcgcttagatgttccgttgttagaagcactcagcttcgagttggagaaagaactggaacgtcttgaaggcgaagtctttcgtttagcggggcatcccttcaatctcaactctcgcgaccaattggagaaagtgctctttgatgaattaggtttaacccctatcggacgtacagagaagaccggcaaacgttccacttcggcagccgccttggaagcacttcgtggtgctcacccgatcgtcgaattgattttgcagtaccgcgagctcagcaaactcaaatcaacctatcttgatccgttacctcgtcttgttcatccacgtacgggtcgtttacacacccgcttcaatcaaacggcgacagccaccgggcgcttgtcgtcgagtgacccgaacctccagaatattccagtgcgcacgccgttaggccaacgcattcgtaaagcgtttgttgcggaagaaggttggttattacttgcggccgattactcccagatcgaacttcgtgtattggcgcatctctctggcgacgagaatcttaaacgcgtgtttcgcgaaggcaaggatattcacactgaaaccgcagcctggatgttcgggcttgacccagccttagtggaccccaagatgcgtcgtgccgccaagaccgtcaactttggcgtactctatggtatgtcagcacatcgtcttagtcaggaattgggcattgactacaaagaagctgaagcgtttatcgagcgctatttccaatcctttccgaaagttcgcgcgtggattgaacgtaccctcgaagaaggtcgcactcgcggctatgtggaaacgttattcgggcgtcgtcgctacgttccagatcttgcatctcgtgtccgctcagtgcgcgaagctgctgagcgtatggccttcaatatgcctgttcagggaacagcggcggacctcatgaagatcgccatggtgaaattgtttccgcgcttgaaacccttaggagcccaccttcttttacaggtgcatgatgaattggtcttggaagtacccgaggatcgcgcagaagaagccaaagcactcgtgaaagaggttatggaaaacgcgtatccgttagatgttccgttggaggtcgaagtgggtgtaggccgtgattggcttgaagcgaaacaagactaatga

SEQ ID NO: 220 - protein, 844 aa, synthetic construct
  REGION 1..844: note = DNA Polymerase Variant
MHHHHHHGGSGMLPLFDLEEPPKRVLLVDGHHLAYRTFYALSLTTSRGEPVQMVYGFARSLLKALKEDGQAVVVVFDAKAPSFRHEAYEAYKAGRAPTPEDFPRQLALVKRLVDLLGLVRLEAPGYEADDVLGTLAKKAEREGMEVCILTGDRDFFQLLSEKVSVLLPDGTLVTPKDVQEKYGVPPERWVDFRALTGDRSDNIPGVAGIGEKTALRLLAEWGSVENLLKNLDRVKPDSLRRKIEAHLEDLRLSLDLARIRTDLPLEVDFKALRRRTPDLEGLRAFLEELEFGSLLHEFGLLGGEKPREEAPWPPPEGAFVGFLLSRKEPMWAELLALAAAAEGRVHRATSPVEALADLKEARGFLAKDLAVLALREGVALDPTDDPLLVAYLLDPANTNPEGVARRYGGEFTEDAAERALLSERLFQTLFPRLSEKLLWLYQEVERPLSRVLAHMEARGVRLDVPLLEALSFELEKELERLEGEVFRLAGHPFNLNSRDQLEKVLFDELGLTPIGRTEKTGKRSTSAAALEALRGAHPIVELILQYRELSKLKSTYLDPLPRLVHPRTGRLHTRFNQTATATGRLSSSDPNLQNIPVRTPLGQRIRKAFVAEEGWLLLAADYSQIELRVLAHLSGDENLKRVFREGKDIHTETAAWMFGLDPALVDPKMRRAAKTVNFGVLYGMSAHRLSQELGIDYKEAEAFIERYFQSFPKVRAWIERTLEEGRTRGYVETLFGRRRYVPDLASRVRSVREAAERMAFNMPVQGTAADLMKIAMVKLFPRLKPLGAHLLLQVHDELVLEVPEDRAEEAKALVKEVMENAYPLDVPLEVEVGVGRDWLEAKQD

SEQ ID NO: 221 - DNA, 2538 bp, synthetic construct
  misc_feature 1..2538: note = DNA Polymerase Variant
  source 1..2538: mol_type = other DNA
atgcaccatcatcatcatcatggcggtagcggcatgttaccgctgtttgatttggaagaaccaccaaaacgcgtgctgcttgttgacggccatcatctggcgtatcgtaccttctacgcactgagccttacgacctcacgtggtgagcctgtccagatggtgtatgggtttgctcgctccctgctgaaagccctgaaggaagatggtcaagccgtagtagtggttttcgatgcgaaagcaccgtcgtttcgtcacgaagcgtacgaggcctataaagctggccgcgcaccgaccccggaagactttccgcgtcagttagcgctcgtcaaacgcctcgtggatttgctgggattagttcgcttggaagctcctggctacgaggcggacgacgtgctcggtacactggccaagaaagcagaacgtgaaggcatggaggtctgcattcttaccggtgatcgcgatttcttccagctgctgtctgagaaagtgagcgttttgctgcccgatggcacgttagtaaccccgaaagatgtccaagagaaatatggagttccgccagaacgttgggtggactttcgcgcactgactggtgatcgttcagacaacatcccgggcgttgccgggattggtgaaaagacggcgctgcgcctgctggcagaatggggctcggtggaaaatctgctcaagaaccttgatcgtgtgaaacctgatagcttacgccgcaagatcgaagcccacctggaagacttgcgtctgagtctggatcttgcgcgtattcgcaccgatctgccgttggaagtagactttaaagctctgcgtcgtcgcacacccgatttagaggggttacgcgcgttcctcgaagaactggagtttggctccctgctgcatgaattcggtttgttgggcggagagaaaccgcgtgaagaagcaccatggccgccgcccgaaggtgcctttgtcggctttcttctgtcacgcaaagagccaatgtgggcggaactgttagctcttgcagccgccgcggaagggcgtgttcaccgcgcgacctctcctgtcgaggccctcgctgacctcaaagaagcacgtggtttcttggcgaaagatttagccgtgcttgcattacgcgaaggcgttgcgctcgatccgacggacgacccgcttttggtggcttatttgctcgatcctgcgaataccaacccggaaggtgtagcccgtcgttacggcggcgagtttactgaagatgcggcagaacgcgcgttgcttagcgaacgcctcttccagacgttatttccacgtctttcggagaaattactctggctctatcaggaagtcgaacgtccattgagtcgcgtgcttgcccatatggaggctcgcggtgtgcgcttagatgttccgttgttagaagcactcagcttcgagttggagaaagaactggaacgtcttgaaggcgaagtctttcgtttagcggggcatcccttcaatctcaactctcgcgaccaattggagaaagtgctctttgatgaattaggtttaacccctatccatcgtacagagaagaccggcaaacgttccacttcggcagccgccttggaagcacttcgtggtgctcacccgatcgtcgaattgattttgcagtaccgcgagctcagcaaactcaaatcaacctatcttgatccgttacctcgtcttgttcatccacgtacgggtcgtttacacacccgcttcaatcaaacggcgacagccaccgggcgcttgtcgtcgagtgacccgaacctccagaatattccagtgcgcacgccgttaggccaacgcattcgtaaagcgtttgttgcggaagaaggttggttattacttgcggccgattactcccagatcgaacttcgtgtattggcgcatctctctggcgacgagaatcttaaacgcgtgtttcgcgaaggcaaggatattcacactgaaaccgcagcctggatgttcgggcttgacccagccttagtggaccccaagatgcgtcgtgccgccaagaccgtcaactttggcgtactctatggtatgtcagcacatcgtcttagtcaggaattgggcattgactacaaagaagctgaagcgtttatcgagcgctatttccaatcctttccgaaagttcgcgcgtggattgaacgtaccctcgaagaaggtcgcactcgcggctatgtggaaacgttattcgggcgtcgtcgctacgttccagatcttgcatctcgtgtccgctcagtgcgcgaagctgctgagcgtatggccttcaatatgcctgttcagggaacagcggcggacctcatgaagatcgccatggtgaaattgtttccgcgcttgaaacccttaggagcccaccttcttttacaggtgcatgatgaattggtcttggaagtacccgaggatcgcgcagaagaagccaaagcactcgtgaaagaggttatggaaaacgcgtatccgttagatgttccgttggaggtcgaagtgggtgtaggccgtgattggcttgaagcgaaacaagactaatga

SEQ ID NO: 222 - protein, 844 aa, synthetic construct
  REGION 1..844: note = DNA Polymerase Variant
MHHHHHHGGSGMLPLFDLEEPPKRVLLVDGHHLAYRTFYALSLTTSRGEPVQMVYGFARSLLKALKEDGQAVVVVFDAKAPSFRHEAYEAYKAGRAPTPEDFPRQLALVKRLVDLLGLVRLEAPGYEADDVLGTLAKKAEREGMEVCILTGDRDFFQLLSEKVSVLLPDGTLVTPKDVQEKYGVPPERWVDFRALTGDRSDNIPGVAGIGEKTALRLLAEWGSVENLLKNLDRVKPDSLRRKIEAHLEDLRLSLDLARIRTDLPLEVDFKALRRRTPDLEGLRAFLEELEFGSLLHEFGLLGGEKPREEAPWPPPEGAFVGFLLSRKEPMWAELLALAAAAEGRVHRATSPVEALADLKEARGFLAKDLAVLALREGVALDPTDDPLLVAYLLDPANTNPEGVARRYGGEFTEDAAERALLSERLFQTLFPRLSEKLLWLYQEVERPLSRVLAHMEARGVRLDVPLLEALSFELEKELERLEGEVFRLAGHPFNLNSRDQLEKVLFDELGLTPIHRTEKTGKRSTSAAALEALRGAHPIVELILQYRELSKLKSTYLDPLPRLVHPRTGRLHTRFNQTATATGRLSSSDPNLQNIPVRTPLGQRIRKAFVAEEGWLLLAADYSQIELRVLAHLSGDENLKRVFREGKDIHTETAAWMFGLDPALVDPKMRRAAKTVNFGVLYGMSAHRLSQELGIDYKEAEAFIERYFQSFPKVRAWIERTLEEGRTRGYVETLFGRRRYVPDLASRVRSVREAAERMAFNMPVQGTAADLMKIAMVKLFPRLKPLGAHLLLQVHDELVLEVPEDRAEEAKALVKEVMENAYPLDVPLEVEVGVGRDWLEAKQD

SEQ ID NO: 223 - DNA, 2538 bp, synthetic construct
  misc_feature 1..2538: note = DNA Polymerase Variant
  source 1..2538: mol_type = other DNA
atgcaccatcatcatcatcatggcggtagcggcatgttaccgctgtttgatttggaagaaccaccaaaacgcgtgctgcttgttgacggccatcatctggcgtatcgtaccttctacgcactgagccttacgacctcacgtggtgagcctgtccagatggtgtatgggtttgctcgctccctgctgaaagccctgaaggaagatggtcaagccgtagtagtggttttcgatgcgaaagcaccgtcgtttcgtcacgaagcgtacgaggcctataaagctggccgcgcaccgaccccggaagactttccgcgtcagttagcgctcgtcaaacgcctcgtggatttgctgggattagttcgcttggaagctcctggctacgaggcggacgacgtgctcggtacactggccaagaaagcagaacgtgaaggcatggaggtctgcattcttaccggtgatcgcgatttcttccagctgctgtctgagaaagtgagcgttttgctgcccgatggcacgttagtaaccccgaaagatgtccaagagaaatatggagttccgccagaacgttgggtggactttcgcgcactgactggtgatcgttcagacaacatcccgggcgttgccgggattggtgaaaagacggcgctgcgcctgctggcagaatggggctcggtggaaaatctgctcaagaaccttgatcgtgtgaaacctgatagcttacgccgcaagatcgaagcccacctggaagacttgcgtctgagtctggatcttgcgcgtattcgcaccgatctgccgttggaagtagactttaaagctctgcgtcgtcgcacacccgatttagaggggttacgcgcgttcctcgaagaactggagtttggctccctgctgcatgaattcggtttgttgggcggagagaaaccgcgtgaagaagcaccatggccgccgcccgaaggtgcctttgtcggctttcttctgtcacgcaaagagccaatgtgggcggaactgttagctcttgcagccgccgcggaagggcgtgttcaccgcgcgacctctcctgtcgaggccctcgctgacctcaaagaagcacgtggtttcttggcgaaagatttagccgtgcttgcattacgcgaaggcgttgcgctcgatccgacggacgacccgcttttggtggcttatttgctcgatcctgcgaataccaacccggaaggtgtagcccgtcgttacggcggcgagtttactgaagatgcggcagaacgcgcgttgcttagcgaacgcctcttccagacgttatttccacgtctttcggagaaattactctggctctatcaggaagtcgaacgtccattgagtcgcgtgcttgcccatatggaggctcgcggtgtgcgcttagatgttccgttgttagaagcactcagcttcgagttggagaaagaactggaacgtcttgaaggcgaagtctttcgtttagcggggcatcccttcaatctcaactctcgcgaccaattggagaaagtgctctttgatgaattaggtttaacccctatcggacgtacagagaagaccggcaaacgttccacttcggcagccgccttggaagcacttcgtggtgctcacccgatcgtcgaattgattttgcagtaccgcgagctcagcaaactcaaatcaacctatcttgatccgttacctcgtcttgttcatccacgtacgggtcgtttacacacccgcttcaatcaaacggcgacagccaccgggcgcttgtcgtcgagtgacccgaacctccaggcgattccagtgcgcacgccgttaggccaacgcattcgtaaagcgtttgttgcggaagaaggttggttattacttgcggccgattactcccagatcgaacttcgtgtattggcgcatctctctggcgacgagaatcttaaacgcgtgtttcgcgaaggcaaggatattcacactgaaaccgcagcctggatgttcgggcttgacccagccttagtggaccccaagatgcgtcgtgccgccaagaccgtcaactttggcgtactctatggtatgtcagcacatcgtcttagtcaggaattgggcattgactacaaagaagctgaagcgtttatcgagcgctatttccaatcctttccgaaagttcgcgcgtggattgaacgtaccctcgaagaaggtcgcactcgcggctatgtggaaacgttattcgggcgtcgtcgctacgttccagatcttgcatctcgtgtccgctcagtgcgcgaagctgctgagcgtatggccttcaatatgcctgttcagggaacagcggcggacctcatgaagatcgccatggtgaaattgtttccgcgcttgaaacccttaggagcccaccttcttttacaggtgcatgatgaattggtcttggaagtacccgaggatcgcgcagaagaagccaaagcactcgtgaaagaggttatggaaaacgcgtatccgttagatgttccgttggaggtcgaagtgggtgtaggccgtgattggcttgaagcgaaacaagactaatga

SEQ ID NO: 224 - protein, 844 aa, synthetic construct
  REGION 1..844: note = DNA Polymerase Variant
MHHHHHHGGSGMLPLFDLEEPPKRVLLVDGHHLAYRTFYALSLTTSRGEPVQMVYGFARSLLKALKEDGQAVVVVFDAKAPSFRHEAYEAYKAGRAPTPEDFPRQLALVKRLVDLLGLVRLEAPGYEADDVLGTLAKKAEREGMEVCILTGDRDFFQLLSEKVSVLLPDGTLVTPKDVQEKYGVPPERWVDFRALTGDRSDNIPGVAGIGEKTALRLLAEWGSVENLLKNLDRVKPDSLRRKIEAHLEDLRLSLDLARIRTDLPLEVDFKALRRRTPDLEGLRAFLEELEFGSLLHEFGLLGGEKPREEAPWPPPEGAFVGFLLSRKEPMWAELLALAAAAEGRVHRATSPVEALADLKEARGFLAKDLAVLALREGVALDPTDDPLLVAYLLDPANTNPEGVARRYGGEFTEDAAERALLSERLFQTLFPRLSEKLLWLYQEVERPLSRVLAHMEARGVRLDVPLLEALSFELEKELERLEGEVFRLAGHPFNLNSRDQLEKVLFDELGLTPIGRTEKTGKRSTSAAALEALRGAHPIVELILQYRELSKLKSTYLDPLPRLVHPRTGRLHTRFNQTATATGRLSSSDPNLQAIPVRTPLGQRIRKAFVAEEGWLLLAADYSQIELRVLAHLSGDENLKRVFREGKDIHTETAAWMFGLDPALVDPKMRRAAKTVNFGVLYGMSAHRLSQELGIDYKEAEAFIERYFQSFPKVRAWIERTLEEGRTRGYVETLFGRRRYVPDLASRVRSVREAAERMAFNMPVQGTAADLMKIAMVKLFPRLKPLGAHLLLQVHDELVLEVPEDRAEEAKALVKEVMENAYPLDVPLEVEVGVGRDWLEAKQD

SEQ ID NO: 225 - DNA, 2538 bp, synthetic construct
  misc_feature 1..2538: note = DNA Polymerase Variant
  source 1..2538: mol_type = other DNA
atgcaccatcatcatcatcatggcggtagcggcatgttaccgctgtttgatttggaagaaccaccaaaacgcgtgctgcttgttgacggccatcatctggcgtatcgtaccttctacgcactgagccttacgacctcacgtggtgagcctgtccagatggtgtatgggtttgctcgctccctgctgaaagccctgaaggaagatggtcaagccgtagtagtggttttcgatgcgaaagcaccgtcgtttcgtcacgaagcgtacgaggcctataaagctggccgcgcaccgaccccggaagactttccgcgtcagttagcgctcgtcaaacgcctcgtggatttgctgggattagttcgcttggaagctcctggctacgaggcggacgacgtgctcggtacactggccaagaaagcagaacgtgaaggcatggaggtctgcattcttaccggtgatcgcgatttcttccagctgctgtctgagaaagtgagcgttttgctgcccgatggcacgttagtaaccccgaaagatgtccaagagaaatatggagttccgccagaacgttgggtggactttcgcgcactgactggtgatcgttcagacaacatcccgggcgttgccgggattggtgaaaagacggcgctgcgcctgctggcagaatggggctcggtggaaaatctgctcaagaaccttgatcgtgtgaaacctgatagcttacgccgcaagatcgaagcccacctggaagacttgcgtctgagtctggatcttgcgcgtattcgcaccgatctgccgttggaagtagactttaaagctctgcgtcgtcgcacacccgatttagaggggttacgcgcgttcctcgaagaactggagtttggctccctgctgcatgaattcggtttgttgggcggagagaaaccgcgtgaagaagcaccatggccgccgcccgaaggtgcctttgtcggctttcttctgtcacgcaaagagccaatgtgggcggaactgttagctcttgcagccgccgcggaagggcgtgttcaccgcgcgacctctcctgtcgaggccctcgctgacctcaaagaagcacgtggtttcttggcgaaagatttagccgtgcttgcattacgcgaaggcgttgcgctcgatccgacggacgacccgcttttggtggcttatttgctcgatcctgcgaataccaacccggaaggtgtagcccgtcgttacggcggcgagtttactgaagatgcggcagaacgcgcgttgcttagcgaacgcctcttccagacgttatttccacgtctttcggagaaattactctggctctatcaggaagtcgaacgtccattgagtcgcgtgcttgcccatatggaggctcgcggtgtgcgcttagatgttccgttgttagaagcactcagcttcgagttggagaaagaactggaacgtcttgaaggcgaagtctttcgtttagcggggcatcccttcaatctcaactctcgcgaccaattggagaaagtgctctttgatgaattaggtttaacccctatcggacgtacagagaagaccggcaaacgttccacttcggcagccgccttggaagcacttcgtggtgctcacccgatcgtcgaattgattttgcagtaccgcgagctcagcaaactcaaatcaacctatcttgataggttacctcgtcttgttcatccacgtacgggtcgtttacacacccgcttcaatcaaacggcgacagccaccgggcgcttgtcgtcgagtgacccgaacctccagaatattccagtgcgcacgccgttaggccaacgcattcgtaaagcgtttgttgcggaagaaggttggttattacttgcggccgattactcccagatcgaacttcgtgtattggcgcatctctctggcgacgagaatcttaaacgcgtgtttcgcgaaggcaaggatattcacactgaaaccgcagcctggatgttcgggcttgacccagccttagtggaccccaagatgcgtcgtgccgccaagaccgtcaactttggcgtactctatggtatgtcagcacatcgtcttagtcaggaattgggcattgactacaaagaagctgaagcgtttatcgagcgctatttccaatcctttccgaaagttcgcgcgtggattgaacgtaccctcgaagaaggtcgcactcgcggctatgtggaaacgttattcgggcgtcgtcgctacgttccagatcttgcatctcgtgtccgctcagtgcgcgaagctgctgagcgtatggccttcaatatgcctgttcagggaacagcggcggacctcatgaagatcgccatggtgaaattgtttccgcgcttgaaacccttaggagcccaccttcttttacaggtgcatgatgaattggtcttggaagtacccgaggatcgcgcagaagaagccaaagcactcgtgaaagaggttatggaaaacgcgtatccgttagatgttccgttggaggtcgaagtgggtgtaggccgtgattggcttgaagcgaaacaagactaatga

SEQ ID NO: 226 - protein, 844 aa, synthetic construct
  REGION 1..844: note = DNA Polymerase Variant
MHHHHHHGGSGMLPLFDLEEPPKRVLLVDGHHLAYRTFYALSLTTSRGEPVQMVYGFARSLLKALKEDGQAVVVVFDAKAPSFRHEAYEAYKAGRAPTPEDFPRQLALVKRLVDLLGLVRLEAPGYEADDVLGTLAKKAEREGMEVCILTGDRDFFQLLSEKVSVLLPDGTLVTPKDVQEKYGVPPERWVDFRALTGDRSDNIPGVAGIGEKTALRLLAEWGSVENLLKNLDRVKPDSLRRKIEAHLEDLRLSLDLARIRTDLPLEVDFKALRRRTPDLEGLRAFLEELEFGSLLHEFGLLGGEKPREEAPWPPPEGAFVGFLLSRKEPMWAELLALAAAAEGRVHRATSPVEALADLKEARGFLAKDLAVLALREGVALDPTDDPLLVAYLLDPANTNPEGVARRYGGEFTEDAAERALLSERLFQTLFPRLSEKLLWLYQEVERPLSRVLAHMEARGVRLDVPLLEALSFELEKELERLEGEVFRLAGHPFNLNSRDQLEKVLFDELGLTPIGRTEKTGKRSTSAAALEALRGAHPIVELILQYRELSKLKSTYLDRLPRLVHPRTGRLHTRFNQTATATGRLSSSDPNLQNIPVRTPLGQRIRKAFVAEEGWLLLAADYSQIELRVLAHLSGDENLKRVFREGKDIHTETAAWMFGLDPALVDPKMRRAAKTVNFGVLYGMSAHRLSQELGIDYKEAEAFIERYFQSFPKVRAWIERTLEEGRTRGYVETLFGRRRYVPDLASRVRSVREAAERMAFNMPVQGTAADLMKIAMVKLFPRLKPLGAHLLLQVHDELVLEVPEDRAEEAKALVKEVMENAYPLDVPLEVEVGVGRDWLEAKQD

SEQ ID NO: 227 - DNA, 2538 bp, synthetic construct
  misc_feature 1..2538: note = DNA Polymerase Variant
  source 1..2538: mol_type = other DNA
atgcaccatcatcatcatcatggcggtagcggcatgttaccgctgtttgatttggaagaaccaccaaaacgcgtgctgcttgttgacggccatcatctggcgtatcgtaccttctacgcactgagccttacgacctcacgtggtgagcctgtccagatggtgtatgggtttgctcgctccctgctgaaagccctgaaggaagatggtcaagccgtagtagtggttttcgatgcgaaagcaccgtcgtttcgtcacgaagcgtacgaggcctataaagctggccgcgcaccgaccccggaagactttccgcgtcagttagcgctcgtcaaacgcctcgtggatttgctgggattagttcgcttggaagctcctggctacgaggcggacgacgtgctcggtacactggccaagaaagcagaacgtgaaggcatggaggtctgcattcttaccggtgatcgcgatttcttccagctgctgtctgagaaagtgagcgttttgctgcccgatggcacgttagtaaccccgaaagatgtccaagagaaatatggagttccgccagaacgttgggtggactttcgcgcactgactggtgatcgttcagacaacatcccgggcgttgccgggattggtgaaaagacggcgctgcgcctgctggcagaatggggctcggtggaaaatctgctcaagaaccttgatcgtgtgaaacctgatagcttacgccgcaagatcgaagcccacctggaagacttgcgtctgagtctggatcttgcgcgtattcgcaccgatctgccgttggaagtagactttaaagctctgcgtcgtcgcacacccgatttagaggggttacgcgcgttcctcgaagaactggagtttggctccctgctgcatgaattcggtttgttgggcggagagaaaccgcgtgaagaagcaccatggccgccgcccgaaggtgcctttgtcggctttcttctgtcacgcaaagagccaatgtgggcggaactgttagctcttgcagccgccgcggaagggcgtgttcaccgcgcgacctctcctgtcgaggccctcgctgacctcaaagaagcacgtggtttcttggcgaaagatttagccgtgcttgcattacgcgaaggcgttgcgctcgatccgacggacgacccgcttttggtggcttatttgctcgatcctgcgaataccaacccggaaggtgtagcccgtcgttacggcggcgagtttactgaagatgcggcagaacgcgcgttgcttagcgaacgcctcttccagacgttatttccacgtctttcggagaaattactctggctctatcaggaagtcgaacgtccattgagtcgcgtgcttgcccatatggaggctcgcggtgtgcgcttagatgttccgttgttagaagcactcagcttcgagttggagaaagaactggaacgtcttgaaggcgaagtctttcgtttagcggggcatcccttcaatctcaactctcgcgaccaattggagaaagtgctctttgatgaattaggtttaacccctatcggacgtacagagaagaccggcaaacgttccacttcggcagccgccttggaagcacttcgtggtgctcacccgatcgtcgaattgattttgcagtaccgcgagctcagcaaactcaaatcaacctatcttgatccgttacctcgtcttgttcatccacgtacgggtcgtttacacacccgcttcaatcaaacggcgacagccaccgggcgcttgtcgtcgagtgacccgaacctccagaatattccagtgcgcacgccgttaggccaacgcattcgtaaagcgtttgttgcggaagaaggttggttattacttgcggccgattactcccagatcgaacttcgtgtattggcgcatctctctggcgacgagaatcttaaacgcgtgtttcgcgaaggcaaggatattcacactgaaaccgcagcctggatgttcgggcttgacccagccttagtggaccccaagatgcgtcgtgccgccaagaccgtcaactttggcgtactctatggtatgtcagcacatcgtcttagtcaggaattgggcattgactacaaagaagctgaagcgtttatcgagcgctatttccaatcctttccgaaagttcgcgcgtggattgaacgtaccctcgaagaaggtcgcactcgcggctatgtggaaacgttattcgggcgtcgtcgctacgttccagatcttgcatctcgtgtccgctcagtgcgcgaagctgctgagcgtatggcctggaatatgcctgttcagggaacagcggcggacctcatgaagatcgccatggtgaaattgtttccgcgcttgaaacccttaggagcccaccttcttttacaggtgcatgatgaattggtcttggaagtacccgaggatcgcgcagaagaagccaaagcactcgtgaaagaggttatggaaaacgcgtatccgttagatgttccgttggaggtcgaagtgggtgtaggccgtgattggcttgaagcgaaacaagactaatga

SEQ ID NO: 228 - protein, 844 aa, synthetic construct
  REGION 1..844: note = DNA Polymerase Variant
MHHHHHHGGSGMLPLFDLEEPPKRVLLVDGHHLAYRTFYALSLTTSRGEPVQMVYGFARSLLKALKEDGQAVVVVFDAKAPSFRHEAYEAYKAGRAPTPEDFPRQLALVKRLVDLLGLVRLEAPGYEADDVLGTLAKKAEREGMEVCILTGDRDFFQLLSEKVSVLLPDGTLVTPKDVQEKYGVPPERWVDFRALTGDRSDNIPGVAGIGEKTALRLLAEWGSVENLLKNLDRVKPDSLRRKIEAHLEDLRLSLDLARIRTDLPLEVDFKALRRRTPDLEGLRAFLEELEFGSLLHEFGLLGGEKPREEAPWPPPEGAFVGFLLSRKEPMWAELLALAAAAEGRVHRATSPVEALADLKEARGFLAKDLAVLALREGVALDPTDDPLLVAYLLDPANTNPEGVARRYGGEFTEDAAERALLSERLFQTLFPRLSEKLLWLYQEVERPLSRVLAHMEARGVRLDVPLLEALSFELEKELERLEGEVFRLAGHPFNLNSRDQLEKVLFDELGLTPIGRTEKTGKRSTSAAALEALRGAHPIVELILQYRELSKLKSTYLDPLPRLVHPRTGRLHTRFNQTATATGRLSSSDPNLQNIPVRTPLGQRIRKAFVAEEGWLLLAADYSQIELRVLAHLSGDENLKRVFREGKDIHTETAAWMFGLDPALVDPKMRRAAKTVNFGVLYGMSAHRLSQELGIDYKEAEAFIERYFQSFPKVRAWIERTLEEGRTRGYVETLFGRRRYVPDLASRVRSVREAAERMAWNMPVQGTAADLMKIAMVKLFPRLKPLGAHLLLQVHDELVLEVPEDRAEEAKALVKEVMENAYPLDVPLEVEVGVGRDWLEAKQD

SEQ ID NO: 229 - DNA, 2538 bp, synthetic construct
  misc_feature 1..2538: note = DNA Polymerase Variant
  source 1..2538: mol_type = other DNA
atgcaccatcatcatcatcatggcggtagcggcatgttaccgctgtttgatttggaagaaccaccaaaacgcgtgctgcttgttgacggccatcatctggcgtatcgtaccttctacgcactgagccttacgacctcacgtggtgagcctgtccagatggtgtatgggtttgctcgctccctgctgaaagccctgaaggaagatggtcaagccgtagtagtggttttcgatgcgaaagcaccgtcgtttcgtcacgaagcgtacgaggcctataaagctggccgcgcaccgaccccggaagactttccgcgtcagttagcgctcgtcaaacgcctcgtggatttgctgggattagttcgcttggaagctcctggctacgaggcggacgacgtgctcggtacactggccaagaaagcagaacgtgaaggcatggaggtctgcattcttaccggtgatcgcgatttcttccagctgctgtctgagaaagtgagcgttttgctgcccgatggcacgttagtaaccccgaaagatgtccaagagaaatatggagttccgccagaacgttgggtggactttcgcgcactgactggtgatcgttcagacaacatcccgggcgttgccgggattggtgaaaagacggcgctgcgcctgctggcagaatggggctcggtggaaaatctgctcaagaaccttgatcgtgtgaaacctgatagcttacgccgcaagatcgaagcccacctggaagacttgcgtctgagtctggatcttgcgcgtattcgcaccgatctgccgttggaagtagactttaaagctctgcgtcgtcgcacacccgatttagaggggttacgcgcgttcctcgaagaactggagtttggctccctgctgcatgaattcggtttgttgggcggagagaaaccgcgtgaagaagcaccatggccgccgcccgaaggtgcctttgtcggctttcttctgtcacgcaaagagccaatgtgggcggaactgttagctcttgcagccgccgcggaagggcgtgttcaccgcgcgacctctcctgtcgaggccctcgctgacctcaaagaagcacgtggtttcttggcgaaagatttagccgtgcttgcattacgcgaaggcgttgcgctcgatccgacggacgacccgcttttggtggcttatttgctcgatcctgcgaataccaacccggaaggtgtagcccgtcgttacggcggcgagtttactgaagatgcggcagaacgcgcgttgcttagcgaacgcctcttccagacgttatttccacgtctttcggagaaattactctggctctatcaggaagtcgaacgtccattgagtcgcgtgcttgcccatatggaggctcgcggtgtgcgcttagatgttccgttgttagaagcactcagcttcgagttggagaaagaactggaacgtcttgaaggcgaagtctttcgtttagcggggcatcccttcaatctcaactctcgcgaccaattggagaaagtgctctttgatgaattaggtttaacccctatcggacgtacagagaagaccggcaaacgttccacttcggcagccgccttggaagcacttcgtggtgctcacccgatcgtctcgttgattttgcagtaccgcgagctcagcaaactcaaatcaacctatcttgatccgttacctcgtcttgttcatccacgtacgggtcgtttacacacccgcttcaatcaaacggcgacagccaccgggcgcttgtcgtcgagtgacccgaacctccagaatattccagtgcgcacgccgttaggccaacgcattcgtaaagcgtttgttgcggaagaaggttggttattacttgcggccgattactcccagatcgaacttcgtgtattggcgcatctctctggcgacgagaatcttaaacgcgtgtttcgcgaaggcaaggatattcacactgaaaccgcagcctggatgttcgggcttgacccagccttagtggaccccaagatgcgtcgtgccgccaagaccgtcaactttggcgtactctatggtatgtcagcacatcgtcttagtcaggaattgggcattgactacaaagaagctgaagcgtttatcgagcgctatttccaatcctttccgaaagttcgcgcgtggattgaacgtaccctcgaagaaggtcgcactcgcggctatgtggaaacgttattcgggcgtcgtcgctacgttccagatcttgcatctcgtgtccgctcagtgcgcgaagctgctgagcgtatggccttcaatatgcctgttcagggaacagcggcggacctcatgaagatcgccatggtgaaattgtttccgcgcttgaaacccttaggagcccaccttcttttacaggtgcatgatgaattggtcttggaagtacccgaggatcgcgcagaagaagccaaagcactcgtgaaagaggttatggaaaacgcgtatccgttagatgttccgttggaggtcgaagtgggtgtaggccgtgattggcttgaagcgaaacaagactaatga

SEQ ID NO: 230 - protein, 844 aa, synthetic construct
  REGION 1..844: note = DNA Polymerase Variant
MHHHHHHGGSGMLPLFDLEEPPKRVLLVDGHHLAYRTFYALSLTTSRGEPVQMVYGFARSLLKALKEDGQAVVVVFDAKAPSFRHEAYEAYKAGRAPTPEDFPRQLALVKRLVDLLGLVRLEAPGYEADDVLGTLAKKAEREGMEVCILTGDRDFFQLLSEKVSVLLPDGTLVTPKDVQEKYGVPPERWVDFRALTGDRSDNIPGVAGIGEKTALRLLAEWGSVENLLKNLDRVKPDSLRRKIEAHLEDLRLSLDLARIRTDLPLEVDFKALRRRTPDLEGLRAFLEELEFGSLLHEFGLLGGEKPREEAPWPPPEGAFVGFLLSRKEPMWAELLALAAAAEGRVHRATSPVEALADLKEARGFLAKDLAVLALREGVALDPTDDPLLVAYLLDPANTNPEGVARRYGGEFTEDAAERALLSERLFQTLFPRLSEKLLWLYQEVERPLSRVLAHMEARGVRLDVPLLEALSFELEKELERLEGEVFRLAGHPFNLNSRDQLEKVLFDELGLTPIGRTEKTGKRSTSAAALEALRGAHPIVSLILQYRELSKLKSTYLDPLPRLVHPRTGRLHTRFNQTATATGRLSSSDPNLQNIPVRTPLGQRIRKAFVAEEGWLLLAADYSQIELRVLAHLSGDENLKRVFREGKDIHTETAAWMFGLDPALVDPKMRRAAKTVNFGVLYGMSAHRLSQELGIDYKEAEAFIERYFQSFPKVRAWIERTLEEGRTRGYVETLFGRRRYVPDLASRVRSVREAAERMAFNMPVQGTAADLMKIAMVKLFPRLKPLGAHLLLQVHDELVLEVPEDRAEEAKALVKEVMENAYPLDVPLEVEVGVGRDWLEAKQD

SEQ ID NO: 231 - DNA, 2538 bp, synthetic construct
  misc_feature 1..2538: note = DNA Polymerase Variant
  source 1..2538: mol_type = other DNA
atgcaccatcatcatcatcatggcggtagcggcatgttaccgctgtttgatttggaagaaccaccaaaacgcgtgctgcttgttgacggccatcatctggcgtatcgtaccttctacgcactgagccttacgacctcacgtggtgagcctgtccagatggtgtatgggtttgctcgctccctgctgaaagccctgaaggaagatggtcaagccgtagtagtggttttcgatgcgaaagcaccgtcgtttcgtcacgaagcgtacgaggcctataaagctggccgcgcaccgaccccggaagactttccgcgtcagttagcgctcgtcaaacgcctcgtggatttgctgggattagttcgcttggaagctcctggctacgaggcggacgacgtgctcggtacactggccaagaaagcagaacgtgaaggcatggaggtctgcattcttaccggtgatcgcgatttcttccagctgctgtctgagaaagtgagcgttttgctgcccgatggcacgttagtaaccccgaaagatgtccaagagaaatatggagttccgccagaacgttgggtggactttcgcgcactgactggtgatcgttcagacaacatcccgggcgttgccgggattggtgaaaagacggcgctgcgcctgctggcagaatggggctcggtggaaaatctgctcaagaaccttgatcgtgtgaaacctgatagcttacgccgcaagatcgaagcccacctggaagacttgcgtctgagtctggatcttgcgcgtattcgcaccgatctgccgttggaagtagactttaaagctctgcgtcgtcgcacacccgatttagaggggttacgcgcgttcctcgaagaactggagtttggctccctgctgcatgaattcggtttgttgggcggagagaaaccgcgtgaagaagcaccatggccgccgcccgaaggtgcctttgtcggctttcttctgtcacgcaaagagccaatgtgggcggaactgttagctcttgcagccgccgcggaagggcgtgttcaccgcgcgacctctcctgtcgaggccctcgctgacctcaaagaagcacgtggtttcttggcgaaagatttagccgtgcttgcattacgcgaaggcgttgcgctcgatccgacggacgacccgcttttggtggcttatttgctcgatcctgcgaataccaacccggaaggtgtagcccgtcgttacggcggcgagtttactgaagatgcggcagaacgcgcgttgcttagcgaacgcctcttccagacgttatttccacgtctttcggagaaattactctggctctatcaggaagtcgaacgtccattgagtcgcgtgcttgcccatatggaggctcgcggtgtgcgcttagatgttccgttgttagaagcactcagcttcgagttggagaaagaactggaacgtcttgaaggcgaagtctttcgtttagcggggcatcccttcaatctcaactctcgcgaccaattggagaaagtgctctttgatgaattaggtttaacccctatcggacgtacagagaagaccggcaaacgttccacttcggcagccgccttggaagcacttcgtggtgctcacccgatcgtcaatttgattttgcagtaccgcgagctcagcaaactcaaatcaacctatcttgatccgttacctcgtcttgttcatccacgtacgggtcgtttacacacccgcttcaatcaaacggcgacagccaccgggcgcttgtcgtcgagtgacccgaacctccagaatattccagtgcgcacgccgttaggccaacgcattcgtaaagcgtttgttgcggaagaaggttggttattacttgcggccgattactcccagatcgaacttcgtgtattggcgcatctctctggcgacgagaatcttaaacgcgtgtttcgcgaaggcaaggatattcacactgaaaccgcagcctggatgttcgggcttgacccagccttagtggaccccaagatgcgtcgtgccgccaagaccgtcaactttggcgtactctatggtatgtcagcacatcgtcttagtcaggaattgggcattgactacaaagaagctgaagcgtttatcgagcgctatttccaatcctttccgaaagttcgcgcgtggattgaacgtaccctcgaagaaggtcgcactcgcggctatgtggaaacgttattcgggcgtcgtcgctacgttccagatcttgcatctcgtgtccgctcagtgcgcgaagctgctgagcgtatggccttcaatatgcctgttcagggaacagcggcggacctcatgaagatcgccatggtgaaattgtttccgcgcttgaaacccttaggagcccaccttcttttacaggtgcatgatgaattggtcttggaagtacccgaggatcgcgcagaagaagccaaagcactcgtgaaagaggttatggaaaacgcgtatccgttagatgttccgttggaggtcgaagtgggtgtaggccgtgattggcttgaagcgaaacaagactaatga

SEQ ID NO: 232 - protein, 844 aa, synthetic construct
  REGION 1..844: note = DNA Polymerase Variant
MHHHHHHGGSGMLPLFDLEEPPKRVLLVDGHHLAYRTFYALSLTTSRGEPVQMVYGFARSLLKALKEDGQAVVVVFDAKAPSFRHEAYEAYKAGRAPTPEDFPRQLALVKRLVDLLGLVRLEAPGYEADDVLGTLAKKAEREGMEVCILTGDRDFFQLLSEKVSVLLPDGTLVTPKDVQEKYGVPPERWVDFRALTGDRSDNIPGVAGIGEKTALRLLAEWGSVENLLKNLDRVKPDSLRRKIEAHLEDLRLSLDLARIRTDLPLEVDFKALRRRTPDLEGLRAFLEELEFGSLLHEFGLLGGEKPREEAPWPPPEGAFVGFLLSRKEPMWAELLALAAAAEGRVHRATSPVEALADLKEARGFLAKDLAVLALREGVALDPTDDPLLVAYLLDPANTNPEGVARRYGGEFTEDAAERALLSERLFQTLFPRLSEKLLWLYQEVERPLSRVLAHMEARGVRLDVPLLEALSFELEKELERLEGEVFRLAGHPFNLNSRDQLEKVLFDELGLTPIGRTEKTGKRSTSAAALEALRGAHPIVNLILQYRELSKLKSTYLDPLPRLVHPRTGRLHTRFNQTATATGRLSSSDPNLQNIPVRTPLGQRIRKAFVAEEGWLLLAADYSQIELRVLAHLSGDENLKRVFREGKDIHTETAAWMFGLDPALVDPKMRRAAKTVNFGVLYGMSAHRLSQELGIDYKEAEAFIERYFQSFPKVRAWIERTLEEGRTRGYVETLFGRRRYVPDLASRVRSVREAAERMAFNMPVQGTAADLMKIAMVKLFPRLKPLGAHLLLQVHDELVLEVPEDRAEEAKALVKEVMENAYPLDVPLEVEVGVGRDWLEAKQD

SEQ ID NO: 233 - DNA, 2538 bp, synthetic construct
  misc_feature 1..2538: note = DNA Polymerase Variant
  source 1..2538: mol_type = other DNA
atgcaccatcatcatcatcatggcggtagcggcatgttaccgctgtttgatttggaagaaccaccaaaacgcgtgctgcttgttgacggccatcatctggcgtatcgtaccttctacgcactgagccttacgacctcacgtggtgagcctgtccagatggtgtatgggtttgctcgctccctgctgaaagccctgaaggaagatggtcaagccgtagtagtggttttcgatgcgaaagcaccgtcgtttcgtcacgaagcgtacgaggcctataaagctggccgcgcaccgaccccggaagactttccgcgtcagttagcgctcgtcaaacgcctcgtggatttgctgggattagttcgcttggaagctcctggctacgaggcggacgacgtgctcggtacactggccaagaaagcagaacgtgaaggcatggaggtctgcattcttaccggtgatcgcgatttcttccagctgctgtctgagaaagtgagcgttttgctgcccgatggcacgttagtaaccccgaaagatgtccaagagaaatatggagttccgccagaacgttgggtggactttcgcgcactgactggtgatcgttcagacaacatcccgggcgttgccgggattggtgaaaagacggcgctgcgcctgctggcagaatggggctcggtggaaaatctgctcaagaaccttgatcgtgtgaaacctgatagcttacgccgcaagatcgaagcccacctggaagacttgcgtctgagtctggatcttgcgcgtattcgcaccgatctgccgttggaagtagactttaaagctctgcgtcgtcgcacacccgatttagaggggttacgcgcgttcctcgaagaactggagtttggctccctgctgcatgaattcggtttgttgggcggagagaaaccgcgtgaagaagcaccatggccgccgcccgaaggtgcctttgtcggctttcttctgtcacgcaaagagccaatgtgggcggaactgttagctcttgcagccgccgcggaagggcgtgttcaccgcgcgacctctcctgtcgaggccctcgctgacctcaaagaagcacgtggtttcttggcgaaagatttagccgtgcttgcattacgcgaaggcgttgcgctcgatccgacggacgacccgcttttggtggcttatttgctcgatcctgcgaataccaacccggaaggtgtagcccgtcgttacggcggcgagtttactgaagatgcggcagaacgcgcgttgcttagcgaacgcctcttccagacgttatttccacgtctttcggagaaattactctggctctatcaggaagtcgaacgtccattgagtcgcgtgcttgcccatatggaggctcgcggtgtgcgcttagatgttccgttgttagaagcactcagcttcgagttggagaaagaactggaacgtcttgaaggcgaagtctttcgtttagcggggcatcccttcaatctcaactctcgcgaccaattggagaaagtgctctttgatgaattaggtttaacccctatcggacgtacagagaagaccggcaaacgttccacttcggcagccgccttggaagcacttcgtggtgctcacccgatcgtcgaattgattttgcagtaccgcgagctcagcaaactcaaatcaacctatcttgatccgttacctcgtcttgttcatccacgtacgggtcgtttacacacccgcttcaatcaaacggcgacagccaccgggcgcttgtcgtcgagtgacccgaacctccagaatattccagtgcgcacgccgttaggccaacgcattcgtaaagcgtttgttgcggaagaaggttggttattacttgcggccgattactcccagatcgaacttcgtgtattggcgcatctctctggcgacgagaatcttaaacgcgtgtttcgcgaaggcaaggatattcacactgaaaccgcagcctggatgttcgggcttgacccagccttagtggaccccaagatgcgtcgtgccgccaagaccgtcaactttggcgtactctatggtatgtcagcacatcgtcttagtcaggaattgggcattgactacaaagaagctgaagcgtttatcgagcgctatttccaatcctttccgaaagttcgcgcgtggattgaacgtaccctcgaagaaggtcgcactcgcggctatgtggaaacgttattcgggcgtcgtcgctacgttccagatcttgcatctcgtgtccgctcagtgcgcgcggctgctgagcgtatggccttcaatatgcctgttcagggaacagcggcggacctcatgaagatcgccatggtgaaattgtttccgcgcttgaaacccttaggagcccaccttcttttacaggtgcatgatgaattggtcttggaagtacccgaggatcgcgcagaagaagccaaagcactcgtgaaagaggttatggaaaacgcgtatccgttagatgttccgttggaggtcgaagtgggtgtaggccgtgattggcttgaagcgaaacaagactaatga

SEQ ID NO: 234 - protein, 844 aa, synthetic construct
  REGION 1..844: note = DNA Polymerase Variant
MHHHHHHGGSGMLPLFDLEEPPKRVLLVDGHHLAYRTFYALSLTTSRGEPVQMVYGFARSLLKALKEDGQAVVVVFDAKAPSFRHEAYEAYKAGRAPTPEDFPRQLALVKRLVDLLGLVRLEAPGYEADDVLGTLAKKAEREGMEVCILTGDRDFFQLLSEKVSVLLPDGTLVTPKDVQEKYGVPPERWVDFRALTGDRSDNIPGVAGIGEKTALRLLAEWGSVENLLKNLDRVKPDSLRRKIEAHLEDLRLSLDLARIRTDLPLEVDFKALRRRTPDLEGLRAFLEELEFGSLLHEFGLLGGEKPREEAPWPPPEGAFVGFLLSRKEPMWAELLALAAAAEGRVHRATSPVEALADLKEARGFLAKDLAVLALREGVALDPTDDPLLVAYLLDPANTNPEGVARRYGGEFTEDAAERALLSERLFQTLFPRLSEKLLWLYQEVERPLSRVLAHMEARGVRLDVPLLEALSFELEKELERLEGEVFRLAGHPFNLNSRDQLEKVLFDELGLTPIGRTEKTGKRSTSAAALEALRGAHPIVELILQYRELSKLKSTYLDPLPRLVHPRTGRLHTRFNQTATATGRLSSSDPNLQNIPVRTPLGQRIRKAFVAEEGWLLLAADYSQIELRVLAHLSGDENLKRVFREGKDIHTETAAWMFGLDPALVDPKMRRAAKTVNFGVLYGMSAHRLSQELGIDYKEAEAFIERYFQSFPKVRAWIERTLEEGRTRGYVETLFGRRRYVPDLASRVRSVRAAAERMAFNMPVQGTAADLMKIAMVKLFPRLKPLGAHLLLQVHDELVLEVPEDRAEEAKALVKEVMENAYPLDVPLEVEVGVGRDWLEAKQD

SEQ ID NO: 235 - DNA, 2538 bp, synthetic construct
  misc_feature 1..2538: note = DNA Polymerase Variant
  source 1..2538: mol_type = other DNA
atgcaccatcatcatcatcatggcggtagcggcatgttaccgctgtttgatttggaagaaccaccaaaacgcgtgctgcttgttgacggccatcatctggcgtatcgtaccttctacgcactgagccttacgacctcacgtggtgagcctgtccagatggtgtatgggtttgctcgctccctgctgaaagccctgaaggaagatggtcaagccgtagtagtggttttcgatgcgaaagcaccgtcgtttcgtcacgaagcgtacgaggcctataaagctggccgcgcaccgaccccggaagactttccgcgtcagttagcgctcgtcaaacgcctcgtggatttgctgggattagttcgcttggaagctcctggctacgaggcggacgacgtgctcggtacactggccaagaaagcagaacgtgaaggcatggaggtctgcattcttaccggtgatcgcgatttcttccagctgctgtctgagaaagtgagcgttttgctgcccgatggcacgttagtaaccccgaaagatgtccaagagaaatatggagttccgccagaacgttgggtggactttcgcgcactgactggtgatcgttcagacaacatcccgggcgttgccgggattggtgaaaagacggcgctgcgcctgctggcagaatggggctcggtggaaaatctgctcaagaaccttgatcgtgtgaaacctgatagcttacgccgcaagatcgaagcccacctggaagacttgcgtctgagtctggatcttgcgcgtattcgcaccgatctgccgttggaagtagactttaaagctctgcgtcgtcgcacacccgatttagaggggttacgcgcgttcctcgaagaactggagtttggctccctgctgcatgaattcggtttgttgggcggagagaaaccgcgtgaagaagcaccatggccgccgcccgaaggtgcctttgtcggctttcttctgtcacgcaaagagccaatgtgggcggaactgttagctcttgcagccgccgcggaagggcgtgttcaccgcgcgacctctcctgtcgaggccctcgctgacctcaaagaagcacgtggtttcttggcgaaagatttagccgtgcttgcattacgcgaaggcgttgcgctcgatccgacggacgacccgcttttggtggcttatttgctcgatcctgcgaataccaacccggaacgggtagcccgtcgttacggcggcgagtttactgaagatgcggcagaacgcgcgttgcttagcgaacgcctcttccagacgttatttccacgtctttcggagaaattactctggctctatcaggaagtcgaacgtccattgagtcgcgtgcttgcccatatggaggctcgcggtgtgcgcttagatgttccgttgttagaagcactcagcttcgagttggagaaagaactggaacgtcttgaaggcgaagtctttcgtttagcggggcatcccttcaatctcaactctcgcgaccaattggagaaagtgctctttgatgaattaggtttaacccctatcggacgtacagagaagaccggcaaacgttccacttcggcagccgccttggaagcacttcgtggtgctcacccgatcgtcgaattgattttgcagtaccgcgagctcagcaaactcaaatcaacctatcttgatccgttacctcgtcttgttcatccacgtacgggtcgtttacacacccgcttcaatcaaacggcgacagccaccgggcgcttgtcgtcgagtgacccgaacctccagaatattccagtgcgcacgccgttaggccaacgcattcgtaaagcgtttgttgcggaagaaggttggttattacttgcggccgattactcccagatcgaacttcgtgtattggcgcatctctctggcgacgagaatcttaaacgcgtgtttcgcgaaggcaaggatattcacactgaaaccgcagcctggatgttcgggcttgacccagccttagtggaccccaagatgcgtcgtgccgccaagaccgtcaactttggcgtactctatggtatgtcagcacatcgtcttagtcaggaattgggcattgactacaaagaagctgaagcgtttatcgagcgctatttccaatcctttccgaaagttcgcgcgtggattgaacgtaccctcgaagaaggtcgcactcgcggctatgtggaaacgttattcgggcgtcgtcgctacgttccagatcttgcatctcgtgtccgctcagtgcgcgaagctgctgagcgtatggccttcaatatgcctgttcagggaacagcggcggacctcatgaagatcgccatggtgaaattgtttccgcgcttgaaacccttaggagcccaccttcttttacaggtgcatgatgaattggtcttggaagtacccgaggatcgcgcagaagaagccaaagcactcgtgaaagaggttatggaaaacgcgtatccgttagatgttccgttggaggtcgaagtgggtgtaggccgtgattggcttgaagcgaaacaagactaatga

SEQ ID NO: 236 - protein, 844 aa, synthetic construct
  REGION 1..844: note = DNA Polymerase Variant
MHHHHHHGGSGMLPLFDLEEPPKRVLLVDGHHLAYRTFYALSLTTSRGEPVQMVYGFARSLLKALKEDGQAVVVVFDAKAPSFRHEAYEAYKAGRAPTPEDFPRQLALVKRLVDLLGLVRLEAPGYEADDVLGTLAKKAEREGMEVCILTGDRDFFQLLSEKVSVLLPDGTLVTPKDVQEKYGVPPERWVDFRALTGDRSDNIPGVAGIGEKTALRLLAEWGSVENLLKNLDRVKPDSLRRKIEAHLEDLRLSLDLARIRTDLPLEVDFKALRRRTPDLEGLRAFLEELEFGSLLHEFGLLGGEKPREEAPWPPPEGAFVGFLLSRKEPMWAELLALAAAAEGRVHRATSPVEALADLKEARGFLAKDLAVLALREGVALDPTDDPLLVAYLLDPANTNPERVARRYGGEFTEDAAERALLSERLFQTLFPRLSEKLLWLYQEVERPLSRVLAHMEARGVRLDVPLLEALSFELEKELERLEGEVFRLAGHPFNLNSRDQLEKVLFDELGLTPIGRTEKTGKRSTSAAALEALRGAHPIVELILQYRELSKLKSTYLDPLPRLVHPRTGRLHTRFNQTATATGRLSSSDPNLQNIPVRTPLGQRIRKAFVAEEGWLLLAADYSQIELRVLAHLSGDENLKRVFREGKDIHTETAAWMFGLDPALVDPKMRRAAKTVNFGVLYGMSAHRLSQELGIDYKEAEAFIERYFQSFPKVRAWIERTLEEGRTRGYVETLFGRRRYVPDLASRVRSVREAAERMAFNMPVQGTAADLMKIAMVKLFPRLKPLGAHLLLQVHDELVLEVPEDRAEEAKALVKEVMENAYPLDVPLEVEVGVGRDWLEAKQD

SEQ ID NO: 237 - DNA, 2538 bp, synthetic construct
  misc_feature 1..2538: note = DNA Polymerase Variant
  source 1..2538: mol_type = other DNA
atgcaccatcatcatcatcatggcggtagcggcatgttaccgctgtttgatttggaagaaccaccaaaacgcgtgctgcttgttgacggccatcatctggcgtatcgtaccttctacgcactgagccttacgacctcacgtggtgagcctgtccagatggtgtatgggtttgctcgctccctgctgaaagccctgaaggaagatggtcaagccgtagtagtggttttcgatgcgaaagcaccgtcgtttcgtcacgaagcgtacgaggcctataaagctggccgcgcaccgaccccggaagactttccgcgtcagttagcgctcgtcaaacgcctcgtggatttgctgggattagttcgcttggaagctcctggctacgaggcggacgacgtgctcggtacactggccaagaaagcagaacgtgaaggcatggaggtctgcattcttaccggtgatcgcgatttcttccagctgctgtctgagaaagtgagcgttttgctgcccgatggcacgttagtaaccccgaaagatgtccaagagaaatatggagttccgccagaacgttgggtggactttcgcgcactgactggtgatcgttcagacaacatcccgggcgttgccgggattggtgaaaagacggcgctgcgcctgctggcagaatggggctcggtggaaaatctgctcaagaaccttgatcgtgtgaaacctgatagcttacgccgcaagatcgaagcccacctggaagacttgcgtctgagtctggatcttgcgcgtattcgcaccgatctgccgttggaagtagactttaaagctctgcgtcgtcgcacacccgatttagaggggttacgcgcgttcctcgaagaactggagtttggctccctgctgcatgaattcggtttgttgggcggagagaaaccgcgtgaagaagcaccatggccgccgcccgaaggtgcctttgtcggctttcttctgtcacgcaaagagccaatgtgggcggaactgttagctcttgcagccgccgcggaagggcgtgttcaccgcgcgacctctcctgtcgaggccctcgctgacctcaaagaagcacgtggtttcttggcgaaagatttagccgtgcttgcattacgcgaaggcgttgcgctcgatccgacggacgacccgcttttggtggcttatttgctcgatcctgcgaataccaacccggaaggtgtagcccgtcgttacggcggcgagtttactgaagatgcggcagaacgcgcgttgcttagcgaacgcctcttccagacgttatttccacgtctttcggagaaattactctggctctatcaggaagtcgaacgtccattgagtcgcgtgcttgcccatatggaggctcgcggtgtgcgcttagatgttccgttgttagaagcactcagcttcgagttggagaaagaactggaacgtcttgaaggcgaagtctttcgtttagcggggcatcccttcaatctcaactctcgcgaccaattggagaaagtgctctttgatgaattaggtttaacccctatcggacgtacagagaagaccggcaaacgttccacttcggcagccgccttggaagcacttcgtggtgctcacccgatcgtcgaattgattttgcagtaccgcgagctcagcaaactcaaatcaacctatcttgatccgttacctcgtcttgttcatccacgtacgggtcgtttacacacccgcttcaatcaaacggcgacagccaccgggcgcttgtcgtcgagtgacccgaacctccagaatattccagtgcgcacgccgttaggccaacgcattcgtaaagcgtttgttgcggaagaaggttggttattacttgcggccgattactcccagatcgaacttcgtgtattggcgcatctctctggcgacgagaatcttaaacgcgtgtttcgcgaaggcaaggatattcacactgaaaccgcagcctggatgttcgggcttgacccagccttagtggaccccaagatgcgtcgtgccgccaagaccgtcaactttggcgtactctatggtatgtcagcacatcgtcttagtcaggaattgggcattgactacaaagaagctgaagcgtttatcgagcgctatttccaatcctttccgaaagttcgcgcgtggattgaacgtaccctcgaagaaggtcgcactcgcggctatgtggaaacgttattcgggcgtcgtcgctacgttccagatcttgcatctcgtgtccgctcagtgcgcgaagctgctgagcgtatggccacgaatatgcctgttcagggaacagcggcggacctcatgaagatcgccatggtgaaattgtttccgcgcttgaaacccttaggagcccaccttcttttacaggtgcatgatgaattggtcttggaagtacccgaggatcgcgcagaagaagccaaagcactcgtgaaagaggttatggaaaacgcgtatccgttagatgttccgttggaggtcgaagtgggtgtaggccgtgattggcttgaagcgaaacaagactaatga

SEQ ID NO: 238 - protein, 844 aa, synthetic construct
  REGION 1..844: note = DNA Polymerase Variant
MHHHHHHGGSGMLPLFDLEEPPKRVLLVDGHHLAYRTFYALSLTTSRGEPVQMVYGFARSLLKALKEDGQAVVVVFDAKAPSFRHEAYEAYKAGRAPTPEDFPRQLALVKRLVDLLGLVRLEAPGYEADDVLGTLAKKAEREGMEVCILTGDRDFFQLLSEKVSVLLPDGTLVTPKDVQEKYGVPPERWVDFRALTGDRSDNIPGVAGIGEKTALRLLAEWGSVENLLKNLDRVKPDSLRRKIEAHLEDLRLSLDLARIRTDLPLEVDFKALRRRTPDLEGLRAFLEELEFGSLLHEFGLLGGEKPREEAPWPPPEGAFVGFLLSRKEPMWAELLALAAAAEGRVHRATSPVEALADLKEARGFLAKDLAVLALREGVALDPTDDPLLVAYLLDPANTNPEGVARRYGGEFTEDAAERALLSERLFQTLFPRLSEKLLWLYQEVERPLSRVLAHMEARGVRLDVPLLEALSFELEKELERLEGEVFRLAGHPFNLNSRDQLEKVLFDELGLTPIGRTEKTGKRSTSAAALEALRGAHPIVELILQYRELSKLKSTYLDPLPRLVHPRTGRLHTRFNQTATATGRLSSSDPNLQNIPVRTPLGQRIRKAFVAEEGWLLLAADYSQIELRVLAHLSGDENLKRVFREGKDIHTETAAWMFGLDPALVDPKMRRAAKTVNFGVLYGMSAHRLSQELGIDYKEAEAFIERYFQSFPKVRAWIERTLEEGRTRGYVETLFGRRRYVPDLASRVRSVREAAERMATNMPVQGTAADLMKIAMVKLFPRLKPLGAHLLLQVHDELVLEVPEDRAEEAKALVKEVMENAYPLDVPLEVEVGVGRDWLEAKQD

SEQ ID NO: 239 - DNA, 2538 bp, synthetic construct
  misc_feature 1..2538: note = DNA Polymerase Variant
  source 1..2538: mol_type = other DNA
atgcaccatcatcatcatcatggcggtagcggcatgttaccgctgtttgatttggaagaaccaccaaaacgcgtgctgcttgttgacggccatcatctggcgtatcgtaccttctacgcactgagccttacgacctcacgtggtgagcctgtccagatggtgtatgggtttgctcgctccctgctgaaagccctgaaggaagatggtcaagccgtagtagtggttttcgatgcgaaagcaccgtcgtttcgtcacgaagcgtacgaggcctataaagctggccgcgcaccgaccccggaagactttccgcgtcagttagcgctcgtcaaacgcctcgtggatttgctgggattagttcgcttggaagctcctggctacgaggcggacgacgtgctcggtacactggccaagaaagcagaacgtgaaggcatggaggtctgcattcttaccggtgatcgcgatttcttccagctgctgtctgagaaagtgagcgttttgctgcccgatggcacgttagtaaccccgaaagatgtccaagagaaatatggagttccgccagaacgttgggtggactttcgcgcactgactggtgatcgttcagacaacatcccgggcgttgccgggattggtgaaaagacggcgctgcgcctgctggcagaatggggctcggtggaaaatctgctcaagaaccttgatcgtgtgaaacctgatagcttacgccgcaagatcgaagcccacctggaagacttgcgtctgagtctggatcttgcgcgtattcgcaccgatctgccgttggaagtagactttaaagctctgcgtcgtcgcacacccgatttagaggggttacgcgcgttcctcgaagaactggagtttggctccctgctgcatgaattcggtttgttgggcggagagaaaccgcgtgaagaagcaccatggccgccgcccgaaggtgcctttgtcggctttcttctgtcacgcaaagagccaatgtgggcggaactgttagctcttgcagccgccgcggaagggcgtgttcaccgcgcgacctctcctgtcgaggccctcgctgacctcaaagaagcacgtggtttcttggcgaaagatttagccgtgcttgcattacgcgaaggcgttgcgctcgatccgacggacgacccgcttttggtggcttatttgctcgatcctgcgaatcagaacccggaaggtgtagcccgtcgttacggcggcgagtttactgaagatgcggcagaacgcgcgttgcttagcgaacgcctcttccagacgttatttccacgtctttcggagaaattactctggctctatcaggaagtcgaacgtccattgagtcgcgtgcttgcccatatggaggctcgcggtgtgcgcttagatgttccgttgttagaagcactcagcttcgagttggagaaagaactggaacgtcttgaaggcgaagtctttcgtttagcggggcatcccttcaatctcaactctcgcgaccaattggagaaagtgctctttgatgaattaggtttaacccctatcggacgtacagagaagaccggcaaacgttccacttcggcagccgccttggaagcacttcgtggtgctcacccgatcgtcgaattgattttgcagtaccgcgagctcagcaaactcaaatcaacctatcttgatccgttacctcgtcttgttcatccacgtacgggtcgtttacacacccgcttcaatcaaacggcgacagccaccgggcgcttgtcgtcgagtgacccgaacctccagaatattccagtgcgcacgccgttaggccaacgcattcgtaaagcgtttgttgcggaagaaggttggttattacttgcggccgattactcccagatcgaacttcgtgtattggcgcatctctctggcgacgagaatcttaaacgcgtgtttcgcgaaggcaaggatattcacactgaaaccgcagcctggatgttcgggcttgacccagccttagtggaccccaagatgcgtcgtgccgccaagaccgtcaactttggcgtactctatggtatgtcagcacatcgtcttagtcaggaattgggcattgactacaaagaagctgaagcgtttatcgagcgctatttccaatcctttccgaaagttcgcgcgtggattgaacgtaccctcgaagaaggtcgcactcgcggctatgtggaaacgttattcgggcgtcgtcgctacgttccagatcttgcatctcgtgtccgctcagtgcgcgaagctgctgagcgtatggccttcaatatgcctgttcagggaacagcggcggacctcatgaagatcgccatggtgaaattgtttccgcgcttgaaacccttaggagcccaccttcttttacaggtgcatgatgaattggtcttggaagtacccgaggatcgcgcagaagaagccaaagcactcgtgaaagaggttatggaaaacgcgtatccgttagatgttccgttggaggtcgaagtgggtgtaggccgtgattggcttgaagcgaaacaagactaatga

SEQ ID NO: 240 - protein, 844 aa, synthetic construct
  REGION 1..844: note = DNA Polymerase Variant
MHHHHHHGGSGMLPLFDLEEPPKRVLLVDGHHLAYRTFYALSLTTSRGEPVQMVYGFARSLLKALKEDGQAVVVVFDAKAPSFRHEAYEAYKAGRAPTPEDFPRQLALVKRLVDLLGLVRLEAPGYEADDVLGTLAKKAEREGMEVCILTGDRDFFQLLSEKVSVLLPDGTLVTPKDVQEKYGVPPERWVDFRALTGDRSDNIPGVAGIGEKTALRLLAEWGSVENLLKNLDRVKPDSLRRKIEAHLEDLRLSLDLARIRTDLPLEVDFKALRRRTPDLEGLRAFLEELEFGSLLHEFGLLGGEKPREEAPWPPPEGAFVGFLLSRKEPMWAELLALAAAAEGRVHRATSPVEALADLKEARGFLAKDLAVLALREGVALDPTDDPLLVAYLLDPANQNPEGVARRYGGEFTEDAAERALLSERLFQTLFPRLSEKLLWLYQEVERPLSRVLAHMEARGVRLDVPLLEALSFELEKELERLEGEVFRLAGHPFNLNSRDQLEKVLFDELGLTPIGRTEKTGKRSTSAAALEALRGAHPIVELILQYRELSKLKSTYLDPLPRLVHPRTGRLHTRFNQTATATGRLSSSDPNLQNIPVRTPLGQRIRKAFVAEEGWLLLAADYSQIELRVLAHLSGDENLKRVFREGKDIHTETAAWMFGLDPALVDPKMRRAAKTVNFGVLYGMSAHRLSQELGIDYKEAEAFIERYFQSFPKVRAWIERTLEEGRTRGYVETLFGRRRYVPDLASRVRSVREAAERMAFNMPVQGTAADLMKIAMVKLFPRLKPLGAHLLLQVHDELVLEVPEDRAEEAKALVKEVMENAYPLDVPLEVEVGVGRDWLEAKQD

SEQ ID NO: 241 - DNA, 2538 bp, synthetic construct
  misc_feature 1..2538: note = DNA Polymerase Variant
  source 1..2538: mol_type = other DNA
atgcaccatcatcatcatcatggcggtagcggcatgttaccgctgtttgatttggaagaaccaccaaaacgcgtgctgcttgttgacggccatcatctggcgtatcgtaccttctacgcactgagccttacgacctcacgtggtgagcctgtccagatggtgtatgggtttgctcgctccctgctgaaagccctgaaggaagatggtcaagccgtagtagtggttttcgatgcgaaagcaccgtcgtttcgtcacgaagcgtacgaggcctataaagctggccgcgcaccgaccccggaagactttccgcgtcagttagcgctcgtcaaacgcctcgtggatttgctgggattagttcgcttggaagctcctggctacgaggcggacgacgtgctcggtacactggccaagaaagcagaacgtgaaggcatggaggtctgcattcttaccggtgatcgcgatttcttccagctgctgtctgagaaagtgagcgttttgctgcccgatggcacgttagtaaccccgaaagatgtccaagagaaatatggagttccgccagaacgttgggtggactttcgcgcactgactggtgatcgttcagacaacatcccgggcgttgccgggattggtgaaaagacggcgctgcgcctgctggcagaatggggctcggtggaaaatctgctcaagaaccttgatcgtgtgaaacctgatagcttacgccgcaagatcgaagcccacctggaagacttgcgtctgagtctggatcttgcgcgtattcgcaccgatctgccgttggaagtagactttaaagctctgcgtcgtcgcacacccgatttagaggggttacgcgcgttcctcgaagaactggagtttggctccctgctgcatgaattcggtttgttgggcggagagaaaccgcgtgaagaagcaccatggccgccgcccgaaggtgcctttgtcggctttcttctgtcacgcaaagagccaatgtgggcggaactgttagctcttgcagccgccgcggaagggcgtgttcaccgcgcgacctctcctgtcgaggccctcgctgacctcaaagaagcacgtggtttcttggcgaaagatttagccgtgcttgcattacgcgaaggcgttgcgctcgatccgacggacgacccgcttttggtggcttatttgctcgatcctgcgaataccaacccggaaggtgtagcccgtcgttacggcggcgagtttactgaagatgcggcagaacgcgcgttgcttagcgaacgcctcttccagacgttatttccacgtctttcggagaaattactctggctctatcaggaagtcgaacgtccattgagtcgcgtgcttgcccatatggaggctcgcggtgtgcgcttagatgttccgttgttagaagcactcagcttcgagttggagaaagaactggaacgtcttgaaggcgaagtctttcgtttagcggggcatcccttcaatctcaactctcgcgaccaattggagaaagtgctctttgatgaattaggtttaacccctatcggacgtacagagaagaccggcaaacgttccacttcggcagccgccttggaagcacttcgtggtgctcacccgatcgtcgaattgattttgcagtaccgcgagctcagcaaactcaaatcaacctatcttgatccgttacctcgtcttgttcatccacgtacgggtcgtttacacacccgcttcaatcaaacggcgacagccaccgggcgcttgtcgtcgagtgacccgaacctccagaatattccagtgcgcacgccgttaggccaacgcattcgtaaagcgtttgttgcggaagaaggttggttattacttgcggccgattactcccagatcgaacttcgtgtattggcgcatctctctggcgacgagaatcttaaacgcgtgtttcgcgaaggcaaggatattcacactgaaaccgcagcctggatgttcgggcttgacccagccttagtggaccccaagatgcgtcgtgccgccaagaccgtcaactttggcgtactctatggtatgtcagcacatcgtcttagtcaggaattgggcattgactacaaagaagctgaagcgtttatcgagcgctatttccaatcctttccgaaagttcgcgcgtggattgaacgtaccctcgaagaaggtcgcactcgcggctatgtggaaacgttattcgggcgtcgtcgctacgttccagatcttgcatctcgtgtccgctcagtgcgcgaagctgctgagcgtggggccttcaatatgcctgttcagggaacagcggcggacctcatgaagatcgccatggtgaaattgtttccgcgcttgaaacccttaggagcccaccttcttttacaggtgcatgatgaattggtcttggaagtacccgaggatcgcgcagaagaagccaaagcactcgtgaaagaggttatggaaaacgcgtatccgttagatgttccgttggaggtcgaagtgggtgtaggccgtgattggcttgaagcgaaacaagactaatga

SEQ ID NO: 242 - protein, 844 aa, synthetic construct
  REGION 1..844: note = DNA Polymerase Variant
MHHHHHHGGSGMLPLFDLEEPPKRVLLVDGHHLAYRTFYALSLTTSRGEPVQMVYGFARSLLKALKEDGQAVVVVFDAKAPSFRHEAYEAYKAGRAPTPEDFPRQLALVKRLVDLLGLVRLEAPGYEADDVLGTLAKKAEREGMEVCILTGDRDFFQLLSEKVSVLLPDGTLVTPKDVQEKYGVPPERWVDFRALTGDRSDNIPGVAGIGEKTALRLLAEWGSVENLLKNLDRVKPDSLRRKIEAHLEDLRLSLDLARIRTDLPLEVDFKALRRRTPDLEGLRAFLEELEFGSLLHEFGLLGGEKPREEAPWPPPEGAFVGFLLSRKEPMWAELLALAAAAEGRVHRATSPVEALADLKEARGFLAKDLAVLALREGVALDPTDDPLLVAYLLDPANTNPEGVARRYGGEFTEDAAERALLSERLFQTLFPRLSEKLLWLYQEVERPLSRVLAHMEARGVRLDVPLLEALSFELEKELERLEGEVFRLAGHPFNLNSRDQLEKVLFDELGLTPIGRTEKTGKRSTSAAALEALRGAHPIVELILQYRELSKLKSTYLDPLPRLVHPRTGRLHTRFNQTATATGRLSSSDPNLQNIPVRTPLGQRIRKAFVAEEGWLLLAADYSQIELRVLAHLSGDENLKRVFREGKDIHTETAAWMFGLDPALVDPKMRRAAKTVNFGVLYGMSAHRLSQELGIDYKEAEAFIERYFQSFPKVRAWIERTLEEGRTRGYVETLFGRRRYVPDLASRVRSVREAAERGAFNMPVQGTAADLMKIAMVKLFPRLKPLGAHLLLQVHDELVLEVPEDRAEEAKALVKEVMENAYPLDVPLEVEVGVGRDWLEAKQD

SEQ ID NO: 243 - DNA, 2538 bp, synthetic construct
  misc_feature 1..2538: note = DNA Polymerase Variant
  source 1..2538: mol_type = other DNA
atgcaccatcatcatcatcatggcggtagcggcatgttaccgctgtttgatttggaagaaccaccaaaacgcgtgctgcttgttgacggccatcatctggcgtatcgtaccttctacgcactgagccttacgacctcacgtggtgagcctgtccagatggtgtatgggtttgctcgctccctgctgaaagccctgaaggaagatggtcaagccgtagtagtggttttcgatgcgaaagcaccgtcgtttcgtcacgaagcgtacgaggcctataaagctggccgcgcaccgaccccggaagactttccgcgtcagttagcgctcgtcaaacgcctcgtggatttgctgggattagttcgcttggaagctcctggctacgaggcggacgacgtgctcggtacactggccaagaaagcagaacgtgaaggcatggaggtctgcattcttaccggtgatcgcgatttcttccagctgctgtctgagaaagtgagcgttttgctgcccgatggcacgttagtaaccccgaaagatgtccaagagaaatatggagttccgccagaacgttgggtggactttcgcgcactgactggtgatcgttcagacaacatcccgggcgttgccgggattggtgaaaagacggcgctgcgcctgctggcagaatggggctcggtggaaaatctgctcaagaaccttgatcgtgtgaaacctgatagcttacgccgcaagatcgaagcccacctggaagacttgcgtctgagtctggatcttgcgcgtattcgcaccgatctgccgttggaagtagactttaaagctctgcgtcgtcgcacacccgatttagaggggttacgcgcgttcctcgaagaactggagtttggctccctgctgcatgaattcggtttgttgggcggagagaaaccgcgtgaagaagcaccatggccgccgcccgaaggtgcctttgtcggctttcttctgtcacgcaaagagccaatgtgggcggaactgttagctcttgcagccgccgcggaagggcgtgttcaccgcgcgacctctcctgtcgaggccctcgctgacctcaaagaagcacgtggtttcttggcgaaagatttagccgtgcttgcattacgcgaaggcgttgcgctcgatccgacggacgacccgcttttggtggcttatttgctcgatcctgcgaataccaacccggaaggtgtagcccgtcgttacggcggcgagtttactgaagatgcggcagaacgcgcgttgcttagcgaacgcctcttccagacgttatttccacgtctttcggagaaattactctggctctatcaggaagtcgaacgtccattgagtcgcgtgcttgcccatatggaggctcgcggtgtgcgcttagatgttccgttgttagaagcactcagcttcgagttggagaaagaactggaacgtcttgaaggcgaagtctttcgtttagcggggcatcccttcaatctcaactctcgcgaccaattggagaaagtgctctttgatgaattaggtttaacccctatcggacgtacagagaagaccggcaaacgttccacttcggcagccgccttggaagcacttcgtggtgctcacccgatcgtcgaattgattttgcagtaccgcgagctcagcaaactcaaatcaacctatcttgatccgttacctcgtcttgttcatccacgtacgggtcgtttacacacccgcttcaatcaaacggcgacagccaccgggcgcttgtcgtcgagtgacccgaacctccagaatattccagtgcgcacgccgttaggccaacgcattcgtaaagcgtttgttgcggaagaaggttggttattacttgcggccgattactcccagatcgaacttcgtgtattggcgcatctctctggcgacgagaatcttaaacgcgtgtttcgcgaaggcaaggatattcacactgaaaccgcagcctggatgttcgggcttgacccagccttagtggaccccaagatgcgtcgtgccgccaagaccgtcaactttggcgtactctatggtatgtcagcacatcgtcttagtcaggaattgggcattgactacaaagaagctgaagcgtttatcgagcgctatttccaatcctttccgaaagttcgcgcgtggattgaacgtaccctcgaagaaggtcgcactcgcggctatgtggaaacgttattcgggcgtcgtcgctacgttccagatcttgcatctcgtgtccgctcagtgcgcgaagctgctgagcgtatggcctataatatgcctgttcagggaacagcggcggacctcatgaagatcgccatggtgaaattgtttccgcgcttgaaacccttaggagcccaccttcttttacaggtgcatgatgaattggtcttggaagtacccgaggatcgcgcagaagaagccaaagcactcgtgaaagaggttatggaaaacgcgtatccgttagatgttccgttggaggtcgaagtgggtgtaggccgtgattggcttgaagcgaaacaagactaatga

SEQ ID NO: 244 - protein, 844 aa, synthetic construct
  REGION 1..844: note = DNA Polymerase Variant
MHHHHHHGGSGMLPLFDLEEPPKRVLLVDGHHLAYRTFYALSLTTSRGEPVQMVYGFARSLLKALKEDGQAVVVVFDAKAPSFRHEAYEAYKAGRAPTPEDFPRQLALVKRLVDLLGLVRLEAPGYEADDVLGTLAKKAEREGMEVCILTGDRDFFQLLSEKVSVLLPDGTLVTPKDVQEKYGVPPERWVDFRALTGDRSDNIPGVAGIGEKTALRLLAEWGSVENLLKNLDRVKPDSLRRKIEAHLEDLRLSLDLARIRTDLPLEVDFKALRRRTPDLEGLRAFLEELEFGSLLHEFGLLGGEKPREEAPWPPPEGAFVGFLLSRKEPMWAELLALAAAAEGRVHRATSPVEALADLKEARGFLAKDLAVLALREGVALDPTDDPLLVAYLLDPANTNPEGVARRYGGEFTEDAAERALLSERLFQTLFPRLSEKLLWLYQEVERPLSRVLAHMEARGVRLDVPLLEALSFELEKELERLEGEVFRLAGHPFNLNSRDQLEKVLFDELGLTPIGRTEKTGKRSTSAAALEALRGAHPIVELILQYRELSKLKSTYLDPLPRLVHPRTGRLHTRFNQTATATGRLSSSDPNLQNIPVRTPLGQRIRKAFVAEEGWLLLAADYSQIELRVLAHLSGDENLKRVFREGKDIHTETAAWMFGLDPALVDPKMRRAAKTVNFGVLYGMSAHRLSQELGIDYKEAEAFIERYFQSFPKVRAWIERTLEEGRTRGYVETLFGRRRYVPDLASRVRSVREAAERMAYNMPVQGTAADLMKIAMVKLFPRLKPLGAHLLLQVHDELVLEVPEDRAEEAKALVKEVMENAYPLDVPLEVEVGVGRDWLEAKQD

SEQ ID NO: 245 - DNA, 2538 bp, synthetic construct
  misc_feature 1..2538: note = DNA Polymerase Variant
  source 1..2538: mol_type = other DNA
atgcaccatcatcatcatcatggcggtagcggcatgttaccgctgtttgatttggaagaaccaccaaaacgcgtgctgcttgttgacggccatcatctggcgtatcgtaccttctacgcactgagccttacgacctcacgtggtgagcctgtccagatggtgtatgggtttgctcgctccctgctgaaagccctgaaggaagatggtcaagccgtagtagtggttttcgatgcgaaagcaccgtcgtttcgtcacgaagcgtacgaggcctataaagctggccgcgcaccgaccccggaagactttccgcgtcagttagcgctcgtcaaacgcctcgtggatttgctgggattagttcgcttggaagctcctggctacgaggcggacgacgtgctcggtacactggccaagaaagcagaacgtgaaggcatggaggtctgcattcttaccggtgatcgcgatttcttccagctgctgtctgagaaagtgagcgttttgctgcccgatggcacgttagtaaccccgaaagatgtccaagagaaatatggagttccgccagaacgttgggtggactttcgcgcactgactggtgatcgttcagacaacatcccgggcgttgccgggattggtgaaaagacggcgctgcgcctgctggcagaatggggctcggtggaaaatctgctcaagaaccttgatcgtgtgaaacctgatagcttacgccgcaagatcgaagcccacctggaagacttgcgtctgagtctggatcttgcgcgtattcgcaccgatctgccgttggaagtagactttaaagctctgcgtcgtcgcacacccgatttagaggggttacgcgcgttcctcgaagaactggagtttggctccctgctgcatgaattcggtttgttgggcggagagaaaccgcgtgaagaagcaccatggccgccgcccgaaggtgcctttgtcggctttcttctgtcacgcaaagagccaatgtgggcggaactgttagctcttgcagccgccgcggaagggcgtgttcaccgcgcgacctctcctgtcgaggccctcgctgacctcaaagaagcacgtggtttcttggcgaaagatttagccgtgcttgcattacgcgaaggcgttgcgctcgatccgacggacgacccgcttttggtggcttatttgctcgatcctgcgaataccgggccggaaggtgtagcccgtcgttacggcggcgagtttactgaagatgcggcagaacgcgcgttgcttagcgaacgcctcttccagacgttatttccacgtctttcggagaaattactctggctctatcaggaagtcgaacgtccattgagtcgcgtgcttgcccatatggaggctcgcggtgtgcgcttagatgttccgttgttagaagcactcagcttcgagttggagaaagaactggaacgtcttgaaggcgaagtctttcgtttagcggggcatcccttcaatctcaactctcgcgaccaattggagaaagtgctctttgatgaattaggtttaacccctatcggacgtacagagaagaccggcaaacgttccacttcggcagccgccttggaagcacttcgtggtgctcacccgatcgtcgaattgattttgcagtaccgcgagctcagcaaactcaaatcaacctatcttgatccgttacctcgtcttgttcatccacgtacgggtcgtttacacacccgcttcaatcaaacggcgacagccaccgggcgcttgtcgtcgagtgacccgaacctccagaatattccagtgcgcacgccgttaggccaacgcattcgtaaagcgtttgttgcggaagaaggttggttattacttgcggccgattactcccagatcgaacttcgtgtattggcgcatctctctggcgacgagaatcttaaacgcgtgtttcgcgaaggcaaggatattcacactgaaaccgcagcctggatgttcgggcttgacccagccttagtggaccccaagatgcgtcgtgccgccaagaccgtcaactttggcgtactctatggtatgtcagcacatcgtcttagtcaggaattgggcattgactacaaagaagctgaagcgtttatcgagcgctatttccaatcctttccgaaagttcgcgcgtggattgaacgtaccctcgaagaaggtcgcactcgcggctatgtggaaacgttattcgggcgtcgtcgctacgttccagatcttgcatctcgtgtccgctcagtgcgcgaagctgctgagcgtatggccttcaatatgcctgttcagggaacagcggcggacctcatgaagatcgccatggtgaaattgtttccgcgcttgaaacccttaggagcccaccttcttttacaggtgcatgatgaattggtcttggaagtacccgaggatcgcgcagaagaagccaaagcactcgtgaaagaggttatggaaaacgcgtatccgttagatgttccgttggaggtcgaagtgggtgtaggccgtgattggcttgaagcgaaacaagactaatga

SEQ ID NO: 246 - protein, 844 aa, synthetic construct
  REGION 1..844: note = DNA Polymerase Variant
MHHHHHHGGSGMLPLFDLEEPPKRVLLVDGHHLAYRTFYALSLTTSRGEPVQMVYGFARSLLKALKEDGQAVVVVFDAKAPSFRHEAYEAYKAGRAPTPEDFPRQLALVKRLVDLLGLVRLEAPGYEADDVLGTLAKKAEREGMEVCILTGDRDFFQLLSEKVSVLLPDGTLVTPKDVQEKYGVPPERWVDFRALTGDRSDNIPGVAGIGEKTALRLLAEWGSVENLLKNLDRVKPDSLRRKIEAHLEDLRLSLDLARIRTDLPLEVDFKALRRRTPDLEGLRAFLEELEFGSLLHEFGLLGGEKPREEAPWPPPEGAFVGFLLSRKEPMWAELLALAAAAEGRVHRATSPVEALADLKEARGFLAKDLAVLALREGVALDPTDDPLLVAYLLDPANTGPEGVARRYGGEFTEDAAERALLSERLFQTLFPRLSEKLLWLYQEVERPLSRVLAHMEARGVRLDVPLLEALSFELEKELERLEGEVFRLAGHPFNLNSRDQLEKVLFDELGLTPIGRTEKTGKRSTSAAALEALRGAHPIVELILQYRELSKLKSTYLDPLPRLVHPRTGRLHTRFNQTATATGRLSSSDPNLQNIPVRTPLGQRIRKAFVAEEGWLLLAADYSQIELRVLAHLSGDENLKRVFREGKDIHTETAAWMFGLDPALVDPKMRRAAKTVNFGVLYGMSAHRLSQELGIDYKEAEAFIERYFQSFPKVRAWIERTLEEGRTRGYVETLFGRRRYVPDLASRVRSVREAAERMAFNMPVQGTAADLMKIAMVKLFPRLKPLGAHLLLQVHDELVLEVPEDRAEEAKALVKEVMENAYPLDVPLEVEVGVGRDWLEAKQD

SEQ ID NO: 247 - DNA, 2538 bp, synthetic construct
  misc_feature 1..2538: note = DNA Polymerase Variant
  source 1..2538: mol_type = other DNA
atgcaccatcatcatcatcatggcggtagcggcatgttaccgctgtttgatttggaagaaccaccaaaacgcgtgctgcttgttgacggccatcatctggcgtatcgtaccttctacgcactgagccttacgacctcacgtggtgagcctgtccagatggtgtatgggtttgctcgctccctgctgaaagccctgaaggaagatggtcaagccgtagtagtggttttcgatgcgaaagcaccgtcgtttcgtcacgaagcgtacgaggcctataaagctggccgcgcaccgaccccggaagactttccgcgtcagttagcgctcgtcaaacgcctcgtggatttgctgggattagttcgcttggaagctcctggctacgaggcggacgacgtgctcggtacactggccaagaaagcagaacgtgaaggcatggaggtctgcattcttaccggtgatcgcgatttcttccagctgctgtctgagaaagtgagcgttttgctgcccgatggcacgttagtaaccccgaaagatgtccaagagaaatatggagttccgccagaacgttgggtggactttcgcgcactgactggtgatcgttcagacaacatcccgggcgttgccgggattggtgaaaagacggcgctgcgcctgctggcagaatggggctcggtggaaaatctgctcaagaaccttgatcgtgtgaaacctgatagcttacgccgcaagatcgaagcccacctggaagacttgcgtctgagtctggatcttgcgcgtattcgcaccgatctgccgttggaagtagactttaaagctctgcgtcgtcgcacacccgatttagaggggttacgcgcgttcctcgaagaactggagtttggctccctgctgcatgaattcggtttgttgggcggagagaaaccgcgtgaagaagcaccatggccgccgcccgaaggtgcctttgtcggctttcttctgtcacgcaaagagccaatgtgggcggaactgttagctcttgcagccgccgcggaagggcgtgttcaccgcgcgacctctcctgtcgaggccctcgctgacctcaaagaagcacgtggtttcttggcgaaagatttagccgtgcttgcattacgcgaaggcgttgcgctcgatccgacggacgacccgcttttggtggcttatttgctcgatcctgcgaataccaacccggaaggtgtagcccgtcgttacggcggcgagtttactgaagatgcggcagaacgcgcgttgcttagcgaacgcctcttccagacgttatttccacgtctttcggagaaattactctggctctatcaggaagtcgaacgtccattgagtcgcgtgcttgcccatatggaggctcgcggtgtgcgcttagatgttccgttgttagaagcactcagcttcgagttggagaaagaactggaacgtcttgaaggcgaagtctttcgtttagcggggcatcccttcaatctcaactctcgcgaccaattggagaaagtgctctttgatgaattaggtttaacccctatcggacgtacagagaagaccggcaaacgttccacttcggcagccgccttggaagcacttcgtggtgctcacccgatcgtcgaattgattttgcagtaccgcgagctcagcaaactcaaatcaacctatcttgatccgttacctcgtcttgttcatccacgtacgggtcgtttacacacccgctggaatcaaacggcgacagccaccgggcgcttgtcgtcgagtgacccgaacctccagaatattccagtgcgcacgccgttaggccaacgcattcgtaaagcgtttgttgcggaagaaggttggttattacttgcggccgattactcccagatcgaacttcgtgtattggcgcatctctctggcgacgagaatcttaaacgcgtgtttcgcgaaggcaaggatattcacactgaaaccgcagcctggatgttcgggcttgacccagccttagtggaccccaagatgcgtcgtgccgccaagaccgtcaactttggcgtactctatggtatgtcagcacatcgtcttagtcaggaattgggcattgactacaaagaagctgaagcgtttatcgagcgctatttccaatcctttccgaaagttcgcgcgtggattgaacgtaccctcgaagaaggtcgcactcgcggctatgtggaaacgttattcgggcgtcgtcgctacgttccagatcttgcatctcgtgtccgctcagtgcgcgaagctgctgagcgtatggccttcaatatgcctgttcagggaacagcggcggacctcatgaagatcgccatggtgaaattgtttccgcgcttgaaacccttaggagcccaccttcttttacaggtgcatgatgaattggtcttggaagtacccgaggatcgcgcagaagaagccaaagcactcgtgaaagaggttatggaaaacgcgtatccgttagatgttccgttggaggtcgaagtgggtgtaggccgtgattggcttgaagcgaaacaagactaatga

SEQ ID NO: 248 - protein, 844 aa, synthetic construct
  REGION 1..844: note = DNA Polymerase Variant
MHHHHHHGGSGMLPLFDLEEPPKRVLLVDGHHLAYRTFYALSLTTSRGEPVQMVYGFARSLLKALKEDGQAVVVVFDAKAPSFRHEAYEAYKAGRAPTPEDFPRQLALVKRLVDLLGLVRLEAPGYEADDVLGTLAKKAEREGMEVCILTGDRDFFQLLSEKVSVLLPDGTLVTPKDVQEKYGVPPERWVDFRALTGDRSDNIPGVAGIGEKTALRLLAEWGSVENLLKNLDRVKPDSLRRKIEAHLEDLRLSLDLARIRTDLPLEVDFKALRRRTPDLEGLRAFLEELEFGSLLHEFGLLGGEKPREEAPWPPPEGAFVGFLLSRKEPMWAELLALAAAAEGRVHRATSPVEALADLKEARGFLAKDLAVLALREGVALDPTDDPLLVAYLLDPANTNPEGVARRYGGEFTEDAAERALLSERLFQTLFPRLSEKLLWLYQEVERPLSRVLAHMEARGVRLDVPLLEALSFELEKELERLEGEVFRLAGHPFNLNSRDQLEKVLFDELGLTPIGRTEKTGKRSTSAAALEALRGAHPIVELILQYRELSKLKSTYLDPLPRLVHPRTGRLHTRWNQTATATGRLSSSDPNLQNIPVRTPLGQRIRKAFVAEEGWLLLAADYSQIELRVLAHLSGDENLKRVFREGKDIHTETAAWMFGLDPALVDPKMRRAAKTVNFGVLYGMSAHRLSQELGIDYKEAEAFIERYFQSFPKVRAWIERTLEEGRTRGYVETLFGRRRYVPDLASRVRSVREAAERMAFNMPVQGTAADLMKIAMVKLFPRLKPLGAHLLLQVHDELVLEVPEDRAEEAKALVKEVMENAYPLDVPLEVEVGVGRDWLEAKQD

SEQ ID NO: 249 - DNA, 2538 bp, synthetic construct
  misc_feature 1..2538: note = DNA Polymerase Variant
  source 1..2538: mol_type = other DNA
atgcaccatcatcatcatcatggcggtagcggcatgttaccgctgtttgatttggaagaaccaccaaaacgcgtgctgcttgttgacggccatcatctggcgtatcgtaccttctacgcactgagccttacgacctcacgtggtgagcctgtccagatggtgtatgggtttgctcgctccctgctgaaagccctgaaggaagatggtcaagccgtagtagtggttttcgatgcgaaagcaccgtcgtttcgtcacgaagcgtacgaggcctataaagctggccgcgcaccgaccccggaagactttccgcgtcagttagcgctcgtcaaacgcctcgtggatttgctgggattagttcgcttggaagctcctggctacgaggcggacgacgtgctcggtacactggccaagaaagcagaacgtgaaggcatggaggtctgcattcttaccggtgatcgcgatttcttccagctgctgtctgagaaagtgagcgttttgctgcccgatggcacgttagtaaccccgaaagatgtccaagagaaatatggagttccgccagaacgttgggtggactttcgcgcactgactggtgatcgttcagacaacatcccgggcgttgccgggattggtgaaaagacggcgctgcgcctgctggcagaatggggctcggtggaaaatctgctcaagaaccttgatcgtgtgaaacctgatagcttacgccgcaagatcgaagcccacctggaagacttgcgtctgagtctggatcttgtgcgtattcgcaccgatctgccgttggaagtagactttaaagctctgcgtcgtcgcacacccgatttagaggggttacgcgcgttcctcgaagaactggagtttggctccctgctgcatgaattcggtttgttgggcggagagaaaccgcgtgaagaagcaccatggccgccgcccgaaggtgcctttgtcggctttcttctgtcacgcaaagagccaatgtgggcggaactgttagctcttgcagccgccgcggaagggcgtgttcaccgcgcgacctctcctgtcgaggccctcgctgacctcaaagaagcacgtggtttcttggcgaaagatttagccgtgcttgcattacgcgaaggcgttgcgctcgatccgacggacgacccgcttttggtggcttatttgctcgatcctgcgaataccaacccggaaggtgtagcccgtcgttacggcggcgagtttactgaagatgcggcagaacgcgcgttgcttagcgaacgcctcttccagacgttatttccacgtctttcggagaaattactctggctctatcaggaagtcgaacgtccattgagtcgcgtgcttgcccatatggaggctcgcggtgtgcgcttagatgttccgttgttagaagcactcagcttcgagttggagaaagaactggaacgtcttgaaggcgaagtctttcgtttagcggggcatcccttcaatctcaactctcgcgaccaattggagaaagtgctctttgatgaattaggtttaacccctatcggacgtacagagaagaccggcaaacgttccacttcggcagccgccttggaagcacttcgtggtgctcacccgatcgtcgaattgattttgcagtaccgcgagctcagcaaactcaaatcaacctatcttgatccgttacctcgtcttgttcatccacgtacgggtcgtttacacacccgcttcaatcaaacggcgacagccaccgggcgcttgtcgtcgagtgacccgaacctccagaatattccagtgcgcacgccgttaggccaacgcattcgtaaagcgtttgttgcggaagaaggttggttattacttgcggccgattactcccagatcgaacttcgtgtattggcgcatctctctggcgacgagaatcttaaacgcgtgtttcgcgaaggcaaggatattcacactgaaaccgcagcctggatgttcgggcttgacccagccttagtggaccccaagatgcgtcgtgccgccaagaccgtcaactttggcgtactctatggtatgtcagcacatcgtcttagtcaggaattgggcattgactacaaagaagctgaagcgtttatcgagcgctatttccaatcctttccgaaagttcgcgcgtggattgaacgtaccctcgaagaaggtcgcactcgcggctatgtggaaacgttattcgggcgtcgtcgctacgttccagatcttgcatctcgtgtccgctcagtgcgcgaagctgctgagcgtggggccttcaatatgcctgttcagggaacagcggcggacctcatgaagatcgccatggtgaaattgtttccgcgcttgaaacccttaggagcccaccttcttttacaggtgcatgatgaattggtcttggaagtacccgaggatcgcgcagaagaagccaaagcactcgtgaaagaggttatggaaaacgcgtatccgttagatgttccgttggaggtcgaagtgggtgtaggccgtgattggcttgaagcgaaacaagactaatga

SEQ ID NO: 250 - protein, 844 aa, synthetic construct
  REGION 1..844: note = DNA Polymerase Variant
MHHHHHHGGSGMLPLFDLEEPPKRVLLVDGHHLAYRTFYALSLTTSRGEPVQMVYGFARSLLKALKEDGQAVVVVFDAKAPSFRHEAYEAYKAGRAPTPEDFPRQLALVKRLVDLLGLVRLEAPGYEADDVLGTLAKKAEREGMEVCILTGDRDFFQLLSEKVSVLLPDGTLVTPKDVQEKYGVPPERWVDFRALTGDRSDNIPGVAGIGEKTALRLLAEWGSVENLLKNLDRVKPDSLRRKIEAHLEDLRLSLDLVRIRTDLPLEVDFKALRRRTPDLEGLRAFLEELEFGSLLHEFGLLGGEKPREEAPWPPPEGAFVGFLLSRKEPMWAELLALAAAAEGRVHRATSPVEALADLKEARGFLAKDLAVLALREGVALDPTDDPLLVAYLLDPANTNPEGVARRYGGEFTEDAAERALLSERLFQTLFPRLSEKLLWLYQEVERPLSRVLAHMEARGVRLDVPLLEALSFELEKELERLEGEVFRLAGHPFNLNSRDQLEKVLFDELGLTPIGRTEKTGKRSTSAAALEALRGAHPIVELILQYRELSKLKSTYLDPLPRLVHPRTGRLHTRFNQTATATGRLSSSDPNLQNIPVRTPLGQRIRKAFVAEEGWLLLAADYSQIELRVLAHLSGDENLKRVFREGKDIHTETAAWMFGLDPALVDPKMRRAAKTVNFGVLYGMSAHRLSQELGIDYKEAEAFIERYFQSFPKVRAWIERTLEEGRTRGYVETLFGRRRYVPDLASRVRSVREAAERGAFNMPVQGTAADLMKIAMVKLFPRLKPLGAHLLLQVHDELVLEVPEDRAEEAKALVKEVMENAYPLDVPLEVEVGVGRDWLEAKQD

SEQ ID NO: 251 - DNA, 2538 bp, synthetic construct
  misc_feature 1..2538: note = DNA Polymerase Variant
  source 1..2538: mol_type = other DNA
atgcaccatcatcatcatcatggcggtagcggcatgttaccgctgtttgatttggaagaaccaccaaaacgcgtgctgcttgttgacggccatcatctggcgtatcgtaccttctacgcactgagccttacgacctcacgtggtgagcctgtccagatggtgtatgggtttgctcgctccctgctgaaagccctgaaggaagatggtcaagccgtagtagtggttttcgatgcgaaagcaccgtcgtttcgtcacgaagcgtacgaggcctataaagctggccgcgcaccgaccccggaagactttccgcgtcagttagcgctcgtcaaacgcctcgtggatttgctgggattagttcgcttggaagctcctggctacgaggcggacgacgtgctcggtacactggccaagaaagcagaacgtgaaggcatggaggtctgcattcttaccggtgatcgcgatttcttccagctgctgtctgagaaagtgagcgttttgctgcccgatggcacgttagtaaccccgaaagatgtccaagagaaatatggagttccgccagaacgttgggtggactttcgcgcactgactggtgatcgttcagacaacatcccgggcgttgccgggattggtgaaaagacggcgctgcgcctgctggcagaatggggctcggtggaaaatctgctcaagaaccttgatcgtgtgaaacctgatagcttacgccgcaagatcgaagcccacctggaagacttgcgtctgagtctggatcttgcgcgtattcgcaccgatctgccgttggaagtagactttaaagctctgcgtcgtcgcacacccgatttagaggggttacgcgcgttcctcgaagaactggagtttggctccctgctgcatgaattcggtttgttgggcggagagaaaccgcgtgaagaagcaccatggccgccgcccgaaggtgcctttgtcggctttcttctgtcacgcaaagagccaatgtgggcggaactgttagctcttgcagccgccgcggaagggcgtgttcaccgcgcgacctctcctgtcgaggccctcgctgacctcaaagaagcacgtggtttcttggcgaaagatttagccgtgcttgcattacgcgaaggcgttgcgctcgatccgacggacgacccgcttttggtggcttatttgctcgatcctgcgaataccaacccggaaggtgtagcccgtcgttacggcggcgagtttactgaagatgcggcagaacgcgcgttgcttagcgaacgcctcttccagacgttatttccacgtctttcggagaaattactctggctctatcaggaagtcgaacgtccattgagtcgcgtgcttgcccatatggaggctcgcggtgtgcgcttagatgttccgttgttagaagcactcagcttcgagttggagaaagaactggaacgtcttgaaggcgaagtctttcgtttagcggggcatcccttcaatctcaactctcgcgaccaattggagaaagtgctctttgatgaattaggtttaacccctatcggacgtacagagaagaccggcaaacgttccacttcggcagccgccttggaagcacttcgtggtgctcacccgatcgtcgaattgattttgcagtaccgcgagctcagcaaactcaaatcaacctatcttcttccgttacctcgtcttgttcatccacgtacgggtcgtttacacacccgcttcaatcaaacggcgacagccaccgggcgcttgtcgtcgagtgacccgaacctccagaatattccagtgcgcacgccgttaggccaacgcattcgtaaagcgtttgttgcggaagaaggttggttattacttgcggccgattactcccagatcgaacttcgtgtattggcgcatctctctggcgacgagaatcttaaacgcgtgtttcgcgaaggcaaggatattcacactgaaaccgcagcctggatgttcgggcttgacccagccttagtggaccccaagatgcgtcgtgccgccaagaccgtcaactttggcgtactctatggtatgtcagcacatcgtcttagtcaggaattgggcattgactacaaagaagctgaagcgtttatcgagcgctatttccaatcctttccgaaagttcgcgcgtggattgaacgtaccctcgaagaaggtcgcactcgcggctatgtggaaacgttattcgggcgtcgtcgctacgttccagatcttgcatctcgtgtccgctcagtgcgcgaagctgctgagcgtatggccttcaatatgcctgttcagggaacagcggcggacctcatgaagatcgccatggtgaaattgtttccgcgcttgaaacccttaggagcccaccttcttttacaggtgcatgatgaattggtcttggaagtacccgaggatcgcgcagaagaagccaaagcactcgtgaaagaggttatggaaaacgcgtatccgttagatgttccgttggaggtcgaagtgggtgtaggccgtgattggcttgaagcgaaacaagactaatga

SEQ ID NO: 252 - protein, 844 aa, synthetic construct
  REGION 1..844: note = DNA Polymerase Variant
MHHHHHHGGSGMLPLFDLEEPPKRVLLVDGHHLAYRTFYALSLTTSRGEPVQMVYGFARSLLKALKEDGQAVVVVFDAKAPSFRHEAYEAYKAGRAPTPEDFPRQLALVKRLVDLLGLVRLEAPGYEADDVLGTLAKKAEREGMEVCILTGDRDFFQLLSEKVSVLLPDGTLVTPKDVQEKYGVPPERWVDFRALTGDRSDNIPGVAGIGEKTALRLLAEWGSVENLLKNLDRVKPDSLRRKIEAHLEDLRLSLDLARIRTDLPLEVDFKALRRRTPDLEGLRAFLEELEFGSLLHEFGLLGGEKPREEAPWPPPEGAFVGFLLSRKEPMWAELLALAAAAEGRVHRATSPVEALADLKEARGFLAKDLAVLALREGVALDPTDDPLLVAYLLDPANTNPEGVARRYGGEFTEDAAERALLSERLFQTLFPRLSEKLLWLYQEVERPLSRVLAHMEARGVRLDVPLLEALSFELEKELERLEGEVFRLAGHPFNLNSRDQLEKVLFDELGLTPIGRTEKTGKRSTSAAALEALRGAHPIVELILQYRELSKLKSTYLLPLPRLVHPRTGRLHTRFNQTATATGRLSSSDPNLQNIPVRTPLGQRIRKAFVAEEGWLLLAADYSQIELRVLAHLSGDENLKRVFREGKDIHTETAAWMFGLDPALVDPKMRRAAKTVNFGVLYGMSAHRLSQELGIDYKEAEAFIERYFQSFPKVRAWIERTLEEGRTRGYVETLFGRRRYVPDLASRVRSVREAAERMAFNMPVQGTAADLMKIAMVKLFPRLKPLGAHLLLQVHDELVLEVPEDRAEEAKALVKEVMENAYPLDVPLEVEVGVGRDWLEAKQD

SEQ ID NO: 253 - DNA, 2538 bp, synthetic construct
  misc_feature 1..2538: note = DNA Polymerase Variant
  source 1..2538: mol_type = other DNA
atgcaccatcatcatcatcatggcggtagcggcatgttaccgctgtttgatttggaagaaccaccaaaacgcgtgctgcttgttgacggccatcatctggcgtatcgtaccttctacgcactgagccttacgacctcacgtggtgagcctgtccagatggtgtatgggtttgctcgctccctgctgaaagccctgaaggaagatggtcaagccgtagtagtggttttcgatgcgaaagcaccgtcgtttcgtcacgaagcgtacgaggcctataaagctggccgcgcaccgaccccggaagactttccgcgtcagttagcgctcgtcaaacgcctcgtggatttgctgggattagttcgcttggaagctcctggctacgaggcggacgacgtgctcggtacactggccaagaaagcagaacgtgaaggcatggaggtctgcattcttaccggtgatcgcgatttcttccagctgctgtctgagaaagtgagcgttttgctgcccgatggcacgttagtaaccccgaaagatgtccaagagaaatatggagttccgccagaacgttgggtggactttcgcgcactgactggtgatcgttcagacaacatcccgggcgttgccgggattggtgaaaagacggcgctgcgcctgctggcagaatggggctcggtggaaaatctgctcaagaaccttgatcgtgtgaaacctgatagcttacgccgcaagatcgaagcccacctggaagacttgcgtctgagtctggatcttgcgcgtattcgcaccgatctgccgttggaagtagactttaaagctctgcgtcgtcgcacacccgatttagaggggttacgcgcgttcctcgaagaactggagtttggctccctgctgcatgaattcggtttgttgggcggagagaaaccgcgtgaagaagcaccatggccgccgcccgaaggtgcctttgtcggctttcttctgtcacgcaaagagccaatgtgggcggaactgttagctcttgcagccgccgcggaagggcgtgttcaccgcgcgacctctcctgtcgaggccctcgctgacctcaaagaagcacgtggtttcttggcgaaagatttagccgtgcttgcattacgcgaaggcgttgcgctcgatccgacggacgacccgcttttggtggcttatttgctcgatcctgcgaataccaacccggaatatgtagcccgtcgttacggcggcgagtttactgaagatgcggcagaacgcgcgttgcttagcgaacgcctcttccagacgttatttccacgtctttcggagaaattactctggctctatcaggaagtcgaacgtccattgagtcgcgtgcttgcccatatggaggctcgcggtgtgcgcttagatgttccgttgttagaagcactcagcttcgagttggagaaagaactggaacgtcttgaaggcgaagtctttcgtttagcggggcatcccttcaatctcaactctcgcgaccaattggagaaagtgctctttgatgaattaggtttaacccctatcggacgtacagagaagaccggcaaacgttccacttcggcagccgccttggaagcacttcgtggtgctcacccgatcgtcgaattgattttgcagtaccgcgagctcagcaaactcaaatcaacctatcttgatccgttacctcgtcttgttcatccacgtacgggtcgtttacacacccgcttcaatcaaacggcgacagccaccgggcgcttgtcgtcgagtgacccgaacctccagaatattccagtgcgcacgccgttaggccaacgcattcgtaaagcgtttgttgcggaagaaggttggttattacttgcggccgattactcccagatcgaacttcgtgtattggcgcatctctctggcgacgagaatcttaaacgcgtgtttcgcgaaggcaaggatattcacactgaaaccgcagcctggatgttcgggcttgacccagccttagtggaccccaagatgcgtcgtgccgccaagaccgtcaactttggcgtactctatggtatgtcagcacatcgtcttagtcaggaattgggcattgactacaaagaagctgaagcgtttatcgagcgctatttccaatcctttccgaaagttcgcgcgtggattgaacgtaccctcgaagaaggtcgcactcgcggctatgtggaaacgttattcgggcgtcgtcgctacgttccagatcttgcatctcgtgtccgctcagtgcgcgaagctgctgagcgtatggccttcaatatgcctgttcagggaacagcggcggacctcatgaagatcgccatggtgaaattgtttccgcgcttgaaacccttaggagcccaccttcttttacaggtgcatgatgaattggtcttggaagtacccgaggatcgcgcagaagaagccaaagcactcgtgaaagaggttatggaaaacgcgtatccgttagatgttccgttggaggtcgaagtgggtgtaggccgtgattggcttgaagcgaaacaagactaatga

SEQ ID NO: 254 - protein, 844 aa, synthetic construct
  REGION 1..844: note = DNA Polymerase Variant
MHHHHHHGGSGMLPLFDLEEPPKRVLLVDGHHLAYRTFYALSLTTSRGEPVQMVYGFARSLLKALKEDGQAVVVVFDAKAPSFRHEAYEAYKAGRAPTPEDFPRQLALVKRLVDLLGLVRLEAPGYEADDVLGTLAKKAEREGMEVCILTGDRDFFQLLSEKVSVLLPDGTLVTPKDVQEKYGVPPERWVDFRALTGDRSDNIPGVAGIGEKTALRLLAEWGSVENLLKNLDRVKPDSLRRKIEAHLEDLRLSLDLARIRTDLPLEVDFKALRRRTPDLEGLRAFLEELEFGSLLHEFGLLGGEKPREEAPWPPPEGAFVGFLLSRKEPMWAELLALAAAAEGRVHRATSPVEALADLKEARGFLAKDLAVLALREGVALDPTDDPLLVAYLLDPANTNPEYVARRYGGEFTEDAAERALLSERLFQTLFPRLSEKLLWLYQEVERPLSRVLAHMEARGVRLDVPLLEALSFELEKELERLEGEVFRLAGHPFNLNSRDQLEKVLFDELGLTPIGRTEKTGKRSTSAAALEALRGAHPIVELILQYRELSKLKSTYLDPLPRLVHPRTGRLHTRFNQTATATGRLSSSDPNLQNIPVRTPLGQRIRKAFVAEEGWLLLAADYSQIELRVLAHLSGDENLKRVFREGKDIHTETAAWMFGLDPALVDPKMRRAAKTVNFGVLYGMSAHRLSQELGIDYKEAEAFIERYFQSFPKVRAWIERTLEEGRTRGYVETLFGRRRYVPDLASRVRSVREAAERMAFNMPVQGTAADLMKIAMVKLFPRLKPLGAHLLLQVHDELVLEVPEDRAEEAKALVKEVMENAYPLDVPLEVEVGVGRDWLEAKQD

SEQ ID NO: 255 - DNA, 2538 bp, synthetic construct
  misc_feature 1..2538: note = DNA Polymerase Variant
  source 1..2538: mol_type = other DNA
atgcaccatcatcatcatcatggcggtagcggcatgttaccgctgtttgatttggaagaaccaccaaaacgcgtgctgcttgttgacggccatcatctggcgtatcgtaccttctacgcactgagccttacgacctcacgtggtgagcctgtccagatggtgtatgggtttgctcgctccctgctgaaagccctgaaggaagatggtcaagccgtagtagtggttttcgatgcgaaagcaccgtcgtttcgtcacgaagcgtacgaggcctataaagctggccgcgcaccgaccccggaagactttccgcgtcagttagcgctcgtcaaacgcctcgtggatttgctgggattagttcgcttggaagctcctggctacgaggcggacgacgtgctcggtacactggccaagaaagcagaacgtgaaggcatggaggtctgcattcttaccggtgatcgcgatttcttccagctgctgtctgagaaagtgagcgttttgctgcccgatggcacgttagtaaccccgaaagatgtccaagagaaatatggagttccgccagaacgttgggtggactttcgcgcactgactggtgatcgttcagacaacatcccgggcgttgccgggattggtgaaaagacggcgctgcgcctgctggcagaatggggctcggtggaaaatctgctcaagaaccttgatcgtgtgaaacctgatagcttacgccgcaagatcgaagcccacctggaagacttgcgtctgagtctggatcttgcgcgtattcgcaccgatctgccgttggaagtagactttaaagctctgcgtcgtcgcacacccgatttagaggggttacgcgcgttcctcgaagaactggagtttggctccctgctgcatgaattcggtttgttgggcggagagaaaccgcgtgaagaagcaccatggccgccgcccgaaggtgcctttgtcggctttcttctgtcacgcaaagagccaatgtgggcggaactgttagctcttgcagccgccgcggaagggcgtgttcaccgcgcgacctctcctgtcgaggccctcgctgacctcaaagaagcacgtggtttcttggcgaaagatttagccgtgcttgcattacgcgaaggcgttgcgctcgatccgacggacgacccgcttttggtggcttatttgctcgatcctgcgaataccaacccggaaggtgtagcccgtcgttacggcggcgagtttactgaagatgcggcagaacgcgcgttgcttagcgaacgcctcttccagacgttatttccacgtctttcggagaaattactctggctctatcaggaagtcgaacgtccattgagtcgcgtgcttgcccatatggaggctcgcggtgtgcgcttagatgttccgttgttagaagcactcagcttcgagttggagaaagaactggaacgtcttgaaggcgaagtctttcgtttagcggggcatcccttcaatctcaactctcgcgaccaattggagaaagtgctctttgatgaattaggtttaacccctatcggacgtacagagaagaccggcaaacgttccacttcggcagccgccttggaagcacttcgtggtgctcacccgatcgtcgaattgattttgcagtaccgcgagctcagcaaactcaaatcaacctatcttacgccgttacctcgtcttgttcatccacgtacgggtcgtttacacacccgcttcaatcaaacggcgacagccaccgggcgcttgtcgtcgagtgacccgaacctccagaatattccagtgcgcacgccgttaggccaacgcattcgtaaagcgtttgttgcggaagaaggttggttattacttgcggccgattactcccagatcgaacttcgtgtattggcgcatctctctggcgacgagaatcttaaacgcgtgtttcgcgaaggcaaggatattcacactgaaaccgcagcctggatgttcgggcttgacccagccttagtggaccccaagatgcgtcgtgccgccaagaccgtcaactttggcgtactctatggtatgtcagcacatcgtcttagtcaggaattgggcattgactacaaagaagctgaagcgtttatcgagcgctatttccaatcctttccgaaagttcgcgcgtggattgaacgtaccctcgaagaaggtcgcactcgcggctatgtggaaacgttattcgggcgtcgtcgctacgttccagatcttgcatctcgtgtccgctcagtgcgcgaagctgctgagcgtatggccttcaatatgcctgttcagggaacagcggcggacctcatgaagatcgccatggtgaaattgtttccgcgcttgaaacccttaggagcccaccttcttttacaggtgcatgatgaattggtcttggaagtacccgaggatcgcgcagaagaagccaaagcactcgtgaaagaggttatggaaaacgcgtatccgttagatgttccgttggaggtcgaagtgggtgtaggccgtgattggcttgaagcgaaacaagactaatga

SEQ ID NO: 256 - protein, 844 aa, synthetic construct
  REGION 1..844: note = DNA Polymerase Variant
MHHHHHHGGSGMLPLFDLEEPPKRVLLVDGHHLAYRTFYALSLTTSRGEPVQMVYGFARSLLKALKEDGQAVVVVFDAKAPSFRHEAYEAYKAGRAPTPEDFPRQLALVKRLVDLLGLVRLEAPGYEADDVLGTLAKKAEREGMEVCILTGDRDFFQLLSEKVSVLLPDGTLVTPKDVQEKYGVPPERWVDFRALTGDRSDNIPGVAGIGEKTALRLLAEWGSVENLLKNLDRVKPDSLRRKIEAHLEDLRLSLDLARIRTDLPLEVDFKALRRRTPDLEGLRAFLEELEFGSLLHEFGLLGGEKPREEAPWPPPEGAFVGFLLSRKEPMWAELLALAAAAEGRVHRATSPVEALADLKEARGFLAKDLAVLALREGVALDPTDDPLLVAYLLDPANTNPEGVARRYGGEFTEDAAERALLSERLFQTLFPRLSEKLLWLYQEVERPLSRVLAHMEARGVRLDVPLLEALSFELEKELERLEGEVFRLAGHPFNLNSRDQLEKVLFDELGLTPIGRTEKTGKRSTSAAALEALRGAHPIVELILQYRELSKLKSTYLTPLPRLVHPRTGRLHTRFNQTATATGRLSSSDPNLQNIPVRTPLGQRIRKAFVAEEGWLLLAADYSQIELRVLAHLSGDENLKRVFREGKDIHTETAAWMFGLDPALVDPKMRRAAKTVNFGVLYGMSAHRLSQELGIDYKEAEAFIERYFQSFPKVRAWIERTLEEGRTRGYVETLFGRRRYVPDLASRVRSVREAAERMAFNMPVQGTAADLMKIAMVKLFPRLKPLGAHLLLQVHDELVLEVPEDRAEEAKALVKEVMENAYPLDVPLEVEVGVGRDWLEAKQD

SEQ ID NO: 257 - DNA, 2538 bp, synthetic construct
  misc_feature 1..2538: note = DNA Polymerase Variant
  source 1..2538: mol_type = other DNA
atgcaccatcatcatcatcatggcggtagcggcatgttaccgctgtttgatttggaagaaccaccaaaacgcgtgctgcttgttgacggccatcatctggcgtatcgtaccttctacgcactgagccttacgacctcacgtggtgagcctgtccagatggtgtatgggtttgctcgctccctgctgaaagccctgaaggaagatggtcaagccgtagtagtggttttcgatgcgaaagcaccgtcgtttcgtcacgaagcgtacgaggcctataaagctggccgcgcaccgaccccggaagactttccgcgtcagttagcgctcgtcaaacgcctcgtggatttgctgggattagttcgcttggaagctcctggctacgaggcggacgacgtgctcggtacactggccaagaaagcagaacgtgaaggcatggaggtctgcattcttaccggtgatcgcgatttcttccagctgctgtctgagaaagtgagcgttttgctgcccgatggcacgttagtaaccccgaaagatgtccaagagaaatatggagttccgccagaacgttgggtggactttcgcgcactgactggtgatcgttcagacaacatcccgggcgttgccgggattggtgaaaagacggcgctgcgcctgctggcagaatggggctcggtggaaaatctgctcaagaaccttgatcgtgtgaaacctgatagcttacgccgcaagatcgaagcccacctggaagacttgcgtctgagtctggatcttgcgcgtattcgcaccgatctgccgttggaagtagactttaaagctctgcgtcgtcgcacacccgatttagaggggttacgcgcgttcctcgaagaactggagtttggctccctgctgcatgaattcggtttgttgggcggagagaaaccgcgtgaagaagcaccatggccgccgcccgaaggtgcctttgtcggctttcttctgtcacgcaaagagccaatgtgggcggaactgttagctcttgcagccgccgcggaagggcgtgttcaccgcgcgacctctcctgtcgaggccctcgctgacctcaaagaagcacgtggtttcttggcgaaagatttagccgtgcttgcattacgcgaaggcgttgcgctcgatccgacggacgacccgcttttggtggcttatttgctcgatcctgcgaataccaacccggaaggtgtagcccgtcgttacggcggcgagtttactgaagatgcggcagaacgcgcgttgcttagcgaacgcctcttccagacgttatttccacgtctttcggagaaattactctggctctatcaggaagtcgaacgtccattgagtcgcgtgcttgcccatatggaggctcgcggtgtgcgcttagatgttccgttgttagaagcactcagcttcgagttggagaaagaactggaacgtcttgaaggcgaagtctttcgtttagcggggcatcccttcaatctcaactctcgcgaccaattggagaaagtgctctttgatgaattaggtttaacccctatcggacgtacagagaagaccggcaaacgttccacttcggcagccgccttggaagcacttcgtggtgctcacccgatcgtcgaattgattttgcagtaccgcgagctcagcaaactcaaatcaacctatcttgatccgttacctcgtcttgttcatccacgtacgggtcgtttacacacccgcttcaatcaaacggcgacagccaccgggcgcttgtcgtcgagtgacccgaacctccagaatattccagtgcgcacgccgacgggccaacgcattcgtaaagcgtttgttgcggaagaaggttggttattacttgcggccgattactcccagatcgaacttcgtgtattggcgcatctctctggcgacgagaatcttaaacgcgtgtttcgcgaaggcaaggatattcacactgaaaccgcagcctggatgttcgggcttgacccagccttagtggaccccaagatgcgtcgtgccgccaagaccgtcaactttggcgtactctatggtatgtcagcacatcgtcttagtcaggaattgggcattgactacaaagaagctgaagcgtttatcgagcgctatttccaatcctttccgaaagttcgcgcgtggattgaacgtaccctcgaagaaggtcgcactcgcggctatgtggaaacgttattcgggcgtcgtcgctacgttccagatcttgcatctcgtgtccgctcagtgcgcgaagctgctgagcgtatggccttcaatatgcctgttcagggaacagcggcggacctcatgaagatcgccatggtgaaattgtttccgcgcttgaaacccttaggagcccaccttcttttacaggtgcatgatgaattggtcttggaagtacccgaggatcgcgcagaagaagccaaagcactcgtgaaagaggttatggaaaacgcgtatccgttagatgttccgttggaggtcgaagtgggtgtaggccgtgattggcttgaagcgaaacaagactaatga

SEQ ID NO: 258 - protein, 844 aa, synthetic construct
  REGION 1..844: note = DNA Polymerase Variant
MHHHHHHGGSGMLPLFDLEEPPKRVLLVDGHHLAYRTFYALSLTTSRGEPVQMVYGFARSLLKALKEDGQAVVVVFDAKAPSFRHEAYEAYKAGRAPTPEDFPRQLALVKRLVDLLGLVRLEAPGYEADDVLGTLAKKAEREGMEVCILTGDRDFFQLLSEKVSVLLPDGTLVTPKDVQEKYGVPPERWVDFRALTGDRSDNIPGVAGIGEKTALRLLAEWGSVENLLKNLDRVKPDSLRRKIEAHLEDLRLSLDLARIRTDLPLEVDFKALRRRTPDLEGLRAFLEELEFGSLLHEFGLLGGEKPREEAPWPPPEGAFVGFLLSRKEPMWAELLALAAAAEGRVHRATSPVEALADLKEARGFLAKDLAVLALREGVALDPTDDPLLVAYLLDPANTNPEGVARRYGGEFTEDAAERALLSERLFQTLFPRLSEKLLWLYQEVERPLSRVLAHMEARGVRLDVPLLEALSFELEKELERLEGEVFRLAGHPFNLNSRDQLEKVLFDELGLTPIGRTEKTGKRSTSAAALEALRGAHPIVELILQYRELSKLKSTYLDPLPRLVHPRTGRLHTRFNQTATATGRLSSSDPNLQNIPVRTPTGQRIRKAFVAEEGWLLLAADYSQIELRVLAHLSGDENLKRVFREGKDIHTETAAWMFGLDPALVDPKMRRAAKTVNFGVLYGMSAHRLSQELGIDYKEAEAFIERYFQSFPKVRAWIERTLEEGRTRGYVETLFGRRRYVPDLASRVRSVREAAERMAFNMPVQGTAADLMKIAMVKLFPRLKPLGAHLLLQVHDELVLEVPEDRAEEAKALVKEVMENAYPLDVPLEVEVGVGRDWLEAKQD

SEQ ID NO: 259 - DNA, 2538 bp, synthetic construct
  misc_feature 1..2538: note = DNA Polymerase Variant
  source 1..2538: mol_type = other DNA
atgcaccatcatcatcatcatggcggtagcggcatgttaccgctgtttgatttggaagaaccaccaaaacgcgtgctgcttgttgacggccatcatctggcgtatcgtaccttctacgcactgagccttacgacctcacgtggtgagcctgtccagatggtgtatgggtttgctcgctccctgctgaaagccctgaaggaagatggtcaagccgtagtagtggttttcgatgcgaaagcaccgtcgtttcgtcacgaagcgtacgaggcctataaagctggccgcgcaccgaccccggaagactttccgcgtcagttagcgctcgtcaaacgcctcgtggatttgctgggattagttcgcttggaagctcctggctacgaggcggacgacgtgctcggtacactggccaagaaagcagaacgtgaaggcatggaggtctgcattcttaccggtgatcgcgatttcttccagctgctgtctgagaaagtgagcgttttgctgcccgatggcacgttagtaaccccgaaagatgtccaagagaaatatggagttccgccagaacgttgggtggactttcgcgcactgactggtgatcgttcagacaacatcccgggcgttgccgggattggtgaaaagacggcgctgcgcctgctggcagaatggggctcggtggaaaatctgctcaagaaccttgatcgtgtgaaacctgatagcttacgccgcaagatcgaagcccacctggaagacttgcgtctgagtctggatcttgcgcgtattcgcaccgatctgccgttggaagtagactttaaagctctgcgtcgtcgcacacccgatttagaggggttacgcgcgttcctcgaagaactggagtttggctccctgctgcatgaattcggtttgttgggcggagagaaaccgcgtgaagaagcaccatggccgccgcccgaaggtgcctttgtcggctttcttctgtcacgcaaagagccaatgtgggcggaactgttagctcttgcagccgccgcggaagggcgtgttcaccgcgcgacctctcctgtcgaggccctcgctgacctcaaagaagcacgtggtttcttggcgaaagatttagccgtgcttgcattacgcgaaggcgttgcgctcgatccgacggacgacccgcttttggtggcttatttgctcgatcctgcgaatgggaacccggaaggtgtagcccgtcgttacggcggcgagtttactgaagatgcggcagaacgcgcgttgcttagcgaacgcctcttccagacgttatttccacgtctttcggagaaattactctggctctatcaggaagtcgaacgtccattgagtcgcgtgcttgcccatatggaggctcgcggtgtgcgcttagatgttccgttgttagaagcactcagcttcgagttggagaaagaactggaacgtcttgaaggcgaagtctttcgtttagcggggcatcccttcaatctcaactctcgcgaccaattggagaaagtgctctttgatgaattaggtttaacccctatcggacgtacagagaagaccggcaaacgttccacttcggcagccgccttggaagcacttcgtggtgctcacccgatcgtcgaattgattttgcagtaccgcgagctcagcaaactcaaatcaacctatcttgatccgttacctcgtcttgttcatccacgtacgggtcgtttacacacccgcttcaatcaaacggcgacagccaccgggcgcttgtcgtcgagtgacccgaacctccagaatattccagtgcgcacgccgttaggccaacgcattcgtaaagcgtttgttgcggaagaaggttggttattacttgcggccgattactcccagatcgaacttcgtgtattggcgcatctctctggcgacgagaatcttaaacgcgtgtttcgcgaaggcaaggatattcacactgaaaccgcagcctggatgttcgggcttgacccagccttagtggaccccaagatgcgtcgtgccgccaagaccgtcaactttggcgtactctatggtatgtcagcacatcgtcttagtcaggaattgggcattgactacaaagaagctgaagcgtttatcgagcgctatttccaatcctttccgaaagttcgcgcgtggattgaacgtaccctcgaagaaggtcgcactcgcggctatgtggaaacgttattcgggcgtcgtcgctacgttccagatcttgcatctcgtgtccgctcagtgcgcgaagctgctgagcgtatggccttcaatatgcctgttcagggaacagcggcggacctcatgaagatcgccatggtgaaattgtttccgcgcttgaaacccttaggagcccaccttcttttacaggtgcatgatgaattggtcttggaagtacccgaggatcgcgcagaagaagccaaagcactcgtgaaagaggttatggaaaacgcgtatccgttagatgttccgttggaggtcgaagtgggtgtaggccgtgattggcttgaagcgaaacaagactaatga

SEQ ID NO: 260 - protein, 844 aa, synthetic construct
  REGION 1..844: note = DNA Polymerase Variant
MHHHHHHGGSGMLPLFDLEEPPKRVLLVDGHHLAYRTFYALSLTTSRGEPVQMVYGFARSLLKALKEDGQAVVVVFDAKAPSFRHEAYEAYKAGRAPTPEDFPRQLALVKRLVDLLGLVRLEAPGYEADDVLGTLAKKAEREGMEVCILTGDRDFFQLLSEKVSVLLPDGTLVTPKDVQEKYGVPPERWVDFRALTGDRSDNIPGVAGIGEKTALRLLAEWGSVENLLKNLDRVKPDSLRRKIEAHLEDLRLSLDLARIRTDLPLEVDFKALRRRTPDLEGLRAFLEELEFGSLLHEFGLLGGEKPREEAPWPPPEGAFVGFLLSRKEPMWAELLALAAAAEGRVHRATSPVEALADLKEARGFLAKDLAVLALREGVALDPTDDPLLVAYLLDPANGNPEGVARRYGGEFTEDAAERALLSERLFQTLFPRLSEKLLWLYQEVERPLSRVLAHMEARGVRLDVPLLEALSFELEKELERLEGEVFRLAGHPFNLNSRDQLEKVLFDELGLTPIGRTEKTGKRSTSAAALEALRGAHPIVELILQYRELSKLKSTYLDPLPRLVHPRTGRLHTRFNQTATATGRLSSSDPNLQNIPVRTPLGQRIRKAFVAEEGWLLLAADYSQIELRVLAHLSGDENLKRVFREGKDIHTETAAWMFGLDPALVDPKMRRAAKTVNFGVLYGMSAHRLSQELGIDYKEAEAFIERYFQSFPKVRAWIERTLEEGRTRGYVETLFGRRRYVPDLASRVRSVREAAERMAFNMPVQGTAADLMKIAMVKLFPRLKPLGAHLLLQVHDELVLEVPEDRAEEAKALVKEVMENAYPLDVPLEVEVGVGRDWLEAKQD

SEQ ID NO: 261 - DNA, 2538 bp, synthetic construct
  misc_feature 1..2538: note = DNA Polymerase Variant
  source 1..2538: mol_type = other DNA
atgcaccatcatcatcatcatggcggtagcggcatgttaccgctgtttgatttggaagaaccaccaaaacgcgtgctgcttgttgacggccatcatctggcgtatcgtaccttctacgcactgagccttacgacctcacgtggtgagcctgtccagatggtgtatgggtttgctcgctccctgctgaaagccctgaaggaagatggtcaagccgtagtagtggttttcgatgcgaaagcaccgtcgtttcgtcacgaagcgtacgaggcctataaagctggccgcgcaccgaccccggaagactttccgcgtcagttagcgctcgtcaaacgcctcgtggatttgctgggattagttcgcttggaagctcctggctacgaggcggacgacgtgctcggtacactggccaagaaagcagaacgtgaaggcatggaggtctgcattcttaccggtgatcgcgatttcttccagctgctgtctgagaaagtgagcgttttgctgcccgatggcacgttagtaaccccgaaagatgtccaagagaaatatggagttccgccagaacgttgggtggactttcgcgcactgactggtgatcgttcagacaacatcccgggcgttgccgggattggtgaaaagacggcgctgcgcctgctggcagaatggggctcggtggaaaatctgctcaagaaccttgatcgtgtgaaacctgatagcttacgccgcaagatcgaagcccacctggaagacttgcgtctgagtctggatcttgcgcgtattcgcaccgatctgccgttggaagtagactttaaagctctgcgtcgtcgcacacccgatttagaggggttacgcgcgttcctcgaagaactggagtttggctccctgctgcatgaattcggtttgttgggcggagagaaaccgcgtgaagaagcaccatggccgccgcccgaaggtgcctttgtcggctttcttctgtcacgcaaagagccaatgtgggcggaactgttagctcttgcagccgccgcggaagggcgtgttcaccgcgcgacctctcctgtcgaggccctcgctgacctcaaagaagcacgtggtttcttggcgaaagatttagccgtgcttgcattacgcgaaggcgttgcgctcgatccgacggacgacccgcttttggtggcttatttgctcgatcctgcgaataccaacccggaaggtgtagcccgtcgttacggcggcgagtttactgaagatgcggcagaacgcgcgttgcttagcgaacgcctcttccagacgttatttccacgtctttcggagaaattactctggctctatcaggaagtcgaacgtccattgagtcgcgtgcttgcccatatggaggctcgcggtgtgcgcttagatgttccgttgttagaagcactcagcttcgagttggagaaagaactggaacgtcttgaaggcgaagtctttcgtttagcggggcatcccttcaatctcaactctcgcgaccaattggagaaagtgctctttgatgaattaggtttaacccctatcggacgtacagagaagaccggcaaacgttccacttcggcagccgccttggaagcacttcgtggtgctcacccgatcgtcgaattgattttgcagtaccgcgagctcagcaaactcaaatcaacctatcttgatccgttacctcgtcttgttcatccacgtacgggtcgtttacacacccgcttcaatcaaacggcgacagccaccgggcgcttgtcgtcgagtgacccgaacctccagaatattccagtgcgcacgccgttaggccaacgcattcgtaaagcgtttgttgcggaagaaggttggttattacttgcggccgattactcccagatcgaacttcgtgtattggcgcatctctctggcgacgagaatcttaaacgcgtgtttcgcgaaggcaaggatattcacactgaaaccgcagcctggatgttcgggcttgacccagccttagtggaccccaagatgcgtcgtgccgccaagaccgtcaactttggcgtactctatggtatgtcagcacatcgtcttagtcaggaattgggcattgactacaaagaagctgaagcgtttatcgagcgctatttccaatcctttccgaaagttcgcgcgtggattgaacgtaccctcgaagaaggtcgcactcgcggctatgtggaaacgttattcgggcgtcgtcgctacgttccagatcttgcatctcgtgtccgctcagtgcgcgaagctgctgagcgtatggccttcaatgcgcctgttcagggaacagcggcggacctcatgaagatcgccatggtgaaattgtttccgcgcttgaaacccttaggagcccaccttcttttacaggtgcatgatgaattggtcttggaagtacccgaggatcgcgcagaagaagccaaagcactcgtgaaagaggttatggaaaacgcgtatccgttagatgttccgttggaggtcgaagtgggtgtaggccgtgattggcttgaagcgaaacaagactaatga

SEQ ID NO: 262 - protein, 844 aa, synthetic construct
  REGION 1..844: note = DNA Polymerase Variant
MHHHHHHGGSGMLPLFDLEEPPKRVLLVDGHHLAYRTFYALSLTTSRGEPVQMVYGFARSLLKALKEDGQAVVVVFDAKAPSFRHEAYEAYKAGRAPTPEDFPRQLALVKRLVDLLGLVRLEAPGYEADDVLGTLAKKAEREGMEVCILTGDRDFFQLLSEKVSVLLPDGTLVTPKDVQEKYGVPPERWVDFRALTGDRSDNIPGVAGIGEKTALRLLAEWGSVENLLKNLDRVKPDSLRRKIEAHLEDLRLSLDLARIRTDLPLEVDFKALRRRTPDLEGLRAFLEELEFGSLLHEFGLLGGEKPREEAPWPPPEGAFVGFLLSRKEPMWAELLALAAAAEGRVHRATSPVEALADLKEARGFLAKDLAVLALREGVALDPTDDPLLVAYLLDPANTNPEGVARRYGGEFTEDAAERALLSERLFQTLFPRLSEKLLWLYQEVERPLSRVLAHMEARGVRLDVPLLEALSFELEKELERLEGEVFRLAGHPFNLNSRDQLEKVLFDELGLTPIGRTEKTGKRSTSAAALEALRGAHPIVELILQYRELSKLKSTYLDPLPRLVHPRTGRLHTRFNQTATATGRLSSSDPNLQNIPVRTPLGQRIRKAFVAEEGWLLLAADYSQIELRVLAHLSGDENLKRVFREGKDIHTETAAWMFGLDPALVDPKMRRAAKTVNFGVLYGMSAHRLSQELGIDYKEAEAFIERYFQSFPKVRAWIERTLEEGRTRGYVETLFGRRRYVPDLASRVRSVREAAERMAFNAPVQGTAADLMKIAMVKLFPRLKPLGAHLLLQVHDELVLEVPEDRAEEAKALVKEVMENAYPLDVPLEVEVGVGRDWLEAKQD

SEQ ID NO: 263 - DNA, 2538 bp, synthetic construct
  misc_feature 1..2538: note = DNA Polymerase Variant
  source 1..2538: mol_type = other DNA
atgcaccatcatcatcatcatggcggtagcggcatgttaccgctgtttgatttggaagaaccaccaaaacgcgtgctgcttgttgacggccatcatctggcgtatcgtaccttctacgcactgagccttacgacctcacgtggtgagcctgtccagatggtgtatgggtttgctcgctccctgctgaaagccctgaaggaagatggtcaagccgtagtagtggttttcgatgcgaaagcaccgtcgtttcgtcacgaagcgtacgaggcctataaagctggccgcgcaccgaccccggaagactttccgcgtcagttagcgctcgtcaaacgcctcgtggatttgctgggattagttcgcttggaagctcctggctacgaggcggacgacgtgctcggtacactggccaagaaagcagaacgtgaaggcatggaggtctgcattcttaccggtgatcgcgatttcttccagctgctgtctgagaaagtgagcgttttgctgcccgatggcacgttagtaaccccgaaagatgtccaagagaaatatggagttccgccagaacgttgggtggactttcgcgcactgactggtgatcgttcagacaacatcccgggcgttgccgggattggtgaaaagacggcgctgcgcctgctggcagaatggggctcggtggaaaatctgctcaagaaccttgatcgtgtgaaacctgatagcttacgccgcaagatcgaagcccacctggaagacttgcgtctgagtctggatcttgcgcgtattcgcaccgatctgccgttggaagtagactttaaagctctgcgtcgtcgcacacccgatttagaggggttacgcgcgttcctcgaagaactggagtttggctccctgctgcatgaattcggtttgttgggcggagagaaaccgcgtgaagaagcaccatggccgccgcccgaaggtgcctttgtcggctttcttctgtcacgcaaagagccaatgtgggcggaactgttagctcttgcagccgccgcggaagggcgtgttcaccgcgcgacctctcctgtcgaggccctcgctgacctcaaagaagcacgtggtttcttggcgaaagatttagccgtgcttgcattacgcgaaggcgttgcgctcgatccgacggacgacccgcttttggtggcttatttgctcgatcctgcgaataccaacccggaaggtgtagcccgtcgttacggcggcgagtttactgaagatgcggcagaacgcgcgttgcttagcgaacgcctcttccagacgttatttccacgtctttcggagaaattactctggctctatcaggaagtcgaacgtccattgagtcgcgtgcttgcccatatggaggctcgcggtgtgcgcttagatgttccgttgttagaagcactcagcttcgagttggagaaagaactggaacgtcttgaaggcgaagtctttcgtttagcggggcatcccttcaatctcaactctcgcgaccaattggagaaagtgctctttgatgaattaggtttaacccctatcggacgtacagagaagaccggcaaacgttccacttcggcagccgccttggaagcacttcgtggtgctcacccgatcgtcgaattgattttgcagtaccgcgagctcagcaaactcaaatcaacctatcttgggccgttacctcgtcttgttcatccacgtacgggtcgtttacacacccgcttcaatcaaacggcgacagccaccgggcgcttgtcgtcgagtgacccgaacctccagaatattccagtgcgcacgccgttaggccaacgcattcgtaaagcgtttgttgcggaagaaggttggttattacttgcggccgattactcccagatcgaacttcgtgtattggcgcatctctctggcgacgagaatcttaaacgcgtgtttcgcgaaggcaaggatattcacactgaaaccgcagcctggatgttcgggcttgacccagccttagtggaccccaagatgcgtcgtgccgccaagaccgtcaactttggcgtactctatggtatgtcagcacatcgtcttagtcaggaattgggcattgactacaaagaagctgaagcgtttatcgagcgctatttccaatcctttccgaaagttcgcgcgtggattgaacgtaccctcgaagaaggtcgcactcgcggctatgtggaaacgttattcgggcgtcgtcgctacgttccagatcttgcatctcgtgtccgctcagtgcgcgaagctgctgagcgtatggccttcaatatgcctgttcagggaacagcggcggacctcatgaagatcgccatggtgaaattgtttccgcgcttgaaacccttaggagcccaccttcttttacaggtgcatgatgaattggtcttggaagtacccgaggatcgcgcagaagaagccaaagcactcgtgaaagaggttatggaaaacgcgtatccgttagatgttccgttggaggtcgaagtgggtgtaggccgtgattggcttgaagcgaaacaagactaatga

SEQ ID NO: 264 - protein, 844 aa, synthetic construct
  REGION 1..844: note = DNA Polymerase Variant
MHHHHHHGGSGMLPLFDLEEPPKRVLLVDGHHLAYRTFYALSLTTSRGEPVQMVYGFARSLLKALKEDGQAVVVVFDAKAPSFRHEAYEAYKAGRAPTPEDFPRQLALVKRLVDLLGLVRLEAPGYEADDVLGTLAKKAEREGMEVCILTGDRDFFQLLSEKVSVLLPDGTLVTPKDVQEKYGVPPERWVDFRALTGDRSDNIPGVAGIGEKTALRLLAEWGSVENLLKNLDRVKPDSLRRKIEAHLEDLRLSLDLARIRTDLPLEVDFKALRRRTPDLEGLRAFLEELEFGSLLHEFGLLGGEKPREEAPWPPPEGAFVGFLLSRKEPMWAELLALAAAAEGRVHRATSPVEALADLKEARGFLAKDLAVLALREGVALDPTDDPLLVAYLLDPANTNPEGVARRYGGEFTEDAAERALLSERLFQTLFPRLSEKLLWLYQEVERPLSRVLAHMEARGVRLDVPLLEALSFELEKELERLEGEVFRLAGHPFNLNSRDQLEKVLFDELGLTPIGRTEKTGKRSTSAAALEALRGAHPIVELILQYRELSKLKSTYLGPLPRLVHPRTGRLHTRFNQTATATGRLSSSDPNLQNIPVRTPLGQRIRKAFVAEEGWLLLAADYSQIELRVLAHLSGDENLKRVFREGKDIHTETAAWMFGLDPALVDPKMRRAAKTVNFGVLYGMSAHRLSQELGIDYKEAEAFIERYFQSFPKVRAWIERTLEEGRTRGYVETLFGRRRYVPDLASRVRSVREAAERMAFNMPVQGTAADLMKIAMVKLFPRLKPLGAHLLLQVHDELVLEVPEDRAEEAKALVKEVMENAYPLDVPLEVEVGVGRDWLEAKQD

SEQ ID NO: 265 - DNA, 2538 bp, synthetic construct
  misc_feature 1..2538: note = DNA Polymerase Variant
  source 1..2538: mol_type = other DNA
atgcaccatcatcatcatcatggcggtagcggcatgttaccgctgtttgatttggaagaaccaccaaaacgcgtgctgcttgttgacggccatcatctggcgtatcgtaccttctacgcactgagccttacgacctcacgtggtgagcctgtccagatggtgtatgggtttgctcgctccctgctgaaagccctgaaggaagatggtcaagccgtagtagtggttttcgatgcgaaagcaccgtcgtttcgtcacgaagcgtacgaggcctataaagctggccgcgcaccgaccccggaagactttccgcgtcagttagcgctcgtcaaacgcctcgtggatttgctgggattagttcgcttggaagctcctggctacgaggcggacgacgtgctcggtacactggccaagaaagcagaacgtgaaggcatggaggtctgcattcttaccggtgatcgcgatttcttccagctgctgtctgagaaagtgagcgttttgctgcccgatggcacgttagtaaccccgaaagatgtccaagagaaatatggagttccgccagaacgttgggtggactttcgcgcactgactggtgatcgttcagacaacatcccgggcgttgccgggattggtgaaaagacggcgctgcgcctgctggcagaatggggctcggtggaaaatctgctcaagaaccttgatcgtgtgaaacctgatagcttacgccgcaagatcgaagcccacctggaagacttgcgtctgagtctggatcttgcgcgtattcgcaccgatctgccgttggaagtagactttaaagctctgcgtcgtcgcacacccgatttagaggggttacgcgcgttcctcgaagaactggagtttggctccctgctgcatgaattcggtttgttgggcggagagaaaccgcgtgaagaagcaccatggccgccgcccgaaggtgcctttgtcggctttcttctgtcacgcaaagagccaatgtgggcggaactgttagctcttgcagccgccgcggaagggcgtgttcaccgcgcgacctctcctgtcgaggccctcgctgacctcaaagaagcacgtggtttcttggcgaaagatttagccgtgcttgcattacgcgaaggcgttgcgctcgatccgacggacgacccgcttttggtggcttatttgctcgatcctgcgaataccaacccggaaggtgtagcccgtcgttacggcggcgagtttactgaagatgcggcagaacgcgcgttgcttagcgaacgcctcttccagacgttatttccacgtctttcggagaaattactctggctctatcaggaagtcgaacgtccattgagtcgcgtgcttgcccatatggaggctcgcggtgtgcgcttagatgttccgttgttagaagcactcagcttcgagttggagaaagaactggaacgtcttgaaggcgaagtctttcgtttagcggggcatcccttcaatctcaactctcgcgaccaattggagaaagtgctctttgatgaattaggtttaacccctatcggacgtacagagaagaccggcaaacgttccacttcggcagccgccttggaagcacttcgtggtgctcacccgatcgtcgaattgattttgcagtaccgcgagctcagcaaactcaaatcaacctatcttgatccgttacctcgtcttgttcatccacgtacgggtcgtttacacacccgcttcaatcaaacggcgacagccaccgggcgcttgtcgtcgagtgggccgaacctccagaatattccagtgcgcacgccgttaggccaacgcattcgtaaagcgtttgttgcggaagaaggttggttattacttgcggccgattactcccagatcgaacttcgtgtattggcgcatctctctggcgacgagaatcttaaacgcgtgtttcgcgaaggcaaggatattcacactgaaaccgcagcctggatgttcgggcttgacccagccttagtggaccccaagatgcgtcgtgccgccaagaccgtcaactttggcgtactctatggtatgtcagcacatcgtcttagtcaggaattgggcattgactacaaagaagctgaagcgtttatcgagcgctatttccaatcctttccgaaagttcgcgcgtggattgaacgtaccctcgaagaaggtcgcactcgcggctatgtggaaacgttattcgggcgtcgtcgctacgttccagatcttgcatctcgtgtccgctcagtgcgcgaagctgctgagcgtatggccttcaatatgcctgttcagggaacagcggcggacctcatgaagatcgccatggtgaaattgtttccgcgcttgaaacccttaggagcccaccttcttttacaggtgcatgatgaattggtcttggaagtacccgaggatcgcgcagaagaagccaaagcactcgtgaaagaggttatggaaaacgcgtatccgttagatgttccgttggaggtcgaagtgggtgtaggccgtgattggcttgaagcgaaacaagactaatga

SEQ ID NO: 266 - protein, 844 aa, synthetic construct
  REGION 1..844: note = DNA Polymerase Variant
MHHHHHHGGSGMLPLFDLEEPPKRVLLVDGHHLAYRTFYALSLTTSRGEPVQMVYGFARSLLKALKEDGQAVVVVFDAKAPSFRHEAYEAYKAGRAPTPEDFPRQLALVKRLVDLLGLVRLEAPGYEADDVLGTLAKKAEREGMEVCILTGDRDFFQLLSEKVSVLLPDGTLVTPKDVQEKYGVPPERWVDFRALTGDRSDNIPGVAGIGEKTALRLLAEWGSVENLLKNLDRVKPDSLRRKIEAHLEDLRLSLDLARIRTDLPLEVDFKALRRRTPDLEGLRAFLEELEFGSLLHEFGLLGGEKPREEAPWPPPEGAFVGFLLSRKEPMWAELLALAAAAEGRVHRATSPVEALADLKEARGFLAKDLAVLALREGVALDPTDDPLLVAYLLDPANTNPEGVARRYGGEFTEDAAERALLSERLFQTLFPRLSEKLLWLYQEVERPLSRVLAHMEARGVRLDVPLLEALSFELEKELERLEGEVFRLAGHPFNLNSRDQLEKVLFDELGLTPIGRTEKTGKRSTSAAALEALRGAHPIVELILQYRELSKLKSTYLDPLPRLVHPRTGRLHTRFNQTATATGRLSSSGPNLQNIPVRTPLGQRIRKAFVAEEGWLLLAADYSQIELRVLAHLSGDENLKRVFREGKDIHTETAAWMFGLDPALVDPKMRRAAKTVNFGVLYGMSAHRLSQELGIDYKEAEAFIERYFQSFPKVRAWIERTLEEGRTRGYVETLFGRRRYVPDLASRVRSVREAAERMAFNMPVQGTAADLMKIAMVKLFPRLKPLGAHLLLQVHDELVLEVPEDRAEEAKALVKEVMENAYPLDVPLEVEVGVGRDWLEAKQD

SEQ ID NO: 267 - DNA, 2538 bp, synthetic construct
  misc_feature 1..2538: note = DNA Polymerase Variant
  source 1..2538: mol_type = other DNA
atgcaccatcatcatcatcatggcggtagcggcatgttaccgctgtttgatttggaagaaccaccaaaacgcgtgctgcttgttgacggccatcatctggcgtatcgtaccttctacgcactgagccttacgacctcacgtggtgagcctgtccagatggtgtatgggtttgctcgctccctgctgaaagccctgaaggaagatggtcaagccgtagtagtggttttcgatgcgaaagcaccgtcgtttcgtcacgaagcgtacgaggcctataaagctggccgcgcaccgaccccggaagactttccgcgtcagttagcgctcgtcaaacgcctcgtggatttgctgggattagttcgcttggaagctcctggctacgaggcggacgacgtgctcggtacactggccaagaaagcagaacgtgaaggcatggaggtctgcattcttaccggtgatcgcgatttcttccagctgctgtctgagaaagtgagcgttttgctgcccgatggcacgttagtaaccccgaaagatgtccaagagaaatatggagttccgccagaacgttgggtggactttcgcgcactgactggtgatcgttcagacaacatcccgggcgttgccgggattggtgaaaagacggcgctgcgcctgctggcagaatggggctcggtggaaaatctgctcaagaaccttgatcgtgtgaaacctgatagcttacgccgcaagatcgaagcccacctggaagacttgcgtctgagtctggatcttgcgcgtattcgcaccgatctgccgttggaagtagactttaaagctctgcgtcgtcgcacacccgatttagaggggttacgcgcgttcctcgaagaactggagtttggctccctgctgcatgaattcggtttgttgggcggagagaaaccgcgtgaagaagcaccatggccgccgcccgaaggtgcctttgtcggctttcttctgtcacgcaaagagccaatgtgggcggaactgttagctcttgcagccgccgcggaagggcgtgttcaccgcgcgacctctcctgtcgaggccctcgctgacctcaaagaagcacgtggtttcttggcgaaagatttagccgtgcttgcattacgcgaaggcgttgcgctcgatccgacggacgacccgcttttggtggcttatttgctcgatcctgcgaataccaacccggaaggtgtagcccgtcgttacggcggcgagtttactgaagatgcggcagaacgcgcgttgcttagcgaacgcctcttccagacgttatttccacgtctttcggagaaattactctggctctatcaggaagtcgaacgtccattgagtcgcgtgcttgcccatatggaggctcgcggtgtgcgcttagatgttccgttgttagaagcactcagcttcgagttggagaaagaactggaacgtcttgaaggcgaagtctttcgtttagcggggcatcccttcaatctcaactctcgcgaccaattggagaaagtgctctttgatgaattaggtttaacccctatcggacgtacagagaagaccggcaaacgttccacttcggcagccgccttggaagcacttcgtggtgctcacccgatcgtcgaattgattatgcagtaccgcgagctcagcaaactcaaatcaacctatcttgatccgttacctcgtcttgttcatccacgtacgggtcgtttacacacccgcttcaatcaaacggcgacagccaccgggcgcttgtcgtcgagtgacccgaacctccagaatattccagtgcgcacgccgttaggccaacgcattcgtaaagcgtttgttgcggaagaaggttggttattacttgcggccgattactcccagatcgaacttcgtgtattggcgcatctctctggcgacgagaatcttaaacgcgtgtttcgcgaaggcaaggatattcacactgaaaccgcagcctggatgttcgggcttgacccagccttagtggaccccaagatgcgtcgtgccgccaagaccgtcaactttggcgtactctatggtatgtcagcacatcgtcttagtcaggaattgggcattgactacaaagaagctgaagcgtttatcgagcgctatttccaatcctttccgaaagttcgcgcgtggattgaacgtaccctcgaagaaggtcgcactcgcggctatgtggaaacgttattcgggcgtcgtcgctacgttccagatcttgcatctcgtgtccgctcagtgcgcgaagctgctgagcgtatggccttcaatatgcctgttcagggaacagcggcggacctcatgaagatcgccatggtgaaattgtttccgcgcttgaaacccttaggagcccaccttcttttacaggtgcatgatgaattggtcttggaagtacccgaggatcgcgcagaagaagccaaagcactcgtgaaagaggttatggaaaacgcgtatccgttagatgttccgttggaggtcgaagtgggtgtaggccgtgattggcttgaagcgaaacaagactaatga

SEQ ID NO: 268 - protein, 844 aa, synthetic construct
  REGION 1..844: note = DNA Polymerase Variant
MHHHHHHGGSGMLPLFDLEEPPKRVLLVDGHHLAYRTFYALSLTTSRGEPVQMVYGFARSLLKALKEDGQAVVVVFDAKAPSFRHEAYEAYKAGRAPTPEDFPRQLALVKRLVDLLGLVRLEAPGYEADDVLGTLAKKAEREGMEVCILTGDRDFFQLLSEKVSVLLPDGTLVTPKDVQEKYGVPPERWVDFRALTGDRSDNIPGVAGIGEKTALRLLAEWGSVENLLKNLDRVKPDSLRRKIEAHLEDLRLSLDLARIRTDLPLEVDFKALRRRTPDLEGLRAFLEELEFGSLLHEFGLLGGEKPREEAPWPPPEGAFVGFLLSRKEPMWAELLALAAAAEGRVHRATSPVEALADLKEARGFLAKDLAVLALREGVALDPTDDPLLVAYLLDPANTNPEGVARRYGGEFTEDAAERALLSERLFQTLFPRLSEKLLWLYQEVERPLSRVLAHMEARGVRLDVPLLEALSFELEKELERLEGEVFRLAGHPFNLNSRDQLEKVLFDELGLTPIGRTEKTGKRSTSAAALEALRGAHPIVELIMQYRELSKLKSTYLDPLPRLVHPRTGRLHTRFNQTATATGRLSSSDPNLQNIPVRTPLGQRIRKAFVAEEGWLLLAADYSQIELRVLAHLSGDENLKRVFREGKDIHTETAAWMFGLDPALVDPKMRRAAKTVNFGVLYGMSAHRLSQELGIDYKEAEAFIERYFQSFPKVRAWIERTLEEGRTRGYVETLFGRRRYVPDLASRVRSVREAAERMAFNMPVQGTAADLMKIAMVKLFPRLKPLGAHLLLQVHDELVLEVPEDRAEEAKALVKEVMENAYPLDVPLEVEVGVGRDWLEAKQD

SEQ ID NO: 269 - DNA, 2538 bp, synthetic construct
  misc_feature 1..2538: note = DNA Polymerase Variant
  source 1..2538: mol_type = other DNA
atgcaccatcatcatcatcatggcggtagcggcatgttaccgctgtttgatttggaagaaccaccaaaacgcgtgctgcttgttgacggccatcatctggcgtatcgtaccttctacgcactgagccttacgacctcacgtggtgagcctgtccagatggtgtatgggtttgctcgctccctgctgaaagccctgaaggaagatggtcaagccgtagtagtggttttcgatgcgaaagcaccgtcgtttcgtcacgaagcgtacgaggcctataaagctggccgcgcaccgaccccggaagactttccgcgtcagttagcgctcgtcaaacgcctcgtggatttgctgggattagttcgcttggaagctcctggctacgaggcggacgacgtgctcggtacactggccaagaaagcagaacgtgaaggcatggaggtctgcattcttaccggtgatcgcgatttcttccagctgctgtctgagaaagtgagcgttttgctgcccgatggcacgttagtaaccccgaaagatgtccaagagaaatatggagttccgccagaacgttgggtggactttcgcgcactgactggtgatcgttcagacaacatcccgggcgttgccgggattggtgaaaagacggcgctgcgcctgctggcagaatggggctcggtggaaaatctgctcaagaaccttgatcgtgtgaaacctgatagcttacgccgcaagatcgaagcccacctggaagacttgcgtctgagtctggatcttgcgcgtattcgcaccgatctgccgttggaagtagactttaaagctctgcgtcgtcgcacacccgatttagaggggttacgcgcgttcctcgaagaactggagtttggctccctgctgcatgaattcggtttgttgggcggagagaaaccgcgtgaagaagcaccatggccgccgcccgaaggtgcctttgtcggctttcttctgtcacgcaaagagccaatgtgggcggaactgttagctcttgcagccgccgcggaagggcgtgttcaccgcgcgacctctcctgtcgaggccctcgctgacctcaaagaagcacgtggtttcttggcgaaagatttagccgtgcttgcattacgcgaaggcgttgcgctcgatccgacggacgacccgcttttggtggcttatttgctcgatcctgcgaataccaacccggaaggtgtagcccgtcgttacggcggcgagtttactgaagatgcggcagaacgcgcgttgcttagcgaacgcctcttccagacgttatttccacgtctttcggagaaattactctggctctatcaggaagtcgaacgtccattgagtcgcgtgcttgcccatatggaggctcgcggtgtgcgcttagatgttccgttgttagaagcactcagcttcgagttggagaaagaactggaacgtcttgaaggcgaagtctttcgtttagcggggcatcccttcaatctcaactctcgcgaccaattggagaaagtgctctttgatgaattaggtttaacccctatcacgcgtacagagaagaccggcaaacgttccacttcggcagccgccttggaagcacttcgtggtgctcacccgatcgtcgagttgattttgcagtaccgcgagctcagcaaactcaaatcaacctatcttgataggttacctcgtcttgttcatccacgtacgggtcgtttacacacccgcttcaatcaaacggcgacagccaccgggcgcttgtcgtcgagtgacccgaacctccagaatattccagtgcgcacgccgttaggccaacgcattcgtaaagcgtttgttgcggaagaaggttggttattacttgcggccgattactcccagatcgaacttcgtgtattggcgcatctctctggcgacgagaatcttaaacgcgtgtttcgcgaaggcaaggatattcacactgaaaccgcagcctggatgttcgggcttgacccagccttagtggaccccaagatgcgtcgtgccgccaagaccgtcaactttggcgtactctatggtatgtcagcacatcgtcttagtcaggaattgggcattgactacaaagaagctgaagcgtttatcgagcgctatttccaatcctttccgaaagttcgcgcgtggattgaacgtaccctcgaagaaggtcgcactcgcggctatgtggaaacgttattcgggcgtcgtcgctacgttccagatcttgcatctcgtgtccgctcagtgcgcgaagctgctgagcgtatggcctggaatatgcctgttcagggaacagcggcggacctcatgaagatcgccatggtgaaattgtttccgcgcttgaaacccttaggagcccaccttcttttacaggtgcatgatgaattggtcttggaagtacccgaggatcgcgcagaagaagccaaagcactcgtgaaagaggttatggaaaacgcgtatccgttagatgttccgttggaggtcgaagtgggtgtaggccgtgattggcttgaagcgaaacaagactaatga

SEQ ID NO: 270 - protein, 844 aa, synthetic construct
  REGION 1..844: note = DNA Polymerase Variant
MHHHHHHGGSGMLPLFDLEEPPKRVLLVDGHHLAYRTFYALSLTTSRGEPVQMVYGFARSLLKALKEDGQAVVVVFDAKAPSFRHEAYEAYKAGRAPTPEDFPRQLALVKRLVDLLGLVRLEAPGYEADDVLGTLAKKAEREGMEVCILTGDRDFFQLLSEKVSVLLPDGTLVTPKDVQEKYGVPPERWVDFRALTGDRSDNIPGVAGIGEKTALRLLAEWGSVENLLKNLDRVKPDSLRRKIEAHLEDLRLSLDLARIRTDLPLEVDFKALRRRTPDLEGLRAFLEELEFGSLLHEFGLLGGEKPREEAPWPPPEGAFVGFLLSRKEPMWAELLALAAAAEGRVHRATSPVEALADLKEARGFLAKDLAVLALREGVALDPTDDPLLVAYLLDPANTNPEGVARRYGGEFTEDAAERALLSERLFQTLFPRLSEKLLWLYQEVERPLSRVLAHMEARGVRLDVPLLEALSFELEKELERLEGEVFRLAGHPFNLNSRDQLEKVLFDELGLTPITRTEKTGKRSTSAAALEALRGAHPIVELILQYRELSKLKSTYLDRLPRLVHPRTGRLHTRFNQTATATGRLSSSDPNLQNIPVRTPLGQRIRKAFVAEEGWLLLAADYSQIELRVLAHLSGDENLKRVFREGKDIHTETAAWMFGLDPALVDPKMRRAAKTVNFGVLYGMSAHRLSQELGIDYKEAEAFIERYFQSFPKVRAWIERTLEEGRTRGYVETLFGRRRYVPDLASRVRSVREAAERMAWNMPVQGTAADLMKIAMVKLFPRLKPLGAHLLLQVHDELVLEVPEDRAEEAKALVKEVMENAYPLDVPLEVEVGVGRDWLEAKQD

SEQ ID NO: 271 - DNA, 2538 bp, synthetic construct
  misc_feature 1..2538: note = DNA Polymerase Variant
  source 1..2538: mol_type = other DNA
atgcaccatcatcatcatcatggcggtagcggcatgttaccgctgtttgatttggaagaaccaccaaaacgcgtgctgcttgttgacggccatcatctggcgtatcgtaccttctacgcactgagccttacgacctcacgtggtgagcctgtccagatggtgtatgggtttgctcgctccctgctgaaagccctgaaggaagatggtcaagccgtagtagtggttttcgatgcgaaagcaccgtcgtttcgtcacgaagcgtacgaggcctataaagctggccgcgcaccgaccccggaagactttccgcgtcagttagcgctcgtcaaacgcctcgtggatttgctgggattagttcgcttggaagctcctggctacgaggcggacgacgtgctcggtacactggccaagaaagcagaacgtgaaggcatggaggtctgcattcttaccggtgatcgcgatttcttccagctgctgtctgagaaagtgagcgttttgctgcccgatggcacgttagtaaccccgaaagatgtccaagagaaatatggagttccgccagaacgttgggtggactttcgcgcactgactggtgatcgttcagacaacatcccgggcgttgccgggattggtgaaaagacggcgctgcgcctgctggcagaatggggctcggtggaaaatctgctcaagaaccttgatcgtgtgaaacctgatagcttacgccgcaagatcgaagcccacctggaagacttgcgtctgagtctggatcttgcgcgtattcgcaccgatctgccgttggaagtagactttaaagctctgcgtcgtcgcacacccgatttagaggggttacgcgcgttcctcgaagaactggagtttggctccctgctgcatgaattcggtttgttgggcggagagaaaccgcgtgaagaagcaccatggccgccgcccgaaggtgcctttgtcggctttcttctgtcacgcaaagagccaatgtgggcggaactgttagctcttgcagccgccgcggaagggcgtgttcaccgcgcgacctctcctgtcgaggccctcgctgacctcaaagaagcacgtggtttcttggcgaaagatttagccgtgcttgcattacgcgaaggcgttgcgctcgatccgacggacgacccgcttttggtggcttatttgctcgatcctgcgaataccaacccggaaggcgtagcccgtcgttacggcggcgagtttactgaagatgcggcagaacgcgcgttgcttagcgaacgcctcttccagacgttatttccacgtctttcggagaaattactctggctctatcaggaagtcgaacgtccattgagtcgcgtgcttgcccatatggaggctcgcggtgtgcgcttagatgttccgttgttagaagcactcagcttcgagttggagaaagaactggaacgtcttgaaggcgaagtctttcgtttagcggggcatcccttcaatctcaactctcgcgaccaattggagaaagtgctctttgatgaattaggtttaacccctgtcacgcgtacagagaagaccggcaaacgttccacttcggcagccgccttggaagcacttcgtggtgctcacccgatcgtcgagttgattttgcagtaccgcgagctcagcaaactcaaatcaacctatcttgataggttacctcgtcttgttcatccacgtacgggtcgtttacacacccgcttcaatcaaacggcgacagccaccgggcgcttgtcgtcgagtgacccgaacctccagaatattccagtgcgcacgccgctgggccaacgcattcgtaaagcgtttgttgcggaagaaggttggttattacttgcggccgattactcccagatcgaacttcgtgtattggcgcatctctctggcgacgagaatcttaaacgcgtgtttcgcgaaggcaaggatattcacactgaaaccgcagcctggatgttcgggcttgacccagccttagtggaccccaagatgcgtcgtgccgccaagaccgtcaactttggcgtactctatggtatgtcagcacatcgtcttagtcaggaattgggcattgactacaaagaagctgaagcgtttatcgagcgctatttccaatcctttccgaaagttcgcgcgtggattgaacgtaccctcgaagaaggtcgcactcgcggctatgtggaaacgttattcgggcgtcgtcgctacgttccagatcttgcatctcgtgtccgctcagtgcgcgaagctgctgagcgtatggcctggaatatgcctgttcagggaacagcggcggacctcatgaagatcgccatggtgaaattgtttccgcgcttgaaacccttaggagcccaccttcttttacaggtgcatgatgaattggtcttggaagtacccgaggatcgcgcagaagaagccaaagcactcgtgaaagaggttatggaaaacgcgtatccgttagatgttccgttggaggtcgaagtgggtgtaggccgtgattggcttgaagcgaaacaagactaatga

SEQ ID NO: 272 - protein, 844 aa, synthetic construct
  REGION 1..844: note = DNA Polymerase Variant
MHHHHHHGGSGMLPLFDLEEPPKRVLLVDGHHLAYRTFYALSLTTSRGEPVQMVYGFARSLLKALKEDGQAVVVVFDAKAPSFRHEAYEAYKAGRAPTPEDFPRQLALVKRLVDLLGLVRLEAPGYEADDVLGTLAKKAEREGMEVCILTGDRDFFQLLSEKVSVLLPDGTLVTPKDVQEKYGVPPERWVDFRALTGDRSDNIPGVAGIGEKTALRLLAEWGSVENLLKNLDRVKPDSLRRKIEAHLEDLRLSLDLARIRTDLPLEVDFKALRRRTPDLEGLRAFLEELEFGSLLHEFGLLGGEKPREEAPWPPPEGAFVGFLLSRKEPMWAELLALAAAAEGRVHRATSPVEALADLKEARGFLAKDLAVLALREGVALDPTDDPLLVAYLLDPANTNPEGVARRYGGEFTEDAAERALLSERLFQTLFPRLSEKLLWLYQEVERPLSRVLAHMEARGVRLDVPLLEALSFELEKELERLEGEVFRLAGHPFNLNSRDQLEKVLFDELGLTPVTRTEKTGKRSTSAAALEALRGAHPIVELILQYRELSKLKSTYLDRLPRLVHPRTGRLHTRFNQTATATGRLSSSDPNLQNIPVRTPLGQRIRKAFVAEEGWLLLAADYSQIELRVLAHLSGDENLKRVFREGKDIHTETAAWMFGLDPALVDPKMRRAAKTVNFGVLYGMSAHRLSQELGIDYKEAEAFIERYFQSFPKVRAWIERTLEEGRTRGYVETLFGRRRYVPDLASRVRSVREAAERMAWNMPVQGTAADLMKIAMVKLFPRLKPLGAHLLLQVHDELVLEVPEDRAEEAKALVKEVMENAYPLDVPLEVEVGVGRDWLEAKQD

SEQ ID NO: 273 - DNA, 2538 bp, synthetic construct
  misc_feature 1..2538: note = DNA Polymerase Variant
  source 1..2538: mol_type = other DNA
atgcaccatcatcatcatcatggcggtagcggcatgttaccgctgtttgatttggaagaaccaccaaaacgcgtgctgcttgttgacggccatcatctggcgtatcgtaccttctacgcactgagccttacgacctcacgtggtgagcctgtccagatggtgtatgggtttgctcgctccctgctgaaagccctgaaggaagatggtcaagccgtagtagtggttttcgatgcgaaagcaccgtcgtttcgtcacgaagcgtacgaggcctataaagctggccgcgcaccgaccccggaagactttccgcgtcagttagcgctcgtcaaacgcctcgtggatttgctgggattagttcgcttggaagctcctggctacgaggcggacgacgtgctcggtacactggccaagaaagcagaacgtgaaggcatggaggtctgcattcttaccggtgatcgcgatttcttccagctgctgtctgagaaagtgagcgttttgctgcccgatggcacgttagtaaccccgaaagatgtccaagagaaatatggagttccgccagaacgttgggtggactttcgcgcactgactggtgatcgttcagacaacatcccgggcgttgccgggattggtgaaaagacggcgctgcgcctgctggcagaatggggctcggtggaaaatctgctcaagaaccttgatcgtgtgaaacctgatagcttacgccgcaagatcgaagcccacctggaagacttgcgtctgagtctggatcttgcgcgtattcgcaccgatctgccgttggaagtagactttaaagctctgcgtcgtcgcacacccgatttagaggggttacgcgcgttcctcgaagaactggagtttggctccctgctgcatgaattcggtttgttgggcggagagaaaccgcgtgaagaagcaccatggccgccgcccgaaggtgcctttgtcggctttcttctgtcacgcaaagagccaatgtgggcggaactgttagctcttgcagccgccgcggaagggcgtgttcaccgcgcgacctctcctgtcgaggccctcgctgacctcaaagaagcacgtggtttcttggcgaaagatttagccgtgcttgcattacgcgaaggcgttgcgctcgatccgacggacgacccgcttttggtggcttatttgctcgatcctgcgaataccaacccggaaggtgtagcccgtcgttacggcggcgagtttactgaagatgcggcagaacgcgcgttgcttagcgaacgcctcttccagacgttatttccacgtctttcggagaaattactctggctctatcaggaagtcgaacgtccattgagtcgcgtgcttgcccatatggaggctcgcggtgtgcgcttagatgttccgttgttagaagcactcagcttcgagttggagaaagaaatggaacgtcttgaaggcgaagtctttcgtttagcggggcatcccttcaatctcaactctcgcgaccaattggagaaagtgctctttgatgaattaggtttaacccctatcacgcgtacagagaagaccggcaaacgttccacttcggcagccgccttggaagcacttcgtggtgctcacccgatcgtcgaattgattttgcagtaccgcgagctcagcaaactcaaatcaacctatcttgataggttacctcgtcttgttcatccacgtacgggtcgtttacacacccgcttcaatcaaacggcgacagccaccgggcgcttgtcgtcgagtgacccgaacctccagaatattccagtgcgcacgccgctgggccaacgcattcgtaaagcgtttgttgcggaagaaggttggttattacttgcggccgattactcccagatcgaacttcgtgtattggcgcatctctctggcgacgagaatcttaaacgcgtgtttcgcgaaggcaaggatattcacactgaaaccgcagcctggatgttcgggcttgacccagccttagtggaccccaagatgcgtcgtgccgccaagaccgtcaactttggcgtactctatggtatgtcagcacatcgtcttagtcaggaattgggcattgactacaaagaagctgaagcgtttatcgagcgctatttccaatcctttccgaaagttcgcgcgtggattgaacgtaccctcgaagaaggtcgcactcgcggctatgtggaaacgttattcgggcgtcgtcgctacgttccagatcttgcatctcgtgtccgctcagtgcgcgaagctgctgagcgtatggcctggaatatgcctgttcagggaacagcggcggacctcatgaagatcgccatggtgaaattgtttccgcgcttgaaacccttaggagcccaccttcttttacaggtgcatgatgaattggtcttggaagtacccgaggatcgcgcagaagaagccaaagcactcgtgaaagaggttatggaaaacgcgtatccgttagatgttccgttggaggtcgaagtgggtgtaggccgtgattggcttgaagcgaaacaagactaatga

SEQ ID NO: 274 - protein, 844 aa, synthetic construct
  REGION 1..844: note = DNA Polymerase Variant
MHHHHHHGGSGMLPLFDLEEPPKRVLLVDGHHLAYRTFYALSLTTSRGEPVQMVYGFARSLLKALKEDGQAVVVVFDAKAPSFRHEAYEAYKAGRAPTPEDFPRQLALVKRLVDLLGLVRLEAPGYEADDVLGTLAKKAEREGMEVCILTGDRDFFQLLSEKVSVLLPDGTLVTPKDVQEKYGVPPERWVDFRALTGDRSDNIPGVAGIGEKTALRLLAEWGSVENLLKNLDRVKPDSLRRKIEAHLEDLRLSLDLARIRTDLPLEVDFKALRRRTPDLEGLRAFLEELEFGSLLHEFGLLGGEKPREEAPWPPPEGAFVGFLLSRKEPMWAELLALAAAAEGRVHRATSPVEALADLKEARGFLAKDLAVLALREGVALDPTDDPLLVAYLLDPANTNPEGVARRYGGEFTEDAAERALLSERLFQTLFPRLSEKLLWLYQEVERPLSRVLAHMEARGVRLDVPLLEALSFELEKEMERLEGEVFRLAGHPFNLNSRDQLEKVLFDELGLTPITRTEKTGKRSTSAAALEALRGAHPIVELILQYRELSKLKSTYLDRLPRLVHPRTGRLHTRFNQTATATGRLSSSDPNLQNIPVRTPLGQRIRKAFVAEEGWLLLAADYSQIELRVLAHLSGDENLKRVFREGKDIHTETAAWMFGLDPALVDPKMRRAAKTVNFGVLYGMSAHRLSQELGIDYKEAEAFIERYFQSFPKVRAWIERTLEEGRTRGYVETLFGRRRYVPDLASRVRSVREAAERMAWNMPVQGTAADLMKIAMVKLFPRLKPLGAHLLLQVHDELVLEVPEDRAEEAKALVKEVMENAYPLDVPLEVEVGVGRDWLEAKQD

SEQ ID NO: 275 - DNA, 2538 bp, synthetic construct
  misc_feature 1..2538: note = DNA Polymerase Variant
  source 1..2538: mol_type = other DNA
atgcaccatcatcatcatcatggcggtagcggcatgttaccgctgtttgatttggaagaaccaccaaaacgcgtgctgcttgttgacggccatcatctggcgtatcgtaccttctacgcactgagccttacgacctcacgtggtgagcctgtccagatggtgtatgggtttgctcgctccctgctgaaagccctgaaggaagatggtcaagccgtagtagtggttttcgatgcgaaagcaccgtcgtttcgtcacgaagcgtacgaggcctataaagctggccgcgcaccgaccccggaagactttccgcgtcagttagcgctcgtcaaacgcctcgtggatttgctgggattagttcgcttggaagctcctggctacgaggcggacgacgtgctcggtacactggccaagaaagcagaacgtgaaggcatggaggtctgcattcttaccggtgatcgcgatttcttccagctgctgtctgagaaagtgagcgttttgctgcccgatggcacgttagtaaccccgaaagatgtccaagagaaatatggagttccgccagaacgttgggtggactttcgcgcactgactggtgatcgttcagacaacatcccgggcgttgccgggattggtgaaaagacggcgctgcgcctgctggcagaatggggctcggtggaaaatctgctcaagaaccttgatcgtgtgaaacctgatagcttacgccgcaagatcgaagcccacctggaagacttgcgtctgagtctggatcttgcgcgtattcgcaccgatctgccgttggaagtagactttaaagctctgcgtcgtcgcacacccgatttagaggggttacgcgcgttcctcgaagaactggagtttggctccctgctgcatgaattcggtttgttgggcggagagaaaccgcgtgaagaagcaccatggccgccgcccgaaggtgcctttgtcggctttcttctgtcacgcaaagagccaatgtgggcggaactgttagctcttgcagccgccgcggaagggcgtgttcaccgcgcgacctctcctgtcgaggccctcgctgacctcaaagaagcacgtggtttcttggcgaaagatttagccgtgcttgcattacgcgaaggcgttgcgctcgatccgacggacgacccgcttttggtggcttatttgctcgatcctgcgaataccaacccggaaggtgtagcccgtcgttacggcggcgagtttactgaagatgcggcagaacgcgcgttgcttagcgaacgcctcttccagacgttatttccacgtctttcggagaaattactctggctctatcaggaagtcgaacgtccattgagtcgcgtgcttgcccatatggaggctcgcggtgtgcgcttagatgttccgttgttagaagcactcagcttcgagttggagaaagaactggaacgtcttgaaggcgaagtctttcgtttagcggggcatcccttcaatctcaactctcgcgaccaattggagaaagtgctctttgatgaattaggtttaacccctatcggacgtacagagaagaccggcaaacgttccacttcggcagccgccttggaagcacttcgtggtgctcacccgatcgtcgaattgattttgcagtaccgcgagctcagcaaactcaaatcaacctatcttgataggttacctcgtcttgttcatccacgtacgggtcgtttacacacccgcttcaatcaaacggcgacagccaccgggcgcttgtcgtcgagtgacccgaacctccagaatattccagtgcgcacgccgttaggccaacgcattcgtaaagcgtttgttgcggaagaaggttggttattacttgcggccgattactcccagatcgaacttcgtgtattggcgcatctctctggcgacgagaatcttaaacgcgtgtttcgcgaaggcaaggatattcacactgaaaccgcagcctggatgttcggggtggacccagccttagtggaccccaagatgcgtcgtgccgccaagaccgtcaactttggcgtactctatggtatgtcagcacatcgtcttagtcaggaattgggcattgactacaaagaagctgaagcgtttatcgagcgctatttccaatcctttccgaaagttcgcgcgtggattgaacgtaccctcgaagaaggtcgcactcgcggctatgtggaaacgttattcgggcgtcgtcgctacgttccagatcttgcatctcgtgtccgctcagtgcgcgaagctgctgagcgtatggccttcaatatgcctgttcagggaacagcggcggacctcatgaagatcgccatggtgaaattgtttccgcgcttgaaacccttaggagcccaccttcttttacaggtgcatgatgaattggtcttggaagtacccgaggatcgcgcagaagaagccaaagcactcgtgaaagaggttatggaaaacgcgtatccgttagatgttccgttggaggtcgaagtgggtgtaggccgtgattggcttgaagcgaaacaagactaatga

SEQ ID NO: 276 - protein, 844 aa, synthetic construct
  REGION 1..844: note = DNA Polymerase Variant
MHHHHHHGGSGMLPLFDLEEPPKRVLLVDGHHLAYRTFYALSLTTSRGEPVQMVYGFARSLLKALKEDGQAVVVVFDAKAPSFRHEAYEAYKAGRAPTPEDFPRQLALVKRLVDLLGLVRLEAPGYEADDVLGTLAKKAEREGMEVCILTGDRDFFQLLSEKVSVLLPDGTLVTPKDVQEKYGVPPERWVDFRALTGDRSDNIPGVAGIGEKTALRLLAEWGSVENLLKNLDRVKPDSLRRKIEAHLEDLRLSLDLARIRTDLPLEVDFKALRRRTPDLEGLRAFLEELEFGSLLHEFGLLGGEKPREEAPWPPPEGAFVGFLLSRKEPMWAELLALAAAAEGRVHRATSPVEALADLKEARGFLAKDLAVLALREGVALDPTDDPLLVAYLLDPANTNPEGVARRYGGEFTEDAAERALLSERLFQTLFPRLSEKLLWLYQEVERPLSRVLAHMEARGVRLDVPLLEALSFELEKELERLEGEVFRLAGHPFNLNSRDQLEKVLFDELGLTPIGRTEKTGKRSTSAAALEALRGAHPIVELILQYRELSKLKSTYLDRLPRLVHPRTGRLHTRFNQTATATGRLSSSDPNLQNIPVRTPLGQRIRKAFVAEEGWLLLAADYSQIELRVLAHLSGDENLKRVFREGKDIHTETAAWMFGVDPALVDPKMRRAAKTVNFGVLYGMSAHRLSQELGIDYKEAEAFIERYFQSFPKVRAWIERTLEEGRTRGYVETLFGRRRYVPDLASRVRSVREAAERMAFNMPVQGTAADLMKIAMVKLFPRLKPLGAHLLLQVHDELVLEVPEDRAEEAKALVKEVMENAYPLDVPLEVEVGVGRDWLEAKQD

SEQ ID NO: 277 - DNA, 2538 bp, synthetic construct
  misc_feature 1..2538: note = DNA Polymerase Variant
  source 1..2538: mol_type = other DNA
atgcaccatcatcatcatcatggcggtagcggcatgttaccgctgtttgatttggaagaaccaccaaaacgcgtgctgcttgttgacggccatcatctggcgtatcgtaccttctacgcactgagccttacgacctcacgtggtgagcctgtccagatggtgtatgggtttgctcgctccctgctgaaagccctgaaggaagatggtcaagccgtagtagtggttttcgatgcgaaagcaccgtcgtttcgtcacgaagcgtacgaggcctataaagctggccgcgcaccgaccccggaagactttccgcgtcagttagcgctcgtcaaacgcctcgtggatttgctgggattagttcgcttggaagctcctggctacgaggcggacgacgtgctcggtacactggccaagaaagcagaacgtgaaggcatggaggtctgcattcttaccggtgatcgcgatttcttccagctgctgtctgagaaagtgagcgttttgctgcccgatggcacgttagtaaccccgaaagatctgcaagagaaatatggagttccgccagaacgttgggtggactttcgcgcactgactggtgatcgttcagacaacatcccgggcgttgccgggattggtgaaaagacggcgctgcgcctgctggcagaatggggctcggtggaaaatctgctcaagaaccttgatcgtgtgaaacctgatagcttacgccgcaagatcgaagcccacctggaagacttgcgtctgagtctggatcttgcgcgtattcgcaccgatctgccgttggaagtagactttaaagctctgcgtcgtcgcacacccgatttagaggggttacgcgcgttcctcgaagaactggagtttggctccctgctgcatgaattcggtttgttgggcggagagaaaccgcgtgaagaagcaccatggccgccgcccgaaggtgcctttgtcggctttcttctgtcacgcaaagagccaatgtgggcggaactgttagctcttgcagccgccgcggaagggcgtgttcaccgcgcgacctctcctgtcgaggccctcgctgacctcaaagaagcacgtggtttcttggcgaaagatttagccgtgcttgcattacgcgaaggcgttgcgctcgatccgacggacgacccgcttttggtggcttatttgctcgatcctgcgaataccaacccggaaggtgtagcccgtcgttacggcggcgagtttactgaagatgcggcagaacgcgcgttgcttagcgaacgcctcttccagacgttatttccacgtctttcggagaaattactctggctctatcaggaagtcgaacgtccattgagtcgcgtgcttgcccatatggaggctcgcggtgtgcgcttagatgttccgttgttagaagcactcagcttcgagttggagaaagaactggaacgtcttgaaggcgaagtctttcgtttagcggggcatcccttcaatctcaactctcgcgaccaattggagaaagtgctctttgatgaattaggtttaacccctatcggacgtacagagaagaccggcaaacgttccacttcggcagccgccttggaagcacttcgtggtgctcacccgatcgtcgaattgattttgcagtaccgcgagctcagcaaactcaaatcaacctatcttgataggttacctcgtcttgttcatccacgtacgggtcgtttacacacccgcttcaatcaaacggcgacagccaccgggcgcttgtcgtcgagtgacccgaacctccagaatattccagtgcgcacgccgttaggccaacgcattcgtaaagcgtttgttgcggaagaaggttggttattacttgcggccgattactcccagatcgaacttcgtgtattggcgcatctctctggcgacgagaatcttaaacgcgtgtttcgcgaaggcaaggatattcacactgaaaccgcagcctggatgttcgggcttgacccagccttagtggaccccaagatgcgtcgtgccgccaagaccgtcaactttggcgtactctatggtatgtcagcacatcgtcttagtcaggaattgggcattgactacaaagaagctgaagcgtttatcgagcgctatttccaatcctttccgaaagttcgcgcgtggattgaacgtaccctcgaagaaggtcgcactcgcggctatgtggaaacgttattcgggcgtcgtcgctacgttccagatcttgcatctcgtgtccgctcagtgcgcgaagctgctgagcgtatggccttcaatatgcctgttcagggaacagcggcggacctcatgaagatcgccatggtgaaattgtttccgcgcttgaaacccttaggagcccaccttcttttacaggtgcatgatgaattggtcttggaagtacccgaggatcgcgcagaagaagccaaagcactcgtgaaagaggttatggaaaacgcgtatccgttagatgttccgttggaggtcgaagtgggtgtaggccgtgattggcttgaagcgaaacaagactaatga

SEQ ID NO: 278 - protein, 844 aa, synthetic construct
  REGION 1..844: note = DNA Polymerase Variant
MHHHHHHGGSGMLPLFDLEEPPKRVLLVDGHHLAYRTFYALSLTTSRGEPVQMVYGFARSLLKALKEDGQAVVVVFDAKAPSFRHEAYEAYKAGRAPTPEDFPRQLALVKRLVDLLGLVRLEAPGYEADDVLGTLAKKAEREGMEVCILTGDRDFFQLLSEKVSVLLPDGTLVTPKDLQEKYGVPPERWVDFRALTGDRSDNIPGVAGIGEKTALRLLAEWGSVENLLKNLDRVKPDSLRRKIEAHLEDLRLSLDLARIRTDLPLEVDFKALRRRTPDLEGLRAFLEELEFGSLLHEFGLLGGEKPREEAPWPPPEGAFVGFLLSRKEPMWAELLALAAAAEGRVHRATSPVEALADLKEARGFLAKDLAVLALREGVALDPTDDPLLVAYLLDPANTNPEGVARRYGGEFTEDAAERALLSERLFQTLFPRLSEKLLWLYQEVERPLSRVLAHMEARGVRLDVPLLEALSFELEKELERLEGEVFRLAGHPFNLNSRDQLEKVLFDELGLTPIGRTEKTGKRSTSAAALEALRGAHPIVELILQYRELSKLKSTYLDRLPRLVHPRTGRLHTRFNQTATATGRLSSSDPNLQNIPVRTPLGQRIRKAFVAEEGWLLLAADYSQIELRVLAHLSGDENLKRVFREGKDIHTETAAWMFGLDPALVDPKMRRAAKTVNFGVLYGMSAHRLSQELGIDYKEAEAFIERYFQSFPKVRAWIERTLEEGRTRGYVETLFGRRRYVPDLASRVRSVREAAERMAFNMPVQGTAADLMKIAMVKLFPRLKPLGAHLLLQVHDELVLEVPEDRAEEAKALVKEVMENAYPLDVPLEVEVGVGRDWLEAKQD

SEQ ID NO: 279 - DNA, 2538 bp, synthetic construct
  misc_feature 1..2538: note = DNA Polymerase Variant
  source 1..2538: mol_type = other DNA
atgcaccatcatcatcatcatggcggtagcggcatgttaccgctgtttgatttggaagaaccaccaaaacgcgtgctgcttgttgacggccatcatctggcgtatcgtaccttctacgcactgagccttacgacctcacgtggtgagcctgtccagatggtgtatgggtttgctcgctccctgctgaaagccctgaaggaagatggtcaagccgtagtagtggttttcgatgcgaaagcaccgtcgtttcgtcacgaagcgtacgaggcctataaagctggccgcgcaccgaccccggaagactttccgcgtcagttagcgctcgtcaaacgcctcgtggatttgctgggattagttcgcttggaagctcctggctacgaggcggacgacgtgctcggtacactggccaagaaagcagaacgtgaaggcatggaggtctgcattcttaccggtgatcgcgatttcttccagctgctgtctgagaaagtgagcgttttgctgcccgatggcacgttagtaaccccgaaagatgtccaagagaaatatggagttccgccagaacgttgggtggactttcgcgcactgactggtgatcgttcagacaacatcccgggcgttgccgggattggtgaaaagacggcgctgcgcctgctggcagaatggggctcggtggaaaatctgctcaagaaccttgatcgtgtgaaacctgatagcttacgccgcaagatcgaagcccacctggaagacttgcgtctgagtctggatcttgcgcgtattcgcaccgatctgccgttggaagtagactttaaagctctgcgtcgtcgcacacccgatttagaggggttacgcgcgttcctcgaagaactggagtttggctccctgctgcatgaattcggtttgttgggcggagagaaaccgcgtgaagaagcaccatggccgccgcccgaaggtgcctttgtcggctttcttctgtcacgcaaagagccaatgtgggcggaactgttagctcttgcagccgccgcggaagggcgtgttcaccgcgcgacctctcctgtcgaggccctcgctgacctcaaagaagcacgtggtttcttggcgaaagatttagccgtgcttgcattacgcgaaggcgttgcgctcgatccgacggacgacccgcttttggtggcttatttgctcgatcctgcgaataccaacccggaatatgtagcccgtcgttacggcggcgagtttactgaagatgcggcagaacgcgcgttgcttagcgaacgcctcttccagacgttatttccacgtctttcggagaaattactctggctctatcaggaagtcgaacgtccattgagtcgcgtgcttgcccatatggaggctcgcggtgtgcgcttagatgttccgttgttagaagcactcagcttcgagttggagaaagaactggaacgtcttgaaggcgaagtctttcgtttagcggggcatcccttcaatctcaactctcgcgaccaattggagaaagtgctctttgatgaattaggtttaacccctatcacgcgtacagagaagaccggcaaacgttccacttcggcagcggccttggaagcacttcgtggtgctcacccgatcgtcgagttgattttgcagtaccgcgagctcagcaaactcaaatcaacctatcttgataggttacctcgtcttgttcatccacgtacgggtcgtttacacacccgcttcaatcaaacggcgacagccaccgggcgcttgtcgtcgagtgacccgaacctccagaatattccagtgcgcacgccgttaggccaacgcattcgtaaagcgtttgttgcggaagaaggttggttattacttgcggccgattactcccagatcgaacttcgtgtattggcgcatctctctggcgacgagaatcttaaacgcgtgtttcgcgaaggcaaggatattcacactgaaaccgcagcctggatgttcgggcttgacccagccttagtggaccccaagatgcgtcgtgccgccaagaccgtcaactttggcgtactctatggtatgtcagcacatcgtcttagtcaggaattgggcattgactacaaagaagctgaagcgtttatcgagcgctatttccaatcctttccgaaagttcgcgcgtggattgaacgtaccctcgaagaaggtcgcactcgcggctatgtggaaacgttattcgggcgtcgtcgctacgttccagatcttgcatctcgtgtccgctcagtgcgcgaagctgctgagcgtatggccttcaatatgcctgttcagggaacagcggcggacctcatgaagatcgccatggtgaaattgtttccgcgcttgaaacccttaggagcccaccttcttttacaggtgcatgatgaattggtcttggaagtacccgaggatcgcgcagaagaagccaaagcactcgtgaaagaggttatggaaaacgcgtatccgttagatgttccgttggaggtcgaagtgggtgtaggccgtgattggcttgaagcgaaacaagactaatga

SEQ ID NO: 280 - protein, 844 aa, synthetic construct
  REGION 1..844: note = DNA Polymerase Variant
MHHHHHHGGSGMLPLFDLEEPPKRVLLVDGHHLAYRTFYALSLTTSRGEPVQMVYGFARSLLKALKEDGQAVVVVFDAKAPSFRHEAYEAYKAGRAPTPEDFPRQLALVKRLVDLLGLVRLEAPGYEADDVLGTLAKKAEREGMEVCILTGDRDFFQLLSEKVSVLLPDGTLVTPKDVQEKYGVPPERWVDFRALTGDRSDNIPGVAGIGEKTALRLLAEWGSVENLLKNLDRVKPDSLRRKIEAHLEDLRLSLDLARIRTDLPLEVDFKALRRRTPDLEGLRAFLEELEFGSLLHEFGLLGGEKPREEAPWPPPEGAFVGFLLSRKEPMWAELLALAAAAEGRVHRATSPVEALADLKEARGFLAKDLAVLALREGVALDPTDDPLLVAYLLDPANTNPEYVARRYGGEFTEDAAERALLSERLFQTLFPRLSEKLLWLYQEVERPLSRVLAHMEARGVRLDVPLLEALSFELEKELERLEGEVFRLAGHPFNLNSRDQLEKVLFDELGLTPITRTEKTGKRSTSAAALEALRGAHPIVELILQYRELSKLKSTYLDRLPRLVHPRTGRLHTRFNQTATATGRLSSSDPNLQNIPVRTPLGQRIRKAFVAEEGWLLLAADYSQIELRVLAHLSGDENLKRVFREGKDIHTETAAWMFGLDPALVDPKMRRAAKTVNFGVLYGMSAHRLSQELGIDYKEAEAFIERYFQSFPKVRAWIERTLEEGRTRGYVETLFGRRRYVPDLASRVRSVREAAERMAFNMPVQGTAADLMKIAMVKLFPRLKPLGAHLLLQVHDELVLEVPEDRAEEAKALVKEVMENAYPLDVPLEVEVGVGRDWLEAKQD

SEQ ID NO: 281 - DNA, 2538 bp, synthetic construct
  misc_feature 1..2538: note = DNA Polymerase Variant
  source 1..2538: mol_type = other DNA
atgcaccatcatcatcatcatggcggtagcggcatgttaccgctgtttgatttggaagaaccaccaaaacgcgtgctgcttgttgacggccatcatctggcgtatcgtaccttctacgcactgagccttacgacctcacgtggtgagcctgtccagatggtgtatgggtttgctcgctccctgctgaaagccctgaaggaagatggtcaagccgtagtagtggttttcgatgcgaaagcaccgtcgtttcgtcacgaagcgtacgaggcctataaagctggccgcgcaccgaccccggaagactttccgcgtcagttagcgctcgtcaaacgcctcgtggatttgctgggattagttcgcttggaagctcctggctacgaggcggacgacgtgctcggtacactggccaagaaagcagaacgtgaaggcatggaggtctgcattcttaccggtgatcgcgatttcttccagctgctgtctgagaaagtgagcgttttgctgcccgatggcacgttagtaaccccgaaagatgtccaagagaaatatggagttccgccagaacgttgggtggactttcgcgcactgactggtgatcgttcagacaacatcccgggcgttgccgggattggtgaaaagacggcgctgcgcctgctggcagaatggggctcggtggaaaatctgctcaagaaccttgatcgtgtgaaacctgatagcttacgccgcaagatcgaagcccacctggaagacttgcgtctgagtctggatcttgcgcgtattcgcaccgatctgccgttggaagtagactttaaagctctgcgtcgtcgcacacccgatttagaggggttacgcgcgttcctcgaagaactggagtttggctccctgctgcatgaattcggtttgttgggcggagagaaaccgcgtgaagaagcaccatggccgccgcccgaaggtgcctttgtcggctttcttctgtcacgcaaagagccaatgtgggcggaactgttagctcttgcagccgccgcggaagggcgtgttcaccgcgcgacctctcctgtcgaggccctcgctgacctcaaagaagcacgtggtttcttggcgaaagatttagccgtgcttgcattacgcgaatgcgttgcgctcgatccgacggacgacccgcttttggtggcttatttgctcgatcctgcgaataccaacccggaaggtgtagcccgtcgttacggcggcgagtttactgaagatgcggcagaacgcgcgttgcttagcgaacgcctcttccagacgttatttccacgtctttcggagaaattactctggctctatcaggaagtcgaacgtccattgagtcgcgtgcttgcccatatggaggctcgcggtgtgcgcttagatgttccgttgttagaagcactcagcttcgagttggagaaagaactggaacgtcttgaaggcgaagtctttcgtttagcggggcatcccttcaatctcaactctcgcgaccaattggagaaagtgctctttgatgaattaggtttaacccctatcacgcgtacagagaagaccggcaaacgttccacttcggcagccgccttggaagcacttcgtggtgctcacccgatcgtcgaattgattttgcagtaccgcgagctcagcaaactcaaatcaacctatcttgataggttacctcgtcttgttcatccacgtacgggtcgtttacacacccgcttcaatcaaacggcgacagccaccgggcgcttgtcgtcgagtgacccgaacctccagaatattccagtgcgcacgccgctgggccaacgcattcgtaaagcgtttgttgcggaagaaggttggttattacttgcggccgattactcccagatcgaacttcgtgtattggcgcatctctctggcgacgagaatcttaaacgcgtgtttcgcgaaggcaaggatattcacactgaaaccgcagcctggatgttcgggcttgacccagccttagtggaccccaagatgcgtcgtgccgccaagaccgtcaactttggcgtactctatggtatgtcagcacatcgtcttagtcaggaattgggcattgactacaaagaagctgaagcgtttatcgagcgctatttccaatcctttccgaaagttcgcgcgtggattgaacgtaccctcgaagaaggtcgcactcgcggctatgtggaaacgttattcgggcgtcgtcgctacgttccagatcttgcatctcgtgtccgctcagtgcgcgaagctgctgagcgtatggcctttaatatgcctgttcagggaacagcggcggacctcatgaagatcgccatggtgaaattgtttccgcgcttgaaacccttaggagcccaccttcttttacaggtgcatgatgaattggtcttggaagtacccgaggatcgcgcagaagaagccaaagcactcgtgaaagaggttatggaaaacgcgtatccgttagatgttccgttggaggtcgaagtgggtgtaggccgtgattggcttgaagcgaaacaagactaatga

SEQ ID NO: 282 - protein, 844 aa, synthetic construct
  REGION 1..844: note = DNA Polymerase Variant
MHHHHHHGGSGMLPLFDLEEPPKRVLLVDGHHLAYRTFYALSLTTSRGEPVQMVYGFARSLLKALKEDGQAVVVVFDAKAPSFRHEAYEAYKAGRAPTPEDFPRQLALVKRLVDLLGLVRLEAPGYEADDVLGTLAKKAEREGMEVCILTGDRDFFQLLSEKVSVLLPDGTLVTPKDVQEKYGVPPERWVDFRALTGDRSDNIPGVAGIGEKTALRLLAEWGSVENLLKNLDRVKPDSLRRKIEAHLEDLRLSLDLARIRTDLPLEVDFKALRRRTPDLEGLRAFLEELEFGSLLHEFGLLGGEKPREEAPWPPPEGAFVGFLLSRKEPMWAELLALAAAAEGRVHRATSPVEALADLKEARGFLAKDLAVLALRECVALDPTDDPLLVAYLLDPANTNPEGVARRYGGEFTEDAAERALLSERLFQTLFPRLSEKLLWLYQEVERPLSRVLAHMEARGVRLDVPLLEALSFELEKELERLEGEVFRLAGHPFNLNSRDQLEKVLFDELGLTPITRTEKTGKRSTSAAALEALRGAHPIVELILQYRELSKLKSTYLDRLPRLVHPRTGRLHTRFNQTATATGRLSSSDPNLQNIPVRTPLGQRIRKAFVAEEGWLLLAADYSQIELRVLAHLSGDENLKRVFREGKDIHTETAAWMFGLDPALVDPKMRRAAKTVNFGVLYGMSAHRLSQELGIDYKEAEAFIERYFQSFPKVRAWIERTLEEGRTRGYVETLFGRRRYVPDLASRVRSVREAAERMAFNMPVQGTAADLMKIAMVKLFPRLKPLGAHLLLQVHDELVLEVPEDRAEEAKALVKEVMENAYPLDVPLEVEVGVGRDWLEAKQD

SEQ ID NO: 283 - DNA, 2538 bp, synthetic construct
  misc_feature 1..2538: note = DNA Polymerase Variant
  source 1..2538: mol_type = other DNA
atgcaccatcatcatcatcatggcggtagcggcatgttaccgctgtttgatttggaagaaccaccaaaacgcgtgctgcttgttgacggccatcatctggcgtatcgtaccttctacgcactgagccttacgacctcacgtggtgagcctgtccagatggtgtatgggtttgctcgctccctgctgaaagccctgaaggaagatggtcaagccgtagtagtggttttcgatgcgaaagcaccgtcgtttcgtcacgaagcgtacgaggcctataaagctggccgcgcaccgaccccggaagactttccgcgtcagttagcgctcgtcaaacgcctcgtggatttgctgggattagttcgcttggaagctcctggctacgaggcggacgacgtgctcggtacactggccaagaaagcagaacgtgaaggcatggaggtctgcattcttaccggtgatcgcgatttcttccagctgctgtctgagaaagtgagcgttttgctgcccgatggcacgttagtaaccccgaaagatgtccaagagaaatatggagttccgccagaacgttgggtggactttcgcgcactgactggtgatcgttcagacaacatcccgggcgttgccgggattggtgaaaagacggcgctgcgcctgctggcagaatggggctcggtggaaaatctgctcaagaaccttgatcgtgtgaaacctgatagcttacgccgcaagatcgaagcccacctggaagacttgcgtctgagtctggatcttgcgcgtattcgcaccgatctgccgttggaagtagactttaaagctctgcgtcgtcgcacacccgatttagaggggttacgcgcgttcctcgaagaactggagtttggctccctgctgcatgaattcggtttgttgggcggagagaaaccgcgtgaagaagcaccatggccgccgcccgaaggtgcctttgtcggctttcttctgtcacgcaaagagccaatgtgggcggaactgttagctcttgcagccgccgcggaagggcgtgttcaccgcgcgacctctcctgtcgaggccctcgctgacctcaaagaagcacgtggtttcttggcgaaagatttagccgtgcttgcattacgcgaaggcgttgcgctcgatccgacggacgacccgcttttggtggcttatttgctcgatcctgcgaataccaacccggaaggtgtagcccgtcgttacggcggcgagtttactgaagatgcggcagaacgcgcgttgcttagcgaacgcctcttccagacgttatttccacgtctttcggagaaattactctggctctatcaggaagtcgaacgtccattgagtcgcgtgcttgcccatatggaggctcgcggtgtgcgcttagatgttccgttgttagaagcactcagcttcgagttggagaaagaactggaacgtcttgaaggcgaagtctttcgtttagcggggcatcccttcaatctcaactctcgcgaccaattggagaaagtgctctttgatgaattaggtttaacccctatcacgcgtacagagaagaccggcaaacgttccacttcggcagccgccttggaagcacttcgtggtgctcacccgatcgtcgaattgattttgcagtaccgcgagctcagcaaactcaaatcaacctatcttgataggttacctcgtcttgttcatccacgtacgggtcgtttacacacccgcttcaatcaaacggcgacagccaccgggcgcttgtcgtcgagtgacccgaacctccagaatattccagtgcgcacgccgttaggccaacgcattcgtaaagcgtttgttgcggaagaaggttggttattacttgcggccgattactcccagatcgaacttcgtgtattggcgcatctctctggcgacgagaatcttaaacgcgtgtttcgcgaaggcaaggatattcacactgaaaccgcagcctggatgttcgggcttgacccagccttagtggaccccaagatgcgtcgtgccgccaagaccgtcaactttggcgtactctatggtatgtcagcacatcgtcttagtcaggaattgggcattgactacaaagaagctgaagcgtttatcgagcgctatttccaatcctttccgaaagttcgcgcgtggattgaacgtaccctcgaagaaggtcgcactcgcggctatgtggaaacgttattcgggcgtcgtcgctacgttccagatcttgcatctcgtgtccgctcagtgcgcgaagctgctgagcgtatggccttcaatatgcctgttcagggaacagcggcggacctcatgaagatcgccatggtgaaattgtttccgcgcttgaaacccttaggagcccaccttcttttacaggtgcatgatgaattggtcttggaagtacccgaggatcgcgcagaagaagccaaagcactcgtgaaagaggttatggaaaacgcgtatccgttagatgttccgttggaggtcgaagtgggtgtaggccgtgattggcttgaagcgaaacaagactaatga

SEQ ID NO: 284 - protein, 844 aa, synthetic construct
  REGION 1..844: note = DNA Polymerase Variant
MHHHHHHGGSGMLPLFDLEEPPKRVLLVDGHHLAYRTFYALSLTTSRGEPVQMVYGFARSLLKALKEDGQAVVVVFDAKAPSFRHEAYEAYKAGRAPTPEDFPRQLALVKRLVDLLGLVRLEAPGYEADDVLGTLAKKAEREGMEVCILTGDRDFFQLLSEKVSVLLPDGTLVTPKDVQEKYGVPPERWVDFRALTGDRSDNIPGVAGIGEKTALRLLAEWGSVENLLKNLDRVKPDSLRRKIEAHLEDLRLSLDLARIRTDLPLEVDFKALRRRTPDLEGLRAFLEELEFGSLLHEFGLLGGEKPREEAPWPPPEGAFVGFLLSRKEPMWAELLALAAAAEGRVHRATSPVEALADLKEARGFLAKDLAVLALREGVALDPTDDPLLVAYLLDPANTNPEGVARRYGGEFTEDAAERALLSERLFQTLFPRLSEKLLWLYQEVERPLSRVLAHMEARGVRLDVPLLEALSFELEKELERLEGEVFRLAGHPFNLNSRDQLEKVLFDELGLTPITRTEKTGKRSTSAAALEALRGAHPIVELILQYRELSKLKSTYLDRLPRLVHPRTGRLHTRFNQTATATGRLSSSDPNLQNIPVRTPLGQRIRKAFVAEEGWLLLAADYSQIELRVLAHLSGDENLKRVFREGKDIHTETAAWMFGLDPALVDPKMRRAAKTVNFGVLYGMSAHRLSQELGIDYKEAEAFIERYFQSFPKVRAWIERTLEEGRTRGYVETLFGRRRYVPDLASRVRSVREAAERMAFNMPVQGTAADLMKIAMVKLFPRLKPLGAHLLLQVHDELVLEVPEDRAEEAKALVKEVMENAYPLDVPLEVEVGVGRDWLEAKQD

SEQ ID NO: 285 - DNA, 2538 bp, synthetic construct
  misc_feature 1..2538: note = DNA Polymerase Variant
  source 1..2538: mol_type = other DNA
atgcaccatcatcatcatcatggcggtagcggcatgttaccgctgtttgatttggaagaaccaccaaaacgcgtgctgcttgttgacggccatcatctggcgtatcgtaccttctacgcactgagccttacgacctcacgtggtgagcctgtccagatggtgtatgggtttgctcgctccctgctgaaagccctgaaggaagatggtcaagccgtagtagtggttttcgatgcgaaagcaccgtcgtttcgtcacgaagcgtacgaggcctataaagctggccgcgcaccgaccccggaagactttccgcgtcagttagcgctcgtcaaacgcctcgtggatttgctgggattagttcgcttggaagctcctggctacgaggcggacgacgtgctcggtacactggccaagaaagcagaacgtgaaggcatggaggtctgcattcttaccggtgatcgcgatttcttccagctgctgtctgagaaagtgagcgttttgctgcccgatggcacgttagtaaccccgaaagatgtccaagagaaatatggagttccgccagaacgttgggtggactttcgcgcactgactggtgatcgttcagacaacatcccgggcgttgccgggattggtgaaaagacggcgctgcgcctgctggcagaatggggctcggtggaaaatctgctcaagaaccttgatcgtgtgaaacctgatagcttacgccgcaagatcgaagcccacctggaagacttgcgtctgagtctggatcttgcgcgtattcgcaccgatctgccgttggaagtagactttaaagctctgcgtcgtcgcacacccgatttagaggggttacgcgcgttcctcgaagaactggagtttggctccctgctgcatgaattcggtttgttgggcggagagaaaccgcgtgaagaagcaccatggccgccgcccgaaggtgcctttgtcggctttcttctgtcacgcaaagagccaatgtgggcggaactgttagctcttgcagccgccgcggaagggcgtgttcaccgcgcgacctctcctgtcgaggccctcgctgacctcaaagaagcacgtggtttcttggcgaaagatttagccgtgcttgcattacgcgaaggcgttgcgctcgatccgacggacgacccgcttttggtggcttatttgctcgatcctgcgaataccaacccggaaggtgtagcccgtcgttacggcggcgagtttactgaagatgcggcagaacgcgcgttgcttagcgaacgcctcttccagacgttatttccacgtctttcggagaaattactctggctctatcaggaagtcgaacgtccattgagtcgcgtgcttgcccatatggaggctcgcggtgtgcgcttagatgttccgttgttagaagcactcagcttcgagttggagaaagaactggaacgtcttgaaggcgaagtctttcgtttagcggggcatcccttcaatctcaactctcgcgaccaattggagaaagtgctctttgatgaattaggtttaacccctgtcacgcgtacagagaagaccggcaaacgttccacttcggcagccgccttggaagcacttcgtggtgctcacccgatcgtcgaattgattttgcagtaccgcgagctcagcaaactcaaatcaacctatcttgataggttacctcgtcttgttcatccacgtacgggtcgtttacacacccgcttcaatcaaacggcgacagccaccgggcgcttgtcgtcgagtgacccgaacctccagaatattccagtgcgcacgccgttaggccaacgcattcgtaaagcgtttgttgcggaagaaggttggttattacttgcggccgattactcccagatcgaacttcgtgtattggcgcatctctctggcgacgagaatcttaaacgcgtgtttcgcgaaggcaaggatattcacactgaaaccgcagcctggatgttcgggcttgacccagccttagtggaccccaagatgcgtcgtgccgccaagaccgtcaactttggcgtactctatggtatgtcagcacatcgtcttagtcaggaattgggcattgactacaaagaagctgaagcgtttatcgagcgctatttccaatcctttccgaaagttcgcgcgtggattgaacgtaccctcgaagaaggtcgcactcgcggctatgtggaaacgttattcgggcgtcgtcgctacgttccagatcttgcatctcgtgtccgctcagtgcgcgaagctgctgagcgtatggccttcaatatgcctgttcagggaacagcggcggacctcatgaagatcgccatggtgaaattgtttccgcgcttgaaacccttaggagcccaccttcttttacaggtgcatgatgaattggtcttggaagtacccgaggatcgcgcagaagaagccaaagcactcgtgaaagaggttatggaaaacgcgtatccgttagatgttccgttggaggtcgaagtgggtgtaggccgtgattggcttgaagcgaaacaagactaatga

SEQ ID NO: 286 - protein, 844 aa, synthetic construct
  REGION 1..844: note = DNA Polymerase Variant
MHHHHHHGGSGMLPLFDLEEPPKRVLLVDGHHLAYRTFYALSLTTSRGEPVQMVYGFARSLLKALKEDGQAVVVVFDAKAPSFRHEAYEAYKAGRAPTPEDFPRQLALVKRLVDLLGLVRLEAPGYEADDVLGTLAKKAEREGMEVCILTGDRDFFQLLSEKVSVLLPDGTLVTPKDVQEKYGVPPERWVDFRALTGDRSDNIPGVAGIGEKTALRLLAEWGSVENLLKNLDRVKPDSLRRKIEAHLEDLRLSLDLARIRTDLPLEVDFKALRRRTPDLEGLRAFLEELEFGSLLHEFGLLGGEKPREEAPWPPPEGAFVGFLLSRKEPMWAELLALAAAAEGRVHRATSPVEALADLKEARGFLAKDLAVLALREGVALDPTDDPLLVAYLLDPANTNPEGVARRYGGEFTEDAAERALLSERLFQTLFPRLSEKLLWLYQEVERPLSRVLAHMEARGVRLDVPLLEALSFELEKELERLEGEVFRLAGHPFNLNSRDQLEKVLFDELGLTPVTRTEKTGKRSTSAAALEALRGAHPIVELILQYRELSKLKSTYLDRLPRLVHPRTGRLHTRFNQTATATGRLSSSDPNLQNIPVRTPLGQRIRKAFVAEEGWLLLAADYSQIELRVLAHLSGDENLKRVFREGKDIHTETAAWMFGLDPALVDPKMRRAAKTVNFGVLYGMSAHRLSQELGIDYKEAEAFIERYFQSFPKVRAWIERTLEEGRTRGYVETLFGRRRYVPDLASRVRSVREAAERMAFNMPVQGTAADLMKIAMVKLFPRLKPLGAHLLLQVHDELVLEVPEDRAEEAKALVKEVMENAYPLDVPLEVEVGVGRDWLEAKQD

SEQ ID NO: 287 - DNA, 2538 bp, synthetic construct
  misc_feature 1..2538: note = DNA Polymerase Variant
  source 1..2538: mol_type = other DNA
atgcaccatcatcatcatcatggcggtagcggcatgttaccgctgtttgatttggaagaaccaccaaaacgcgtgctgcttgttgacggccatcatctggcgtatcgtaccttctacgcactgagccttacgacctcacgtggtgagcctgtccagatggtgtatgggtttgctcgctccctgctgaaagccctgaaggaagatggtcaagccgtagtagtggttttcgatgcgaaagcaccgtcgtttcgtcacgaagcgtacgaggcctataaagctggccgcgcaccgaccccggaagactttccgcgtcagttagcgctcgtcaaacgcctcgtggatttgctgggattagttcgcttggaagctcctggctacgaggcggacgacgtgctcggtacactggccaagaaagcagaacgtgaaggcatggaggtctgcattcttaccggtgatcgcgatttcttccagctgctgtctgagaaagtgagcgttttgctgcccgatggcacgttagtaaccccgaaagatgtccaagagaaatatggagttccgccagaacgttgggtggactttcgcgcactgactggtgatcgttcagacaacatcccgggcgttgccgggattggtgaaaagacggcgctgcgcctgctggcagaatggggctcggtggaaaatctgctcaagaaccttgatcgtgtgaaacctgatagcttacgccgcaagatcgaagcccacctggaagacttgcgtctgagtctggatcttgcgcgtattcgcaccgatctgccgttggaagtagactttaaagctctgcgtcgtcgcacacccgatttagaggggttacgcgcgttcctcgaagaactggagtttggctccctgctgcatgaattcggtttgttgggcggagagaaaccgcgtgaagaagcaccatggccgccgcccgaaggtgcctttgtcggctttcttctgtcacgcaaagagccaatgtgggcggaactgttagctcttgcagccgccgcggaagggcgtgttcaccgcgcgacctctcctgtcgaggccctcgctgacctcaaagaagcacgtggtttcttggcgaaagatttagccgtgcttgcattacgcgaaggcgttgcgctcgatccgacggacgacccgcttttggtggcttatttgctcgatcctgcgaataccaacccggaatatgtagcccgtcgttacggcggcgagtttactgaagatgcggcagaacgcgcgttgcttagcgaacgcctcttccagacgttatttccacgtctttcggagaaattactctggctctatcaggaagtcgaacgtccattgagtcgcgtgcttgcccatatggaggctcgcggtgtgcgcttagatgttccgttgttagaagcactcagcttcgagttggagaaagaactggaacgtcttgaaggcgaagtctttcgtttagcggggcatcccttcaatctcaactctcgcgaccaattggagaaagtgctctttgatgaattaggtttaacccctatcggacgtacagagaagaccggcaaacgttccacttcggcagccgccttggaagcacttcgtggtgctcacccgatcgtcgaattgattttgcagtaccgcgagctcagcaaactcaaatcaacctatcttgataggttacctcgtcttgttcatccacgtacgggtcgtttacacacccgcttcaatcaaacggcgacagccaccgggcgcttgtcgtcgagtgacccgaacctccagaatattccagtgcgcacgccgttaggccaacgcattcgtaaagcgtttgttgcggaagaaggttggttattacttgcggccgattactcccagatcgaacttcgtgtattggcgcatctctctggcgacgagaatcttaaacgcgtgtttcgcgaaggcaaggatattcacactgaaaccgcagcctggatgttcgggcttgacccagccttagtggaccccaagatgcgtcgtgccgccaagaccgtcaactttggcgtactctatggtatgtcagcacatcgtcttagtcaggaattgggcattgactacaaagaagctgaagcgtttatcgagcgctatttccaatcctttccgaaagttcgcgcgtggattgaacgtaccctcgaagaaggtcgcactcgcggctatgtggaaacgttattcgggcgtcgtcgctacgttccagatcttgcatctcgtgtccgctcagtgcgcgaagctgctgagcgtatggccttcaatatgcctgttcagggaacagcggcggacctcatgaagatcgccatggtgaaattgtttccgcgcttgaaacccttaggagcccaccttcttttacaggtgcatgatgaattggtcttggaagtacccgaggatcgcgcagaagaagccaaagcactcgtgaaagaggttatggaaaacgcgtatccgttagatgttccgttggaggtcgaagtgggtgtaggccgtgattggcttgaagcgaaacaagactaatga

SEQ ID NO: 288 - protein, 844 aa, synthetic construct
  REGION 1..844: note = DNA Polymerase Variant
MHHHHHHGGSGMLPLFDLEEPPKRVLLVDGHHLAYRTFYALSLTTSRGEPVQMVYGFARSLLKALKEDGQAVVVVFDAKAPSFRHEAYEAYKAGRAPTPEDFPRQLALVKRLVDLLGLVRLEAPGYEADDVLGTLAKKAEREGMEVCILTGDRDFFQLLSEKVSVLLPDGTLVTPKDVQEKYGVPPERWVDFRALTGDRSDNIPGVAGIGEKTALRLLAEWGSVENLLKNLDRVKPDSLRRKIEAHLEDLRLSLDLARIRTDLPLEVDFKALRRRTPDLEGLRAFLEELEFGSLLHEFGLLGGEKPREEAPWPPPEGAFVGFLLSRKEPMWAELLALAAAAEGRVHRATSPVEALADLKEARGFLAKDLAVLALREGVALDPTDDPLLVAYLLDPANTNPEYVARRYGGEFTEDAAERALLSERLFQTLFPRLSEKLLWLYQEVERPLSRVLAHMEARGVRLDVPLLEALSFELEKELERLEGEVFRLAGHPFNLNSRDQLEKVLFDELGLTPIGRTEKTGKRSTSAAALEALRGAHPIVELILQYRELSKLKSTYLDRLPRLVHPRTGRLHTRFNQTATATGRLSSSDPNLQNIPVRTPLGQRIRKAFVAEEGWLLLAADYSQIELRVLAHLSGDENLKRVFREGKDIHTETAAWMFGLDPALVDPKMRRAAKTVNFGVLYGMSAHRLSQELGIDYKEAEAFIERYFQSFPKVRAWIERTLEEGRTRGYVETLFGRRRYVPDLASRVRSVREAAERMAFNMPVQGTAADLMKIAMVKLFPRLKPLGAHLLLQVHDELVLEVPEDRAEEAKALVKEVMENAYPLDVPLEVEVGVGRDWLEAKQD

SEQ ID NO: 289 - DNA, 2538 bp, synthetic construct
  misc_feature 1..2538: note = DNA Polymerase Variant
  source 1..2538: mol_type = other DNA
atgcaccatcatcatcatcatggcggtagcggcatgttaccgctgtttgatttggaagaaccaccaaaacgcgtgctgcttgttgacggccatcatctggcgtatcgtaccttctacgcactgagccttacgacctcacgtggtgagcctgtccagatggtgtatgggtttgctcgctccctgctgaaagccctgaaggaagatggtcaagccgtagtagtggttttcgatgcgaaagcaccgtcgtttcgtcacgaagcgtacgaggcctataaagctggccgcgcaccgaccccggaagactttccgcgtcagttagcgctcgtcaaacgcctcgtggatttgctgggattagttcgcttggaagctcctggctacgaggcggacgacgtgctcggtacactggccaagaaagcagaacgtgaaggcatggaggtctgcattcttaccggtgatcgcgatttcttccagctgctgtctgagaaagtgagcgttttgctgcccgatggcacgttagtaaccccgaaagatgtccaagagaaatatggagttccgccagaacgttgggtggactttcgcgcactgactggtgatcgttcagacaacatcccgggcgttgccgggattggtgaaaagacggcgctgcgcctgctggcagaatggggctcggtggaaaatctgctcaagaaccttgatcgtgtgaaacctgatagcttacgccgcaagatcgaagcccacctggaagacttgcgtctgagtctggatcttgcgcgtattcgcaccgatctgccgttggaagtagactttaaagctctgcgtcgtcgcacacccgatttagaggggttacgcgcgttcctcgaagaactggagtttggctccctgctgcatgaattcggtttgttgggcggagagaaaccgcgtgaagaagcaccatggccgccgcccgaaggtgcctttgtcggctttcttctgtcacgcaaagagccaatgtgggcggaactgttagctcttgcagccgccgcggaagggcgtgttcaccgcgcgacctctcctgtcgaggccctcgctgacctcaaagaagcacgtggtttcttggcgaaagatttagccgtgcttgcattacgcgaaggcgttgcgctcgatccgacggacgacccgcttttggtggcttatttgctcgatcctgcgaataccaacccggaaggtgtagcccgtcgttacggcggcgagtttactgaagatgcggcagaacgcgcgttgcttagcgaacgcctcttccagacgttatttccacgtctttcggagaaattactctggctctatcaggaagtcgaacgtccattgagtcgcgtgcttgcccatatggaggctcgcggtgtgcgcttagatgttccgttgttagaagcactcagcttcgagttggagaaagaactggaacgtcttgaaggcgaagtctttcgtttagcggggcatcccttcaatctcaactctcgcgaccaattggagcgcgtgctctttgatgaattaggtttaacccctatcggacgtacagagaagaccggcaaacgttccacttcggcagccgccttggaagcacttcgtggtgctcacccgatcgtcgaattgattttgcagtaccgcgagctcagcaaactcaaatcaacctatcttgataggttacctcgtcttgttcatccacgtacgggtcgtttacacacccgcttcaatcaaacggcgacagccaccgggcgcttgtcgtcgagtgacccgaacctccagaatattccagtgcgcacgccgttaggccaacgcattcgtaaagcgtttgttgcggaagaaggttggttattacttgcggccgattactcccagatcgaacttcgtgtattggcgcatctctctggcgacgagaatcttaaacgcgtgtttcgcgaaggcaaggatattcacactgaaaccgcagcctggatgttcgggcttgacccagccttagtggaccccaagatgcgtcgtgccgccaagaccgtcaactttggcgtactctatggtatgtcagcacatcgtcttagtcaggaattgggcattgactacaaagaagctgaagcgtttatcgagcgctatttccaatcctttccgaaagttcgcgcgtggattgaacgtaccctcgaagaaggtcgcactcgcggctatgtggaaacgttattcgggcgtcgtcgctacgttccagatcttgcatctcgtgtccgctcagtgcgcgaagctgctgagcgtatggccttcaatatgcctgttcagggaacagcggcggacctcatgaagatcgccatggtgaaattgtttccgcgcttgaaacccttaggagcccaccttcttttacaggtgcatgatgaattggtcttggaagtacccgaggatcgcgcagaagaagccaaagcactcgtgaaagaggttatggaaaacgcgtatccgttagatgttccgttggaggtcgaagtgggtgtaggccgtgattggcttgaagcgaaacaagactaatga

SEQ ID NO: 290 - protein, 844 aa, synthetic construct
  REGION 1..844: note = DNA Polymerase Variant
MHHHHHHGGSGMLPLFDLEEPPKRVLLVDGHHLAYRTFYALSLTTSRGEPVQMVYGFARSLLKALKEDGQAVVVVFDAKAPSFRHEAYEAYKAGRAPTPEDFPRQLALVKRLVDLLGLVRLEAPGYEADDVLGTLAKKAEREGMEVCILTGDRDFFQLLSEKVSVLLPDGTLVTPKDVQEKYGVPPERWVDFRALTGDRSDNIPGVAGIGEKTALRLLAEWGSVENLLKNLDRVKPDSLRRKIEAHLEDLRLSLDLARIRTDLPLEVDFKALRRRTPDLEGLRAFLEELEFGSLLHEFGLLGGEKPREEAPWPPPEGAFVGFLLSRKEPMWAELLALAAAAEGRVHRATSPVEALADLKEARGFLAKDLAVLALREGVALDPTDDPLLVAYLLDPANTNPEGVARRYGGEFTEDAAERALLSERLFQTLFPRLSEKLLWLYQEVERPLSRVLAHMEARGVRLDVPLLEALSFELEKELERLEGEVFRLAGHPFNLNSRDQLERVLFDELGLTPIGRTEKTGKRSTSAAALEALRGAHPIVELILQYRELSKLKSTYLDRLPRLVHPRTGRLHTRFNQTATATGRLSSSDPNLQNIPVRTPLGQRIRKAFVAEEGWLLLAADYSQIELRVLAHLSGDENLKRVFREGKDIHTETAAWMFGLDPALVDPKMRRAAKTVNFGVLYGMSAHRLSQELGIDYKEAEAFIERYFQSFPKVRAWIERTLEEGRTRGYVETLFGRRRYVPDLASRVRSVREAAERMAFNMPVQGTAADLMKIAMVKLFPRLKPLGAHLLLQVHDELVLEVPEDRAEEAKALVKEVMENAYPLDVPLEVEVGVGRDWLEAKQD

SEQ ID NO: 291 - DNA, 2538 bp, synthetic construct
  misc_feature 1..2538: note = DNA Polymerase Variant
  source 1..2538: mol_type = other DNA
atgcaccatcatcatcatcatggcggtagcggcatgttaccgctgtttgatttggaagaaccaccaaaacgcgtgctgcttgttgacggccatcatctggcgtatcgtaccttctacgcactgagccttacgacctcacgtggtgagcctgtccagatggtgtatgggtttgctcgctccctgctgaaagccctgaaggaagatggtcaagccgtagtagtggttttcgatgcgaaagcaccgtcgtttcgtcacgaagcgtacgaggcctataaagctggccgcgcaccgaccccggaagactttccgcgtcagttagcgctcgtcaaacgcctcgtggatttgctgggattagttcgcttggaagctcctggctacgaggcggacgacgtgctcggtacactggccaagaaagcagaacgtgaaggcatggaggtctgcattcttaccggtgatcgcgatttcttccagctgctgtctgagaaagtgagcgttttgctgcccgatggcacgttagtaaccccgaaagatgtccaagagaaatatggagttccgccagaacgttgggtggactttcgcgcactgactggtgatcgttcagacaacatcccgggcgttgccgggattggtgaaaagacggcgctgcgcctgctggcagaatggggctcggtggaaaatctgctcaagaaccttgatcgtgtgaaacctgatagcgttcgccgcaagatcgaagcccacctggaagacttgcgtctgagtctggatcttgcgcgtattcgcaccgatctgccgttggaagtagactttaaagctctgcgtcgtcgcacacccgatttagaggggttacgcgcgttcctcgaagaactggagtttggctccctgctgcatgaattcggtttgttgggcggagagaaaccgcgtgaagaagcaccatggccgccgcccgaaggtgcctttgtcggctttcttctgtcacgcaaagagccaatgtgggcggaactgttagctcttgcagccgccgcggaagggcgtgttcaccgcgcgacctctcctgtcgaggccctcgctgacctcaaagaagcacgtggtttcttggcgaaagatttagccgtgcttgcattacgcgaaggcgttgcgctcgatccgacggacgacccgcttttggtggcttatttgctcgatcctgcgaataccaacccggaaggtgtagcccgtcgttacggcggcgagtttactgaagatgcggcagaacgcgcgttgcttagcgaacgcctcttccagacgttatttccacgtctttcggagaaattactctggctctatcaggaagtcgaacgtccattgagtcgcgtgcttgcccatatggaggctcgcggtgtgcgcttagatgttccgttgttagaagcactcagcttcgagttggagaaagaactggaacgtcttgaaggcgaagtctttcgtttagcggggcatcccttcaatctcaactctcgcgaccaattggagaaagtgctctttgatgaattaggtttaacccctatcggacgtacagagaagaccggcaaacgttccacttcggcagccgccttggaagcacttcgtggtgctcacccgatcgtcgaattgattttgcagtaccgcgagctcagcaaactcaaatcaacctatcttgataggttacctcgtcttgttcatccacgtacgggtcgtttacacacccgcttcaatcaaacggcgacagccaccgggcgcttgtcgtcgagtgacccgaacctccagaatattccagtgcgcacgccgttaggccaacgcattcgtaaagcgtttgttgcggaagaaggttggttattacttgcggccgattactcccagatcgaacttcgtgtattggcgcatctctctggcgacgagaatcttaaacgcgtgtttcgcgaaggcaaggatattcacactgaaaccgcagcctggatgttcgggcttgacccagccttagtggaccccaagatgcgtcgtgccgccaagaccgtcaactttggcgtactctatggtatgtcagcacatcgtcttagtcaggaattgggcattgactacaaagaagctgaagcgtttatcgagcgctatttccaatcctttccgaaagttcgcgcgtggattgaacgtaccctcgaagaaggtcgcactcgcggctatgtggaaacgttattcgggcgtcgtcgctacgttccagatcttgcatctcgtgtccgctcagtgcgcgaagctgctgagcgtatggccttcaatatgcctgttcagggaacagcggcggacctcatgaagatcgccatggtgaaattgtttccgcgcttgaaacccttaggagcccaccttcttttacaggtgcatgatgaattggtcttggaagtacccgaggatcgcgcagaagaagccaaagcactcgtgaaagaggttatggaaaacgcgtatccgttagatgttccgttggaggtcgaagtgggtgtaggccgtgattggcttgaagcgaaacaagactaatga

SEQ ID NO: 292 - protein, 844 aa, synthetic construct
  REGION 1..844: note = DNA Polymerase Variant
MHHHHHHGGSGMLPLFDLEEPPKRVLLVDGHHLAYRTFYALSLTTSRGEPVQMVYGFARSLLKALKEDGQAVVVVFDAKAPSFRHEAYEAYKAGRAPTPEDFPRQLALVKRLVDLLGLVRLEAPGYEADDVLGTLAKKAEREGMEVCILTGDRDFFQLLSEKVSVLLPDGTLVTPKDVQEKYGVPPERWVDFRALTGDRSDNIPGVAGIGEKTALRLLAEWGSVENLLKNLDRVKPDSVRRKIEAHLEDLRLSLDLARIRTDLPLEVDFKALRRRTPDLEGLRAFLEELEFGSLLHEFGLLGGEKPREEAPWPPPEGAFVGFLLSRKEPMWAELLALAAAAEGRVHRATSPVEALADLKEARGFLAKDLAVLALREGVALDPTDDPLLVAYLLDPANTNPEGVARRYGGEFTEDAAERALLSERLFQTLFPRLSEKLLWLYQEVERPLSRVLAHMEARGVRLDVPLLEALSFELEKELERLEGEVFRLAGHPFNLNSRDQLEKVLFDELGLTPIGRTEKTGKRSTSAAALEALRGAHPIVELILQYRELSKLKSTYLDRLPRLVHPRTGRLHTRFNQTATATGRLSSSDPNLQNIPVRTPLGQRIRKAFVAEEGWLLLAADYSQIELRVLAHLSGDENLKRVFREGKDIHTETAAWMFGLDPALVDPKMRRAAKTVNFGVLYGMSAHRLSQELGIDYKEAEAFIERYFQSFPKVRAWIERTLEEGRTRGYVETLFGRRRYVPDLASRVRSVREAAERMAFNMPVQGTAADLMKIAMVKLFPRLKPLGAHLLLQVHDELVLEVPEDRAEEAKALVKEVMENAYPLDVPLEVEVGVGRDWLEAKQD

SEQ ID NO: 293 - DNA, 2538 bp, synthetic construct
  misc_feature 1..2538: note = DNA Polymerase Variant
  source 1..2538: mol_type = other DNA
atgcaccatcatcatcatcatggcggtagcggcatgttaccgctgtttgatttggaagaaccaccaaaacgcgtgctgcttgttgacggccatcatctggcgtatcgtaccttctacgcactgagccttacgacctcacgtggtgagcctgtccagatggtgtatgggtttgctcgctccctgctgaaagccctgaaggaagatggtcaagccgtaattgtggttttcgatgcgaaagcaccgtcgtttcgtcacgaagcgtacgaggcctataaagctggccgcgcaccgaccccggaagactttccgcgtcagttagcgctcgtcaaacgcctcgtggatttgctgggattagttcgcttggaagctcctggctacgaggcggacgacgtgctcggtacactggccaagaaagcagaacgtgaaggcatggaggtctgcattcttaccggtgatcgcgatttcttccagctgctgtctgagaaagtgagcgttttgctgcccgatggcacgttagtaaccccgaaagatgtccaagagaaatatggagttccgccagaacgttgggtggactttcgcgcactgactggtgatcgttcagacaacatcccgggcgttgccgggattggtgaaaagacggcgctgcgcctgctggcagaatggggctcggtggaaaatctgctcaagaaccttgatcgtgtgaaacctgatagcttacgccgcaagatcgaagcccacctggaagacttgcgtctgagtctggatcttgcgcgtattcgcaccgatctgccgttggaagtagactttaaagctctgcgtcgtcgcacacccgatttagaggggttacgcgcgttcctcgaagaactggagtttggctccctgctgcatgaattcggtttgttgggcggagagaaaccgcgtgaagaagcaccatggccgccgcccgaaggtgcctttgtcggctttcttctgtcacgcaaagagccaatgtgggcggaactgttagctcttgcagccgccgcggaagggcgtgttcaccgcgcgacctctcctgtcgaggccctcgctgacctcaaagaagcacgtggtttcttggcgaaagatttagccgtgcttgcattacgcgaaggcgttgcgctcgatccgacggacgacccgcttttggtggcttatttgctcgatcctgcgaataccaacccggaaggtgtagcccgtcgttacggcggcgagtttactgaagatgcggcagaacgcgcgttgcttagcgaacgcctcttccagacgttatttccacgtctttcggagaaattactctggctctatcaggaagtcgaacgtccattgagtcgcgtgcttgcccatatggaggctcgcggtgtgcgcttagatgttccgttgttagaagcactcagcttcgagttggagaaagaactggaacgtcttgaaggcgaagtctttcgtttagcggggcatcccttcaatctcaactctcgcgaccaattggagaaagtgctctttgatgaattaggtttaacccctatcggacgtacagagaagaccggcaaacgttccacttcggcagccgccttggaagcacttcgtggtgctcacccgatcgtcgaattgattttgcagtaccgcgagctcagcaaactcaaatcaacctatcttgataggttacctcgtcttgttcatccacgtacgggtcgtttacacacccgcttcaatcaaacggcgacagccaccgggcgcttgtcgtcgagtgacccgaacctccagaatattccagtgcgcacgccgttaggccaacgcattcgtaaagcgtttgttgcggaagaaggttggttattacttgcggccgattactcccagatcgaacttcgtgtattggcgcatctctctggcgacgagaatcttaaacgcgtgtttcgcgaaggcaaggatattcacactgaaaccgcagcctggatgttcgggcttgacccagccttagtggaccccaagatgcgtcgtgccgccaagaccgtcaactttggcgtactctatggtatgtcagcacatcgtcttagtcaggaattgggcattgactacaaagaagctgaagcgtttatcgagcgctatttccaatcctttccgaaagttcgcgcgtggattgaacgtaccctcgaagaaggtcgcactcgcggctatgtggaaacgttattcgggcgtcgtcgctacgttccagatcttgcatctcgtgtccgctcagtgcgcgaagctgctgagcgtatggccttcaatatgcctgttcagggaacagcggcggacctcatgaagatcgccatggtgaaattgtttccgcgcttgaaacccttaggagcccaccttcttttacaggtgcatgatgaattggtcttggaagtacccgaggatcgcgcagaagaagccaaagcactcgtgaaagaggttatggaaaacgcgtatccgttagatgttccgttggaggtcgaagtgggtgtaggccgtgattggcttgaagcgaaacaagactaatga

SEQ ID NO: 294 - protein, 844 aa, synthetic construct
  REGION 1..844: note = DNA Polymerase Variant
MHHHHHHGGSGMLPLFDLEEPPKRVLLVDGHHLAYRTFYALSLTTSRGEPVQMVYGFARSLLKALKEDGQAVIVVFDAKAPSFRHEAYEAYKAGRAPTPEDFPRQLALVKRLVDLLGLVRLEAPGYEADDVLGTLAKKAEREGMEVCILTGDRDFFQLLSEKVSVLLPDGTLVTPKDVQEKYGVPPERWVDFRALTGDRSDNIPGVAGIGEKTALRLLAEWGSVENLLKNLDRVKPDSLRRKIEAHLEDLRLSLDLARIRTDLPLEVDFKALRRRTPDLEGLRAFLEELEFGSLLHEFGLLGGEKPREEAPWPPPEGAFVGFLLSRKEPMWAELLALAAAAEGRVHRATSPVEALADLKEARGFLAKDLAVLALREGVALDPTDDPLLVAYLLDPANTNPEGVARRYGGEFTEDAAERALLSERLFQTLFPRLSEKLLWLYQEVERPLSRVLAHMEARGVRLDVPLLEALSFELEKELERLEGEVFRLAGHPFNLNSRDQLEKVLFDELGLTPIGRTEKTGKRSTSAAALEALRGAHPIVELILQYRELSKLKSTYLDRLPRLVHPRTGRLHTRFNQTATATGRLSSSDPNLQNIPVRTPLGQRIRKAFVAEEGWLLLAADYSQIELRVLAHLSGDENLKRVFREGKDIHTETAAWMFGLDPALVDPKMRRAAKTVNFGVLYGMSAHRLSQELGIDYKEAEAFIERYFQSFPKVRAWIERTLEEGRTRGYVETLFGRRRYVPDLASRVRSVREAAERMAFNMPVQGTAADLMKIAMVKLFPRLKPLGAHLLLQVHDELVLEVPEDRAEEAKALVKEVMENAYPLDVPLEVEVGVGRDWLEAKQD

SEQ ID NO: 295 - DNA, 2538 bp, synthetic construct
  misc_feature 1..2538: note = DNA Polymerase Variant
  source 1..2538: mol_type = other DNA
atgcaccatcatcatcatcatggcggtagcggcatgttaccgctgtttgatttggaagaaccaccaaaacgcgtgctgcttgttgacggccatcatctggcgtatcgtaccttctacgcactgagccttacgacctcacgtggtgagcctgtccagatggtgtatgggtttgctcgctccctgctgaaagccctgaaggaagatggtcaagccgtagtagtggttttcgatgcgaaagcaccgtcgtttcgtcacgaagcgtacgaggcctataaagctggccgcgcaccgaccccggaagactttccgcgtcagttagcgctcgtcaaacgcctcgtggatttgctgggattagttcgcttggaagctcctggctacgaggcggacgacgtgctcggtacactggccaagaaagcagaacgtgaaggcatggaggtctgcattcttaccggtgatcgcgatttcttccagctgctgtctgagaaagtgagcgttttgctgcccgatggcacgttagtaaccccgaaagatgtccaagagaaatatggagttccgccagaacgttgggtggactttcgcgcactgactggtgatcgttcagacaacatcccgggcgttgccgggattggtgaaaagacggcgctgcgcctgctggcagaatggggctcggtggaaaatctgctcaagaaccttgatcgtgtgaaacctgatagcttacgccgcaagatcgaagcccacctggaagacttgcgtctgagtctggatcttgcgcgtattcgcaccgatctgccgttggaagtagactttaaagctctgcgtcgtcgcacacccgatttagaggggttacgcgcgttcctcgaagaactggagtttggctccctgctgcatgaattcggtttgttgggcggagagaaaccgcgtgaagaagcaccatggccgccgcccgaaggtgcctttgtcggctttcttctgtcacgcaaagagccaatgtgggcggaactgttagctcttgcagccgccgcggaagggcgtgttcaccgcgcgacctctcctgtcgaggccctcgctgacctcaaagaagcacgtggtttcttggcgaaagatttagccgtgcttgcattacgcgaaggcgttgcgctcgatccgacggacgacccgcttttggtggcttatttgctcgatcctgcgaataccaacccggaaggtgtagcccgtcgttacggcggcgagtttactgaagatgcggcagaacgcgcgttgcttagcgaacgcctcttccagacgttatttccacgtctttcggagaaattactctggctctatcaggaagtcgaacgtccattgagtcgcgtgcttgcccatatggaggctcgcggtgtgcgcttagatgttccgttgttagaagcactcagcttcgagttggagaaagaactggaacgtcttgaaggcgaagtctttcgtttagcggggcatcccttcaatctcaactctcgcgaccaattggagaaagtgctctttgatgaattaggtttaacccctatcggacgtacagagaagaccggcaaacgttccacttcggcaggggccttggaagcacttcgtggtgctcacccgatcgtcaacttgattttgcagtaccgcgagctcagcaaactcaaatcaacctatcttgataggttacctcgtcttgttcatccacgtacgggtcgtttacacacccgcttcaatcaaacggcgacagccaccgggcgcttgtcgtcgagtgacccgaacctccagaatattccagtgcgcacgccgttaggccaacgcattcgtaaagcgtttgttgcggaagaaggttggttattacttgcggccgattactcccagatcgaacttcgtgtattggcgcatctctctggcgacgagaatcttaaacgcgtgtttcgcgaaggcaaggatattcacactgaaaccgcagcctggatgttcgggcttgacccagccttagtggaccccaagatgcgtcgtgccgccaagaccgtcaactttggcgtactctatggtatgtcagcacatcgtcttagtcaggaattgggcattgactacaaagaagctgaagcgtttatcgagcgctatttccaatcctttccgaaagttcgcgcgtggattgaacgtaccctcgaagaaggtcgcactcgcggctatgtggaaacgttattcgggcgtcgtcgctacgttccagatcttgcatctcgtgtccgctcagtgcgcgaagctgctgagcgtatggcctttaatatgcctgttcagggaacagcggcggacctcatgaagatcgccatggtgaaattgtttccgcgcttgaaacccttaggagcccaccttcttttacaggtgcatgatgaattggtcttggaagtacccgaggatcgcgcagaagaagccaaagcactcgtgaaagaggttatggaaaacgcgtatccgttagatgttccgttggaggtcgaagtgggtgtaggccgtgattggcttgaagcgaaacaagactaatga

SEQ ID NO: 296 - protein, 844 aa, synthetic construct
  REGION 1..844: note = DNA Polymerase Variant
MHHHHHHGGSGMLPLFDLEEPPKRVLLVDGHHLAYRTFYALSLTTSRGEPVQMVYGFARSLLKALKEDGQAVVVVFDAKAPSFRHEAYEAYKAGRAPTPEDFPRQLALVKRLVDLLGLVRLEAPGYEADDVLGTLAKKAEREGMEVCILTGDRDFFQLLSEKVSVLLPDGTLVTPKDVQEKYGVPPERWVDFRALTGDRSDNIPGVAGIGEKTALRLLAEWGSVENLLKNLDRVKPDSLRRKIEAHLEDLRLSLDLARIRTDLPLEVDFKALRRRTPDLEGLRAFLEELEFGSLLHEFGLLGGEKPREEAPWPPPEGAFVGFLLSRKEPMWAELLALAAAAEGRVHRATSPVEALADLKEARGFLAKDLAVLALREGVALDPTDDPLLVAYLLDPANTNPEGVARRYGGEFTEDAAERALLSERLFQTLFPRLSEKLLWLYQEVERPLSRVLAHMEARGVRLDVPLLEALSFELEKELERLEGEVFRLAGHPFNLNSRDQLEKVLFDELGLTPIGRTEKTGKRSTSAGALEALRGAHPIVNLILQYRELSKLKSTYLDRLPRLVHPRTGRLHTRFNQTATATGRLSSSDPNLQNIPVRTPLGQRIRKAFVAEEGWLLLAADYSQIELRVLAHLSGDENLKRVFREGKDIHTETAAWMFGLDPALVDPKMRRAAKTVNFGVLYGMSAHRLSQELGIDYKEAEAFIERYFQSFPKVRAWIERTLEEGRTRGYVETLFGRRRYVPDLASRVRSVREAAERMAFNMPVQGTAADLMKIAMVKLFPRLKPLGAHLLLQVHDELVLEVPEDRAEEAKALVKEVMENAYPLDVPLEVEVGVGRDWLEAKQD

SEQ ID NO: 297 - DNA, 2538 bp, synthetic construct
  misc_feature 1..2538: note = DNA Polymerase Variant
  source 1..2538: mol_type = other DNA
atgcaccatcatcatcatcatggcggtagcggcatgttaccgctgtttgatttggaagaaccaccaaaacgcgtgctgcttgttgacggccatcatctggcgtatcgtaccttctacgcactgagccttacgacctcacgtggtgagcctgtccagatggtgtatgggtttgctaaatccctgctgaaagccctgaaggaagatggtcaagccgtagtagtggttttcgatgcgaaagcaccgtcgtttcgtcacgaagcgtacgaggcctataaagctggccgcgcaccgaccccggaagactttccgcgtcagttagcgctcgtcaaacgcctcgtggatttgctgggattagttcgcttggaagctcctggctacgaggcggacgacgtgctcggtacactggccaagaaagcagaacgtgaaggcatggaggtctgcattcttaccggtgatcgcgatttcttccagctgctgtctgagaaagtgagcgttttgctgcccgatggcacgttagtaaccccgaaagatgtccaagagaaatatggagttccgccagaacgttgggtggactttcgcgcactgactggtgatcgttcagacaacatcccgggcgttgccgggattggtgaaaagacggcgctgcgcctgctggcagaatggggctcggtggaaaatctgctcaagaaccttgatcgtgtgaaacctgatagcttacgccgcaagatcgaagcccacctggaagacttgcgtctgagtctggatcttgcgcgtattcgcaccgatctgccgttggaagtagactttaaagctctgcgtcgtcgcacacccgatttagaggggttacgcgcgttcctcgaagaactggagtttggctccctgctgcatgaattcggtttgttgggcggagagaaaccgcgtgaagaagcaccatggccgccgcccgaaggtgcctttgtcggctttcttctgtcacgcaaagagccaatgtgggcggaactgttagctcttgcagccgccgcggaagggcgtgttcaccgcgcgacctctcctgtcgaggccctcgctgacctcaaagaagcacgtggtttcttggcgaaagatttagccgtgcttgcattacgcgaaggcgttgcgctcgatccgacggacgacccgcttttggtggcttatttgctcgatcctgcgaataccaacccggaaggtgtagcccgtcgttacggcggcgagtttactgaagatgcggcagaacgcgcgttgcttagcgaacgcctcttccagacgttatttccacgtctttcggagaaattactctggctctatcaggaagtcgaacgtccattgagtcgcgtgcttgcccatatggaggctcgcggtgtgcgcttagatgttccgttgttagaagcactcagcttcgagttggagaaagaactggaacgtcttgaaggcgaagtctttcgtttagcggggcatcccttcaatctcaactctcgcgaccaattggagaaagtgctctttgatgaattaggtttaacccctatcggacgtacagagaagaccggcaaacgttccacttcggcagccgccttggaagcacttcgtggtgctcacccgatcgtcgaattgattttgcagtaccgcgagctcagcaaactcaaatcaacctatcttgataggttacctcgtcttgttcatccacgtacgggtcgtttacacacccgcttcaatcaaacggcgacagccaccgggcgcttgtcgtcgagtgacccgaacctccagaatattccagtgcgcacgccgttaggccaacgcattcgtaaagcgtttgttgcggaagaaggttggttattacttgcggccgattactcccagatcgaacttcgtgtattggcgcatctctctggcgacgagaatcttaaacgcgtgtttcgcgaaggcaaggatattcacactgaaaccgcagcctggatgttcgggcttgacccagccttagtggaccccaagatgcgtcgtgccgccaagaccgtcaactttggcgtactctatggtatgtcagcacatcgtcttagtcaggaattgggcattgactacaaagaagctgaagcgtttatcgagcgctatttccaatcctttccgaaagttcgcgcgtggattgaacgtaccctcgaagaaggtcgcactcgcggctatgtggaaacgttattcgggcgtcgtcgctacgttccagatcttgcatctcgtgtccgctcagtgcgcgaagctgctgagcgtatggccttcaatatgcctgttcagggaacagcggcggacctcatgaagatcgccatggtgaaattgtttccgcgcttgaaacccttaggagcccaccttcttttacaggtgcatgatgaattggtcttggaagtacccgaggatcgcgcagaagaagccaaagcactcgtgaaagaggttatggaaaacgcgtatccgttagatgttccgttggaggtcgaagtgggtgtaggccgtgattggcttgaagcgaaacaagactaatga

SEQ ID NO: 298 - protein, 844 aa, synthetic construct
  REGION 1..844: note = DNA Polymerase Variant
MHHHHHHGGSGMLPLFDLEEPPKRVLLVDGHHLAYRTFYALSLTTSRGEPVQMVYGFAKSLLKALKEDGQAVVVVFDAKAPSFRHEAYEAYKAGRAPTPEDFPRQLALVKRLVDLLGLVRLEAPGYEADDVLGTLAKKAEREGMEVCILTGDRDFFQLLSEKVSVLLPDGTLVTPKDVQEKYGVPPERWVDFRALTGDRSDNIPGVAGIGEKTALRLLAEWGSVENLLKNLDRVKPDSLRRKIEAHLEDLRLSLDLARIRTDLPLEVDFKALRRRTPDLEGLRAFLEELEFGSLLHEFGLLGGEKPREEAPWPPPEGAFVGFLLSRKEPMWAELLALAAAAEGRVHRATSPVEALADLKEARGFLAKDLAVLALREGVALDPTDDPLLVAYLLDPANTNPEGVARRYGGEFTEDAAERALLSERLFQTLFPRLSEKLLWLYQEVERPLSRVLAHMEARGVRLDVPLLEALSFELEKELERLEGEVFRLAGHPFNLNSRDQLEKVLFDELGLTPIGRTEKTGKRSTSAAALEALRGAHPIVELILQYRELSKLKSTYLDRLPRLVHPRTGRLHTRFNQTATATGRLSSSDPNLQNIPVRTPLGQRIRKAFVAEEGWLLLAADYSQIELRVLAHLSGDENLKRVFREGKDIHTETAAWMFGLDPALVDPKMRRAAKTVNFGVLYGMSAHRLSQELGIDYKEAEAFIERYFQSFPKVRAWIERTLEEGRTRGYVETLFGRRRYVPDLASRVRSVREAAERMAFNMPVQGTAADLMKIAMVKLFPRLKPLGAHLLLQVHDELVLEVPEDRAEEAKALVKEVMENAYPLDVPLEVEVGVGRDWLEAKQD

SEQ ID NO: 299 - DNA, 2538 bp, synthetic construct
  misc_feature 1..2538: note = DNA Polymerase Variant
  source 1..2538: mol_type = other DNA
atgcaccatcatcatcatcatggcggtagcggcatgttaccgctgtttgatttggaagaaccaccaaaacgcgtgctgcttgttgacggccatcatctggcgtatcgtaccttctacgcactgagccttacgacctcacgtggtgagcctgtccagatggtgtatgggtttgctcgctccctgctgaaagccctgaaggaagatggtcaagccgtagtagtggttttcgatgcgaaagcaccgtcgtttcgtcacgaagcgtacgaggcctataaagctggccgcgcaccgaccccggaagactttccgcgtcagttagcgctcgtcaaacgcctcgtggatttgctgggattagttcgcttggaagctcctggctacgaggcggacgacgtgctcggtacactggccaagaaagcagaacgtgaaggcatggaggtctgcattcttaccggtgatcgcgatttcttccagctgctgtctgagaaagtgagcgttttgctgcccgatggcacgttagtaaccccgaaagatgtccaagagaaatatggagttccgccagaacgttgggtggactttcgcgcactgactggtgatcgttcagacaacatcccgggcgttgccgggattggtgaaaagacggcgctgcgcctgctggcagaatggggctcggtggaaaatctgctcaagaaccttgatcgtgtgaaacctgatagcttacgccgcaagatcgaagcccacctggaagacttgcgtctgagtctggatcttgcgcgtattcgcaccgatctgccgttggaagtagactttaaagctctgcgtcgtcgcacacccgatttagaggggttacgcgcgttcctcgaagaactggagtttggctccctgctgcatgaattcggtttgttgggcggagagaaaccgcgtgaagaagcaccatggccgccgcccgaaggtgcctttgtcggctttcttctgtcacgcaaagagccaatgtgggcggaactgttagctcttgcagccgccgcggaagggcgtgttcaccgcgcgacctctcctgtcgaggccctcgctgacctcaaagaagcacgtggtttcttggcgaaagatttagccgtgcttgcattacgcgaaggcgttgcgctcgatccgacggacgacccgcttttggtggcttatttgctcgatcctgcgaataccaacccggaaggtgtagcccgtcgttacggcggcgagtttactgaagatgcggcagaacgcgcgttgcttagcgaacgcctcttccagacgttatttccacgtctttcggagaaattactctggctctatcaggaagtcgaacgtccattgagtcgcgtgcttgcccatatggaggctcgcggtgtgcgcttagatgttccgttgttagaagcactcagcttcgagttggagaaagaactggaacgtcttgaaggcgaagtctttcgtttagcggggcatcccttcaatctcaactctcgcgaccaattggagaaagtgctctttgatgaattaggtttaacccctatcacgcgtacagagaagaccggcaaacgttccacttcggcagcggccttggaagcacttcgtggtgctcacccgatcgtcgagttgattttgcagtaccgcgagctcagcaaactcaaatcaacctatcttgataggttacctcgtcttgttcatccacgtacgggtcgtttacacacccgctggaatcaaacggcgacagccaccgggcgcttgtcgtcgagtgacccgaacctccagaatattccagtgcgcacgccgctgggccaacgcattcgtaaagcgtttgttgcggaagaaggttggttattacttgcggccgattactcccagatcgaacttcgtgtattggcgcatctctctggcgacgagaatcttaaacgcgtgtttcgcgaaggcaaggatattcacactgaaaccgcagcctggatgttcgggcttgacccagccttagtggaccccaagatgcgtcgtgccgccaagaccgtcaactttggcgtactctatggtatgtcagcacatcgtcttagtcaggaattgggcattgactacaaagaagctgaagcgtttatcgagcgctatttccaatcctttccgaaagttcgcgcgtggattgaacgtaccctcgaagaaggtcgcactcgcggctatgtggaaacgttattcgggcgtcgtcgctacgttccagatcttgcatctcgtgtccgctcagtgcgcgaagctgctgagcgtatggcctttaatatgcctgttcagggaacagcggcggacctcatgaagatcgccatggtgaaattgtttccgcgcttgaaacccttaggagcccaccttcttttacaggtgcatgatgaattggtcttggaagtacccgaggatcgcgcagaagaagccaaagcactcgtgaaagaggttatggaaaacgcgtatccgttagatgttccgttggaggtcgaagtgggtgtaggccgtgattggcttgaagcgaaacaagactaatga

SEQ ID NO: 300 - protein, 844 aa, synthetic construct
  REGION 1..844: note = DNA Polymerase Variant
MHHHHHHGGSGMLPLFDLEEPPKRVLLVDGHHLAYRTFYALSLTTSRGEPVQMVYGFARSLLKALKEDGQAVVVVFDAKAPSFRHEAYEAYKAGRAPTPEDFPRQLALVKRLVDLLGLVRLEAPGYEADDVLGTLAKKAEREGMEVCILTGDRDFFQLLSEKVSVLLPDGTLVTPKDVQEKYGVPPERWVDFRALTGDRSDNIPGVAGIGEKTALRLLAEWGSVENLLKNLDRVKPDSLRRKIEAHLEDLRLSLDLARIRTDLPLEVDFKALRRRTPDLEGLRAFLEELEFGSLLHEFGLLGGEKPREEAPWPPPEGAFVGFLLSRKEPMWAELLALAAAAEGRVHRATSPVEALADLKEARGFLAKDLAVLALREGVALDPTDDPLLVAYLLDPANTNPEGVARRYGGEFTEDAAERALLSERLFQTLFPRLSEKLLWLYQEVERPLSRVLAHMEARGVRLDVPLLEALSFELEKELERLEGEVFRLAGHPFNLNSRDQLEKVLFDELGLTPITRTEKTGKRSTSAAALEALRGAHPIVELILQYRELSKLKSTYLDRLPRLVHPRTGRLHTRWNQTATATGRLSSSDPNLQNIPVRTPLGQRIRKAFVAEEGWLLLAADYSQIELRVLAHLSGDENLKRVFREGKDIHTETAAWMFGLDPALVDPKMRRAAKTVNFGVLYGMSAHRLSQELGIDYKEAEAFIERYFQSFPKVRAWIERTLEEGRTRGYVETLFGRRRYVPDLASRVRSVREAAERMAFNMPVQGTAADLMKIAMVKLFPRLKPLGAHLLLQVHDELVLEVPEDRAEEAKALVKEVMENAYPLDVPLEVEVGVGRDWLEAKQD

SEQ ID NO: 301 - DNA, 2538 bp, synthetic construct
  misc_feature 1..2538: note = DNA Polymerase Variant
  source 1..2538: mol_type = other DNA
atgcacaatcatcatcatcatggcggtagcggcatgttaccgctgtttgatttggaagaaccaccaaaacgcgtgctgcttgttgacggccatcatctggcgtatcgtaccttctacgcactgagccttacgacctcacgtggtgagcctgtccagatggtgtatgggtttgctcgctccctgctgaaagccctgaaggaagatggtcaagccgtagtagtggttttcgatgcgaaagcaccgtcgtttcgtcacgaagcgtacgaggcctataaagctggccgcgcaccgaccccggaagactttccgcgtcagttagcgctcgtcaaacgcctcgtggatttgctgggattagttcgcttggaagctcctggctacgaggcggacgacgtgctcggtacactggccaagaaagcagaacgtgaaggcatggaggtctgcattcttaccggtgatcgcgatttcttccagctgctgtctgagaaagtgagcgttttgctgcccgatggcacgttagtaaccccgaaagatgtccaagagaaatatggagttccgccagaacgttgggtggactttcgcgcactgactggtgatcgttcagacaacatcccgggcgttgccgggattggtgaaaagacggcgctgcgcctgctggcagaatggggctcggtggaaaatctgctcaagaaccttgatcgtgtgaaacctgatagcttacgccgcaagatcgaagcccacctggaagacttgcgtctgagtctggatcttgcgcgtattcgcaccgatctgccgttggaagtagactttaaagctctgcgtcgtcgcacacccgatttagaggggttacgcgcgttcctcgaagaactggagtttggctccctgctgcatgaattcggtttgttgggcggagagaaaccgcgtgaagaagcaccatggccgccgcccgaaggtgcctttgtcggctttcttctgtcacgcaaagagccaatgtgggcggaactgttagctcttgcagccgccgcggaagggcgtgttcaccgcgcgacctctcctgtcgaggccctcgctgacctcaaagaagcacgtggtttcttggcgaaagatttagccgtgcttgcattacgcgaaggcgttgcgctcgatccgacggacgacccgcttttggtggcttatttgctcgatcctgcgaataccaacccggaaggcgtagcccgtcgttacggcggcgagtttactgaagatgcggcagaacgcgcgttgcttagcgaacgcctcttccagacgttatttccacgtctttcggagaaattactctggctctatcaggaagtcgaacgtccattgagtcgcgtgcttgcccatatggaggctcgcggtgtgcgcttagatgttccgttgttagaagcactcagcttcgagttggagaaagaactggaacgtcttgaaggcgaagtctttcgtttagcggggcatcccttcaatctcaactctcgcgaccaattggagaaagtgctctttgatgaattaggtttaacccctatcacgcgtacagagaagaccggcaaacgttccacttcggcagccgccttggaagcacttcgtggtgctcacccgatcgtcgaattgattttgcagtaccgcgagctcagcaaactcaaatcaacctatcttgatccgttacctcgtcttgttcatccacgtacgggtcgtttacacacccgcttcaatcaaacggcgacagccaccgggcgcttgtcgtcgagtgacccgaacctccagaatattccagtgcgcacgccgctgggccaacgcattcgtaaagcgtttgttgcggaagaaggttggttattacttgcggccgattactcccagatcgaacttcgtgtattggcgcatctctctggcgacgagaatcttaaacgcgtgtttcgcgaaggcaaggatattcacactgaaaccgcagcctggatgttcgggcttgacccagccttagtggaccccaagatgcgtcgtgccgccaagaccgtcaactttggcgtactctatggtatgtcagcacatcgtcttagtcaggaattgggcattgactacaaagaagctgaagcgtttatcgagcgctatttccaatcctttccgaaagttcgcgcgtggattgaacgtaccctcgaagaaggtcgcactcgcggctatgtggaaacgttattcgggcgtcgtcgctacgttccagatcttgcatctcgtgtccgctcagtgcgcgaagctgctgagcgtatggcctttaatatgcctgttcagggaacagcggcggacctcatgaagatcgccatggtgaaattgtttccgcgcttgaaacccttaggagcccaccttcttttacaggtgcatgatgaattggtcttggaagtacccgaggatcgcgcagaagaagccaaagcactcgtgaaagaggttatggaaaacgcgtatccgttagatgttccgttggaggtcgaagtgggtgtaggccgtgattggcttgaagcgaaacaagactaatga

SEQ ID NO: 302 - protein, 844 aa, synthetic construct
  REGION 1..844: note = DNA Polymerase Variant
MHNHHHHGGSGMLPLFDLEEPPKRVLLVDGHHLAYRTFYALSLTTSRGEPVQMVYGFARSLLKALKEDGQAVVVVFDAKAPSFRHEAYEAYKAGRAPTPEDFPRQLALVKRLVDLLGLVRLEAPGYEADDVLGTLAKKAEREGMEVCILTGDRDFFQLLSEKVSVLLPDGTLVTPKDVQEKYGVPPERWVDFRALTGDRSDNIPGVAGIGEKTALRLLAEWGSVENLLKNLDRVKPDSLRRKIEAHLEDLRLSLDLARIRTDLPLEVDFKALRRRTPDLEGLRAFLEELEFGSLLHEFGLLGGEKPREEAPWPPPEGAFVGFLLSRKEPMWAELLALAAAAEGRVHRATSPVEALADLKEARGFLAKDLAVLALREGVALDPTDDPLLVAYLLDPANTNPEGVARRYGGEFTEDAAERALLSERLFQTLFPRLSEKLLWLYQEVERPLSRVLAHMEARGVRLDVPLLEALSFELEKELERLEGEVFRLAGHPFNLNSRDQLEKVLFDELGLTPITRTEKTGKRSTSAAALEALRGAHPIVELILQYRELSKLKSTYLDPLPRLVHPRTGRLHTRFNQTATATGRLSSSDPNLQNIPVRTPLGQRIRKAFVAEEGWLLLAADYSQIELRVLAHLSGDENLKRVFREGKDIHTETAAWMFGLDPALVDPKMRRAAKTVNFGVLYGMSAHRLSQELGIDYKEAEAFIERYFQSFPKVRAWIERTLEEGRTRGYVETLFGRRRYVPDLASRVRSVREAAERMAFNMPVQGTAADLMKIAMVKLFPRLKPLGAHLLLQVHDELVLEVPEDRAEEAKALVKEVMENAYPLDVPLEVEVGVGRDWLEAKQD

SEQ ID NO: 303 - DNA, 2538 bp, synthetic construct
  misc_feature 1..2538: note = DNA Polymerase Variant
  source 1..2538: mol_type = other DNA
atgcaccatcatcatcatcatggcggtagcggcatgttaccgctgtttgatttggaagaaccaccaaaacgcgtgctgcttgttgacggccatcatctggcgtatcgtaccttctacgcactgagccttacgacctcacgtggtgagcctgtccagatggtgtatgggtttgctcgctccctgctgaaagccctgaaggaagatggtcaagccgtagtagtggttttcgatgcgaaagcaccgtcgtttcgtcacgaagcgtacgaggcctataaagctggccgcgcaccgaccccggaagactttccgcgtcagttagcgctcgtcaaacgcctcgtggatttgctgggattagttcgcttggaagctcctggctacgaggcggacgacgtgctcggtacactggccaagaaagcagaacgtgaaggcatggaggtctgcattcttaccggtgatcgcgatttcttccagctgctgtctgagaaagtgagcgttttgctgcccgatggcacgttagtaaccccgaaagatgtccaagagaaatatggagttccgccagaacgttgggtggactttcgcgcactgactggtgatcgttcagacaacatcccgggcgttgccgggattggtgaaaagacggcgctgcgcctgctggcagaatggggctcggtggaaaatctgctcaagaaccttgatcgtgtgaaacctgatagcttacgccgcaagatcgaagcccacctggaagacttgcgtctgagtctggatcttgcgcgtattcgcaccgatctgccgttggaagtagactttaaagctctgcgtcgtcgcacacccgatttagaggggttacgcgcgttcctcgaagaactggagtttggctccctgctgcatgaattcggtttgttgggcggagagaaaccgcgtgaagaagcaccatggccgccgcccgaaggtgcctttgtcggctttcttctgtcacgcaaagagccaatgtgggcggaactgttagctcttgcagccgccgcggaagggcgtgttcaccgcgcgacctctcctgtcgaggccctcgctgacctcaaagaagcacgtggtttcttggcgaaagatttagccgtgcttgcattacgcgaatgcgttgcgctcgatccgacggacgacccgcttttggtggcttatttgctcgatcctgcgaataccaacccggaaggcgtagcccgtcgttacggcggcgagtttactgaagatgcggcagaacgcgcgttgcttagcgaacgcctcttccagacgttatttccacgtctttcggagaaattactctggctctatcaggaagtcgaacgtccattgagtcgcgtgcttgcccatatggaggctcgcggtgtgcgcttagatgttccgttgttagaagcactcagcttcgagttggagaaagaactggaacgtcttgaaggcgaagtctttcgtttagcggggcatcccttcaatctcaactctcgcgaccaattggagaaagtgctctttgatgaattaggtttaacccctatccatcgtacagagaagaccggcaaacgttccacttcggcaggggccttggaagcacttcgtggtgctcacccgatcgtcaacttgattttgcagtaccgcgagctcagcaaactcaaaaacacctatattgaccgtttacctcgtcttgttcatccacgtacgggtcgtttacacacccgcttcaatcaaacggcgacagccaccgggcgcttgtcgtcgagtgacccgaacctccagaatattccagtgcgcacgccgttaggccaacgcattcgtaaagcgtttgttgcggaagaaggttggttattacttgcggccgattactcccagatcgaacttcgtgtattggcgcatctctctggcgacgagaatcttaaacgcgtgtttcgcgaaggcaaggatattcacactgaaaccgcagcctggatgttcgggcttgacccagccttagtggaccccaagatgcgtcgtgccgccaagaccgtcaactttggcgtactctatggtatgtcagcacatcgtcttagtcaggaattgggcattgactacaaagaagctgaagcgtttatcgagcgctatttccaatcctttccgaaagttcgcgcgtggattgaacgtaccctcgaagaaggtcgcactcgcggctatgtggaaacgttattcgggcgtcgtcgctacgttccagatcttgcatctcgtgtccgctcagtgcgcgaagctgctgagcgtatggcctttaatatgcctgttcagggaacagcggcggacctcatgaagatcgccatggtgaaattgtttccgcgcttgaaacccttaggagcccaccttcttttacaggtgcatgatgaattggtcttggaagtacccgaggatcgcgcagaagaagccaaagcactcgtgaaagaggttatggaaaacgcgtatccgttagatgttccgttggaggtcgaagtgggtgtaggccgtgattggcttgaagcgaaacaagactaatga

SEQ ID NO: 304 - protein, 844 aa, synthetic construct
  REGION 1..844: note = DNA Polymerase Variant
MHHHHHHGGSGMLPLFDLEEPPKRVLLVDGHHLAYRTFYALSLTTSRGEPVQMVYGFARSLLKALKEDGQAVVVVFDAKAPSFRHEAYEAYKAGRAPTPEDFPRQLALVKRLVDLLGLVRLEAPGYEADDVLGTLAKKAEREGMEVCILTGDRDFFQLLSEKVSVLLPDGTLVTPKDVQEKYGVPPERWVDFRALTGDRSDNIPGVAGIGEKTALRLLAEWGSVENLLKNLDRVKPDSLRRKIEAHLEDLRLSLDLARIRTDLPLEVDFKALRRRTPDLEGLRAFLEELEFGSLLHEFGLLGGEKPREEAPWPPPEGAFVGFLLSRKEPMWAELLALAAAAEGRVHRATSPVEALADLKEARGFLAKDLAVLALRECVALDPTDDPLLVAYLLDPANTNPEGVARRYGGEFTEDAAERALLSERLFQTLFPRLSEKLLWLYQEVERPLSRVLAHMEARGVRLDVPLLEALSFELEKELERLEGEVFRLAGHPFNLNSRDQLEKVLFDELGLTPIHRTEKTGKRSTSAGALEALRGAHPIVNLILQYRELSKLKNTYIDRLPRLVHPRTGRLHTRFNQTATATGRLSSSDPNLQNIPVRTPLGQRIRKAFVAEEGWLLLAADYSQIELRVLAHLSGDENLKRVFREGKDIHTETAAWMFGLDPALVDPKMRRAAKTVNFGVLYGMSAHRLSQELGIDYKEAEAFIERYFQSFPKVRAWIERTLEEGRTRGYVETLFGRRRYVPDLASRVRSVREAAERMAFNMPVQGTAADLMKIAMVKLFPRLKPLGAHLLLQVHDELVLEVPEDRAEEAKALVKEVMENAYPLDVPLEVEVGVGRDWLEAKQD

SEQ ID NO: 305 - DNA, 2538 bp, synthetic construct
  misc_feature 1..2538: note = DNA Polymerase Variant
  source 1..2538: mol_type = other DNA
atgcaccatcatcatcatcatggcggtagcggcatgttaccgctgtttgatttggaagaaccaccaaaacgcgtgctgcttgttgacggccatcatctggcgtatcgtaccttctacgcactgagccttacgacctcacgtggtgagcctgtccagatggtgtatgggtttgctcgctccctgctgaaagccctgaaggaagatggtcaagccgtagtagtggttttcgatgcgaaagcaccgtcgtttcgtcacgaagcgtacgaggcctataaagctggccgcgcaccgaccccggaagactttccgcgtcagttagcgctcgtcaaacgcctcgtggatttgctgggattagttcgcttggaagctcctggctacgaggcggacgacgtgctcggtacactggccaagaaagcagaacgtgaaggcatggaggtctgcattcttaccggtgatcgcgatttcttccagctgctgtctgagaaagtgagcgttttgctgcccgatggcacgttagtaaccccgaaagatgtccaagagaaatatggagttccgccagaacgttgggtggactttcgcgcactgactggtgatcgttcagacaacatcccgggcgttgccgggattggtgaaaagacggcgctgcgcctgctggcagaatggggctcggtggaaaatctgctcaagaaccttgatcgtgtgaaacctgatagcttacgccgcaagatcgaagcccacctggaagacttgcgtctgagtctggatcttgcgcgtattcgcaccgatctgccgttggaagtagactttaaagctctgcgtcgtcgcacacccgatttagaggggttacgcgcgttcctcgaagaactggagtttggctccctgctgcatgaattcggtttgttgggcggagagaaaccgcgtgaagaagcaccatggccgccgcccgaaggtgcctttgtcggctttcttctgtcacgcaaagagccaatgtgggcggaactgttagctcttgcagccgccgcggaagggcgtgttcaccgcgcgacctctcctgtcgaggccctcgctgacctcaaagaagcacgtggtttcttggcgaaagatttagccgtgcttgcattacgcgaaggcgttgcgctcgatccgacggacgacccgcttttggtggcttatttgctcgatcctgcgaataccaacccggaacgcgtagcccgtcgttacggcggcgagtttactgaagatgcggcagaacgcgcgttgcttagcgaacgcctcttccagacgttatttccacgtctttcggagaaattactctggctctatcaggaagtcgaacgtccattgagtcgcgtgcttgcccatatggaggctcgcggtgtgcgcttagatgttccgttgttagaagcactcagcttcgagttggagaaagaactggaacgtcttgaaggcgaagtctttcgtttagcggggcatcccttcaatctcaactctcgcgaccaattggagaaagtgctctttgatgaattaggtttaacccctgtcacgcgtacagagaagaccggcaaacgttccacttcggcagccgccttggaagcacttcgtggtgctcacccgatcgtcaacttgattttgcagtaccgcgagctcagcaaactcaaatcaacctatcttgatccgttacctcgtcttgttcatccacgtacgggtcgtttacacacccgcttcaatcaaacggcgacagccaccgggcgcttgtcgtcgagtgacccgaacctccagaatattccagtgcgcacgccgctgggccaacgcattcgtaaagcgtttgttgcggaagaaggttggttattacttgcggccgattactcccagatcgaacttcgtgtattggcgcatctctctggcgacgagaatcttaaacgcgtgtttcgcgaaggcaaggatattcacactgaaaccgcagcctggatgttcgggcttgacccagccttagtggaccccaagatgcgtcgtgccgccaagaccgtcaactttggcgtactctatggtatgtcagcacatcgtcttagtcaggaattgggcattgactacaaagaagctgaagcgtttatcgagcgctatttccaatcctttccgaaagttcgcgcgtggattgaacgtaccctcgaagaaggtcgcactcgcggctatgtggaaacgttattcgggcgtcgtcgctacgttccagatcttgcatctcgtgtccgctcagtgcgcgaagctgctgagcgtatggccttcaatatgcctgttcagggaacagcggcggacctcatgaagatcgccatggtgaaattgtttccgcgcttgaaacccttaggagcccaccttcttttacaggtgcatgatgaattggtcttggaagtacccgaggatcgcgcagaagaagccaaagcactcgtgaaagaggttatggaaaacgcgtatccgttagatgttccgttggaggtcgaagtgggtgtaggccgtgattggcttgaagcgaaacaagactaatga

SEQ ID NO: 306 - protein, 844 aa, synthetic construct
  REGION 1..844: note = DNA Polymerase Variant
MHHHHHHGGSGMLPLFDLEEPPKRVLLVDGHHLAYRTFYALSLTTSRGEPVQMVYGFARSLLKALKEDGQAVVVVFDAKAPSFRHEAYEAYKAGRAPTPEDFPRQLALVKRLVDLLGLVRLEAPGYEADDVLGTLAKKAEREGMEVCILTGDRDFFQLLSEKVSVLLPDGTLVTPKDVQEKYGVPPERWVDFRALTGDRSDNIPGVAGIGEKTALRLLAEWGSVENLLKNLDRVKPDSLRRKIEAHLEDLRLSLDLARIRTDLPLEVDFKALRRRTPDLEGLRAFLEELEFGSLLHEFGLLGGEKPREEAPWPPPEGAFVGFLLSRKEPMWAELLALAAAAEGRVHRATSPVEALADLKEARGFLAKDLAVLALREGVALDPTDDPLLVAYLLDPANTNPERVARRYGGEFTEDAAERALLSERLFQTLFPRLSEKLLWLYQEVERPLSRVLAHMEARGVRLDVPLLEALSFELEKELERLEGEVFRLAGHPFNLNSRDQLEKVLFDELGLTPVTRTEKTGKRSTSAAALEALRGAHPIVNLILQYRELSKLKSTYLDPLPRLVHPRTGRLHTRFNQTATATGRLSSSDPNLQNIPVRTPLGQRIRKAFVAEEGWLLLAADYSQIELRVLAHLSGDENLKRVFREGKDIHTETAAWMFGLDPALVDPKMRRAAKTVNFGVLYGMSAHRLSQELGIDYKEAEAFIERYFQSFPKVRAWIERTLEEGRTRGYVETLFGRRRYVPDLASRVRSVREAAERMAFNMPVQGTAADLMKIAMVKLFPRLKPLGAHLLLQVHDELVLEVPEDRAEEAKALVKEVMENAYPLDVPLEVEVGVGRDWLEAKQD

SEQ ID NO: 307 - DNA, 2538 bp, synthetic construct
  misc_feature 1..2538: note = DNA Polymerase Variant
  source 1..2538: mol_type = other DNA
atgcaccatcatcatcatcatggcggtagcggcatgttaccgctgtttgatttggaagaaccaccaaaacgcgtgctgcttgttgacggccatcatctggcgtatcgtaccttctacgcactgagccttacgacctcacgtggtgagcctgtccagatggtgtatgggtttgctcgctccctgctgaaagccctgaaggaagatggtcaagccgtagtagtggttttcgatgcgaaagcaccgtcgtttcgtcacgaagcgtacgaggcctataaagctggccgcgcaccgaccccggaagactttccgcgtcagttagcgctcgtcaaacgcctcgtggatttgctgggattagttcgcttggaagctcctggctacgaggcggacgacgtgctcggtacactggccaagaaagcagaacgtgaaggcatggaggtctgcattcttaccggtgatcgcgatttcttccagctgctgtctgagaaagtgagcgttttgctgcccgatggcacgttagtaaccccgaaagatgtccaagagaaatatggagttccgccagaacgttgggtggactttcgcgcactgactggtgatcgttcagacaacatcccgggcgttgccgggattggtgaaaagacggcgctgcgcctgctggcagaatggggctcggtggaaaatctgctcaagaaccttgatcgtgtgaaacctgatagcttacgccgcaagatcgaagcccacctggaagacttgcgtctgagtctggatcttgcgcgtattcgcaccgatctgccgttggaagtagactttaaagctctgcgtcgtcgcacacccgatttagaggggttacgcgcgttcctcgaagaactggagtttggctccctgctgcatgaattcggtttgttgggcggagagaaaccgcgtgaagaagcaccatggccgccgcccgaaggtgcctttgtcggctttcttctgtcacgcaaagagccaatgtgggcggaactgttagctcttgcagccgccgcggaagggcgtgttcaccgcgcgacctctcctgtcgaggccctcgctgacctcaaagaagcacgtggtttcttggcgaaagatttagccgtgcttgcattacgcgaaggcgttgcgctcgatccgacggacgacccgcttttggtggcttatttgctcgatcctgcgaataccaacccggaaggcgtagcccgtcgttacggcggcgagtttactgaagatgcggcagaacgcgcgttgcttagcgaacgcctcttccagacgttatttccacgtctttcggagaaattactctggctctatcaggaagtcgaacgtccattgagtcgcgtgcttgcccatatggaggctcgcggtgtgcgcttagatgttccgttgttagaagcactcagcttcgagttggagaaagaactggaacgtcttgaaggcgaagtctttcgtttagcggggcatcccttcaatctcaactctcgcgaccaattggagaaagtgctctttgatgaattaggtttaacccctgtcacgcgtacagagaagaccggcaaacgttccacttcggcagcggccttggaagcacttcgtggtgctcacccgatcgtcgggttgattttgcagtaccgcgagctcagcaaactcaaatcaacctatcttgatccgttacctcgtcttgttcatccacgtacgggtcgtttacacacccgcttcaatcaaacggcgacagccaccgggcgcttgtcgtcgagtgacccgaacctccagaatattccagtgcgcacgccgctgggccaacgcattcgtaaagcgtttgttgcggaagaaggttggttattacttgcggccgattactcccagatcgaacttcgtgtattggcgcatctctctggcgacgagaatcttaaacgcgtgtttcgcgaaggcaaggatattcacactgaaaccgcagcctggatgttcgggcttgacccagccttagtggaccccaagatgcgtcgtgccgccaagaccgtcaactttggcgtactctatggtatgtcagcacatcgtcttagtcaggaattgggcattgactacaaagaagctgaagcgtttatcgagcgctatttccaatcctttccgaaagttcgcgcgtggattgaacgtaccctcgaagaaggtcgcactcgcggctatgtggaaacgttattcgggcgtcgtcgctacgttccagatcttgcatctcgtgtccgctcagtgcgcgaagctgctgagcgtatggcctttaatatgcctgttcagggaacagcggcggacctcatgaagatcgccatggtgaaattgtttccgcgcttgaaacccttaggagcccaccttcttttacaggtgcatgatgaattggtcttggaagtacccgaggatcgcgcagaagaagccaaagcactcgtgaaagaggttatggaaaacgcgtatccgttagatgttccgttggaggtcgaagtgggtgtaggccgtgattggcttgaagcgaaacaagactaatga

SEQ ID NO: 308 - protein, 844 aa, synthetic construct
  REGION 1..844: note = DNA Polymerase Variant
MHHHHHHGGSGMLPLFDLEEPPKRVLLVDGHHLAYRTFYALSLTTSRGEPVQMVYGFARSLLKALKEDGQAVVVVFDAKAPSFRHEAYEAYKAGRAPTPEDFPRQLALVKRLVDLLGLVRLEAPGYEADDVLGTLAKKAEREGMEVCILTGDRDFFQLLSEKVSVLLPDGTLVTPKDVQEKYGVPPERWVDFRALTGDRSDNIPGVAGIGEKTALRLLAEWGSVENLLKNLDRVKPDSLRRKIEAHLEDLRLSLDLARIRTDLPLEVDFKALRRRTPDLEGLRAFLEELEFGSLLHEFGLLGGEKPREEAPWPPPEGAFVGFLLSRKEPMWAELLALAAAAEGRVHRATSPVEALADLKEARGFLAKDLAVLALREGVALDPTDDPLLVAYLLDPANTNPEGVARRYGGEFTEDAAERALLSERLFQTLFPRLSEKLLWLYQEVERPLSRVLAHMEARGVRLDVPLLEALSFELEKELERLEGEVFRLAGHPFNLNSRDQLEKVLFDELGLTPVTRTEKTGKRSTSAAALEALRGAHPIVGLILQYRELSKLKSTYLDPLPRLVHPRTGRLHTRFNQTATATGRLSSSDPNLQNIPVRTPLGQRIRKAFVAEEGWLLLAADYSQIELRVLAHLSGDENLKRVFREGKDIHTETAAWMFGLDPALVDPKMRRAAKTVNFGVLYGMSAHRLSQELGIDYKEAEAFIERYFQSFPKVRAWIERTLEEGRTRGYVETLFGRRRYVPDLASRVRSVREAAERMAFNMPVQGTAADLMKIAMVKLFPRLKPLGAHLLLQVHDELVLEVPEDRAEEAKALVKEVMENAYPLDVPLEVEVGVGRDWLEAKQD

SEQ ID NO: 309 - DNA, 2538 bp, synthetic construct
  misc_feature 1..2538: note = DNA Polymerase Variant
  source 1..2538: mol_type = other DNA
atgcaccatcatcatcatcatggcggtagcggcatgttaccgctgtttgatttggaagaaccaccaaaacgcgtgctgcttgttgacggccatcatctggcgtatcgtaccttctacgcactgagccttacgacctcacgtggtgagcctgtccagatggtgtatgggtttgctcgctccctgctgaaagccctgaaggaagatggtcaagccgtagtagtggttttcgatgcgaaagcaccgtcgtttcgtcacgaagcgtacgaggcctataaagctggccgcgcaccgaccccggaagactttccgcgtcagttagcgctcgtcaaacgcctcgtggatttgctgggattagttcgcttggaagctcctggctacgaggcggacgacgtgctcggtacactggccaagaaagcagaacgtgaaggcatggaggtctgcattcttaccggtgatcgcgatttcttccagctgctgtctgagaaagtgagcgttttgctgcccgatggcacgttagtaaccccgaaagatgtccaagagaaatatggagttccgccagaacgttgggtggactttcgcgcactgactggtgatcgttcagacaacatcccgggcgttgccgggattggtgaaaagacggcgctgcgcctgctggcagaatggggctcggtggaaaatctgctcaagaaccttgatcgtgtgaaacctgatagcttacgccgcaagatcgaagcccacctggaagacttgcgtctgagtctggatcttgcgcgtattcgcaccgatctgccgttggaagtagactttaaagctctgcgtcgtcgcacacccgatttagaggggttacgcgcgttcctcgaagaactggagtttggctccctgctgcatgaattcggtttgttgggcggagagaaaccgcgtgaagaagcaccatggccgccgcccgaaggtgcctttgtcggctttcttctgtcacgcaaagagccaatgtgggcggaactgttagctcttgcagccgccgcggaagggcgtgttcaccgcgcgacctctcctgtcgaggccctcgctgacctcaaagaagcacgtggtttcttggcgaaagatttagccgtgcttgcattacgcgaaggcgttgcgctcgatccgacggacgacccgcttttggtggcttatttgctcgatcctgcgaataccaacccggaaggcgtagcccgtcgttacggcggcgagtttactgaagatgcggcagaacgcgcgttgcttagcgaacgcctcttccagacgttatttccacgtctttcggagaaattactctggctctatcaggaagtcgaacgtccattgagtcgcgtgcttgcccatatggaggctcgcggtgtgcgcttagatgttccgttgttagaagcactcagcttcgagttggagaaagaactggaacgtcttgaaggcgaagtctttcgtttagcggggcatcccttcaatctcaactctcgcgaccaattggagaaagtgctctttgatgaattaggtttaacccctgtcacgcgtacagagaagaccggcaaacgttccacttcggcagccgccttggaagcacttcgtggtgctcacccgatcgtcgaattgattttgcagtaccgcgagctcagcaaactcaaatcaacctatcttgatccgttacctcgtcttgttcatccacgtacgggtcgtttacacacccgcttcaatcaaacggcgacagccaccgggcgcttgtcgtcgagtgacccgaacctccagaatattccagtgcgcacgccgctgggccaacgcattcgtaaagcgtttgttgcggaagaaggttggttattacttgcggccgattactcccagatcgaacttcgtgtattggcgcatctctctggcgacgagaatcttaaacgcgtgtttcgcgaaggcaaggatattcacactgaaaccgcagcctggatgttcgggcttgacccagccttagtggaccccaagatgcgtcgtgccgccaagaccgtcaactttggcgtactctatggtatgtcagcacatcgtcttagtcaggaattgggcattgactacaaagaagctgaagcgtttatcgagcgctatttccaatcctttccgaaagttcgcgcgtggattgaacgtaccctcgaagaaggtcgcactcgcggctatgtggaaacgttattcgggcgtcgtcgctacgttccagatcttgcatctcgtgtccgctcagtgcgcgaagctgctgagcgtatggcctttaatatgcctgttcagggaacagcggcggacctcatgaagatcgccatggtgaaattgtttccgcgcttgaaacccttaggagcccaccttcttttacaggtgcatgatgaattggtcttggaagtacccgaggatcgcgcagaagaagccaaagcactcgtgaaagaggttatggaaaacgcgtatccgttagatgttccgttggaggtcgaagtgggtgtaggccgtgattggcttgaagcgaaacaagactaatga

SEQ ID NO: 310 - protein, 844 aa, synthetic construct
  REGION 1..844: note = DNA Polymerase Variant
MHHHHHHGGSGMLPLFDLEEPPKRVLLVDGHHLAYRTFYALSLTTSRGEPVQMVYGFARSLLKALKEDGQAVVVVFDAKAPSFRHEAYEAYKAGRAPTPEDFPRQLALVKRLVDLLGLVRLEAPGYEADDVLGTLAKKAEREGMEVCILTGDRDFFQLLSEKVSVLLPDGTLVTPKDVQEKYGVPPERWVDFRALTGDRSDNIPGVAGIGEKTALRLLAEWGSVENLLKNLDRVKPDSLRRKIEAHLEDLRLSLDLARIRTDLPLEVDFKALRRRTPDLEGLRAFLEELEFGSLLHEFGLLGGEKPREEAPWPPPEGAFVGFLLSRKEPMWAELLALAAAAEGRVHRATSPVEALADLKEARGFLAKDLAVLALREGVALDPTDDPLLVAYLLDPANTNPEGVARRYGGEFTEDAAERALLSERLFQTLFPRLSEKLLWLYQEVERPLSRVLAHMEARGVRLDVPLLEALSFELEKELERLEGEVFRLAGHPFNLNSRDQLEKVLFDELGLTPVTRTEKTGKRSTSAAALEALRGAHPIVELILQYRELSKLKSTYLDPLPRLVHPRTGRLHTRFNQTATATGRLSSSDPNLQNIPVRTPLGQRIRKAFVAEEGWLLLAADYSQIELRVLAHLSGDENLKRVFREGKDIHTETAAWMFGLDPALVDPKMRRAAKTVNFGVLYGMSAHRLSQELGIDYKEAEAFIERYFQSFPKVRAWIERTLEEGRTRGYVETLFGRRRYVPDLASRVRSVREAAERMAFNMPVQGTAADLMKIAMVKLFPRLKPLGAHLLLQVHDELVLEVPEDRAEEAKALVKEVMENAYPLDVPLEVEVGVGRDWLEAKQD

SEQ ID NO: 311 - DNA, 2538 bp, synthetic construct
  misc_feature 1..2538: note = DNA Polymerase Variant
  source 1..2538: mol_type = other DNA
atgcaccatcatcatcatcatggcggtagcggcatgttaccgctgtttgatttggaagaaccaccaaaacgcgtgctgcttgttgacggccatcatctggcgtatcgtaccttctacgcactgagccttacgacctcacgtggtgagcctgtccagatggtgtatgggtttgctcgctccctgctgaaagccctgaaggaagatggtcaagccgtagtagtggttttcgatgcgaaagcaccgtcgtttcgtcacgaagcgtacgaggcctataaagctggccgcgcaccgaccccggaagactttccgcgtcagttagcgctcgtcaaacgcctcgtggatttgctgggattagttcgcttggaagctcctggctacgaggcggacgacgtgctcggtacactggccaagaaagcagaacgtgaaggcatggaggtctgcattcttaccggtgatcgcgatttcttccagctgctgtctgagaaagtgagcgttttgctgcccgatggcacgttagtaaccccgaaagatgtccaagagaaatatggagttccgccagaacgttgggtggactttcgcgcactgactggtgatcgttcagacaacatcccgggcgttgccgggattggtgaaaagacggcgctgcgcctgctggcagaatggggctcggtggaaaatctgctcaagaaccttgatcgtgtgaaacctgatagcttacgccgcaagatcgaagcccacctggaagacttgcgtctgagtctggatcttgcgcgtattcgcaccgatctgccgttggaagtagactttaaagctctgcgtcgtcgcacacccgatttagaggggttacgcgcgttcctcgaagaactggagtttggctccctgctgcatgaattcggtttgttgggcggagagaaaccgcgtgaagaagcaccatggccgccgcccgaaggtgcctttgtcggctttcttctgtcacgcaaagagccaatgtgggcggaactgttagctcttgcagccgccgcggaagggcgtgttcaccgcgcgacctctcctgtcgaggccctcgctgacctcaaagaagcacgtggtttcttggcgaaagatttagccgtgcttgcattacgcgaaggcgttgcgctcgatccgacggacgacccgcttttggtggcttatttgctcgatcctgcgaataccaacccggaaggcgtagcccgtcgttacggcggcgagtttactgaagatgcggcagaacgcgcgttgcttagcgaacgcctcttccagacgttatttccacgtctttcggagaaattactctggctctatcaggaagtcgaacgtccattgagtcgcgtgcttgcccatatggaggctcgcggtgtgcgcttagatgttccgttgttagaagcactcagcttcgagttggagaaagaactggaacgtcttgaaggcgaagtctttcgtttagcggggcatcccttcaatctcaactctcgcgaccaattggagaaagtgctctttgatgaattaggtttaacccctatcacgcgtacagagaagaccggcaaacgttccacttcggcagccgccttggaagcacttcgtggtgctcacccgatcgtcgagttgattttgcagtaccgcgagctcagcaaactcaaatcaacctatcttgatccgttacctcgtcttgttcatccacgtacgggtcgtttacacacccgcttcaatcaaacggcgacagccaccgggcgcttgtcgtcgagtgacccgaacctccagaatattccagtgcgcacgccgctgggccaacgcattcgtaaagcgtttgttgcggaagaaggttggttattacttgcggccgattactcccagatcgaacttcgtgtattggcgcatctctctggcgacgagaatcttaaacgcgtgtttcgcgaaggcaaggatattcacactgaaaccgcagcctggatgttcgggcttgacccagccttagtggaccccaagatgcgtcgtgccgccaagaccgtcaactttggcgtactctatggtatgtcagcacatcgtcttagtcaggaattgggcattgactacaaagaagctgaagcgtttatcgagcgctatttccaatcctttccgaaagttcgcgcgtggattgaacgtaccctcgaagaaggtcgcactcgcggctatgtggaaacgttattcgggcgtcgtcgctacgttccagatcttgcatctcgtgtccgctcagtgcgcgaagctgctgagcgtatggcctttaatatgcctgttcagggaacagcggcggacctcatgaagatcgccatggtgaaattgtttccgcgcttgaaacccttaggagcccaccttcttttacaggtgcatgatgaattggtcttggaagtacccgaggatcgcgcagaagaagccaaagcactcgtgaaagaggttatggaaaacgcgtatccgttagatgttccgttggaggtcgaagtgggtgtaggccgtgattggcttgaagcgaaacaagactaatga

SEQ ID NO: 312 - protein, 844 aa, synthetic construct
  REGION 1..844: note = DNA Polymerase Variant
MHHHHHHGGSGMLPLFDLEEPPKRVLLVDGHHLAYRTFYALSLTTSRGEPVQMVYGFARSLLKALKEDGQAVVVVFDAKAPSFRHEAYEAYKAGRAPTPEDFPRQLALVKRLVDLLGLVRLEAPGYEADDVLGTLAKKAEREGMEVCILTGDRDFFQLLSEKVSVLLPDGTLVTPKDVQEKYGVPPERWVDFRALTGDRSDNIPGVAGIGEKTALRLLAEWGSVENLLKNLDRVKPDSLRRKIEAHLEDLRLSLDLARIRTDLPLEVDFKALRRRTPDLEGLRAFLEELEFGSLLHEFGLLGGEKPREEAPWPPPEGAFVGFLLSRKEPMWAELLALAAAAEGRVHRATSPVEALADLKEARGFLAKDLAVLALREGVALDPTDDPLLVAYLLDPANTNPEGVARRYGGEFTEDAAERALLSERLFQTLFPRLSEKLLWLYQEVERPLSRVLAHMEARGVRLDVPLLEALSFELEKELERLEGEVFRLAGHPFNLNSRDQLEKVLFDELGLTPITRTEKTGKRSTSAAALEALRGAHPIVELILQYRELSKLKSTYLDPLPRLVHPRTGRLHTRFNQTATATGRLSSSDPNLQNIPVRTPLGQRIRKAFVAEEGWLLLAADYSQIELRVLAHLSGDENLKRVFREGKDIHTETAAWMFGLDPALVDPKMRRAAKTVNFGVLYGMSAHRLSQELGIDYKEAEAFIERYFQSFPKVRAWIERTLEEGRTRGYVETLFGRRRYVPDLASRVRSVREAAERMAFNMPVQGTAADLMKIAMVKLFPRLKPLGAHLLLQVHDELVLEVPEDRAEEAKALVKEVMENAYPLDVPLEVEVGVGRDWLEAKQD

SEQ ID NO: 313 - DNA, 2538 bp, synthetic construct
  misc_feature 1..2538: note = DNA Polymerase Variant
  source 1..2538: mol_type = other DNA
atgcaccatcatcatcatcatggcggtagcggcatgttaccgctgtttgatttggaagaaccaccaaaacgcgtgctgcttgttgacggccatcatctggcgtatcgtaccttctacgcactgagccttacgacctcacgtggtgagcctgtccagatggtgtatgggtttgctcgctccctgctgaaagccctgaaggaagatggtcaagccgtagtagtggttttcgatgcgaaagcaccgtcgtttcgtcacgaagcgtacgaggcctataaagctggccgcgcaccgaccccggaagactttccgcgtcagttagcgctcgtcaaacgcctcgtggatttgctgggattagttcgcttggaagctcctggctacgaggcggacgacgtgctcggtacactggccaagaaagcagaacgtgaaggcatggaggtctgcattcttaccggtgatcgcgatttcttccagctgctgtctgagaaagtgagcgttttgctgcccgatggcacgttagtaaccccgaaagatgtccaagagaaatatggagttccgccagaacgttgggtggactttcgcgcactgactggtgatcgttcagacaacatcccgggcgttgccgggattggtgaaaagacggcgctgcgcctgctggcagaatggggctcggtggaaaatctgctcaagaaccttgatcgtgtgaaacctgatagcttacgccgcaagatcgaagcccacctggaagacttgcgtctgagtctggatcttgcgcgtattcgcaccgatctgccgttggaagtagactttaaagctctgcgtcgtcgcacacccgatttagaggggttacgcgcgttcctcgaagaactggagtttggctccctgctgcatgaattcggtttgttgggcggagagaaaccgcgtgaagaagcaccatggccgccgcccgaaggtgcctttgtcggctttcttctgtcacgcaaagagccaatgtgggcggaactgttagctcttgcagccgccgcggaagggcgtgttcaccgcgcgacctctcctgtcgaggccctcgctgacctcaaagaagcacgtggtttcttggcgaaagatttagccgtgcttgcattacgcgaaggcgttgcgctcgatccgacggacgacccgcttttggtggcttatttgctcgatcctgcgaataccaacccggaaggtgtagcccgtcgttacggcggcgagtttactgaagatgcggcagaacgcgcgttgcttagcgaacgcctcttccagacgttatttccacgtctttcggagaaattactctggctctatcaggaagtcgaacgtccattgagtcgcgtgcttgcccatatggaggctcgcggtgtgcgcttagatgttccgttgttagaagcactcagcttcgagttggagaaagaactggaacgtcttgaaggcgaagtctttcgtttagcggggcatcccttcaatctcaactctcgcgaccaattggagaaagtgctctttgatgaattaggtttaacccctatcacgcgtacagagaagaccggcaaacgttccacttcggcagccgccttggaagcacttcgtggtgctcacccgatcgtcaacttgattttgcagtaccgcgagctcagcaaactcaaatcaacctatcttgatccgttacctcgtcttgttcatccacgtacgggtcgtttacacacccgcttcaatcaaacggcgacagccaccgggcgcttgtcgtcgagtgacccgaacctccagaatattccagtgcgcacgccgttaggccaacgcattcgtaaagcgtttgttgcggaagaaggttggttattacttgcggccgattactcccagatcgaacttcgtgtattggcgcatctctctggcgacgagaatcttaaacgcgtgtttcgcgaaggcaaggatattcacactgaaaccgcagcctggatgttcgggcttgacccagccttagtggaccccaagatgcgtcgtgccgccaagaccgtcaactttggcgtactctatggtatgtcagcacatcgtcttagtcaggaattgggcattgactacaaagaagctgaagcgtttatcgagcgctatttccaatcctttccgaaagttcgcgcgtggattgaacgtaccctcgaagaaggtcgcactcgcggctatgtggaaacgttattcgggcgtcgtcgctacgttccagatcttgcatctcgtgtccgctcagtgcgcgaagctgctgagcgtatggccttcaatatgcctgttcagggaacagcggcggacctcatgaagatcgccatggtgaaattgtttccgcgcttgaaacccttaggagcccaccttcttttacaggtgcatgatgaattggtcttggaagtacccgaggatcgcgcagaagaagccaaagcactcgtgaaagaggttatggaaaacgcgtatccgttagatgttccgttggaggtcgaagtgggtgtaggccgtgattggcttgaagcgaaacaagactaatga

SEQ ID NO: 314 - protein, 844 aa, synthetic construct
  REGION 1..844: note = DNA Polymerase Variant
MHHHHHHGGSGMLPLFDLEEPPKRVLLVDGHHLAYRTFYALSLTTSRGEPVQMVYGFARSLLKALKEDGQAVVVVFDAKAPSFRHEAYEAYKAGRAPTPEDFPRQLALVKRLVDLLGLVRLEAPGYEADDVLGTLAKKAEREGMEVCILTGDRDFFQLLSEKVSVLLPDGTLVTPKDVQEKYGVPPERWVDFRALTGDRSDNIPGVAGIGEKTALRLLAEWGSVENLLKNLDRVKPDSLRRKIEAHLEDLRLSLDLARIRTDLPLEVDFKALRRRTPDLEGLRAFLEELEFGSLLHEFGLLGGEKPREEAPWPPPEGAFVGFLLSRKEPMWAELLALAAAAEGRVHRATSPVEALADLKEARGFLAKDLAVLALREGVALDPTDDPLLVAYLLDPANTNPEGVARRYGGEFTEDAAERALLSERLFQTLFPRLSEKLLWLYQEVERPLSRVLAHMEARGVRLDVPLLEALSFELEKELERLEGEVFRLAGHPFNLNSRDQLEKVLFDELGLTPITRTEKTGKRSTSAAALEALRGAHPIVNLILQYRELSKLKSTYLDPLPRLVHPRTGRLHTRFNQTATATGRLSSSDPNLQNIPVRTPLGQRIRKAFVAEEGWLLLAADYSQIELRVLAHLSGDENLKRVFREGKDIHTETAAWMFGLDPALVDPKMRRAAKTVNFGVLYGMSAHRLSQELGIDYKEAEAFIERYFQSFPKVRAWIERTLEEGRTRGYVETLFGRRRYVPDLASRVRSVREAAERMAFNMPVQGTAADLMKIAMVKLFPRLKPLGAHLLLQVHDELVLEVPEDRAEEAKALVKEVMENAYPLDVPLEVEVGVGRDWLEAKQD

SEQ ID NO: 315 - DNA, 2538 bp, synthetic construct
  misc_feature 1..2538: note = DNA Polymerase Variant
  source 1..2538: mol_type = other DNA
atgcaccatcatcatcatcatggcggtagcggcatgttaccgctgtttgatttggaagaaccaccaaaacgcgtgctgcttgttgacggccatcatctggcgtatcgtaccttctacgcactgagccttacgacctcacgtggtgagcctgtccagatggtgtatgggtttgctcgctccctgctgaaagccctgaaggaagatggtcaagccgtagtagtggttttcgatgcgaaagcaccgtcgtttcgtcacgaagcgtacgaggcctataaagctggccgcgcaccgaccccggaagactttccgcgtcagttagcgctcgtcaaacgcctcgtggatttgctgggattagttcgcttggaagctcctggctacgaggcggacgacgtgctcggtacactggccaagaaagcagaacgtgaaggcatggaggtctgcattcttaccggtgatcgcgatttcttccagctgctgtctgagaaagtgagcgttttgctgcccgatggcacgttagtaaccccgaaagatgtccaagagaaatatggagttccgccagaacgttgggtggactttcgcgcactgactggtgatcgttcagacaacatcccgggcgttgccgggattggtgaaaagacggcgctgcgcctgctggcagaatggggctcggtggaaaatctgctcaagaaccttgatcgtgtgaaacctgatagcttacgccgcaagatcgaagcccacctggaagacttgcgtctgagtctggatcttgcgcgtattcgcaccgatctgccgttggaagtagactttaaagctctgcgtcgtcgcacacccgatttagaggggttacgcgcgttcctcgaagaactggagtttggctccctgctgcatgaattcggtttgttgggcggagagaaaccgcgtgaagaagcaccatggccgccgcccgaaggtgcctttgtcggctttcttctgtcacgcaaagagccaatgtgggcggaactgttagctcttgcagccgccgcggaagggcgtgttcaccgcgcgacctctcctgtcgaggccctcgctgacctcaaagaagcacgtggtttcttggcgaaagatttagccgtgcttgcattacgcgaatgcgttgcgctcgatccgacggacgacccgcttttggtggcttatttgctcgatcctgcgaataccaacccggaaggtgtagcccgtcgttacggcggcgagtttactgaagatgcggcagaacgcgcgttgcttagcgaacgcctcttccagacgttatttccacgtctttcggagaaattactctggctctatcaggaagtcgaacgtccattgagtcgcgtgcttgcccatatggaggctcgcggtgtgcgcttagatgttccgttgttagaagcactcagcttcgagttggagaaagaactggaacgtcttgaaggcgaagtctttcgtttagcggggcatcccttcaatctcaactctcgcgaccaattggagaaagtgctctttgatgaattaggtttaacccctatcacgcgtacagagaagaccggcaaacgttccacttcggcagccgccttggaagcacttcgtggtgctcacccgatcgtcgaattgattttgcagtaccgcgagctcagcaaactcaaatcaacctatcttgatccgttacctcgtcttgttcatccacgtacgggtcgtttacacacccgcttcaatcaaacggcgacagccaccgggcgcttgtcgtcgagtgacccgaacctccagaatattccagtgcgcacgccgttaggccaacgcattcgtaaagcgtttgttgcggaagaaggttggttattacttgcggccgattactcccagatcgaacttcgtgtattggcgcatctctctggcgacgagaatcttaaacgcgtgtttcgcgaaggcaaggatattcacactgaaaccgcagcctggatgttcgggcttgacccagccttagtggaccccaagatgcgtcgtgccgccaagaccgtcaactttggcgtactctatggtatgtcagcacatcgtcttagtcaggaattgggcattgactacaaagaagctgaagcgtttatcgagcgctatttccaatcctttccgaaagttcgcgcgtggattgaacgtaccctcgaagaaggtcgcactcgcggctatgtggaaacgttattcgggcgtcgtcgctacgttccagatcttgcatctcgtgtccgctcagtgcgcgaagctgctgagcgtatggccttcaatatgcctgttcagggaacagcggcggacctcatgaagatcgccatggtgaaattgtttccgcgcttgaaacccttaggagcccaccttcttttacaggtgcatgatgaattggtcttggaagtacccgaggatcgcgcagaagaagccaaagcactcgtgaaagaggttatggaaaacgcgtatccgttagatgttccgttggaggtcgaagtgggtgtaggccgtgattggcttgaagcgaaacaagactaatga

SEQ ID NO: 316 - protein, 844 aa, synthetic construct
  REGION 1..844: note = DNA Polymerase Variant
MHHHHHHGGSGMLPLFDLEEPPKRVLLVDGHHLAYRTFYALSLTTSRGEPVQMVYGFARSLLKALKEDGQAVVVVFDAKAPSFRHEAYEAYKAGRAPTPEDFPRQLALVKRLVDLLGLVRLEAPGYEADDVLGTLAKKAEREGMEVCILTGDRDFFQLLSEKVSVLLPDGTLVTPKDVQEKYGVPPERWVDFRALTGDRSDNIPGVAGIGEKTALRLLAEWGSVENLLKNLDRVKPDSLRRKIEAHLEDLRLSLDLARIRTDLPLEVDFKALRRRTPDLEGLRAFLEELEFGSLLHEFGLLGGEKPREEAPWPPPEGAFVGFLLSRKEPMWAELLALAAAAEGRVHRATSPVEALADLKEARGFLAKDLAVLALRECVALDPTDDPLLVAYLLDPANTNPEGVARRYGGEFTEDAAERALLSERLFQTLFPRLSEKLLWLYQEVERPLSRVLAHMEARGVRLDVPLLEALSFELEKELERLEGEVFRLAGHPFNLNSRDQLEKVLFDELGLTPITRTEKTGKRSTSAAALEALRGAHPIVELILQYRELSKLKSTYLDPLPRLVHPRTGRLHTRFNQTATATGRLSSSDPNLQNIPVRTPLGQRIRKAFVAEEGWLLLAADYSQIELRVLAHLSGDENLKRVFREGKDIHTETAAWMFGLDPALVDPKMRRAAKTVNFGVLYGMSAHRLSQELGIDYKEAEAFIERYFQSFPKVRAWIERTLEEGRTRGYVETLFGRRRYVPDLASRVRSVREAAERMAFNMPVQGTAADLMKIAMVKLFPRLKPLGAHLLLQVHDELVLEVPEDRAEEAKALVKEVMENAYPLDVPLEVEVGVGRDWLEAKQD

SEQ ID NO: 317 - DNA, 2538 bp, synthetic construct
  misc_feature 1..2538: note = DNA Polymerase Variant
  source 1..2538: mol_type = other DNA
atgcaccatcatcatcatcatggcggtagcggcatgttaccgctgtttgatttggaagaaccaccaaaacgcgtgctgcttgttgacggccatcatctggcgtatcgtaccttctacgcactgagccttacgacctcacgtggtgagcctgtccagatggtgtatgggtttgctcgctccctgctgaaagccctgaaggaagatggtcaagccgtagtagtggttttcgatgcgaaagcaccgtcgtttcgtcacgaagcgtacgaggcctataaagctggccgcgcaccgaccccggaagactttccgcgtcagttagcgctcgtcaaacgcctcgtggatttgctgggattagttcgcttggaagctcctggctacgaggcggacgacgtgctcggtacactggccaagaaagcagaacgtgaaggcatggaggtctgcattcttaccggtgatcgcgatttcttccagctgctgtctgagaaagtgagcgttttgctgcccgatggcacgttagtaaccccgaaagatgtccaagagaaatatggagttccgccagaacgttgggtggactttcgcgcactgactggtgatcgttcagacaacatcccgggcgttgccgggattggtgaaaagacggcgctgcgcctgctggcagaatggggctcggtggaaaatctgctcaagaaccttgatcgtgtgaaacctgatagcttacgccgcaagatcgaagcccacctggaagacttgcgtctgagtctggatcttgcgcgtattcgcaccgatctgccgttggaagtagactttaaagctctgcgtcgtcgcacacccgatttagaggggttacgcgcgttcctcgaagaactggagtttggctccctgctgcatgaattcggtttgttgggcggagagaaaccgcgtgaagaagcaccatggccgccgcccgaaggtgcctttgtcggctttcttctgtcacgcaaagagccaatgtgggcggaactgttagctcttgcagccgccgcggaagggcgtgttcaccgcgcgacctctcctgtcgaggccctcgctgacctcaaagaagcacgtggtttcttggcgaaagatttagccgtgcttgcattacgcgaaggcgttgcgctcgatccgacggacgacccgcttttggtggcttatttgctcgatcctgcgaataccaacccggaatatgtagcccgtcgttacggcggcgagtttactgaagatgcggcagaacgcgcgttgcttagcgaacgcctcttccagacgttatttccacgtctttcggagaaattactctggctctatcaggaagtcgaacgtccattgagtcgcgtgcttgcccatatggaggctcgcggtgtgcgcttagatgttccgttgttagaagcactcagcttcgagttggagaaagaactggaacgtcttgaaggcgaagtctttcgtttagcggggcatcccttcaatctcaactctcgcgaccaattggagaaagtgctctttgatgaattaggtttaacccctatccatcgtacagagaagaccggcaaacgttccacttcggcagccgccttggaagcacttcgtggtgctcacccgatcgtcgagttgattttgcagtaccgcgagctcagcaaactcaaatcaacctatcttgatccgttacctcgtcttgttcatccacgtacgggtcgtttacacacccgcttcaatcaaacggcgacagccaccgggcgcttgtcgtcgagtgacccgaacctccagaatattccagtgcgcacgccgttaggccaacgcattcgtaaagcgtttgttgcggaagaaggttggttattacttgcggccgattactcccagatcgaacttcgtgtattggcgcatctctctggcgacgagaatcttaaacgcgtgtttcgcgaaggcaaggatattcacactgaaaccgcagcctggatgttcgggcttgacccagccttagtggaccccaagatgcgtcgtgccgccaagaccgtcaactttggcgtactctatggtatgtcagcacatcgtcttagtcaggaattgggcattgactacaaagaagctgaagcgtttatcgagcgctatttccaatcctttccgaaagttcgcgcgtggattgaacgtaccctcgaagaaggtcgcactcgcggctatgtggaaacgttattcgggcgtcgtcgctacgttccagatcttgcatctcgtgtccgctcagtgcgcgaagctgctgagcgtatggccttcaatatgcctgttcagggaacagcggcggacctcatgaagatcgccatggtgaaattgtttccgcgcttgaaacccttaggagcccaccttcttttacaggtgcatgatgaattggtcttggaagtacccgaggatcgcgcagaagaagccaaagcactcgtgaaagaggttatggaaaacgcgtatccgttagatgttccgttggaggtcgaagtgggtgtaggccgtgattggcttgaagcgaaacaagactaatga

SEQ ID NO: 318 - protein, 844 aa, synthetic construct
  REGION 1..844: note = DNA Polymerase Variant
MHHHHHHGGSGMLPLFDLEEPPKRVLLVDGHHLAYRTFYALSLTTSRGEPVQMVYGFARSLLKALKEDGQAVVVVFDAKAPSFRHEAYEAYKAGRAPTPEDFPRQLALVKRLVDLLGLVRLEAPGYEADDVLGTLAKKAEREGMEVCILTGDRDFFQLLSEKVSVLLPDGTLVTPKDVQEKYGVPPERWVDFRALTGDRSDNIPGVAGIGEKTALRLLAEWGSVENLLKNLDRVKPDSLRRKIEAHLEDLRLSLDLARIRTDLPLEVDFKALRRRTPDLEGLRAFLEELEFGSLLHEFGLLGGEKPREEAPWPPPEGAFVGFLLSRKEPMWAELLALAAAAEGRVHRATSPVEALADLKEARGFLAKDLAVLALREGVALDPTDDPLLVAYLLDPANTNPEYVARRYGGEFTEDAAERALLSERLFQTLFPRLSEKLLWLYQEVERPLSRVLAHMEARGVRLDVPLLEALSFELEKELERLEGEVFRLAGHPFNLNSRDQLEKVLFDELGLTPIHRTEKTGKRSTSAAALEALRGAHPIVELILQYRELSKLKSTYLDPLPRLVHPRTGRLHTRFNQTATATGRLSSSDPNLQNIPVRTPLGQRIRKAFVAEEGWLLLAADYSQIELRVLAHLSGDENLKRVFREGKDIHTETAAWMFGLDPALVDPKMRRAAKTVNFGVLYGMSAHRLSQELGIDYKEAEAFIERYFQSFPKVRAWIERTLEEGRTRGYVETLFGRRRYVPDLASRVRSVREAAERMAFNMPVQGTAADLMKIAMVKLFPRLKPLGAHLLLQVHDELVLEVPEDRAEEAKALVKEVMENAYPLDVPLEVEVGVGRDWLEAKQD

SEQ ID NO: 319 - DNA, 2538 bp, synthetic construct
  misc_feature 1..2538: note = DNA Polymerase Variant
  source 1..2538: mol_type = other DNA
atgcaccatcatcatcatcatggcggtagcggcatgttaccgctgtttgatttggaagaaccaccaaaacgcgtgctgcttgttgacggccatcatctggcgtatcgtaccttctacgcactgagccttacgacctcacgtggtgagcctgtccagatggtgtatgggtttgctcgctccctgctgaaagccctgaaggaagatggtcaagccgtagtagtggttttcgatgcgaaagcaccgtcgtttcgtcacgaagcgtacgaggcctataaagctggccgcgcaccgaccccggaagactttccgcgtcagttagcgctcgtcaaacgcctcgtggatttgctgggattagttcgcttggaagctcctggctacgaggcggacgacgtgctcggtacactggccaagaaagcagaacgtgaaggcatggaggtctgcattcttaccggtgatcgcgatttcttccagctgctgtctgagaaagtgagcgttttgctgcccgatggcacgttagtaaccccgaaagatgtccaagagaaatatggagttccgccagaacgttgggtggactttcgcgcactgactggtgatcgttcagacaacatcccgggcgttgccgggattggtgaaaagacggcgctgcgcctgctggcagaatggggctcggtggaaaatctgctcaagaaccttgatcgtgtgaaacctgatagcttacgccgcaagatcgaagcccacctggaagacttgcgtctgagtctggatcttgcgcgtattcgcaccgatctgccgttggaagtagactttaaagctctgcgtcgtcgcacacccgatttagaggggttacgcgcgttcctcgaagaactggagtttggctccctgctgcatgaattcggtttgttgggcggagagaaaccgcgtgaagaagcaccatggccgccgcccgaaggtgcctttgtcggctttcttctgtcacgcaaagagccaatgtgggcggaactgttagctcttgcagccgccgcggaagggcgtgttcaccgcgcgacctctcctgtcgaggccctcgctgacctcaaagaagcacgtggtttcttggcgaaagatttagccgtgcttgcattacgcgaaggcgttgcgctcgatccgacggacgacccgcttttggtggcttatttgctcgatcctgcgaataccaacccggaaggtgtagcccgtcgttacggcggcgagtttactgaagatgcggcagaacgcgcgttgcttagcgaacgcctcttccagacgttatttccacgtctttcggagaaattactctggctctatcaggaagtcgaacgtccattgagtcgcgtgcttgcccatatggaggctcgcggtgtgcgcttagatgttccgttgttagaagcactcagcttcgagttggagaaagaactggaacgtcttgaaggcgaagtctttcgtttagcggggcatcccttcaatctcaactctcgcgaccaattggagaaagtgctctttgatgaattaggtttaacccctatcacgcgtacagagaagaccggcaaacgttccacttcggcagccgccttggaagcacttcgtggtgctcacccgatcgtcaacttgattttgcagtaccgcgagctcagcaaactcaaaagcacctatattgaccgtttacctcgtcttgttcatccacgtacgggtcgtttacacacccgcttcaatcaaacggcgacagccaccgggcgcttgtcgtcgagtgacccgaacctccagaatattccagtgcgcacgccgttaggccaacgcattcgtaaagcgtttgttgcggaagaaggttggttattacttgcggccgattactcccagatcgaacttcgtgtattggcgcatctctctggcgacgagaatcttaaacgcgtgtttcgcgaaggcaaggatattcacactgaaaccgcagcctggatgttcgggcttgacccagccttagtggaccccaagatgcgtcgtgccgccaagaccgtcaactttggcgtactctatggtatgtcagcacatcgtcttagtcaggaattgggcattgactacaaagaagctgaagcgtttatcgagcgctatttccaatcctttccgaaagttcgcgcgtggattgaacgtaccctcgaagaaggtcgcactcgcggctatgtggaaacgttattcgggcgtcgtcgctacgttccagatcttgcatctcgtgtccgctcagtgcgcgaagctgctgagcgtatggcctttaatatgcctgttcagggaacagcggcggacctcatgaagatcgccatggtgaaattgtttccgcgcttgaaacccttaggagcccaccttcttttacaggtgcatgatgaattggtcttggaagtacccgaggatcgcgcagaagaagccaaagcactcgtgaaagaggttatggaaaacgcgtatccgttagatgttccgttggaggtcgaagtgggtgtaggccgtgattggcttgaagcgaaacaagactaatga

SEQ ID NO: 320 - protein, 844 aa, synthetic construct
  REGION 1..844: note = DNA Polymerase Variant
MHHHHHHGGSGMLPLFDLEEPPKRVLLVDGHHLAYRTFYALSLTTSRGEPVQMVYGFARSLLKALKEDGQAVVVVFDAKAPSFRHEAYEAYKAGRAPTPEDFPRQLALVKRLVDLLGLVRLEAPGYEADDVLGTLAKKAEREGMEVCILTGDRDFFQLLSEKVSVLLPDGTLVTPKDVQEKYGVPPERWVDFRALTGDRSDNIPGVAGIGEKTALRLLAEWGSVENLLKNLDRVKPDSLRRKIEAHLEDLRLSLDLARIRTDLPLEVDFKALRRRTPDLEGLRAFLEELEFGSLLHEFGLLGGEKPREEAPWPPPEGAFVGFLLSRKEPMWAELLALAAAAEGRVHRATSPVEALADLKEARGFLAKDLAVLALREGVALDPTDDPLLVAYLLDPANTNPEGVARRYGGEFTEDAAERALLSERLFQTLFPRLSEKLLWLYQEVERPLSRVLAHMEARGVRLDVPLLEALSFELEKELERLEGEVFRLAGHPFNLNSRDQLEKVLFDELGLTPITRTEKTGKRSTSAAALEALRGAHPIVNLILQYRELSKLKSTYIDRLPRLVHPRTGRLHTRFNQTATATGRLSSSDPNLQNIPVRTPLGQRIRKAFVAEEGWLLLAADYSQIELRVLAHLSGDENLKRVFREGKDIHTETAAWMFGLDPALVDPKMRRAAKTVNFGVLYGMSAHRLSQELGIDYKEAEAFIERYFQSFPKVRAWIERTLEEGRTRGYVETLFGRRRYVPDLASRVRSVREAAERMAFNMPVQGTAADLMKIAMVKLFPRLKPLGAHLLLQVHDELVLEVPEDRAEEAKALVKEVMENAYPLDVPLEVEVGVGRDWLEAKQD

SEQ ID NO: 321 - DNA, 2538 bp, synthetic construct
  misc_feature 1..2538: note = DNA Polymerase Variant
  source 1..2538: mol_type = other DNA
atgcaccatcatcatcatcatggcggtagcggcatgttaccgctgtttgatttggaagaaccaccaaaacgcgtgctgcttgttgacggccatcatctggcgtatcgtaccttctacgcactgagccttacgacctcacgtggtgagcctgtccagatggtgtatgggtttgctcgctccctgctgaaagccctgaaggaagatggtcaagccgtagtagtggttttcgatgcgaaagcaccgtcgtttcgtcacgaagcgtacgaggcctataaagctggccgcgcaccgaccccggaagactttccgcgtcagttagcgctcgtcaaacgcctcgtggatttgctgggattagttcgcttggaagctcctggctacgaggcggacgacgtgctcggtacactggccaagaaagcagaacgtgaaggcatggaggtctgcattcttaccggtgatcgcgatttcttccagctgctgtctgagaaagtgagcgttttgctgcccgatggcacgttagtaaccccgaaagatgtgcaagagaaatatggagttccgccagaacgttgggtggactttcgcgcactgactggtgatcgttcagacaacatcccgggcgttgccgggattggtgaaaagacggcgctgcgcctgctggcagaatggggctcggtggaaaatctgctcaagaaccttgatcgtgtgaaacctgatagcttacgccgcaagatcgaagcccacctggaagacttgcgtctgagtctggatcttgcgcgtattcgcaccgatctgccgttggaagtagactttaaagctctgcgtcgtcgcacacccgatttagaggggttacgcgcgttcctcgaagaactggagtttggctccctgctgcatgaattcggtttgttgggcggagagaaaccgcgtgaagaagcaccatggccgccgcccgaaggtgcctttgtcggctttcttctgtcacgcaaagagccaatgtgggcggaactgttagctcttgcagccgccgcggaagggcgtgttcaccgcgcgacctctcctgtcgaggccctcgctgacctcaaagaagcacgtggtttcttggcgaaagatttagccgtgcttgcattacgcgaaggtgttgcgctcgatccgacggacgacccgcttttggtggcttatttgctcgatcctgcgaataccaacccggaacgtgtcgcccgtcgttacggcggcgagtttactgaagatgcggcagaacgcgcgttgcttagcgaacgcctcttccagacgttatttccacgtctttcggagaaattactctggctctatcaggaagtcgaacgtccattgagtcgcgtgcttgcccatatggaggctcgcggtgtgcgcttagatgttccgttgttagaagcactcagcttcgagttggagaaagaactggaacgtcttgaaggcgaagtctttcgtttagcggggcatcccttcaatctcaactctcgcgaccaattggagaaagtgctctttgatgaattaggtttaacccctgtcacgcgtacagagaagaccggcaaacgttccacttcggcaggtgccttggaagcacttcgtggtgctcacccgatcgtcgacttgattttgcagtatcgcgagctcagcaaactcaaatcaacctatcttgataggttacctcgtcttgttcatccacgtacgggtcgtttacacacccgcttcaatcaaacggcgacagccaccgggcgcttgtcgtcgagtgacccgaacctccagaatattccagtgcgcacgccgctgggccaacgcattcgtaaagcgtttgttgcggaagaaggttggttattacttgcggccgattactcccagatcgaacttcgtgtattggcgcatctctctggcgacgagaatcttaaacgcgtgtttcgcgaaggcaaggatattcacactgaaaccgcagcctggatgttcggggtggacccagccttagtggaccccaagatgcgtcgtgccgccaagaccgtcaactttggcgtactctatggtatgtcagcacatcgtcttagtcaggaattgggcattgactacaaagaagctgaagcgtttatcgagcgctatttccaatcctttccgaaagttcgcgcgtggattgaacgtaccctcgaagaaggtcgcactcgcggctatgtggaaacgttattcgggcgtcgtcgctacgttccagatcttgcatctcgtgtccgctcagtgcgcgaagctgctgagcgtatggcctggaatatgcctgttcagggaacagcggcggacctcatgaagatcgccatggtgaaattgtttccgcgcttgaaacccttaggagcccaccttcttttacaggtgcatgatgaattggtcttggaagtacccgaggatcgcgcagaagaagccaaagcactcgtgaaagaggttatggaaaacgcgtatccgttagatgttccgttggaggtcgaagtgggtgtaggccgtgattggcttgaagcgaaacaagactaatga

SEQ ID NO: 322 - protein, 844 aa, synthetic construct
  REGION 1..844: note = DNA Polymerase Variant
MHHHHHHGGSGMLPLFDLEEPPKRVLLVDGHHLAYRTFYALSLTTSRGEPVQMVYGFARSLLKALKEDGQAVVVVFDAKAPSFRHEAYEAYKAGRAPTPEDFPRQLALVKRLVDLLGLVRLEAPGYEADDVLGTLAKKAEREGMEVCILTGDRDFFQLLSEKVSVLLPDGTLVTPKDVQEKYGVPPERWVDFRALTGDRSDNIPGVAGIGEKTALRLLAEWGSVENLLKNLDRVKPDSLRRKIEAHLEDLRLSLDLARIRTDLPLEVDFKALRRRTPDLEGLRAFLEELEFGSLLHEFGLLGGEKPREEAPWPPPEGAFVGFLLSRKEPMWAELLALAAAAEGRVHRATSPVEALADLKEARGFLAKDLAVLALREGVALDPTDDPLLVAYLLDPANTNPERVARRYGGEFTEDAAERALLSERLFQTLFPRLSEKLLWLYQEVERPLSRVLAHMEARGVRLDVPLLEALSFELEKELERLEGEVFRLAGHPFNLNSRDQLEKVLFDELGLTPVTRTEKTGKRSTSAGALEALRGAHPIVDLILQYRELSKLKSTYLDRLPRLVHPRTGRLHTRFNQTATATGRLSSSDPNLQNIPVRTPLGQRIRKAFVAEEGWLLLAADYSQIELRVLAHLSGDENLKRVFREGKDIHTETAAWMFGVDPALVDPKMRRAAKTVNFGVLYGMSAHRLSQELGIDYKEAEAFIERYFQSFPKVRAWIERTLEEGRTRGYVETLFGRRRYVPDLASRVRSVREAAERMAWNMPVQGTAADLMKIAMVKLFPRLKPLGAHLLLQVHDELVLEVPEDRAEEAKALVKEVMENAYPLDVPLEVEVGVGRDWLEAKQD

SEQ ID NO: 323 - DNA, 2538 bp, synthetic construct
  misc_feature 1..2538: note = DNA Polymerase Variant
  source 1..2538: mol_type = other DNA
atgcaccatcatcatcatcatggcggtagcggcatgttaccgctgtttgatttggaagaaccaccaaaacgcgtgctgcttgttgacggccatcatctggcgtatcgtaccttctacgcactgagccttacgacctcacgtggtgagcctgtccagatggtgtatgggtttgctcgctccctgctgaaagccctgaaggaagatggtcaagccgtagtagtggttttcgatgcgaaagcaccgtcgtttcgtcacgaagcgtacgaggcctataaagctggccgcgcaccgaccccggaagactttccgcgtcagttagcgctcgtcaaacgcctcgtggatttgctgggattagttcgcttggaagctcctggctacgaggcggacgacgtgctcggtacactggccaagaaagcagaacgtgaaggcatggaggtctgcattcttaccggtgatcgcgatttcttccagctgctgtctgagaaagtgagcgttttgctgcccgatggcacgttagtaaccccgaaagatgtgcaagagaaatatggagttccgccagaacgttgggtggactttcgcgcactgactggtgatcgttcagacaacatcccgggcgttgccgggattggtgaaaagacggcgctgcgcctgctggcagaatggggctcggtggaaaatctgctcaagaaccttgatcgtgtgaaacctgatagcttacgccgcaagatcgaagcccacctggaagacttgcgtctgagtctggatcttgtccgtattcgcaccgatctgccgttggaagtagactttaaagctctgcgtcgtcgcacacccgatttagaggggttacgcgcgttcctcgaagaactggagtttggctccctgctgcatgaattcggtttgttgggcggagagaaaccgcgtgaagaagcaccatggccgccgcccgaaggtgcctttgtcggctttcttctgtcacgcaaagagccaatgtgggcggaactgttagctcttgcagccgccgcggaagggcgtgttcaccgcgcgacctctcctgtcgaggccctcgctgacctcaaagaagcacgtggtttcttggcgaaagatttagccgtgcttgcattacgcgaaggtgttgcgctcgatccgacggacgacccgcttttggtggcttatttgctcgatcctgcgaataccaacccggaaggcgtagcccgtcgttacggcggcgagtttactgaagatgcggcagaacgcgcgttgcttagcgaacgcctcttccagacgttatttccacgtctttcggagaaattactctggctctatcaggaagtcgaacgtccattgagtcgcgtgcttgcccatatggaggctcgcggtgtgcgcttagatgttccgttgttagaagcactcagcttcgagttggagaaagaactggaacgtcttgaaggcgaagtctttcgtttagcggggcatcccttcaatctcaactctcgcgaccaattggagaaagtgctctttgatgaattaggtttaacccctgtcacgcgtacagagaagaccggcaaacgttccacttcggcagccgccttggaagcacttcgtggtgctcacccgatcgtcgagttgattttgcagtaccgcgagctcagcaaactcaaatcaacctatcttgataggttacctcgtcttgttcatccacgtacgggtcgtttacacacccgcttcaatcaaacggcgacagccaccgggcgcttgtcgtcgagtgacccgaacctccagaatattccagtgcgcacgccgctgggccaacacattcgtaaagcgtttgttgcggaagaaggttggttattacttgcggccgattactcccagatcgaacttcgtgtattggcgcatctctctggcgacgagaatcttaaacgcgtgtttcgcgaaggcaaggatattcacactgaaaccgcagcctggatgttcggggtggacccagccttagtggaccccaagatgcgtcgtgccgccaagaccgtcaactttggcgtactctatggtatgtcagcacatcgtcttagtcaggaattgggcattgactacaaagaagctgaagcgtttatcgagcgctatttccaatcctttccgaaagttcgcgcgtggattgaacgtaccctcgaagaaggtcgcactcgcggctatgtggaaacgttattcgggcgtcgtcgctacgttccagatcttgcatctcgtgtccgctcagtgcgcgaagctgctgagcgtatggcctggaatatgcctgttcagggaacagcggcggacctcatgaagatcgccatggtgaaattgtttccgcgcttgaaacccttaggagcccaccttcttttacaggtgcatgatgaattggtcttggaagtacccgaggatcgcgcagaagaagccaaagcactcgtgaaagaggttatggaaaacgcgtatccgttagatgttccgttggaggtcgaagtgggtgtaggccgtgattggcttgaagcgaaacaagactaatga

SEQ ID NO: 324 - protein, 844 aa, synthetic construct
  REGION 1..844: note = DNA Polymerase Variant
MHHHHHHGGSGMLPLFDLEEPPKRVLLVDGHHLAYRTFYALSLTTSRGEPVQMVYGFARSLLKALKEDGQAVVVVFDAKAPSFRHEAYEAYKAGRAPTPEDFPRQLALVKRLVDLLGLVRLEAPGYEADDVLGTLAKKAEREGMEVCILTGDRDFFQLLSEKVSVLLPDGTLVTPKDVQEKYGVPPERWVDFRALTGDRSDNIPGVAGIGEKTALRLLAEWGSVENLLKNLDRVKPDSLRRKIEAHLEDLRLSLDLVRIRTDLPLEVDFKALRRRTPDLEGLRAFLEELEFGSLLHEFGLLGGEKPREEAPWPPPEGAFVGFLLSRKEPMWAELLALAAAAEGRVHRATSPVEALADLKEARGFLAKDLAVLALREGVALDPTDDPLLVAYLLDPANTNPEGVARRYGGEFTEDAAERALLSERLFQTLFPRLSEKLLWLYQEVERPLSRVLAHMEARGVRLDVPLLEALSFELEKELERLEGEVFRLAGHPFNLNSRDQLEKVLFDELGLTPVTRTEKTGKRSTSAAALEALRGAHPIVELILQYRELSKLKSTYLDRLPRLVHPRTGRLHTRFNQTATATGRLSSSDPNLQNIPVRTPLGQHIRKAFVAEEGWLLLAADYSQIELRVLAHLSGDENLKRVFREGKDIHTETAAWMFGVDPALVDPKMRRAAKTVNFGVLYGMSAHRLSQELGIDYKEAEAFIERYFQSFPKVRAWIERTLEEGRTRGYVETLFGRRRYVPDLASRVRSVREAAERMAWNMPVQGTAADLMKIAMVKLFPRLKPLGAHLLLQVHDELVLEVPEDRAEEAKALVKEVMENAYPLDVPLEVEVGVGRDWLEAKQD

SEQ ID NO: 325 - DNA, 2538 bp, synthetic construct
  misc_feature 1..2538: note = DNA Polymerase Variant
  source 1..2538: mol_type = other DNA
atgcaccatcatcatcatcatggcggtagcggcatgttaccgctgtttgatttggaagaaccaccaaaacgcgtgctgcttgttgacggccatcatctggcgtatcgtaccttctacgcactgagccttacgacctcacgtggtgagcctgtccagatggtgtatgggtttgctcgctccctgctgaaagccctgaaggaagatggtcaagccgtagtagtggttttcgatgcgaaagcaccgtcgtttcgtcacgaagcgtacgaggcctataaagctggccgcgcaccgaccccggaagactttccgcgtcagttagcgctcgtcaaacgcctcgtggatttgctgggattagttcgcttggaagctcctggctacgaggcggacgacgtgctcggtacactggccaagaaagcagaacgtgaaggcatggaggtctgcattcttaccggtgatcgcgatttcttccagctgctgtctgagaaagtgagcgttttgctgcccgatggcacgttagtaaccccgaaagatctgcaagagaaatatggagttccgccagaacgttgggtggactttcgcgcactgactggtgatcgttcagacaacatcccgggcgttgccgggattggtgaaaagacggcgctgcgcctgctggcagaatggggctcggtggaaaatctgctcaagaaccttgatcgtgtgaaacctgatagcttacgccgcaagatcgaagcccacctggaagacttgcgtctgagtctggatcttgtccgtattcgcaccgatctgccgttggaagtagactttaaagctctgcgtcgtcgcacacccgatttagaggggttacgcgcgttcctcgaagaactggagtttggctccctgctgcatgaattcggtttgttgggcggagagaaaccgcgtgaagaagcaccatggccgccgcccgaaggtgcctttgtcggctttcttctgtcacgcaaagagccaatgtgggcggaactgttagctcttgcagccgccgcggaagggcgtgttcaccgcgcgacctctcctgtcgaggccctcgctgacctcaaagaagcacgtggtttcttggcgaaagatttagccgtgcttgcattacgcgaaggtgttgcgctcgatccgacggacgacccgcttttggtggcttatttgctcgatcctgcgaataccaacccggaacgtgtcacccgtcgttacggcggcgagtttactgaagatgcggcagaacgcgcgttgcttagcgaacgcctcttccagacgttatttccacgtctttcggagaaattactctggctctatcaggaagtcgaacgtccattgagtcgcgtgcttgcccatatggaggctcgcggtgtgcgcttagatgttccgttgttagaagcactcagcttcgagttggagaaagaactggaacgtcttgaaggcgaagtctttcgtttagcggggcatcccttcaatctcaactctcgcgaccaattggagaaagtgctctttgatgaattaggtttaacccctgtcacgcgtacagagaagaccggcaaacgttccacttcggcaggtgccttggaagcacttcgtggtgctcacccgatcgtcgagttgattttgcagtaccgcgagctcagcaaactcaaatcaacctatattgataggttacctcgtcttgttcatccacgtacgggtcgtttacacacccgcttcaatcaaacggcgacagccaccgggcgcttgtcgtcgagtgacccgaacctccagaatattccagtgcgcacgccgctgggccaacgcattcgtaaagcgtttgttgcggaagaaggttggttattacttgcggccgattactcccagatcgaacttcgtgtattggcgcatctctctggcgacgagaatcttaaacgcgtgtttcgcgaaggcaaggatattcacactgaaaccgcagcctggatgttcggggtggacccagccttagtggaccccaagatgcgtcgtgccgccaagaccgtcaactttggcgtactctatggtatgtcagcacatcgtcttagtcaggaattgggcattgactacaaagaagctgaagcgtttatcgagcgctatttccaatcctttccgaaagttcgcgcgtggattgaacgtaccctcgaagaaggtcgcactcgcggctatgtggaaacgttattcgggcgtcgtcgctacgttccagatcttgcatctcgtgtccgctcagtgcgcgaagctgctgagcgtatggcctggaatatgcctgttcagggaacagcggcggacctcatgaagatcgccatggtgaaattgtttccgcgcttgaaacccttaggagcccaccttcttttacaggtgcatgatgaattggtcttggaagtacccgaggatcgcgcagaagaagccaaagcactcgtgaaagaggttatggaaaacgcgtatccgttagatgttccgttggaggtcgaagtgggtgtaggccgtgattggcttgaagcgaaacaagactaatga

SEQ ID NO: 326 - protein, 844 aa, synthetic construct
  REGION 1..844: note = DNA Polymerase Variant
MHHHHHHGGSGMLPLFDLEEPPKRVLLVDGHHLAYRTFYALSLTTSRGEPVQMVYGFARSLLKALKEDGQAVVVVFDAKAPSFRHEAYEAYKAGRAPTPEDFPRQLALVKRLVDLLGLVRLEAPGYEADDVLGTLAKKAEREGMEVCILTGDRDFFQLLSEKVSVLLPDGTLVTPKDLQEKYGVPPERWVDFRALTGDRSDNIPGVAGIGEKTALRLLAEWGSVENLLKNLDRVKPDSLRRKIEAHLEDLRLSLDLVRIRTDLPLEVDFKALRRRTPDLEGLRAFLEELEFGSLLHEFGLLGGEKPREEAPWPPPEGAFVGFLLSRKEPMWAELLALAAAAEGRVHRATSPVEALADLKEARGFLAKDLAVLALREGVALDPTDDPLLVAYLLDPANTNPERVTRRYGGEFTEDAAERALLSERLFQTLFPRLSEKLLWLYQEVERPLSRVLAHMEARGVRLDVPLLEALSFELEKELERLEGEVFRLAGHPFNLNSRDQLEKVLFDELGLTPVTRTEKTGKRSTSAGALEALRGAHPIVELILQYRELSKLKSTYIDRLPRLVHPRTGRLHTRFNQTATATGRLSSSDPNLQNIPVRTPLGQRIRKAFVAEEGWLLLAADYSQIELRVLAHLSGDENLKRVFREGKDIHTETAAWMFGVDPALVDPKMRRAAKTVNFGVLYGMSAHRLSQELGIDYKEAEAFIERYFQSFPKVRAWIERTLEEGRTRGYVETLFGRRRYVPDLASRVRSVREAAERMAWNMPVQGTAADLMKIAMVKLFPRLKPLGAHLLLQVHDELVLEVPEDRAEEAKALVKEVMENAYPLDVPLEVEVGVGRDWLEAKQD

SEQ ID NO: 327 - DNA, 2538 bp, synthetic construct
  misc_feature 1..2538: note = DNA Polymerase Variant
  source 1..2538: mol_type = other DNA
atgcaccatcatcatcatcatggcggtagcggcatgttaccgctgtttgatttggaagaaccaccaaaacgcgtgctgcttgttgacggccatcatctggcgtatcgtaccttctacgcactgagccttacgacctcacgtggtgagcctgtccagatggtgtatgggtttgctcgctccctgctgaaagccctgaaggaagatggtcaagccgtagtagtggttttcgatgcgaaagcaccgtcgtttcgtcacgaagcgtacgaggcctataaagctggccgcgcaccgaccccggaagactttccgcgtcagttagcgctcgtcaaacgcctcgtggatttgctgggattagttcgcttggaagctcctggctacgaggcggacgacgtgctcggtacactggccaagaaagcagaacgtgaaggcatggaggtctgcattcttaccggtgatcgcgatttcttccagctgctgtctgagaaagtgagcgttttgctgcccgatggcacgttagtaaccccgaaagatgtccaagagaaatatggagttccgccagaacgttgggtggactttcgcgcactgactggtgatcgttcagacaacatcccgggcgttgccgggattggtgaaaagacggcgctgcgcctgctggcagaatggggctcggtggaaaatctgctcaagaaccttgatcgtgtgaaacctgatagcttacgccgcaagatcgaagcccacctggaagacttgcgtctgagtctggatcttgcgcgtattcgcaccgatctgccgttggaagtagactttaaagctctgcgtcgtcgcacacccgatttagaggggttacgcgcgttcctcgaagaactggagtttggctccctgctgcatgaattcggtttgttgggcggagagaaaccgcgtgaagaagcaccatggccgccgcccgaaggtgcctttgtcggctttcttctgtcacgcaaagagccaatgtgggcggaactgttagctcttgcagccgccgcggaagggcgtgttcaccgcgcgacctctcctgtcgaggccctcgctgacctcaaagaagcacgtggtttcttggcgaaagatttagccgtgcttgcattacgcgaaggcgttgcgctcgatccgacggacgacccgcttttggtggcttatttgctcgatcctgcgaataccaacccggaacgtgtcgcccgtcgttacggcggcgagtttactgaagatgcggcagaacgcgcgttgcttagcgaacgcctcttccagacgttatttccacgtctttcggagaaattactctggctctatcaggaagtcgaacgtccattgagtcgcgtgcttgcccatatggaggctcgcggtgtgcgcttagatgttccgttgttagaagcactcagcttcgagttggagaaagaactggaacgtcttgaaggcgaagtctttcgtttagcggggcatcccttcaatctcaactctcgcgaccaattggagaaagtgctctttgatgaattaggtttaacccctgtcacgcgtacagagaagaccggcaaacgttccacttcggcagccgccttggaagcacttcgtggtgctcacccgatcgtcgagttgattttgcagtatcgcgagctcagcaaactcaaatcaacctatcttgataggttacctcgtcttgttcatccacgtacgggtcgtttacacacccgcttcaatcaaacggcgacagccaccgggcgcttgtcgtcgagtgacccgaacctccagaatattccagtgcgcacgccgctgggccaacacattcgtaaagcgtttgttgcggaagaaggttggttattacttgcggccgattactcccagatcgaacttcgtgtattggcgcatctctctggcgacgagaatcttaaacgcgtgtttcgcgaaggcaaggatattcacactgaaaccgcagcctggatgttcggggtggacccagccttagtggaccccaagatgcgtcgtgccgccaagaccgtcaactttggcgtactctatggtatgtcagcacatcgtcttagtcaggaattgggcattgactacaaagaagctgaagcgtttatcgagcgctatttccaatcctttccgaaagttcgcgcgtggattgaacgtaccctcgaagaaggtcgcactcgcggctatgtggaaacgttattcgggcgtcgtcgctacgttccagatcttgcatctcgtgtccgctcagtgcgcgaagctgctgagcgtatggcctggaatatgcctgttcagggaacagcggcggacctcatgaagatcgccatggtgaaattgtttccgcgcttgaaacccttaggagcccaccttcttttacaggtgcatgatgaattggtcttggaagtacccgaggatcgcgcagaagaagccaaagcactcgtgaaagaggttatggaaaacgcgtatccgttagatgttccgttggaggtcgaagtgggtgtaggccgtgattggcttgaagcgaaacaagactaatga

SEQ ID NO: 328 - protein, 844 aa, synthetic construct
  REGION 1..844: note = DNA Polymerase Variant
MHHHHHHGGSGMLPLFDLEEPPKRVLLVDGHHLAYRTFYALSLTTSRGEPVQMVYGFARSLLKALKEDGQAVVVVFDAKAPSFRHEAYEAYKAGRAPTPEDFPRQLALVKRLVDLLGLVRLEAPGYEADDVLGTLAKKAEREGMEVCILTGDRDFFQLLSEKVSVLLPDGTLVTPKDVQEKYGVPPERWVDFRALTGDRSDNIPGVAGIGEKTALRLLAEWGSVENLLKNLDRVKPDSLRRKIEAHLEDLRLSLDLARIRTDLPLEVDFKALRRRTPDLEGLRAFLEELEFGSLLHEFGLLGGEKPREEAPWPPPEGAFVGFLLSRKEPMWAELLALAAAAEGRVHRATSPVEALADLKEARGFLAKDLAVLALREGVALDPTDDPLLVAYLLDPANTNPERVARRYGGEFTEDAAERALLSERLFQTLFPRLSEKLLWLYQEVERPLSRVLAHMEARGVRLDVPLLEALSFELEKELERLEGEVFRLAGHPFNLNSRDQLEKVLFDELGLTPVTRTEKTGKRSTSAAALEALRGAHPIVELILQYRELSKLKSTYLDRLPRLVHPRTGRLHTRFNQTATATGRLSSSDPNLQNIPVRTPLGQHIRKAFVAEEGWLLLAADYSQIELRVLAHLSGDENLKRVFREGKDIHTETAAWMFGVDPALVDPKMRRAAKTVNFGVLYGMSAHRLSQELGIDYKEAEAFIERYFQSFPKVRAWIERTLEEGRTRGYVETLFGRRRYVPDLASRVRSVREAAERMAWNMPVQGTAADLMKIAMVKLFPRLKPLGAHLLLQVHDELVLEVPEDRAEEAKALVKEVMENAYPLDVPLEVEVGVGRDWLEAKQD

SEQ ID NO: 329 - DNA, 2538 bp, synthetic construct
  misc_feature 1..2538: note = DNA Polymerase Variant
  source 1..2538: mol_type = other DNA
atgcaccatcatcatcatcatggcggtagcggcatgttaccgctgtttgatttggaagaaccaccaaaacgcgtgctgcttgttgacggccatcatctggcgtatcgtaccttctacgcactgagccttacgacctcacgtggtgagcctgtccagatggtgtatgggtttgctcgctccctgctgaaagccctgaaggaagatggtcaagccgtagtagtggttttcgatgcgaaagcaccgtcgtttcgtcacgaagcgtacgaggcctataaagctggccgcgcaccgaccccggaagactttccgcgtcagttagcgctcgtcaaacgcctcgtggatttgctgggattagttcgcttggaagctcctggctacgaggcggacgacgtgctcggtacactggccaagaaagcagaacgtgaaggcatggaggtctgcattcttaccggtgatcgcgatttcttccagctgctgtctgagaaagtgagcgttttgctgcccgatggcacgttagtaaccccgaaagatgtgcaagagaaatatggagttccgccagaacgttgggtggactttcgcgcactgactggtgatcgttcagacaacatcccgggcgttgccgggattggtgaaaagacggcgctgcgcctgctggcagaatggggctcggtggaaaatctgctcaagaaccttgatcgtgtgaaacctgatagcttacgccgcaagatcgaagcccacctggaagacttgcgtctgagtctggatcttgtccgtattcgcaccgatctgccgttggaagtagactttaaagctctgcgtcgtcgcacacccgatttagaggggttacgcgcgttcctcgaagaactggagtttggctccctgctgcatgaattcggtttgttgggcggagagaaaccgcgtgaagaagcaccatggccgccgcccgaaggtgcctttgtcggctttcttctgtcacgcaaagagccaatgtgggcggaactgttagctcttgcagccgccgcggaagggcgtgttcaccgcgcgacctctcctgtcgaggccctcgctgacctcaaagaagcacgtggtttcttggcgaaagatttagccgtgcttgcattacgcgaaggtgttgcgctcgatccgacggacgacccgcttttggtggcttatttgctcgatcctgcgaataccaacccggaatacgtcgcccgtcgttacggcggcgagtttactgaagatgcggcagaacgcgcgttgcttagcgaacgcctcttccagacgttatttccacgtctttcggagaaattactctggctctatcaggaagtcgaacgtccattgagtcgcgtgcttgcccatatggaggctcgcggtgtgcgcttagatgttccgttgttagaagcactcagcttcgagttggagaaagaactggaacgtcttgaaggcgaagtctttcgtttagcggggcatcccttcaatctcaactctcgcgaccaattggagaaagtgctctttgatgaattaggtttaacccctgtcacgcgtacagagaagaccggcaaacgttccacttcggcagccgccttggaagcacttcgtggtgctcacccgatcgtcggcttgattttgcagtatcgcgagctcagcaaactcaaatcaacctatcttgataggttacctcgtcttgttcatccacgtacgggtcgtttacacacccgcttcaatcaaacggcgacagccaccgggcgcttgtcgtcgagtgacccgaacctccagaatattccagtgcgcacgccgctgggccaacgcattcgtaaagcgtttgttgcggaagaaggttggttattacttgcggccgattactcccagatcgaacttcgtgtattggcgcatctctctggcgacgagaatcttaaacgcgtgtttcgcgaaggcaaggatattcacactgaaaccgcagcctggatgttcggggtggacccagccttagtggaccccaagatgcgtcgtgccgccaagaccgtcaactttggcgtactctatggtatgtcagcacatcgtcttagtcaggaattgggcattgactacaaagaagctgaagcgtttatcgagcgctatttccaatcctttccgaaagttcgcgcgtggattgaacgtaccctcgaagaaggtcgcactcgcggctatgtggaaacgttattcgggcgtcgtcgctacgttccagatcttgcatctcgtgtccgctcagtgcgcgaagctgctgagcgtatggcctggaatatgcctgttcagggaacagcggcggacctcatgaagatcgccatggtgaaattgtttccgcgcttgaaacccttaggagcccaccttcttttacaggtgcatgatgaattggtcttggaagtacccgaggatcgcgcagaagaagccaaagcactcgtgaaagaggttatggaaaacgcgtatccgttagatgttccgttggaggtcgaagtgggtgtaggccgtgattggcttgaagcgaaacaagactaatga

SEQ ID NO: 330 - protein, 844 aa, synthetic construct
  REGION 1..844: note = DNA Polymerase Variant
MHHHHHHGGSGMLPLFDLEEPPKRVLLVDGHHLAYRTFYALSLTTSRGEPVQMVYGFARSLLKALKEDGQAVVVVFDAKAPSFRHEAYEAYKAGRAPTPEDFPRQLALVKRLVDLLGLVRLEAPGYEADDVLGTLAKKAEREGMEVCILTGDRDFFQLLSEKVSVLLPDGTLVTPKDVQEKYGVPPERWVDFRALTGDRSDNIPGVAGIGEKTALRLLAEWGSVENLLKNLDRVKPDSLRRKIEAHLEDLRLSLDLVRIRTDLPLEVDFKALRRRTPDLEGLRAFLEELEFGSLLHEFGLLGGEKPREEAPWPPPEGAFVGFLLSRKEPMWAELLALAAAAEGRVHRATSPVEALADLKEARGFLAKDLAVLALREGVALDPTDDPLLVAYLLDPANTNPEYVARRYGGEFTEDAAERALLSERLFQTLFPRLSEKLLWLYQEVERPLSRVLAHMEARGVRLDVPLLEALSFELEKELERLEGEVFRLAGHPFNLNSRDQLEKVLFDELGLTPVTRTEKTGKRSTSAAALEALRGAHPIVGLILQYRELSKLKSTYLDRLPRLVHPRTGRLHTRFNQTATATGRLSSSDPNLQNIPVRTPLGQRIRKAFVAEEGWLLLAADYSQIELRVLAHLSGDENLKRVFREGKDIHTETAAWMFGVDPALVDPKMRRAAKTVNFGVLYGMSAHRLSQELGIDYKEAEAFIERYFQSFPKVRAWIERTLEEGRTRGYVETLFGRRRYVPDLASRVRSVREAAERMAWNMPVQGTAADLMKIAMVKLFPRLKPLGAHLLLQVHDELVLEVPEDRAEEAKALVKEVMENAYPLDVPLEVEVGVGRDWLEAKQD

SEQ ID NO: 331 - DNA, 2538 bp, synthetic construct
  misc_feature 1..2538: note = DNA Polymerase Variant
  source 1..2538: mol_type = other DNA
atgcaccatcatcatcatcatggcggtagcggcatgttaccgctgtttgatttggaagaaccaccaaaacgcgtgctgcttgttgacggccatcatctggcgtatcgtaccttctacgcactgagccttacgacctcacgtggtgagcctgtccagatggtgtatgggtttgctcgctccctgctgaaagccctgaaggaagatggtcaagccgtagtagtggttttcgatgcgaaagcaccgtcgtttcgtcacgaagcgtacgaggcctataaagctggccgcgcaccgaccccggaagactttccgcgtcagttagcgctcgtcaaacgcctcgtggatttgctgggattagttcgcttggaagctcctggctacgaggcggacgacgtgctcggtacactggccaagaaagcagaacgtgaaggcatggaggtctgcattcttaccggtgatcgcgatttcttccagctgctgtctgagaaagtgagcgttttgctgcccgatggcacgttagtaaccccgaaagatgtgcaagagaaatatggagttccgccagaacgttgggtggactttcgcgcactgactggtgatcgttcagacaacatcccgggcgttgccgggattggtgaaaagacggcgctgcgcctgctggcagaatggggctcggtggaaaatctgctcaagaaccttgatcgtgtgaaacctgatagcttacgccgcaagatcgaagcccacctggaagacttgcgtctgagtctggatcttgcgcgtattcgcaccgatctgccgttggaagtagactttaaagctctgcgtcgtcgcacacccgatttagaggggttacgcgcgttcctcgaagaactggagtttggctccctgctgcatgaattcggtttgttgggcggagagaaaccgcgtgaagaagcaccatggccgccgcccgaaggtgcctttgtcggctttcttctgtcacgcaaagagccaatgtgggcggaactgttagctcttgcagccgccgcggaagggcgtgttcaccgcgcgacctctcctgtcgaggccctcgctgacctcaaagaagcacgtggtttcttggcgaaagatttagccgtgcttgcattacgcgaatgtgttgcgctcgatccgacggacgacccgcttttggtggcttatttgctcgatcctgcgaataccaacccggaatacgtcgcccgtcgttacggcggcgagtttactgaagatgcggcagaacgcgcgttgcttagcgaacgcctcttccagacgttatttccacgtctttcggagaaattactctggctctatcaggaagtcgaacgtccattgagtcgcgtgcttgcccatatggaggctcgcggtgtgcgcttagatgttccgttgttagaagcactcagcttcgagttggagaaagaactggaacgtcttgaaggcgaagtctttcgtttagcggggcatcccttcaatctcaactctcgcgaccaattggagaaagtgctctttgatgaattaggtttaacccctgtcacgcgtacagagaagaccggcaaacgttccacttcggcagccgccttggaagcacttcgtggtgctcacccgatcgtcaacttgattttgcagtatcgcgagctcagcaaactcaaatcaacctatcttgataggttacctcgtcttgttcatccacgtacgggtcgtttacacacccgcttcaatcaaacggcgacagccaccgggcgcttgtcgtcgagtgacccgaacctccagaatattccagtgcgcacgccgctgggccaacgcattcgtaaagcgtttgttgcggaagaaggttggttattacttgcggccgattactcccagatcgaacttcgtgtattggcgcatctctctggcgacgagaatcttaaacgcgtgtttcgcgaaggcaaggatattcacactgaaaccgcagcctggatgttcggggtggacccagccttagtggaccccaagatgcgtcgtgccgccaagaccgtcaactttggcgtactctatggtatgtcagcacatcgtcttagtcaggaattgggcattgactacaaagaagctgaagcgtttatcgagcgctatttccaatcctttccgaaagttcgcgcgtggattgaacgtaccctcgaagaaggtcgcactcgcggctatgtggaaacgttattcgggcgtcgtcgctacgttccagatcttgcatctcgtgtccgctcagtgcgcgaagctgctgagcgtatggcctggaatatgcctgttcagggaacagcggcggacctcatgaagatcgccatggtgaaattgtttccgcgcttgaaacccttaggagcccaccttcttttacaggtgcatgatgaattggtcttggaagtacccgaggatcgcgcagaagaagccaaagcactcgtgaaagaggttatggaaaacgcgtatccgttagatgttccgttggaggtcgaagtgggtgtaggccgtgattggcttgaagcgaaacaagactaatga

SEQ ID NO: 332 - protein, 844 aa, synthetic construct
  REGION 1..844: note = DNA Polymerase Variant
MHHHHHHGGSGMLPLFDLEEPPKRVLLVDGHHLAYRTFYALSLTTSRGEPVQMVYGFARSLLKALKEDGQAVVVVFDAKAPSFRHEAYEAYKAGRAPTPEDFPRQLALVKRLVDLLGLVRLEAPGYEADDVLGTLAKKAEREGMEVCILTGDRDFFQLLSEKVSVLLPDGTLVTPKDVQEKYGVPPERWVDFRALTGDRSDNIPGVAGIGEKTALRLLAEWGSVENLLKNLDRVKPDSLRRKIEAHLEDLRLSLDLARIRTDLPLEVDFKALRRRTPDLEGLRAFLEELEFGSLLHEFGLLGGEKPREEAPWPPPEGAFVGFLLSRKEPMWAELLALAAAAEGRVHRATSPVEALADLKEARGFLAKDLAVLALRECVALDPTDDPLLVAYLLDPANTNPEYVARRYGGEFTEDAAERALLSERLFQTLFPRLSEKLLWLYQEVERPLSRVLAHMEARGVRLDVPLLEALSFELEKELERLEGEVFRLAGHPFNLNSRDQLEKVLFDELGLTPVTRTEKTGKRSTSAAALEALRGAHPIVNLILQYRELSKLKSTYLDRLPRLVHPRTGRLHTRFNQTATATGRLSSSDPNLQNIPVRTPLGQRIRKAFVAEEGWLLLAADYSQIELRVLAHLSGDENLKRVFREGKDIHTETAAWMFGVDPALVDPKMRRAAKTVNFGVLYGMSAHRLSQELGIDYKEAEAFIERYFQSFPKVRAWIERTLEEGRTRGYVETLFGRRRYVPDLASRVRSVREAAERMAWNMPVQGTAADLMKIAMVKLFPRLKPLGAHLLLQVHDELVLEVPEDRAEEAKALVKEVMENAYPLDVPLEVEVGVGRDWLEAKQD

SEQ ID NO: 333 - DNA, 2538 bp, synthetic construct
  misc_feature 1..2538: note = DNA Polymerase Variant
  source 1..2538: mol_type = other DNA
atgcaccatcatcatcatcatggcggtagcggcatgttaccgctgtttgatttggaagaaccaccaaaacgcgtgctgcttgttgacggccatcatctggcgtatcgtaccttctacgcactgagccttacgacctcacgtggtgagcctgtccagatggtgtatgggtttgctcgctccctgctgaaagccctgaaggaagatggtcaagccgtagtagtggttttcgatgcgaaagcaccgtcgtttcgtcacgaagcgtacgaggcctataaagctggccgcgcaccgaccccggaagactttccgcgtcagttagcgctcgtcaaacgcctcgtggatttgctgggattagttcgcttggaagctcctggctacgaggcggacgacgtgctcggtacactggccaagaaagcagaacgtgaaggcatggaggtctgcattcttaccggtgatcgcgatttcttccagctgctgtctgagaaagtgagcgttttgctgcccgatggcacgttagtaaccccgaaagatgtgcaagagaaatatggagttccgccagaacgttgggtggactttcgcgcactgactggtgatcgttcagacaacatcccgggcgttgccgggattggtgaaaagacggcgctgcgcctgctggcagaatggggctcggtggaaaatctgctcaagaaccttgatcgtgtgaaacctgatagcttacgccgcaagatcgaagcccacctggaagacttgcgtctgagtctggatcttgtccgtattcgcaccgatctgccgttggaagtagactttaaagctctgcgtcgtcgcacacccgatttagaggggttacgcgcgttcctcgaagaactggagtttggctccctgctgcatgaattcggtttgttgggcggagagaaaccgcgtgaagaagcaccatggccgccgcccgaaggtgcctttgtcggctttcttctgtcacgcaaagagccaatgtgggcggaactgttagctcttgcagccgccgcggaagggcgtgttcaccgcgcgacctctcctgtcgaggccctcgctgacctcaaagaagcacgtggtttcttggcgaaagatttagccgtgcttgcattacgcgaatgtgttgcgctcgatccgacggacgacccgcttttggtggcttatttgctcgatcctgcgaataccaacccggaatacgtcgcccgtcgttacggcggcgagtttactgaagatgcggcagaacgcgcgttgcttagcgaacgcctcttccagacgttatttccacgtctttcggagaaattactctggctctatcaggaagtcgaacgtccattgagtcgcgtgcttgcccatatggaggctcgcggtgtgcgcttagatgttccgttgttagaagcactcagcttcgagttggagaaagaactggaacgtcttgaaggcgaagtctttcgtttagcggggcatcccttcaatctcaactctcgcgaccaattggagaaagtgctctttgatgaattaggtttaacccctgtcacgcgtacagagaagaccggcaaacgttccacttcggcagccgccttggaagcacttcgtggtgctcacccgatcgtcgagttgattttgcagtaccgcgagctcagcaaactcaaatcaacctatcttgataggttacctcgtcttgttcatccacgtacgggtcgtttacacacccgcttcaatcaaacggcgacagccaccgggcgcttgtcgtcgagtgacccgaacctccagaatattccagtgcgcacgccgctgggccaacgcattcgtaaagcgtttgttgcggaagaaggttggttattacttgcggccgattactcccagatcgaacttcgtgtattggcgcatctctctggcgacgagaatcttaaacgcgtgtttcgcgaaggcaaggatattcacactgaaaccgcagcctggatgttcggggtggacccagccttagtggaccccaagatgcgtcgtgccgccaagaccgtcaactttggcgtactctatggtatgtcagcacatcgtcttagtcaggaattgggcattgactacaaagaagctgaagcgtttatcgagcgctatttccaatcctttccgaaagttcgcgcgtggattgaacgtaccctcgaagaaggtcgcactcgcggctatgtggaaacgttattcgggcgtcgtcgctacgttccagatcttgcatctcgtgtccgctcagtgcgcgaagctgctgagcgtatggcctggaatatgcctgttcagggaacagcggcggacctcatgaagatcgccatggtgaaattgtttccgcgcttgaaacccttaggagcccaccttcttttacaggtgcatgatgaattggtcttggaagtacccgaggatcgcgcagaagaagccaaagcactcgtgaaagaggttatggaaaacgcgtatccgttagatgttccgttggaggtcgaagtgggtgtaggccgtgattggcttgaagcgaaacaagactaatga

SEQ ID NO: 334 - protein, 844 aa, synthetic construct
  REGION 1..844: note = DNA Polymerase Variant
MHHHHHHGGSGMLPLFDLEEPPKRVLLVDGHHLAYRTFYALSLTTSRGEPVQMVYGFARSLLKALKEDGQAVVVVFDAKAPSFRHEAYEAYKAGRAPTPEDFPRQLALVKRLVDLLGLVRLEAPGYEADDVLGTLAKKAEREGMEVCILTGDRDFFQLLSEKVSVLLPDGTLVTPKDVQEKYGVPPERWVDFRALTGDRSDNIPGVAGIGEKTALRLLAEWGSVENLLKNLDRVKPDSLRRKIEAHLEDLRLSLDLVRIRTDLPLEVDFKALRRRTPDLEGLRAFLEELEFGSLLHEFGLLGGEKPREEAPWPPPEGAFVGFLLSRKEPMWAELLALAAAAEGRVHRATSPVEALADLKEARGFLAKDLAVLALRECVALDPTDDPLLVAYLLDPANTNPEYVARRYGGEFTEDAAERALLSERLFQTLFPRLSEKLLWLYQEVERPLSRVLAHMEARGVRLDVPLLEALSFELEKELERLEGEVFRLAGHPFNLNSRDQLEKVLFDELGLTPVTRTEKTGKRSTSAAALEALRGAHPIVELILQYRELSKLKSTYLDRLPRLVHPRTGRLHTRFNQTATATGRLSSSDPNLQNIPVRTPLGQRIRKAFVAEEGWLLLAADYSQIELRVLAHLSGDENLKRVFREGKDIHTETAAWMFGVDPALVDPKMRRAAKTVNFGVLYGMSAHRLSQELGIDYKEAEAFIERYFQSFPKVRAWIERTLEEGRTRGYVETLFGRRRYVPDLASRVRSVREAAERMAWNMPVQGTAADLMKIAMVKLFPRLKPLGAHLLLQVHDELVLEVPEDRAEEAKALVKEVMENAYPLDVPLEVEVGVGRDWLEAKQD

SEQ ID NO: 335 - DNA, 2538 bp, synthetic construct
  misc_feature 1..2538: note = DNA Polymerase Variant
  source 1..2538: mol_type = other DNA
atgcaccatcatcatcatcatggcggtagcggcatgttaccgctgtttgatttggaagaaccaccaaaacgcgtgctgcttgttgacggccatcatctggcgtatcgtaccttctacgcactgagccttacgacctcacgtggtgagcctgtccagatggtgtatgggtttgctcgctccctgctgaaagccctgaaggaagatggtcaagccgtagtagtggttttcgatgcgaaagcaccgtcgtttcgtcacgaagcgtacgaggcctataaagctggccgcgcaccgaccccggaagactttccgcgtcagttagcgctcgtcaaacgcctcgtggatttgctgggattagttcgcttggaagctcctggctacgaggcggacgacgtgctcggtacactggccaagaaagcagaacgtgaaggcatggaggtctgcattcttaccggtgatcgcgatttcttccagctgctgtctgagaaagtgagcgttttgctgcccgatggcacgttagtaaccccgaaagatgtccaagagaaatatggagttccgccagaacgttgggtggactttcgcgcactgactggtgatcgttcagacaacatcccgggcgttgccgggattggtgaaaagacggcgctgcgcctgctggcagaatggggctcggtggaaaatctgctcaagaaccttgatcgtgtgaaacctgatagcttacgccgcaagatcgaagcccacctggaagacttgcgtctgagtctggatcttgcgcgtattcgcaccgatctgccgttggaagtagactttaaagctctgcgtcgtcgcacacccgatttagaggggttacgcgcgttcctcgaagaactggagtttggctccctgctgcatgaattcggtttgttgggcggagagaaaccgcgtgaagaagcaccatggccgccgcccgaaggtgcctttgtcggctttcttctgtcacgcaaagagccaatgtgggcggaactgttagctcttgcagccgccgcggaagggcgtgttcaccgcgcgacctctcctgtcgaggccctcgctgacctcaaagaagcacgtggtttcttggcgaaagatttagccgtgcttgcattacgcgaaggcgttgcgctcgatccgacggacgacccgcttttggtggcttatttgctcgatcctgcgaataccaacccggaaggcgtagcccgtcgttacggcggcgagtttactgaagatgcggcagaacgcgcgttgcttagcgaacgcctcttccagacgttatttccacgtctttcggagaaattactctggctctatcaggaagtcgaacgtccattgagtcgcgtgcttgcccatatggaggctcgcggtgtgcgcttagatgttccgttgttagaagcactcagcttcgagttggagaaagaactggaacgtcttgaagacgaagtctttcgtttagcggggcatcccttcaatctcaactctcgcgaccaattggagaaagtgctctttgatgaattaggtttaacccctgtcacgcgtacagagaagaccggcaaacgttccacttcggcagccgccttggaagcacttcgtggtgctcacccgatcgtcgagttgattttgcagtaccgcgagctcagcaaactcaaatcaacctatcttgataggttacctcgtcttgttcatccacgtacgggtcgtttacacacccgcttcaatcaaacggcgacagccaccgggcgcttgtcgtcgagtgacccgaacctccagaatattccagtgcgcacgccgctgggccaacgcattcgtaaagcgtttgttgcggaagaaggttggttattacttgcggccgattactcccagatcgaacttcgtgtattggcgcatctctctggcgacgagaatcttaaacgcgtgtttcgcgaaggcaaggatattcacactgaaaccgcagcctggatgttcggggtggacccagccttagtggaccccaagatgcgtcgtgccgccaagaccgtcaactttggcgtactctatggtatgtcagcacatcgtcttagtcaggaattgggcattgactacaaagaagctgaagcgtttatcgagcgctatttccaatcctttccgaaagttcgcgcgtggattgaacgtaccctcgaagaaggtcgcactcgcggctatgtggaaacgttattcgggcgtcgtcgctacgttccagatcttgcatctcgtgtccgctcagtgcgcgaagctgctgagcgtatggcctggaatatgcctgttcagggaacagcggcggacctcatgaagatcgccatggtgaaattgtttccgcgcttgaaacccttaggagcccaccttcttttacaggtgcatgatgaattggtcttggaagtacccgaggatcgcgcagaagaagccaaagcactcgtgaaagaggttatggaaaacgcgtatccgttagatgttccgttggaggtcgaagtgggtgtaggccgtgattggcttgaagcgaaacaagactaatga

SEQ ID NO: 336 - protein, 844 aa, synthetic construct
  REGION 1..844: note = DNA Polymerase Variant
MHHHHHHGGSGMLPLFDLEEPPKRVLLVDGHHLAYRTFYALSLTTSRGEPVQMVYGFARSLLKALKEDGQAVVVVFDAKAPSFRHEAYEAYKAGRAPTPEDFPRQLALVKRLVDLLGLVRLEAPGYEADDVLGTLAKKAEREGMEVCILTGDRDFFQLLSEKVSVLLPDGTLVTPKDVQEKYGVPPERWVDFRALTGDRSDNIPGVAGIGEKTALRLLAEWGSVENLLKNLDRVKPDSLRRKIEAHLEDLRLSLDLARIRTDLPLEVDFKALRRRTPDLEGLRAFLEELEFGSLLHEFGLLGGEKPREEAPWPPPEGAFVGFLLSRKEPMWAELLALAAAAEGRVHRATSPVEALADLKEARGFLAKDLAVLALREGVALDPTDDPLLVAYLLDPANTNPEGVARRYGGEFTEDAAERALLSERLFQTLFPRLSEKLLWLYQEVERPLSRVLAHMEARGVRLDVPLLEALSFELEKELERLEDEVFRLAGHPFNLNSRDQLEKVLFDELGLTPVTRTEKTGKRSTSAAALEALRGAHPIVELILQYRELSKLKSTYLDRLPRLVHPRTGRLHTRFNQTATATGRLSSSDPNLQNIPVRTPLGQRIRKAFVAEEGWLLLAADYSQIELRVLAHLSGDENLKRVFREGKDIHTETAAWMFGVDPALVDPKMRRAAKTVNFGVLYGMSAHRLSQELGIDYKEAEAFIERYFQSFPKVRAWIERTLEEGRTRGYVETLFGRRRYVPDLASRVRSVREAAERMAWNMPVQGTAADLMKIAMVKLFPRLKPLGAHLLLQVHDELVLEVPEDRAEEAKALVKEVMENAYPLDVPLEVEVGVGRDWLEAKQD

SEQ ID NO: 337 - DNA, 2538 bp, synthetic construct
  misc_feature 1..2538: note = DNA Polymerase Variant
  source 1..2538: mol_type = other DNA
atgcaccatcatcatcatcatggcggtagcggcatgttaccgctgtttgatttggaagaaccaccaaaacgcgtgctgcttgttgacggccatcatctggcgtatcgtaccttctacgcactgagccttacgacctcacgtggtgagcctgtccagatggtgtatgggtttgctcgctccctgctgaaagccctgaaggaagatggtcaagccgtagtagtggttttcgatgcgaaagcaccgtcgtttcgtcacgaagcgtacgaggcctataaagctggccgcgcaccgaccccggaagactttccgcgtcagttagcgctcgtcaaacgcctcgtggatttgctgggattagttcgcttggaagctcctggctacgaggcggacgacgtgctcggtacactggccaagaaagcagaacgtgaaggcatggaggtctgcattcttaccggtgatcgcgatttcttccagctgctgtctgagaaagtgagcgttttgctgcccgatggcacgttagtaaccccgaaagatgtgcaagagaaatatggagttccgccagaacgttgggtggactttcgcgcactgactggtgatcgttcagacaacatcccgggcgttgccgggattggtgaaaagacggcgctgcgcctgctggcagaatggggctcggtggaaaatctgctcaagaaccttgatcgtgtgaaacctgatagcttacgccgcaagatcgaagcccacctggaagacttgcgtctgagtctggatcttgtccgtattcgcaccgatctgccgttggaagtagactttaaagctctgcgtcgtcgcacacccgatttagaggggttacgcgcgttcctcgaagaactggagtttggctccctgctgcatgaattcggtttgttgggcggagagaaaccgcgtgaagaagcaccatggccgccgcccgaaggtgcctttgtcggctttcttctgtcacgcaaagagccaatgtgggcggaactgttagctcttgcagccgccgcggaagggcgtgttcaccgcgcgacctctcctgtcgaggccctcgctgacctcaaagaagcacgtggtttcttggcgaaagatttagccgtgcttgcattacgcgaaggcgttgcgctcgatccgacggacgacccgcttttggtggcttatttgctcgatcctgcgaataccaacccggaatacgtcgcccgtcgttacggcggcgagtttactgaagatgcggcagaacgcgcgttgcttagcgaacgcctcttccagacgttatttccacgtctttcggagaaattactctggctctatcaggaagtcgaacgtccattgagtcgcgtgcttgcccatatggaggctcgcggtgtgcgcttagatgttccgttgttagaagcactcagcttcgagttggagaaagaactggaacgtcttgaaggcgaagtctttcgtttagcggggcatcccttcaatctcaactctcgcgaccaattggagaaagtgctctttgatgaattaggtttaacccctgtcacgcgtacagagaagaccggcaaacgttccacttcggcagccgccttggaagcacttcgtggtgctcacccgatcgtcgagttgattttgcagtaccgcgagctcagcaaactcaaatcaacctatcttgataggttacctcgtcttgttcatccacgtacgggtcgtttacacacccgcttcaatcaaacggcgacagccaccgggcgcttgtcgtcgagtgacccgaacctccagaatattccagtgcgcacgccgctgggccaacgcattcgtaaagcgtttgttgcggaagaaggttggttattacttgcggccgattactcccagatcgaacttcgtgtattggcgcatctctctggcgacgagaatcttaaacgcgtgtttcgcgaaggcaaggatattcacactgaaaccgcagcctggatgttcgggcttgacccagccttagtggaccccaagatgcgtcgtgccgccaagaccgtcaactttggcgtactctatggtatgtcagcacatcgtcttagtcaggaattgggcattgactacaaagaagctgaagcgtttatcgagcgctatttccaatcctttccgaaagttcgcgcgtggattgaacgtaccctcgaagaaggtcgcactcgcggctatgtggaaacgttattcgggcgtcgtcgctacgttccagatcttgcatctcgtgtccgctcagtgcgcgaagctgctgagcgtatggcctggaatatgcctgttcagggaacagcggcggacctcatgaagatcgccatggtgaaattgtttccgcgcttgaaacccttaggagcccaccttcttttacaggtgcatgatgaattggtcttggaagtacccgaggatcgcgcagaagaagccaaagcactcgtgaaagaggttatggaaaacgcgtatccgttagatgttccgttggaggtcgaagtgggtgtaggccgtgattggcttgaagcgaaacaagactaatga

SEQ ID NO: 338 - protein, 844 aa, synthetic construct
  REGION 1..844: note = DNA Polymerase Variant
MHHHHHHGGSGMLPLFDLEEPPKRVLLVDGHHLAYRTFYALSLTTSRGEPVQMVYGFARSLLKALKEDGQAVVVVFDAKAPSFRHEAYEAYKAGRAPTPEDFPRQLALVKRLVDLLGLVRLEAPGYEADDVLGTLAKKAEREGMEVCILTGDRDFFQLLSEKVSVLLPDGTLVTPKDVQEKYGVPPERWVDFRALTGDRSDNIPGVAGIGEKTALRLLAEWGSVENLLKNLDRVKPDSLRRKIEAHLEDLRLSLDLVRIRTDLPLEVDFKALRRRTPDLEGLRAFLEELEFGSLLHEFGLLGGEKPREEAPWPPPEGAFVGFLLSRKEPMWAELLALAAAAEGRVHRATSPVEALADLKEARGFLAKDLAVLALREGVALDPTDDPLLVAYLLDPANTNPEYVARRYGGEFTEDAAERALLSERLFQTLFPRLSEKLLWLYQEVERPLSRVLAHMEARGVRLDVPLLEALSFELEKELERLEGEVFRLAGHPFNLNSRDQLEKVLFDELGLTPVTRTEKTGKRSTSAAALEALRGAHPIVELILQYRELSKLKSTYLDRLPRLVHPRTGRLHTRFNQTATATGRLSSSDPNLQNIPVRTPLGQRIRKAFVAEEGWLLLAADYSQIELRVLAHLSGDENLKRVFREGKDIHTETAAWMFGLDPALVDPKMRRAAKTVNFGVLYGMSAHRLSQELGIDYKEAEAFIERYFQSFPKVRAWIERTLEEGRTRGYVETLFGRRRYVPDLASRVRSVREAAERMAWNMPVQGTAADLMKIAMVKLFPRLKPLGAHLLLQVHDELVLEVPEDRAEEAKALVKEVMENAYPLDVPLEVEVGVGRDWLEAKQD

SEQ ID NO: 339 - DNA, 2538 bp, synthetic construct
  misc_feature 1..2538: note = DNA Polymerase Variant
  source 1..2538: mol_type = other DNA
atgcaccatcatcatcatcatggcggtagcggcatgttaccgctgtttgatttggaagaaccaccaaaacgcgtgctgcttgttgacggccatcatctggcgtatcgtaccttctacgcactgagccttacgacctcacgtggtgagcctgtccagatggtgtatgggtttgctcgctccctgctgaaagccctgaaggaagatggtcaagccgtagtagtggttttcgatgcgaaagcaccgtcgtttcgtcacgaagcgtacgaggcctataaagctggccgcgcaccgaccccggaagactttccgcgtcagttagcgctcgtcaaacgcctcgtggatttgctgggattagttcgcttggaagctcctggctacgaggcggacgacgtgctcggtacactggccaagaaagcagaacgtgaaggcatggaggtctgcattcttaccggtgatcgcgatttcttccagctgctgtctgagaaagtgagcgttttgctgcccgatggcacgttagtaaccccgaaagatgtgcaagagaaatatggagttccgccagaacgttgggtggactttcgcgcactgactggtgatcgttcagacaacatcccgggcgttgccgggattggtgaaaagacggcgctgcgcctgctggcagaatggggctcggtggaaaatctgctcaagaaccttgatcgtgtgaaacctgatagcttacgccgcaagatcgaagcccacctggaagacttgcgtctgagtctggatcttgtccgtattcgcaccgatctgccgttggaagtagactttaaagctctgcgtcgtcgcacacccgatttagaggggttacgcgcgttcctcgaagaactggagtttggctccctgctgcatgaattcggtttgttgggcggagagaaaccgcgtgaagaagcaccatggccgccgcccgaaggtgcctttgtcggctttcttctgtcacgcaaagagccaatgtgggcggaactgttagctcttgcagccgccgcggaagggcgtgttcaccgcgcgacctctcctgtcgaggccctcgctgacctcaaagaagcacgtggtttcttggcgaaagatttagccgtgcttgcattacgcgaaggcgttgcgctcgatccgacggacgacccgcttttggtggcttatttgctcgatcctgcgaataccaacccggaaggcgtagcccgtcgttacggcggcgagtttactgaagatgcggcagaacgcgcgttgcttagcgaacgcctcttccagacgttatttccacgtctttcggagaaattactctggctctatcaggaagtcgaacgtccattgagtcgcgtgcttgcccatatggaggctcgcggtgtgcgcttagatgttccgttgttagaagcactcagcttcgagttggagaaagaactggaacgtcttgaaggcgaagtctttcgtttagcggggcatcccttcaatctcaactctcgcgaccaattggagaaagtgctctttgatgaattaggtttaacccctgtcacgcgtacagagaagaccggcaaacgttccacttcggcagccgccttggaagcacttcgtggtgctcacccgatcgtcgagttgattttgcagtaccgcgagctcagcaaactcaaatcaacctatcttgataggttacctcgtcttgttcatccacgtacgggtcgtttacacacccgcttcaatcaaacggcgacagccaccgggcgcttgtcgtcgagtgacccgaacctccagaatattccagtgcgcacgccgctgggccaacgcattcgtaaagcgtttgttgcggaagaaggttggttattacttgcggccgattactcccagatcgaacttcgtgtattggcgcatctctctggcgacgagaatcttaaacgcgtgtttcgcgaaggcaaggatattcacactgaaaccgcagcctggatgttcgggcttgacccagccttagtggaccccaagatgcgtcgtgccgccaagaccgtcaactttggcgtactctatggtatgtcagcacatcgtcttagtcaggaattgggcattgactacaaagaagctgaagcgtttatcgagcgctatttccaatcctttccgaaagttcgcgcgtggattgaacgtaccctcgaagaaggtcgcactcgcggctatgtggaaacgttattcgggcgtcgtcgctacgttccagatcttgcatctcgtgtccgctcagtgcgcgaagctgctgagcgtatggcctggaatatgcctgttcagggaacagcggcggacctcatgaagatcgccatggtgaaattgtttccgcgcttgaaacccttaggagcccaccttcttttacaggtgcatgatgaattggtcttggaagtacccgaggatcgcgcagaagaagccaaagcactcgtgaaagaggttatggaaaacgcgtatccgttagatgttccgttggaggtcgaagtgggtgtaggccgtgattggcttgaagcgaaacaagactaatga

SEQ ID NO: 340 - protein, 844 aa, synthetic construct
  REGION 1..844: note = DNA Polymerase Variant
MHHHHHHGGSGMLPLFDLEEPPKRVLLVDGHHLAYRTFYALSLTTSRGEPVQMVYGFARSLLKALKEDGQAVVVVFDAKAPSFRHEAYEAYKAGRAPTPEDFPRQLALVKRLVDLLGLVRLEAPGYEADDVLGTLAKKAEREGMEVCILTGDRDFFQLLSEKVSVLLPDGTLVTPKDVQEKYGVPPERWVDFRALTGDRSDNIPGVAGIGEKTALRLLAEWGSVENLLKNLDRVKPDSLRRKIEAHLEDLRLSLDLVRIRTDLPLEVDFKALRRRTPDLEGLRAFLEELEFGSLLHEFGLLGGEKPREEAPWPPPEGAFVGFLLSRKEPMWAELLALAAAAEGRVHRATSPVEALADLKEARGFLAKDLAVLALREGVALDPTDDPLLVAYLLDPANTNPEGVARRYGGEFTEDAAERALLSERLFQTLFPRLSEKLLWLYQEVERPLSRVLAHMEARGVRLDVPLLEALSFELEKELERLEGEVFRLAGHPFNLNSRDQLEKVLFDELGLTPVTRTEKTGKRSTSAAALEALRGAHPIVELILQYRELSKLKSTYLDRLPRLVHPRTGRLHTRFNQTATATGRLSSSDPNLQNIPVRTPLGQRIRKAFVAEEGWLLLAADYSQIELRVLAHLSGDENLKRVFREGKDIHTETAAWMFGLDPALVDPKMRRAAKTVNFGVLYGMSAHRLSQELGIDYKEAEAFIERYFQSFPKVRAWIERTLEEGRTRGYVETLFGRRRYVPDLASRVRSVREAAERMAWNMPVQGTAADLMKIAMVKLFPRLKPLGAHLLLQVHDELVLEVPEDRAEEAKALVKEVMENAYPLDVPLEVEVGVGRDWLEAKQD

SEQ ID NO: 341 - DNA, 2538 bp, synthetic construct
  misc_feature 1..2538: note = DNA Polymerase Variant
  source 1..2538: mol_type = other DNA
atgcaccatcatcatcatcatggcggtagcggcatgttaccgctgtttgatttggaagaaccaccaaaacgcgtgctgcttgttgacggccatcatctggcgtatcgtaccttctacgcactgagccttacgacctcacgtggtgagcctgtccagatggtgtatgggtttgctcgctccctgctgaaagccctgaaggaagatggtcaagccgtagtagtggttttcgatgcgaaagcaccgtcgtttcgtcacgaagcgtacgaggcctataaagctggccgcgcaccgaccccggaagactttccgcgtcagttagcgctcgtcaaacgcctcgtggatttgctgggattagttcgcttggaagctcctggctacgaggcggacgacgtgctcggtacactggccaagaaagcagaacgtgaaggcatggaggtctgcattcttaccggtgatcgcgatttcttccagctgctgtctgagaaagtgagcgttttgctgcccgatggcacgttagtaaccccgaaagatgtgcaagagaaatatggagttccgccagaacgttgggtggactttcgcgcactgactggtgatcgttcagacaacatcccgggcgttgccgggattggtgaaaagacggcgctgcgcctgctggcagaatggggctcggtggaaaatctgctcaagaaccttgatcgtgtgaaacctgatagcttacgccgcaagatcgaagcccacctggaagacttgcgtctgagtctggatcttgtccgtattcgcaccgatctgccgttggaagtagactttaaagctctgcgtcgtcgcacacccgatttagaggggttacgcgcgttcctcgaagaactggagtttggctccctgctgcatgaattcggtttgttgggcggagagaaaccgcgtgaagaagcaccatggccgccgcccgaaggtgcctttgtcggctttcttctgtcacgcaaagagccaatgtgggcggaactgttagctcttgcagccgccgcggaagggcgtgttcaccgcgcgacctctcctgtcgaggccctcgctgacctcaaagaagcacgtggtttcttggcgaaagatttagccgtgcttgcattacgcgaatgtgttgcgctcgatccgacggacgacccgcttttggtggcttatttgctcgatcctgcgaataccaacccggaaggcgtagcccgtcgttacggcggcgagtttactgaagatgcggcagaacgcgcgttgcttagcgaacgcctcttccagacgttatttccacgtctttcggagaaattactctggctctatcaggaagtcgaacgtccattgagtcgcgtgcttgcccatatggaggctcgcggtgtgcgcttagatgttccgttgttagaagcactcagcttcgagttggagaaagaactggaacgtcttgaaggcgaagtctttcgtttagcggggcatcccttcaatctcaactctcgcgaccaattggagaaagtgctctttgatgaattaggtttaacccctgtcacgcgtacagagaagaccggcaaacgttccacttcggcagccgccttggaagcacttcgtggtgctcacccgatcgtcgagttgattttgcagtaccgcgagctcagcaaactcaaatcaacctatcttgataggttacctcgtcttgttcatccacgtacgggtcgtttacacacccgcttcaatcaaacggcgacagccaccgggcgcttgtcgtcgagtgacccgaacctccagaatattccagtgcgcacgccgctgggccaacgcattcgtaaagcgtttgttgcggaagaaggttggttattacttgcggccgattactcccagatcgaacttcgtgtattggcgcatctctctggcgacgagaatcttaaacgcgtgtttcgcgaaggcaaggatattcacactgaaaccgcagcctggatgttcgggcttgacccagccttagtggaccccaagatgcgtcgtgccgccaagaccgtcaactttggcgtactctatggtatgtcagcacatcgtcttagtcaggaattgggcattgactacaaagaagctgaagcgtttatcgagcgctatttccaatcctttccgaaagttcgcgcgtggattgaacgtaccctcgaagaaggtcgcactcgcggctatgtggaaacgttattcgggcgtcgtcgctacgttccagatcttgcatctcgtgtccgctcagtgcgcgaagctgctgagcgtatggcctggaatatgcctgttcagggaacagcggcggacctcatgaagatcgccatggtgaaattgtttccgcgcttgaaacccttaggagcccaccttcttttacaggtgcatgatgaattggtcttggaagtacccgaggatcgcgcagaagaagccaaagcactcgtgaaagaggttatggaaaacgcgtatccgttagatgttccgttggaggtcgaagtgggtgtaggccgtgattggcttgaagcgaaacaagactaatga

SEQ ID NO: 342 - protein, 844 aa, synthetic construct
  REGION 1..844: note = DNA Polymerase Variant
MHHHHHHGGSGMLPLFDLEEPPKRVLLVDGHHLAYRTFYALSLTTSRGEPVQMVYGFARSLLKALKEDGQAVVVVFDAKAPSFRHEAYEAYKAGRAPTPEDFPRQLALVKRLVDLLGLVRLEAPGYEADDVLGTLAKKAEREGMEVCILTGDRDFFQLLSEKVSVLLPDGTLVTPKDVQEKYGVPPERWVDFRALTGDRSDNIPGVAGIGEKTALRLLAEWGSVENLLKNLDRVKPDSLRRKIEAHLEDLRLSLDLVRIRTDLPLEVDFKALRRRTPDLEGLRAFLEELEFGSLLHEFGLLGGEKPREEAPWPPPEGAFVGFLLSRKEPMWAELLALAAAAEGRVHRATSPVEALADLKEARGFLAKDLAVLALRECVALDPTDDPLLVAYLLDPANTNPEGVARRYGGEFTEDAAERALLSERLFQTLFPRLSEKLLWLYQEVERPLSRVLAHMEARGVRLDVPLLEALSFELEKELERLEGEVFRLAGHPFNLNSRDQLEKVLFDELGLTPVTRTEKTGKRSTSAAALEALRGAHPIVELILQYRELSKLKSTYLDRLPRLVHPRTGRLHTRFNQTATATGRLSSSDPNLQNIPVRTPLGQRIRKAFVAEEGWLLLAADYSQIELRVLAHLSGDENLKRVFREGKDIHTETAAWMFGLDPALVDPKMRRAAKTVNFGVLYGMSAHRLSQELGIDYKEAEAFIERYFQSFPKVRAWIERTLEEGRTRGYVETLFGRRRYVPDLASRVRSVREAAERMAWNMPVQGTAADLMKIAMVKLFPRLKPLGAHLLLQVHDELVLEVPEDRAEEAKALVKEVMENAYPLDVPLEVEVGVGRDWLEAKQD

SEQ ID NO: 343 - DNA, 2538 bp, synthetic construct
  misc_feature 1..2538: note = DNA Polymerase Variant
  source 1..2538: mol_type = other DNA
atgcaccatcatcatcatcatggcggtagcggcatgttaccgctgtttgatttggaagaaccaccaaaacgcgtgctgcttgttgacggccatcatctggcgtatcgtaccttctacgcactgagccttacgacctcacgtggtgagcctgtccagatggtgtatgggtttgctcgctccctgctgaaagccctgaaggaagatggtcaagccgtagtagtggttttcgatgcgaaagcaccgtcgtttcgtcacgaagcgtacgaggcctataaagctggccgcgcaccgaccccggaagactttccgcgtcagttagcgctcgtcaaacgcctcgtggatttgctgggattagttcgcttggaagctcctggctacgaggcggacgacgtgctcggtacactggccaagaaagcagaacgtgaaggcatggaggtctgcattcttaccggtgatcgcgatttcttccagctgctgtctgagaaagtgagcgttttgctgcccgatggcacgttagtaaccccgaaagatctgcaagagaaatatggagttccgccagaacgttgggtggactttcgcgcactgactggtgatcgttcagacaacatcccgggcgttgccgggattggtgaaaagacggcgctgcgcctgctggcagaatggggctcggtggaaaatctgctcaagaaccttgatcgtgtgaaacctgatagcttacgccgcaagatcgaagcccacctggaagacttgcgtctgagtctggatcttgcccgtattcgcaccgatctgccgttggaagtagactttaaagctctgcgtcgtcgcacacccgatttagaggggttacgcgcgttcctcgaagaactggagtttggctccctgctgcatgaattcggtttgttgggcggagagaaaccgcgtgaagaagcaccatggccgccgcccgaaggtgcctttgtcggctttcttctgtcacgcaaagagccaatgtgggcggaactgttagctcttgcagccgccgcggaagggcgtgttcaccgcgcgacctctcctgtcgaggccctcgctgacctcaaagaagcacgtggtttcttggcgaaagatttagccgtgcttgcattacgcgaaggcgttgcgctcgatccgacggacgacccgcttttggtggcttatttgctcgatcctgcgaataccaacccggaaggcgtagcccgtcgttacggcggcgagtttactgaagatgcggcagaacgcgcgttgcttagcgaacgcctcttccagacgttatttccacgtctttcggagaaattactctggctctatcaggaagtcgaacgtccattgagtcgcgtgcttgcccatatggaggctcgcggtgtgcgcttagatgttccgttgttagaagcactcagcttcgagttggagaaagaactggaacgtcttgaaggcgaagtctttcgtttagcggggcatcccttcaatctcaactctcgcgaccaattggagaaagtgctctttgatgaattaggtttaacccctgtcacgcgtacagagaagaccggcaaacgttccacttcggcagccgccttggaagcacttcgtggtgctcacccgatcgtcgagttgattttgcagtaccgcgagctcagcaaactcaaatcaacctatcttgataggttacctcgtcttgttcatccacgtacgggtcgtttacacacccgcttcaatcaaacggcgacagccaccgggcgcttgtcgtcgagtgacccgaacctccagaatattccagtgcgcacgccgctgggccaacgcattcgtaaagcgtttgttgcggaagaaggttggttattacttgcggccgattactcccagatcgaacttcgtgtattggcgcatctctctggcgacgagaatcttaaacgcgtgtttcgcgaaggcaaggatattcacactgaaaccgcagcctggatgttcggggtggacccagccttagtggaccccaagatgcgtcgtgccgccaagaccgtcaactttggcgtactctatggtatgtcagcacatcgtcttagtcaggaattgggcattgactacaaagaagctgaagcgtttatcgagcgctatttccaatcctttccgaaagttcgcgcgtggattgaacgtaccctcgaagaaggtcgcactcgcggctatgtggaaacgttattcgggcgtcgtcgctacgttccagatcttgcatctcgtgtccgctcagtgcgcgaagctgctgagcgtatggcctggaatatgcctgttcagggaacagcggcggacctcatgaagatcgccatggtgaaattgtttccgcgcttgaaacccttaggagcccaccttcttttacaggtgcatgatgaattggtcttggaagtacccgaggatcgcgcagaagaagccaaagcactcgtgaaagaggttatggaaaacgcgtatccgttagatgttccgttggaggtcgaagtgggtgtaggccgtgattggcttgaagcgaaacaagactaatga

SEQ ID NO: 344 - protein, 844 aa, synthetic construct
  REGION 1..844: note = DNA Polymerase Variant
MHHHHHHGGSGMLPLFDLEEPPKRVLLVDGHHLAYRTFYALSLTTSRGEPVQMVYGFARSLLKALKEDGQAVVVVFDAKAPSFRHEAYEAYKAGRAPTPEDFPRQLALVKRLVDLLGLVRLEAPGYEADDVLGTLAKKAEREGMEVCILTGDRDFFQLLSEKVSVLLPDGTLVTPKDLQEKYGVPPERWVDFRALTGDRSDNIPGVAGIGEKTALRLLAEWGSVENLLKNLDRVKPDSLRRKIEAHLEDLRLSLDLARIRTDLPLEVDFKALRRRTPDLEGLRAFLEELEFGSLLHEFGLLGGEKPREEAPWPPPEGAFVGFLLSRKEPMWAELLALAAAAEGRVHRATSPVEALADLKEARGFLAKDLAVLALREGVALDPTDDPLLVAYLLDPANTNPEGVARRYGGEFTEDAAERALLSERLFQTLFPRLSEKLLWLYQEVERPLSRVLAHMEARGVRLDVPLLEALSFELEKELERLEGEVFRLAGHPFNLNSRDQLEKVLFDELGLTPVTRTEKTGKRSTSAAALEALRGAHPIVELILQYRELSKLKSTYLDRLPRLVHPRTGRLHTRFNQTATATGRLSSSDPNLQNIPVRTPLGQRIRKAFVAEEGWLLLAADYSQIELRVLAHLSGDENLKRVFREGKDIHTETAAWMFGVDPALVDPKMRRAAKTVNFGVLYGMSAHRLSQELGIDYKEAEAFIERYFQSFPKVRAWIERTLEEGRTRGYVETLFGRRRYVPDLASRVRSVREAAERMAWNMPVQGTAADLMKIAMVKLFPRLKPLGAHLLLQVHDELVLEVPEDRAEEAKALVKEVMENAYPLDVPLEVEVGVGRDWLEAKQD

SEQ ID NO: 345 - DNA, 2538 bp, synthetic construct
  misc_feature 1..2538: note = DNA Polymerase Variant
  source 1..2538: mol_type = other DNA
atgcaccatcatcatcatcatggcggtagcggcatgttaccgctgtttgatttggaagaaccaccaaaacgcgtgctgcttgttgacggccatcatctggcgtatcgtaccttctacgcactgagccttacgacctcacgtggtgagcctgtccagatggtgtatgggtttgctcgctccctgctgaaagccctgaaggaagatggtcaagccgtagtagtggttttcgatgcgaaagcaccgtcgtttcgtcacgaagcgtacgaggcctataaagctggccgcgcaccgaccccggaagactttccgcgtcagttagcgctcgtcaaacgcctcgtggatttgctgggattagttcgcttggaagctcctggctacgaggcggacgacgtgctcggtacactggccaagaaagcagaacgtgaaggcatggaggtctgcattcttaccggtgatcgcgatttcttccagctgctgtctgagaaagtgagcgttttgctgcccgatggcacgttagtaaccccgaaagatgtgcaagagaaatatggagttccgccagaacgttgggtggactttcgcgcactgactggtgatcgttcagacaacatcccgggcgttgccgggattggtgaaaagacggcgctgcgcctgctggcagaatggggctcggtggaaaatctgctcaagaaccttgatcgtgtgaaacctgatagcttacgccgcaagatcgaagcccacctggaagacttgcgtctgagtctggatcttgtccgtattcgcaccgatctgccgttggaagtagactttaaagctctgcgtcgtcgcacacccgatttagaggggttacgcgcgttcctcgaagaactggagtttggctccctgctgcatgaattcggtttgttgggcggagagaaaccgcgtgaagaagcaccatggccgccgcccgaaggtgcctttgtcggctttcttctgtcacgcaaagagccaatgtgggcggaactgttagctcttgcagccgccgcggaagggcgtgttcaccgcgcgacctctcctgtcgaggccctcgctgacctcaaagaagcacgtggtttcttggcgaaagatttagccgtgcttgcattacgcgaatgtgttgcgctcgatccgacggacgacccgcttttggtggcttatttgctcgatcctgcgaataccaacccggaatacgtcgcccgtcgttacggcggcgagtttactgaagatgcggcagaacgcgcgttgcttagcgaacgcctcttccagacgttatttccacgtctttcggagaaattactctggctctatcaggaagtcgaacgtccattgagtcgcgtgcttgcccatatggaggctcgcggtgtgcgcttagatgttccgttgttagaagcactcagcttcgagttggagaaagaactggaacgtcttgaaggcgaagtctttcgtttagcggggcatcccttcaatctcaactctcgcgaccaattggagaaagtgctctttgatgaattaggtttaacccctgtcacgcgtacagagaagaccggcaaacgttccacttcggcagccgccttggaagcacttcgtggtgctcacccgatcgtcgagttgattttgcagtaccgcgagctcagcaaactcaaatcaacctatcttgataggttacctcgtcttgttcatccacgtacgggtcgtttacacacccgcttcaatcaaacggcgacagccaccgggcgcttgtcgtcgagtgacccgaacctccagaatattccagtgcgcacgccgctgggccaacgcattcgtaaagcgtttgttgcggaagaaggttggttattacttgcggccgattactcccagatcgaacttcgtgtattggcgcatctctctggcgacgagaatcttaaacgcgtgtttcgcgaaggcaaggatattcacactgaaaccgcagcctggatgttcgggcttgacccagccttagtggaccccaagatgcgtcgtgccgccaagaccgtcaactttggcgtactctatggtatgtcagcacatcgtcttagtcaggaattgggcattgactacaaagaagctgaagcgtttatcgagcgctatttccaatcctttccgaaagttcgcgcgtggattgaacgtaccctcgaagaaggtcgcactcgcggctatgtggaaacgttattcgggcgtcgtcgctacgttccagatcttgcatctcgtgtccgctcagtgcgcgaagctgctgagcgtatggcctggaatatgcctgttcagggaacagcggcggacctcatgaagatcgccatggtgaaattgtttccgcgcttgaaacccttaggagcccaccttcttttacaggtgcatgatgaattggtcttggaagtacccgaggatcgcgcagaagaagccaaagcactcgtgaaagaggttatggaaaacgcgtatccgttagatgttccgttggaggtcgaagtgggtgtaggccgtgattggcttgaagcgaaacaagactaatga

SEQ ID NO: 346 - protein, 844 aa, synthetic construct
  REGION 1..844: note = DNA Polymerase Variant
MHHHHHHGGSGMLPLFDLEEPPKRVLLVDGHHLAYRTFYALSLTTSRGEPVQMVYGFARSLLKALKEDGQAVVVVFDAKAPSFRHEAYEAYKAGRAPTPEDFPRQLALVKRLVDLLGLVRLEAPGYEADDVLGTLAKKAEREGMEVCILTGDRDFFQLLSEKVSVLLPDGTLVTPKDVQEKYGVPPERWVDFRALTGDRSDNIPGVAGIGEKTALRLLAEWGSVENLLKNLDRVKPDSLRRKIEAHLEDLRLSLDLVRIRTDLPLEVDFKALRRRTPDLEGLRAFLEELEFGSLLHEFGLLGGEKPREEAPWPPPEGAFVGFLLSRKEPMWAELLALAAAAEGRVHRATSPVEALADLKEARGFLAKDLAVLALRECVALDPTDDPLLVAYLLDPANTNPEYVARRYGGEFTEDAAERALLSERLFQTLFPRLSEKLLWLYQEVERPLSRVLAHMEARGVRLDVPLLEALSFELEKELERLEGEVFRLAGHPFNLNSRDQLEKVLFDELGLTPVTRTEKTGKRSTSAAALEALRGAHPIVELILQYRELSKLKSTYLDRLPRLVHPRTGRLHTRFNQTATATGRLSSSDPNLQNIPVRTPLGQRIRKAFVAEEGWLLLAADYSQIELRVLAHLSGDENLKRVFREGKDIHTETAAWMFGLDPALVDPKMRRAAKTVNFGVLYGMSAHRLSQELGIDYKEAEAFIERYFQSFPKVRAWIERTLEEGRTRGYVETLFGRRRYVPDLASRVRSVREAAERMAWNMPVQGTAADLMKIAMVKLFPRLKPLGAHLLLQVHDELVLEVPEDRAEEAKALVKEVMENAYPLDVPLEVEVGVGRDWLEAKQD

SEQ ID NO: 347 - DNA, 2538 bp, synthetic construct
  misc_feature 1..2538: note = DNA Polymerase Variant
  source 1..2538: mol_type = other DNA
atgcaccatcatcatcatcatggcggtagcggcatgttaccgctgtttgatttggaagaaccaccaaaacgcgtgctgcttgttgacggccatcatctggcgtatcgtaccttctacgcactgagccttacgacctcacgtggtgagcctgtccagatggtgtatgggtttgctcgctccctgctgaaagccctgaaggaagatggtcaagccgtagtagtggttttcgatgcgaaagcaccgtcgtttcgtcacgaagcgtacgaggcctataaagctggccgcgcaccgaccccggaagactttccgcgtcagttagcgctcgtcaaacgcctcgtggatttgctgggattagttcgcttggaagctcctggctacgaggcggacgacgtgctcggtacactggccaagaaagcagaacgtgaaggcatggaggtctgcattcttaccggtgatcgcgatttcttccagctgctgtctgagaaagtgagcgttttgctgcccgatggcacgttagtaaccccgaaagatgtgcaagagaaatatggagttccgccagaacgttgggtggactttcgcgcactgactggtgatcgttcagacaacatcccgggcgttgccgggattggtgaaaagacggcgctgcgcctgctggcagaatggggctcggtggaaaatctgctcaagaaccttgatcgtgtgaaacctgatagcttacgccgcaagatcgaagcccacctggaagacttgcgtctgagtctggatcttgcgcgtattcgcaccgatctgccgttggaagtagactttaaagctctgcgtcgtcgcacacccgatttagaggggttacgcgcgttcctcgaagaactggagtttggctccctgctgcatgaattcggtttgttgggcggagagaaaccgcgtgaagaagcaccatggccgccgcccgaaggtgcctttgtcggctttcttctgtcacgcaaagagccaatgtgggcggaactgttagctcttgcagccgccgcggaagggcgtgttcaccgcgcgacctctcctgtcgaggccctcgctgacctcaaagaagcacgtggtttcttggcgaaagatttagccgtgcttgcattacgcgaaggcgttgcgctcgatccgacggacgacccgcttttggtggcttatttgctcgatcctgcgaataccaacccggaaggcgtagcccgtcgttacggcggcgagtttactgaagatgcggcagaacgcgcgttgcttagcgaacgcctcttccagacgttatttccacgtctttcggagaaattactctggctctatcaggaagtcgaacgtccattgagtcgcgtgcttgcccatatggaggctcgcggtgtgcgcttagatgttccgttgttagaagcactcagcttcgagttggagaaagaactggaacgtcttgaaggcgaagtctttcgtttagcggggcatcccttcaatctcaactctcgcgaccaattggagaaagtgctctttgatgaattaggtttaacccctgtcacgcgtacagagaagaccggcaaacgttccacttcggcagccgccttggaagcacttcgtggtgctcacccgatcgtcgagttgattttgcagtaccgcgagctcagcaaactcaaatcaacctatcttgataggttacctcgtcttgttcatccacgtacgggtcgtttacacacccgcttcaatcaaacggcgacagccaccgggcgcttgtcgtcgagtgacccgaacctccagaatattccagtgcgcacgccgctgggccaacgcattcgtaaagcgtttgttgcggaagaaggttggttattacttgcggccgattactcccagatcgaacttcgtgtattggcgcatctctctggcgacgagaatcttaaacgcgtgtttcgcgaaggcaaggatattcacactgaaaccgcagcctggatgttcggggtggacccagccttagtggaccccaagatgcgtcgtgccgccaagaccgtcaactttggcgtactctatggtatgtcagcacatcgtcttagtcaggaattgggcattgactacaaagaagctgaagcgtttatcgagcgctatttccaatcctttccgaaagttcgcgcgtggattgaacgtaccctcgaagaaggtcgcactcgcggctatgtggaaacgttattcgggcgtcgtcgctacgttccagatcttgcatctcgtgtccgctcagtgcgcgaagctgctgagcgtatggcctggaatatgcctgttcagggaacagcggcggacctcatgaagatcgccatggtgaaattgtttccgcgcttgaaacccttaggagcccaccttcttttacaggtgcatgatgaattggtcttggaagtacccgaggatcgcgcagaagaagccaaagcactcgtgaaagaggttatggaaaacgcgtatccgttagatgttccgttggaggtcgaagtgggtgtaggccgtgattggcttgaagcgaaacaagactaatga

SEQ ID NO: 348 - protein, 844 aa, synthetic construct
  REGION 1..844: note = DNA Polymerase Variant
MHHHHHHGGSGMLPLFDLEEPPKRVLLVDGHHLAYRTFYALSLTTSRGEPVQMVYGFARSLLKALKEDGQAVVVVFDAKAPSFRHEAYEAYKAGRAPTPEDFPRQLALVKRLVDLLGLVRLEAPGYEADDVLGTLAKKAEREGMEVCILTGDRDFFQLLSEKVSVLLPDGTLVTPKDVQEKYGVPPERWVDFRALTGDRSDNIPGVAGIGEKTALRLLAEWGSVENLLKNLDRVKPDSLRRKIEAHLEDLRLSLDLARIRTDLPLEVDFKALRRRTPDLEGLRAFLEELEFGSLLHEFGLLGGEKPREEAPWPPPEGAFVGFLLSRKEPMWAELLALAAAAEGRVHRATSPVEALADLKEARGFLAKDLAVLALREGVALDPTDDPLLVAYLLDPANTNPEGVARRYGGEFTEDAAERALLSERLFQTLFPRLSEKLLWLYQEVERPLSRVLAHMEARGVRLDVPLLEALSFELEKELERLEGEVFRLAGHPFNLNSRDQLEKVLFDELGLTPVTRTEKTGKRSTSAAALEALRGAHPIVELILQYRELSKLKSTYLDRLPRLVHPRTGRLHTRFNQTATATGRLSSSDPNLQNIPVRTPLGQRIRKAFVAEEGWLLLAADYSQIELRVLAHLSGDENLKRVFREGKDIHTETAAWMFGVDPALVDPKMRRAAKTVNFGVLYGMSAHRLSQELGIDYKEAEAFIERYFQSFPKVRAWIERTLEEGRTRGYVETLFGRRRYVPDLASRVRSVREAAERMAWNMPVQGTAADLMKIAMVKLFPRLKPLGAHLLLQVHDELVLEVPEDRAEEAKALVKEVMENAYPLDVPLEVEVGVGRDWLEAKQD

SEQ ID NO: 349 - DNA, 2538 bp, synthetic construct
  misc_feature 1..2538: note = DNA Polymerase Variant
  source 1..2538: mol_type = other DNA
atgcaccatcatcatcatcatggcggtagcggcatgttaccgctgtttgatttggaagaaccaccaaaacgcgtgctgcttgttgacggccatcatctggcgtatcgtaccttctacgcactgagccttacgacctcacgtggtgagcctgtccagatggtgtatgggtttgctcgctccctgctgaaagccctgaaggaagatggtcaagccgtagtagtggttttcgatgcgaaagcaccgtcgtttcgtcacgaagcgtacgaggcctataaagctggccgcgcaccgaccccggaagactttccgcgtcagttagcgctcgtcaaacgcctcgtggatttgctgggattagttcgcttggaagctcctggctacgaggcggacgacgtgctcggtacactggccaagaaagcagaacgtgaaggcatggaggtctgcattcttaccggtgatcgcgatttcttccagctgctgtctgagaaagtgagcgttttgctgcccgatggcacgttagtaaccccgaaagatctgcaagagaaatatggagttccgccagaacgttgggtggactttcgcgcactgactggtgatcgttcagacaacatcccgggcgttgccgggattggtgaaaagacggcgctgcgcctgctggcagaatggggctcggtggaaaatctgctcaagaaccttgatcgtgtgaaacctgatagcttacgccgcaagatcgaagcccacctggaagacttgcgtctgagtctggatcttgtccgtattcgcaccgatctgccgttggaagtagactttaaagctctgcgtcgtcgcacacccgatttagaggggttacgcgcgttcctcgaagaactggagtttggctccctgctgcatgaattcggtttgttgggcggagagaaaccgcgtgaagaagcaccatggccgccgcccgaaggtgcctttgtcggctttcttctgtcacgcaaagagccaatgtgggcggaactgttagctcttgcagccgccgcggaagggcgtgttcaccgcgcgacctctcctgtcgaggccctcgctgacctcaaagaagcacgtggtttcttggcgaaagatttagccgtgcttgcattacgcgaatgtgttgcgctcgatccgacggacgacccgcttttggtggcttatttgctcgatcctgcgaataccaacccggaacgtatcgcccgtcgttacggcggcgagtttactgaagatgcggcagaacgcgcgttgcttagcgaacgcctcttccagacgttatttccacgtctttcggagaaattactctggctctatcaggaagtcgaacgtccattgagtcgcgtgcttgcccatatggaggctcgcggtgtgcgcttagatgttccgttgttagaagcactcagcttcgagttggagaaagaactggaacgtcttgaagacgaagtctttcgtttagcggggcatcccttcaatctcaactctcgcgaccaattggagaaagtgctctttgatgaattaggtttaacccctgtcacgcgtacagagaagaccggcaaacgttccacttcggcagctgccttggaagcacttcgtggtgctcacccgatcgtcgagttgattttgcagtaccgcgagctcagcaaactcaaatcaacctatcttgataggttacctcgtcttgttcatccacgtacgggtcgtttacacacccgcttcaatcaaacggcgacagccaccgggcgcttgtcgtcgagtgacccgaacctccagaatattccagtgcgcacgccgctgggccaacacattcgtaaagcgtttgttgcggaagaaggttggttattacttgcggccgattactcccagatcgaacttcgtgtattggcgcatctctctggcgacgagaatcttaaacgcgtgtttcgcgaaggcaaggatattcacactgaaaccgcagcctggatgttcggggtggacccagccttagtggaccccaagatgcgtcgtgccgccaagaccgtcaactttggcgtactctatggtatgtcagcacatcgtcttagtcaggaattgggcattgactacaaagaagctgaagcgtttatcgagcgctatttccaatcctttccgaaagttcgcgcgtggattgaacgtaccctcgaagaaggtcgcactcgcggctatgtggaaacgttattcgggcgtcgtcgctacgttccagatcttgcatctcgtgtccgctcagtgcgcgaagctgctgagcgtatggcctggaatatgcctgttcagggaacagcggcggacctcatgaagatcgccatggtgaaattgtttccgcgcttgaaacccttaggagcccaccttcttttacaggtgcatgatgaattggtcttggaagtacccgaggatcgcgcagaagaagccaaagcactcgtgaaagaggttatggaaaacgcgtatccgttagatgttccgttggaggtcgaagtgggtgtaggccgtgattggcttgaagcgaaacaagactaatga

SEQ ID NO: 350 - protein, 844 aa, synthetic construct
  REGION 1..844: note = DNA Polymerase Variant
MHHHHHHGGSGMLPLFDLEEPPKRVLLVDGHHLAYRTFYALSLTTSRGEPVQMVYGFARSLLKALKEDGQAVVVVFDAKAPSFRHEAYEAYKAGRAPTPEDFPRQLALVKRLVDLLGLVRLEAPGYEADDVLGTLAKKAEREGMEVCILTGDRDFFQLLSEKVSVLLPDGTLVTPKDLQEKYGVPPERWVDFRALTGDRSDNIPGVAGIGEKTALRLLAEWGSVENLLKNLDRVKPDSLRRKIEAHLEDLRLSLDLVRIRTDLPLEVDFKALRRRTPDLEGLRAFLEELEFGSLLHEFGLLGGEKPREEAPWPPPEGAFVGFLLSRKEPMWAELLALAAAAEGRVHRATSPVEALADLKEARGFLAKDLAVLALRECVALDPTDDPLLVAYLLDPANTNPERIARRYGGEFTEDAAERALLSERLFQTLFPRLSEKLLWLYQEVERPLSRVLAHMEARGVRLDVPLLEALSFELEKELERLEDEVFRLAGHPFNLNSRDQLEKVLFDELGLTPVTRTEKTGKRSTSAAALEALRGAHPIVELILQYRELSKLKSTYLDRLPRLVHPRTGRLHTRFNQTATATGRLSSSDPNLQNIPVRTPLGQHIRKAFVAEEGWLLLAADYSQIELRVLAHLSGDENLKRVFREGKDIHTETAAWMFGVDPALVDPKMRRAAKTVNFGVLYGMSAHRLSQELGIDYKEAEAFIERYFQSFPKVRAWIERTLEEGRTRGYVETLFGRRRYVPDLASRVRSVREAAERMAWNMPVQGTAADLMKIAMVKLFPRLKPLGAHLLLQVHDELVLEVPEDRAEEAKALVKEVMENAYPLDVPLEVEVGVGRDWLEAKQD

SEQ ID NO: 351 - DNA, 2538 bp, synthetic construct
  misc_feature 1..2538: note = DNA Polymerase Variant
  source 1..2538: mol_type = other DNA
atgcaccatcatcatcatcatggcggtagcggcatgttaccgctgtttgatttggaagaaccaccaaaacgcgtgctgcttgttgacggccatcatctggcgtatcgtaccttctacgcactgagccttacgacctcacgtggtgagcctgtccagatggtgtatgggtttgctcgctccctgctgaaagccctgaaggaagatggtcaagccgtagtagtggttttcgatgcgaaagcaccgtcgtttcgtcacgaagcgtacgaggcctataaagctggccgcgcaccgaccccggaagactttccgcgtcagttagcgctcgtcaaacgcctcgtggatttgctgggattagttcgcttggaagctcctggctacgaggcggacgacgtgctcggtacactggccaagaaagcagaacgtgaaggcatggaggtctgcattcttaccggtgatcgcgatttcttccagctgctgtctgagaaagtgagcgttttgctgcccgatggcacgttagtaaccccgaaagatgtgcaagagaaatatggagttccgccagaacgttgggtggactttcgcgcactgactggtgatcgttcagacaacatcccgggcgttgccgggattggtgaaaagacggcgctgcgcctgctggcagaatggggctcggtggaaaatctgctcaagaaccttgatcgtgtgaaacctgatagcttacgccgcaagatcgaagcccacctggaagacttgcgtctgagtctggatcttgcgcgtattcgcaccgatctgccgttggaagtagactttaaagctctgcgtcgtcgcacacccgatttagaggggttacgcgcgttcctcgaagaactggagtttggctccctgctgcatgaattcggtttgttgggcggagagaaaccgcgtgaagaagcaccatggccgccgcccgaaggtgcctttgtcggctttcttctgtcacgcaaagagccaatgtgggcggaactgttagctcttgcagccgccgcggaagggcgtgttcaccgcgcgacctctcctgtcgaggccctcgctgacctcaaagaagcacgtggtttcttggcgaaagatttagccgtgcttgcattacgcgaatgtgttgcgctcgatccgacggacgacccgcttttggtggcttatttgctcgatcctgcgaataccaacccggaaggcgtagcccgtcgttacggcggcgagtttactgaagatgcggcagaacgcgcgttgcttagcgaacgcctcttccagacgttatttccacgtctttcggagaaattactctggctctatcaggaagtcgaacgtccattgagtcgcgtgcttgcccatatggaggctcgcggtgtgcgcttagatgttccgttgttagaagcactcagcttcgagttggagaaagaactggaacgtcttgaaggcgaagtctttcgtttagcggggcatcccttcaatctcaactctcgcgaccaattggagaaagtgctctttgatgaattaggtttaacccctgtcacgcgtacagagaagaccggcaaacgttccacttcggcagccgccttggaagcacttcgtggtgctcacccgatcgtcgagttgattttgcagtaccgcgagctcagcaaactcaaatcaacctatcttgataggttacctcgtcttgttcatccacgtacgggtcgtttacacacccgcttcaatcaaacggcgacagccaccgggcgcttgtcgtcgagtgacccgaacctccagaatattccagtgcgcacgccgctgggccaacgcattcgtaaagcgtttgttgcggaagaaggttggttattacttgcggccgattactcccagatcgaacttcgtgtattggcgcatctctctggcgacgagaatcttaaacgcgtgtttcgcgaaggcaaggatattcacactgaaaccgcagcctggatgttcgggctggacccagccttagtggaccccaagatgcgtcgtgccgccaagaccgtcaactttggcgtactctatggtatgtcagcacatcgtcttagtcaggaattgggcattgactacaaagaagctgaagcgtttatcgagcgctatttccaatcctttccgaaagttcgcgcgtggattgaacgtaccctcgaagaaggtcgcactcgcggctatgtggaaacgttattcgggcgtcgtcgctacgttccagatcttgcatctcgtgtccgctcagtgcgcgaagctgctgagcgtatggcctggaatatgcctgttcagggaacagcggcggacctcatgaagatcgccatggtgaaattgtttccgcgcttgaaacccttaggagcccaccttcttttacaggtgcatgatgaattggtcttggaagtacccgaggatcgcgcagaagaagccaaagcactcgtgaaagaggttatggaaaacgcgtatccgttagatgttccgttggaggtcgaagtgggtgtaggccgtgattggcttgaagcgaaacaagactaatga

SEQ ID NO: 352 - protein, 844 aa, synthetic construct
  REGION 1..844: note = DNA Polymerase Variant
MHHHHHHGGSGMLPLFDLEEPPKRVLLVDGHHLAYRTFYALSLTTSRGEPVQMVYGFARSLLKALKEDGQAVVVVFDAKAPSFRHEAYEAYKAGRAPTPEDFPRQLALVKRLVDLLGLVRLEAPGYEADDVLGTLAKKAEREGMEVCILTGDRDFFQLLSEKVSVLLPDGTLVTPKDVQEKYGVPPERWVDFRALTGDRSDNIPGVAGIGEKTALRLLAEWGSVENLLKNLDRVKPDSLRRKIEAHLEDLRLSLDLARIRTDLPLEVDFKALRRRTPDLEGLRAFLEELEFGSLLHEFGLLGGEKPREEAPWPPPEGAFVGFLLSRKEPMWAELLALAAAAEGRVHRATSPVEALADLKEARGFLAKDLAVLALRECVALDPTDDPLLVAYLLDPANTNPEGVARRYGGEFTEDAAERALLSERLFQTLFPRLSEKLLWLYQEVERPLSRVLAHMEARGVRLDVPLLEALSFELEKELERLEGEVFRLAGHPFNLNSRDQLEKVLFDELGLTPVTRTEKTGKRSTSAAALEALRGAHPIVELILQYRELSKLKSTYLDRLPRLVHPRTGRLHTRFNQTATATGRLSSSDPNLQNIPVRTPLGQRIRKAFVAEEGWLLLAADYSQIELRVLAHLSGDENLKRVFREGKDIHTETAAWMFGLDPALVDPKMRRAAKTVNFGVLYGMSAHRLSQELGIDYKEAEAFIERYFQSFPKVRAWIERTLEEGRTRGYVETLFGRRRYVPDLASRVRSVREAAERMAWNMPVQGTAADLMKIAMVKLFPRLKPLGAHLLLQVHDELVLEVPEDRAEEAKALVKEVMENAYPLDVPLEVEVGVGRDWLEAKQD

SEQ ID NO: 353 - DNA, 2538 bp, synthetic construct
  misc_feature 1..2538: note = DNA Polymerase Variant
  source 1..2538: mol_type = other DNA
atgcaccatcatcatcatcatggcggtagcggcatgttaccgctgtttgatttggaagaaccaccaaaacgcgtgctgcttgttgacggccatcatctggcgtatcgtaccttctacgcactgagccttacgacctcacgtggtgagcctgtccagatggtgtatgggtttgctcgctccctgctgaaagccctgaaggaagatggtcaagccgtagtagtggttttcgatgcgaaagcaccgtcgtttcgtcacgaagcgtacgaggcctataaagctggccgcgcaccgaccccggaagactttccgcgtcagttagcgctcgtcaaacgcctcgtggatttgctgggattagttcgcttggaagctcctggctacgaggcggacgacgtgctcggtacactggccaagaaagcagaacgtgaaggcatggaggtctgcattcttaccggtgatcgcgatttcttccagctgctgtctgagaaagtgagcgttttgctgcccgatggcacgttagtaaccccgaaagatctgcaagagaaatatggagttccgccagaacgttgggtggactttcgcgcactgactggtgatcgttcagacaacatcccgggcgttgccgggattggtgaaaagacggcgctgcgcctgctggcagaatggggctcggtggaaaatctgctcaagaaccttgatcgtgtgaaacctgatagcttacgccgcaagatcgaagcccacctggaagacttgcgtctgagtctggatcttgcccgtattcgcaccgatctgccgttggaagtagactttaaagctctgcgtcgtcgcacacccgatttagaggggttacgcgcgttcctcgaagaactggagtttggctccctgctgcatgaattcggtttgttgggcggagagaaaccgcgtgaagaagcaccatggccgccgcccgaaggtgcctttgtcggctttcttctgtcacgcaaagagccaatgtgggcggaactgttagctcttgcagccgccgcggaagggcgtgttcaccgcgcgacctctcctgtcgaggccctcgctgacctcaaagaagcacgtggtttcttggcgaaagatttagccgtgcttgcattacgcgaaggcgttgcgctcgatccgacggacgacccgcttttggtggcttatttgctcgatcctgcgaataccaacccggaacgtatcgcccgtcgttacggcggcgagtttactgaagatgcggcagaacgcgcgttgcttagcgaacgcctcttccagacgttatttccacgtctttcggagaaattactctggctctatcaggaagtcgaacgtccattgagtcgcgtgcttgcccatatggaggctcgcggtgtgcgcttagatgttccgttgttagaagcactcagcttcgagttggagaaagaactggaacgtcttgaaggcgaagtctttcgtttagcggggcatcccttcaatctcaactctcgcgaccaattggagaaagtgctctttgatgaattaggtttaacccctgtcacgcgtacagagaagaccggcaaacgttccacttcggcaggtgccttggaagcacttcgtggtgctcacccgatcgtcggcttgattttgcagtaccgcgagctcagcaaactcaaatcaacctatcttgataggttacctcgtcttgttcatccacgtacgggtcgtttacacacccgcttcaatcaaacggcgacagccaccgggcgcttgtcgtcgagtgacccgaacctccagaatattccagtgcgcacgccgctgggccaacgcattcgtaaagcgtttgttgcggaagaaggttggttattacttgcggccgattactcccagatcgaacttcgtgtattggcgcatctctctggcgacgagaatcttaaacgcgtgtttcgcgaaggcaaggatattcacactgaaaccgcagcctggatgttcggggtggacccagccttagtggaccccaagatgcgtcgtgccgccaagaccgtcaactttggcgtactctatggtatgtcagcacatcgtcttagtcaggaattgggcattgactacaaagaagctgaagcgtttatcgagcgctatttccaatcctttccgaaagttcgcgcgtggattgaacgtaccctcgaagaaggtcgcactcgcggctatgtggaaacgttattcgggcgtcgtcgctacgttccagatcttgcatctcgtgtccgctcagtgcgcgaagctgctgagcgtatggcctggaatatgcctgttcagggaacagcggcggacctcatgaagatcgccatggtgaaattgtttccgcgcttgaaacccttaggagcccaccttcttttacaggtgcatgatgaattggtcttggaagtacccgaggatcgcgcagaagaagccaaagcactcgtgaaagaggttatggaaaacgcgtatccgttagatgttccgttggaggtcgaagtgggtgtaggccgtgattggcttgaagcgaaacaagactaatga

SEQ ID NO: 354 - protein, 844 aa, synthetic construct
  REGION 1..844: note = DNA Polymerase Variant
MHHHHHHGGSGMLPLFDLEEPPKRVLLVDGHHLAYRTFYALSLTTSRGEPVQMVYGFARSLLKALKEDGQAVVVVFDAKAPSFRHEAYEAYKAGRAPTPEDFPRQLALVKRLVDLLGLVRLEAPGYEADDVLGTLAKKAEREGMEVCILTGDRDFFQLLSEKVSVLLPDGTLVTPKDLQEKYGVPPERWVDFRALTGDRSDNIPGVAGIGEKTALRLLAEWGSVENLLKNLDRVKPDSLRRKIEAHLEDLRLSLDLARIRTDLPLEVDFKALRRRTPDLEGLRAFLEELEFGSLLHEFGLLGGEKPREEAPWPPPEGAFVGFLLSRKEPMWAELLALAAAAEGRVHRATSPVEALADLKEARGFLAKDLAVLALREGVALDPTDDPLLVAYLLDPANTNPERIARRYGGEFTEDAAERALLSERLFQTLFPRLSEKLLWLYQEVERPLSRVLAHMEARGVRLDVPLLEALSFELEKELERLEGEVFRLAGHPFNLNSRDQLEKVLFDELGLTPVTRTEKTGKRSTSAGALEALRGAHPIVGLILQYRELSKLKSTYLDRLPRLVHPRTGRLHTRFNQTATATGRLSSSDPNLQNIPVRTPLGQRIRKAFVAEEGWLLLAADYSQIELRVLAHLSGDENLKRVFREGKDIHTETAAWMFGVDPALVDPKMRRAAKTVNFGVLYGMSAHRLSQELGIDYKEAEAFIERYFQSFPKVRAWIERTLEEGRTRGYVETLFGRRRYVPDLASRVRSVREAAERMAWNMPVQGTAADLMKIAMVKLFPRLKPLGAHLLLQVHDELVLEVPEDRAEEAKALVKEVMENAYPLDVPLEVEVGVGRDWLEAKQD

SEQ ID NO: 355 - DNA, 2538 bp, synthetic construct
  misc_feature 1..2538: note = DNA Polymerase Variant
  source 1..2538: mol_type = other DNA
atgcaccatcatcatcatcatggcggtagcggcatgttaccgctgtttgatttggaagaaccaccaaaacgcgtgctgcttgttgacggccatcatctggcgtatcgtaccttctacgcactgagccttacgacctcacgtggtgagcctgtccagatggtgtatgggtttgctcgctccctgctgaaagccctgaaggaagatggtcaagccgtagtagtggttttcgatgcgaaagcaccgtcgtttcgtcacgaagcgtacgaggcctataaagctggccgcgcaccgaccccggaagactttccgcgtcagttagcgctcgtcaaacgcctcgtggatttgctgggattagttcgcttggaagctcctggctacgaggcggacgacgtgctcggtacactggccaagaaagcagaacgtgaaggcatggaggtctgcattcttaccggtgatcgcgatttcttccagctgctgtctgagaaagtgagcgttttgctgcccgatggcacgttagtaaccccgaaagatgtccaagagaaatatggagttccgccagaacgttgggtggactttcgcgcactgactggtgatcgttcagacaacatcccgggcgttgccgggattggtgaaaagacggcgctgcgcctgctggcagaatggggctcggtggaaaatctgctcaagaaccttgatcgtgtgaaacctgatagcttacgccgcaagatcgaagcccacctggaagacttgcgtctgagtctggatcttgcccgtattcgcaccgatctgccgttggaagtagactttaaagctctgcgtcgtcgcacacccgatttagaggggttacgcgcgttcctcgaagaactggagtttggctccctgctgcatgaattcggtttgttgggcggagagaaaccgcgtgaagaagcaccatggccgccgcccgaaggtgcctttgtcggctttcttctgtcacgcaaagagccaatgtgggcggaactgttagctcttgcagccgccgcggaagggcgtgttcaccgcgcgacctctcctgtcgaggccctcgctgacctcaaagaagcacgtggtttcttggcgaaagatttagccgtgcttgcattacgcgaatgtgttgcgctcgatccgacggacgacccgcttttggtggcttatttgctcgatcctgcgaataccaacccggaaggcgtagcccgtcgttacggcggcgagtttactgaagatgcggcagaacgcgcgttgcttagcgaacgcctcttccagacgttatttccacgtctttcggagaaattactctggctctatcaggaagtcgaacgtccattgagtcgcgtgcttgcccatatggaggctcgcggtgtgcgcttagatgttccgttgttagaagcactcagcttcgagttggagaaagaactggaacgtcttgaaggcgaagtctttcgtttagcggggcatcccttcaatctcaactctcgcgaccaattggagaaagtgctctttgatgaattaggtttaacccctgtcacgcgtacagagaagaccggcaaacgttccacttcggcagccgccttggaagcacttcgtggtgctcacccgatcgtcgagttgattttgcagtaccgcgagctcagcaaactcaaatcaacctatcttgataggttacctcgtcttgttcatccacgtacgggtcgtttacacacccgcttcaatcaaacggcgacagccaccgggcgcttgtcgtcgagtgacccgaacctccagaatattccagtgcgcacgccgactggccaacgcattcgtaaagcgtttgttgcggaagaaggttggttattacttgcggccgattactcccagatcgaacttcgtgtattggcgcatctctctggcgacgagaatcttaaacgcgtgtttcgcgaaggcaaggatattcacactgaaaccgcagcctggatgttcggggtggacccagccttagtggaccccaagatgcgtcgtgccgccaagaccgtcaactttggcgtactctatggtatgtcagcacatcgtcttagtcaggaattgggcattgactacaaagaagctgaagcgtttatcgagcgctatttccaatcctttccgaaagttcgcgcgtggattgaacgtaccctcgaagaaggtcgcactcgcggctatgtggaaacgttattcgggcgtcgtcgctacgttccagatcttgcatctcgtgtccgctcagtgcgcgaagctgctgagcgtatggcctggaatatgcctgttcagggaacagcggcggacctcatgaagatcgccatggtgaaattgtttccgcgcttgaaacccttaggagcccaccttcttttacaggtgcatgatgaattggtcttggaagtacccgaggatcgcgcagaagaagccaaagcactcgtgaaagaggttatggaaaacgcgtatccgttagatgttccgttggaggtcgaagtgggtgtaggccgtgattggcttgaagcgaaacaagactaatga

SEQ ID NO: 356 - protein, 844 aa, synthetic construct
  REGION 1..844: note = DNA Polymerase Variant
MHHHHHHGGSGMLPLFDLEEPPKRVLLVDGHHLAYRTFYALSLTTSRGEPVQMVYGFARSLLKALKEDGQAVVVVFDAKAPSFRHEAYEAYKAGRAPTPEDFPRQLALVKRLVDLLGLVRLEAPGYEADDVLGTLAKKAEREGMEVCILTGDRDFFQLLSEKVSVLLPDGTLVTPKDVQEKYGVPPERWVDFRALTGDRSDNIPGVAGIGEKTALRLLAEWGSVENLLKNLDRVKPDSLRRKIEAHLEDLRLSLDLARIRTDLPLEVDFKALRRRTPDLEGLRAFLEELEFGSLLHEFGLLGGEKPREEAPWPPPEGAFVGFLLSRKEPMWAELLALAAAAEGRVHRATSPVEALADLKEARGFLAKDLAVLALRECVALDPTDDPLLVAYLLDPANTNPEGVARRYGGEFTEDAAERALLSERLFQTLFPRLSEKLLWLYQEVERPLSRVLAHMEARGVRLDVPLLEALSFELEKELERLEGEVFRLAGHPFNLNSRDQLEKVLFDELGLTPVTRTEKTGKRSTSAAALEALRGAHPIVELILQYRELSKLKSTYLDRLPRLVHPRTGRLHTRFNQTATATGRLSSSDPNLQNIPVRTPTGQRIRKAFVAEEGWLLLAADYSQIELRVLAHLSGDENLKRVFREGKDIHTETAAWMFGVDPALVDPKMRRAAKTVNFGVLYGMSAHRLSQELGIDYKEAEAFIERYFQSFPKVRAWIERTLEEGRTRGYVETLFGRRRYVPDLASRVRSVREAAERMAWNMPVQGTAADLMKIAMVKLFPRLKPLGAHLLLQVHDELVLEVPEDRAEEAKALVKEVMENAYPLDVPLEVEVGVGRDWLEAKQD

SEQ ID NO: 357 - DNA, 2538 bp, synthetic construct
  misc_feature 1..2538: note = DNA Polymerase Variant
  source 1..2538: mol_type = other DNA
atgcaccatcatcatcatcatggcggtagcggcatgttaccgctgtttgatttggaagaaccaccaaaacgcgtgctgcttgttgacggccatcatctggcgtatcgtaccttctacgcactgagccttacgacctcacgtggtgagcctgtccagatggtgtatgggtttgctcgctccctgctgaaagccctgaaggaagatggtcaagccgtagtagtggttttcgatgcgaaagcaccgtcgtttcgtcacgaagcgtacgaggcctataaagctggccgcgcaccgaccccggaagactttccgcgtcagttagcgctcgtcaaacgcctcgtggatttgctgggattagttcgcttggaagctcctggctacgaggcggacgacgtgctcggtacactggccaagaaagcagaacgtgaaggcatggaggtctgcattcttaccggtgatcgcgatttcttccagctgctgtctgagaaagtgagcgttttgctgcccgatggcacgttagtaaccccgaaagatctgcaagagaaatatggagttccgccagaacgttgggtggactttcgcgcactgactggtgatcgttcagacaacatcccgggcgttgccgggattggtgaaaagacggcgctgcgcctgctggcagaatggggctcggtggaaaatctgctcaagaaccttgatcgtgtgaaacctgatagcttacgccgcaagatcgaagcccacctggaagacttgcgtctgagtctggatcttgcgcgtattcgcaccgatctgccgttggaagtagactttaaagctctgcgtcgtcgcacacccgatttagaggggttacgcgcgttcctcgaagaactggagtttggctccctgctgcatgaattcggtttgttgggcggagagaaaccgcgtgaagaagcaccatggccgccgcccgaaggtgcctttgtcggctttcttctgtcacgcaaagagccaatgtgggcggaactgttagctcttgcagccgccgcggaagggcgtgttcaccgcgcgacctctcctgtcgaggccctcgctgacctcaaagaagcacgtggtttcttggcgaaagatttagccgtgcttgcattacgcgaatgtgttgcgctcgatccgacggacgacccgcttttggtggcttatttgctcgatcctgcgaataccaacccggaaggtgtcgcccgtcgttacggcggcgagtttactgaagatgcggcagaacgcgcgttgcttagcgaacgcctcttccagacgttatttccacgtctttcggagaaattactctggctctatcaggaagtcgaacgtccattgagtcgcgtgcttgcccatatggaggctcgcggtgtgcgcttagatgttccgttgttagaagcactcagcttcgagttggagaaagaactggaacgtcttgaaggcgaagtctttcgtttagcggggcatcccttcaatctcaactctcgcgaccaattggagaaagtgctctttgatgaattaggtttaacccctgtcacgcgtacagagaagaccggcaaacgttccacttcggcagccgccttggaagcacttcgtggtgctcacccgatcgtcgagttgattttgcagtaccgcgagctcagcaaactcaaatcaacctatcttgataggttacctcgtcttgttcatccacgtacgggtcgtttacacacccgcttcaatcaaacggcgacagccaccgggcgcttgtcgtcgagtgacccgaacctccagaatattccagtgcgcacgccgctgggccaacgcattcgtaaagcgtttgttgcggaagaaggttggttattacttgcggccgattactcccagatcgaacttcgtgtattggcgcatctctctggcgacgagaatcttaaacgcgtgtttcgcgaaggcaaggatattcacactgaaaccgcagcctggatgttcgggcttgacccagccttagtggaccccaagatgcgtcgtgccgccaagaccgtcaactttggcgtactctatggtatgtcagcacatcgtcttagtcaggaattgggcattgactacaaagaagctgaagcgtttatcgagcgctatttccaatcctttccgaaagttcgcgcgtggattgaacgtaccctcgaagaaggtcgcactcgcggctatgtggaaacgttattcgggcgtcgtcgctacgttccagatcttgcatctcgtgtccgctcagtgcgcgaagctgctgagcgtatggcctggaatatgcctgttcagggaacagcggcggacctcatgaagatcgccatggtgaaattgtttccgcgcttgaaacccttaggagcccaccttcttttacaggtgcatgatgaattggtcttggaagtacccgaggatcgcgcagaagaagccaaagcactcgtgaaagaggttatggaaaacgcgtatccgttagatgttccgttggaggtcgaagtgggtgtaggccgtgattggcttgaagcgaaacaagactaatga

SEQ ID NO: 358 - protein, 844 aa, synthetic construct
  REGION 1..844: note = DNA Polymerase Variant
MHHHHHHGGSGMLPLFDLEEPPKRVLLVDGHHLAYRTFYALSLTTSRGEPVQMVYGFARSLLKALKEDGQAVVVVFDAKAPSFRHEAYEAYKAGRAPTPEDFPRQLALVKRLVDLLGLVRLEAPGYEADDVLGTLAKKAEREGMEVCILTGDRDFFQLLSEKVSVLLPDGTLVTPKDLQEKYGVPPERWVDFRALTGDRSDNIPGVAGIGEKTALRLLAEWGSVENLLKNLDRVKPDSLRRKIEAHLEDLRLSLDLARIRTDLPLEVDFKALRRRTPDLEGLRAFLEELEFGSLLHEFGLLGGEKPREEAPWPPPEGAFVGFLLSRKEPMWAELLALAAAAEGRVHRATSPVEALADLKEARGFLAKDLAVLALRECVALDPTDDPLLVAYLLDPANTNPEGVARRYGGEFTEDAAERALLSERLFQTLFPRLSEKLLWLYQEVERPLSRVLAHMEARGVRLDVPLLEALSFELEKELERLEGEVFRLAGHPFNLNSRDQLEKVLFDELGLTPVTRTEKTGKRSTSAAALEALRGAHPIVELILQYRELSKLKSTYLDRLPRLVHPRTGRLHTRFNQTATATGRLSSSDPNLQNIPVRTPLGQRIRKAFVAEEGWLLLAADYSQIELRVLAHLSGDENLKRVFREGKDIHTETAAWMFGLDPALVDPKMRRAAKTVNFGVLYGMSAHRLSQELGIDYKEAEAFIERYFQSFPKVRAWIERTLEEGRTRGYVETLFGRRRYVPDLASRVRSVREAAERMAWNMPVQGTAADLMKIAMVKLFPRLKPLGAHLLLQVHDELVLEVPEDRAEEAKALVKEVMENAYPLDVPLEVEVGVGRDWLEAKQD

SEQ ID NO: 359 - DNA, 2538 bp, synthetic construct
  misc_feature 1..2538: note = DNA Polymerase Variant
  source 1..2538: mol_type = other DNA
atgcaccatcatcatcatcatggcggtagcggcatgttaccgctgtttgatttggaagaaccaccaaaacgcgtgctgcttgttgacggccatcatctggcgtatcgtaccttctacgcactgagccttacgacctcacgtggtgagcctgtccagatggtgtatgggtttgctcgctccctgctgaaagccctgaaggaagatggtcaagccgtagtagtggttttcgatgcgaaagcaccgtcgtttcgtcacgaagcgtacgaggcctataaagctggccgcgcaccgaccccggaagactttccgcgtcagttagcgctcgtcaaacgcctcgtggatttgctgggattagttcgcttggaagctcctggctacgaggcggacgacgtgctcggtacactggccaagaaagcagaacgtgaaggcatggaggtctgcattcttaccggtgatcgcgatttcttccagctgctgtctgagaaagtgagcgttttgctgcccgatggcacgttagtaaccccgaaagatgtgcaagagaaatatggagttccgccagaacgttgggtggactttcgcgcactgactggtgatcgttcagacaacatcccgggcgttgccgggattggtgaaaagacggcgctgcgcctgctggcagaatggggctcggtggaaaatctgctcaagaaccttgatcgtgtgaaacctgatagcttacgccgcaagatcgaagcccacctggaagacttgcgtctgagtctggatcttgcccgtattcgcaccgatctgccgttggaagtagactttaaagctctgcgtcgtcgcacacccgatttagaggggttacgcgcgttcctcgaagaactggagtttggctccctgctgcatgaattcggtttgttgggcggagagaaaccgcgtgaagaagcaccatggccgccgcccgaaggtgcctttgtcggctttcttctgtcacgcaaagagccaatgtgggcggaactgttagctcttgcagccgccgcggaagggcgtgttcaccgcgcgacctctcctgtcgaggccctcgctgacctcaaagaagcacgtggtttcttggcgaaagatttagccgtgcttgcattacgcgaatgtgttgcgctcgatccgacggacgacccgcttttggtggcttatttgctcgatcctgcgaataccaacccggaaggcgtagcccgtcgttacggcggcgagtttactgaagatgcggcagaacgcgcgttgcttagcgaacgcctcttccagacgttatttccacgtctttcggagaaattactctggctctatcaggaagtcgaacgtccattgagtcgcgtgcttgcccatatggaggctcgcggtgtgcgcttagatgttccgttgttagaagcactcagcttcgagttggagaaagaactggaacgtcttgaaggcgaagtctttcgtttagcgtggcatcccttcaatctcaactctcgcgaccaattggagaaagtgctctttgatgaattaggtttaacccctgtcacgcgtacagagaagaccggcaaacgttccacttcggcagccgccttggaagcacttcgtggtgctcacccgatcgtcgagttgattttgcagtaccgcgagctcagcaaactcaaatcaacctatcttgataggttacctcgtcttgttcatccacgtacgggtcgtttacacacccgcttcaatcaaacggcgacagccaccgggcgcttgtcgtcgagtgacccgaacctccagaatattccagtgcgcacgccgctgggccaacgcattcgtaaagcgtttgttgcggaagaaggttggttattacttgcggccgattactcccagatcgaacttcgtgtattggcgcatctctctggcgacgagaatcttaaacgcgtgtttcgcgaaggcaaggatattcacactgaaaccgcagcctggatgttcggggtggacccagccttagtggaccccaagatgcgtcgtgccgccaagaccgtcaactttggcgtactctatggtatgtcagcacatcgtcttagtcaggaattgggcattgactacaaagaagctgaagcgtttatcgagcgctatttccaatcctttccgaaagttcgcgcgtggattgaacgtaccctcgaagaaggtcgcactcgcggctatgtggaaacgttattcgggcgtcgtcgctacgttccagatcttgcatctcgtgtccgctcagtgcgcgaagctgctgagcgtatggcctggaatatgcctgttcagggaacagcggcggacctcatgaagatcgccatggtgaaattgtttccgcgcttgaaacccttaggagcccaccttcttttacaggtgcatgatgaattggtcttggaagtacccgaggatcgcgcagaagaagccaaagcactcgtgaaagaggttatggaaaacgcgtatccgttagatgttccgttggaggtcgaagtgggtgtaggccgtgattggcttgaagcgaaacaagactaatga

SEQ ID NO: 360 - protein, 844 aa, synthetic construct
  REGION 1..844: note = DNA Polymerase Variant
MHHHHHHGGSGMLPLFDLEEPPKRVLLVDGHHLAYRTFYALSLTTSRGEPVQMVYGFARSLLKALKEDGQAVVVVFDAKAPSFRHEAYEAYKAGRAPTPEDFPRQLALVKRLVDLLGLVRLEAPGYEADDVLGTLAKKAEREGMEVCILTGDRDFFQLLSEKVSVLLPDGTLVTPKDVQEKYGVPPERWVDFRALTGDRSDNIPGVAGIGEKTALRLLAEWGSVENLLKNLDRVKPDSLRRKIEAHLEDLRLSLDLARIRTDLPLEVDFKALRRRTPDLEGLRAFLEELEFGSLLHEFGLLGGEKPREEAPWPPPEGAFVGFLLSRKEPMWAELLALAAAAEGRVHRATSPVEALADLKEARGFLAKDLAVLALRECVALDPTDDPLLVAYLLDPANTNPEGVARRYGGEFTEDAAERALLSERLFQTLFPRLSEKLLWLYQEVERPLSRVLAHMEARGVRLDVPLLEALSFELEKELERLEGEVFRLAWHPFNLNSRDQLEKVLFDELGLTPVTRTEKTGKRSTSAAALEALRGAHPIVELILQYRELSKLKSTYLDRLPRLVHPRTGRLHTRFNQTATATGRLSSSDPNLQNIPVRTPLGQRIRKAFVAEEGWLLLAADYSQIELRVLAHLSGDENLKRVFREGKDIHTETAAWMFGVDPALVDPKMRRAAKTVNFGVLYGMSAHRLSQELGIDYKEAEAFIERYFQSFPKVRAWIERTLEEGRTRGYVETLFGRRRYVPDLASRVRSVREAAERMAWNMPVQGTAADLMKIAMVKLFPRLKPLGAHLLLQVHDELVLEVPEDRAEEAKALVKEVMENAYPLDVPLEVEVGVGRDWLEAKQD

SEQ ID NO: 361 - DNA, 2538 bp, synthetic construct
  misc_feature 1..2538: note = DNA Polymerase Variant
  source 1..2538: mol_type = other DNA
atgcaccatcatcatcatcatggcggtagcggcatgttaccgctgtttgatttggaagaaccaccaaaacgcgtgctgcttgttgacggccatcatctggcgtatcgtaccttctacgcactgagccttacgacctcacgtggtgagcctgtccagatggtgtatgggtttgctcgctccctgctgaaagccctgaaggaagatggtcaagccgtagtagtggttttcgatgcgaaagcaccgtcgtttcgtcacgaagcgtacgaggcctataaagctggccgcgcaccgaccccggaagactttccgcgtcagttagcgctcgtcaaacgcctcgtggatttgctgggattagttcgcttggaagctcctggctacgaggcggacgacgtgctcggtacactggccaagaaagcagaacgtgaaggcatggaggtctgcattcttaccggtgatcgcgatttcttccagctgctgtctgagaaagtgagcgttttgctgcccgatggcacgttagtaaccccgaaagatgtgcaagagaaatatggagttccgccagaacgttgggtggactttcgcgcactgactggtgatcgttcagacaacatcccgggcgttgccgggattggtgaaaagacggcgctgcgcctgctggcagaatggggctcggtggaaaatctgctcaagaaccttgatcgtgtgaaacctgatagcttacgccgcaagatcgaagcccacctggaagacttgcgtctgagtctggatcttgcgcgtattcgcaccgatctgccgttggaagtagactttaaagctctgcgtcgtcgcacacccgatttagaggggttacgcgcgttcctcgaagaactggagtttggctccctgctgcatgaattcggtttgttgggcggagagaaaccgcgtgaagaagcaccatggccgccgcccgaaggtgcctttgtcggctttcttctgtcacgcaaagagccaatgtgggcggaactgttagctcttgcagccgccgcggaagggcgtgttcaccgcgcgacctctcctgtcgaggccctcgctgacctcaaagaagcacgtggtttcttggcgaaagatttagccgtgcttgcattacgcgaaggcgttgcgctcgatccgacggacgacccgcttttggtggcttatttgctcgatcctgcgaataccaacccggaacgtatcgcccgtcgttacggcggcgagtttactgaagatgcggcagaacgcgcgttgcttagcgaacgcctcttccagacgttatttccacgtctttcggagaaattactctggctctatcaggaagtcgaacgtccattgagtcgcgtgcttgcccatatggaggctcgcggtgtgcgcttagatgttccgttgttagaagcactcagcttcgagttggagaaagaactggaacgtcttgaagacgaagtctttcgtttagcggggcatcccttcaatctcaactctcgcgaccaattggagaaagtgctctttgatgaattaggtttaacccctgtcacgcgtacagagaagaccggcaaacgttccacttcggcagccgccttggaagcacttcgtggtgctcacccgatcgtcgagttgattttgcagtaccgcgagctcagcaaactcaaaaatacctatattgataggttacctcgtcttgttcatccacgtacgggtcgtttacacacccgcttcaatcaaacggcgacagccaccgggcgcttgtcgtcgagtgacccgaacctccagaatattccagtgcgcacgccgctgggccaacgcattcgtaaagcgtttgttgcggaagaaggttggttattacttgcggccgattactcccagatcgaacttcgtgtattggcgcatctctctggcgacgagaatcttaaacgcgtgtttcgcgaaggcaaggatattcacactgaaaccgcagcctggatgttcgggctggacccagccttagtggaccccaagatgcgtcgtgccgccaagaccgtcaactttggcgtactctatggtatgtcagcacatcgtcttagtcaggaattgggcattgactacaaagaagctgaagcgtttatcgagcgctatttccaatcctttccgaaagttcgcgcgtggattgaacgtaccctcgaagaaggtcgcactcgcggctatgtggaaacgttattcgggcgtcgtcgctacgttccagatcttgcatctcgtgtccgctcagtgcgcgaagctgctgagcgtatggcctggaatatgcctgttcagggaacagcggcggacctcatgaagatcgccatggtgaaattgtttccgcgcttgaaacccttaggagcccaccttcttttacaggtgcatgatgaattggtcttggaagtacccgaggatcgcgcagaagaagccaaagcactcgtgaaagaggttatggaaaacgcgtatccgttagatgttccgttggaggtcgaagtgggtgtaggccgtgattggcttgaagcgaaacaagactaatga

SEQ ID NO: 362 - protein, 844 aa, synthetic construct
  REGION 1..844: note = DNA Polymerase Variant
MHHHHHHGGSGMLPLFDLEEPPKRVLLVDGHHLAYRTFYALSLTTSRGEPVQMVYGFARSLLKALKEDGQAVVVVFDAKAPSFRHEAYEAYKAGRAPTPEDFPRQLALVKRLVDLLGLVRLEAPGYEADDVLGTLAKKAEREGMEVCILTGDRDFFQLLSEKVSVLLPDGTLVTPKDVQEKYGVPPERWVDFRALTGDRSDNIPGVAGIGEKTALRLLAEWGSVENLLKNLDRVKPDSLRRKIEAHLEDLRLSLDLARIRTDLPLEVDFKALRRRTPDLEGLRAFLEELEFGSLLHEFGLLGGEKPREEAPWPPPEGAFVGFLLSRKEPMWAELLALAAAAEGRVHRATSPVEALADLKEARGFLAKDLAVLALREGVALDPTDDPLLVAYLLDPANTNPERIARRYGGEFTEDAAERALLSERLFQTLFPRLSEKLLWLYQEVERPLSRVLAHMEARGVRLDVPLLEALSFELEKELERLEDEVFRLAGHPFNLNSRDQLEKVLFDELGLTPVTRTEKTGKRSTSAAALEALRGAHPIVELILQYRELSKLKNTYIDRLPRLVHPRTGRLHTRFNQTATATGRLSSSDPNLQNIPVRTPLGQRIRKAFVAEEGWLLLAADYSQIELRVLAHLSGDENLKRVFREGKDIHTETAAWMFGLDPALVDPKMRRAAKTVNFGVLYGMSAHRLSQELGIDYKEAEAFIERYFQSFPKVRAWIERTLEEGRTRGYVETLFGRRRYVPDLASRVRSVREAAERMAWNMPVQGTAADLMKIAMVKLFPRLKPLGAHLLLQVHDELVLEVPEDRAEEAKALVKEVMENAYPLDVPLEVEVGVGRDWLEAKQD

SEQ ID NO: 363 - DNA, 2538 bp, synthetic construct
  misc_feature 1..2538: note = DNA Polymerase Variant
  source 1..2538: mol_type = other DNA
atgcaccatcatcatcatcatggcggtagcggcatgttaccgctgtttgatttggaagaaccaccaaaacgcgtgctgcttgttgacggccatcatctggcgtatcgtaccttctacgcactgagccttacgacctcacgtggtgagcctgtccagatggtgtatgggtttgctcgctccctgctgaaagccctgaaggaagatggtcaagccgtagtagtggttttcgatgcgaaagcaccgtcgtttcgtcacgaagcgtacgaggcctataaagctggccgcgcaccgaccccggaagactttccgcgtcagttagcgctcgtcaaacgcctcgtggatttgctgggattagttcgcttggaagctcctggctacgaggcggacgacgtgctcggtacactggccaagaaagcagaacgtgaaggcatggaggtctgcattcttaccggtgatcgcgatttcttccagctgctgtctgagaaagtgagcgttttgctgcccgatggcacgttagtaaccccgaaagatctgcaagagaaatatggagttccgccagaacgttgggtggactttcgcgcactgactggtgatcgttcagacaacatcccgggcgttgccgggattggtgaaaagacggcgctgcgcctgctggcagaatggggctcggtggaaaatctgctcaagaaccttgatcgtgtgaaacctgatagcttacgccgcaagatcgaagcccacctggaagacttgcgtctgagtctggatcttgtccgtattcgcaccgatctgccgttggaagtagactttaaagctctgcgtcgtcgcacacccgatttagaggggttacgcgcgttcctcgaagaactggagtttggctccctgctgcatgaattcggtttgttgggcggagagaaaccgcgtgaagaagcaccatggccgccgcccgaaggtgcctttgtcggctttcttctgtcacgcaaagagccaatgtgggcggaactgttagctcttgcagccgccgcggaagggcgtgttcaccgcgcgacctctcctgtcgaggccctcgctgacctcaaagaagcacgtggtttcttggcgaaagatttagccgtgcttgcattacgcgaatgtgttgcgctcgatccgacggacgacccgcttttggtggcttatttgctcgatcctgcgaataccaacccggaaggtgtcgcccgtcgttacggcggcgagtttactgaagatgcggcagaacgcgcgttgcttagcgaacgcctcttccagacgttatttccacgtctttcggagaaattactctggctctatcaggaagtcgaacgtccattgagtcgcgtgcttgcccatatggaggctcgcggtgtgcgcttagatgttccgttgttagaagcactcagcttcgagttggagaaagaactggaacgtcttgaaggcgaagtctttcgtttagcggggcatcccttcaatctcaactctcgcgaccaattggagaaagtgctctttgatgaattaggtttaacccctgtcacgcgtacagagaagaccggcaaacgttccacttcggcagccgccttggaagcacttcgtggtgctcacccgatcgtcgagttgattttgcagtaccgcgagctcagcaaactcaaaagtacctatctgactaggttacctcgtcttgttcatccacgtacgggtcgtttacacacccgcttcaatcaaacggcgacagccaccgggcgcttgtcgtcgagtgacccgaacctccagaatattccagtgcgcacgccgctgggccaacgcattcgtaaagcgtttgttgcggaagaaggttggttattacttgcggccgattactcccagatcgaacttcgtgtattggcgcatctctctggcgacgagaatcttaaacgcgtgtttcgcgaaggcaaggatattcacactgaaaccgcagcctggatgttcggggtggacccagccttagtggaccccaagatgcgtcgtgccgccaagaccgtcaactttggcgtactctatggtatgtcagcacatcgtcttagtcaggaattgggcattgactacaaagaagctgaagcgtttatcgagcgctatttccaatcctttccgaaagttcgcgcgtggattgaacgtaccctcgaagaaggtcgcactcgcggctatgtggaaacgttattcgggcgtcgtcgctacgttccagatcttgcatctcgtgtccgctcagtgcgcgaagctgctgagcgtatggcctggaatatgcctgttcagggaacagcggcggacctcatgaagatcgccatggtgaaattgtttccgcgcttgaaacccttaggagcccaccttcttttacaggtgcatgatgaattggtcttggaagtacccgaggatcgcgcagaagaagccaaagcactcgtgaaagaggttatggaaaacgcgtatccgttagatgttccgttggaggtcgaagtgggtgtaggccgtgattggcttgaagcgaaacaagactaatga

SEQ ID NO: 364 - protein, 844 aa, synthetic construct
  REGION 1..844: note = DNA Polymerase Variant
MHHHHHHGGSGMLPLFDLEEPPKRVLLVDGHHLAYRTFYALSLTTSRGEPVQMVYGFARSLLKALKEDGQAVVVVFDAKAPSFRHEAYEAYKAGRAPTPEDFPRQLALVKRLVDLLGLVRLEAPGYEADDVLGTLAKKAEREGMEVCILTGDRDFFQLLSEKVSVLLPDGTLVTPKDLQEKYGVPPERWVDFRALTGDRSDNIPGVAGIGEKTALRLLAEWGSVENLLKNLDRVKPDSLRRKIEAHLEDLRLSLDLVRIRTDLPLEVDFKALRRRTPDLEGLRAFLEELEFGSLLHEFGLLGGEKPREEAPWPPPEGAFVGFLLSRKEPMWAELLALAAAAEGRVHRATSPVEALADLKEARGFLAKDLAVLALRECVALDPTDDPLLVAYLLDPANTNPEGVARRYGGEFTEDAAERALLSERLFQTLFPRLSEKLLWLYQEVERPLSRVLAHMEARGVRLDVPLLEALSFELEKELERLEGEVFRLAGHPFNLNSRDQLEKVLFDELGLTPVTRTEKTGKRSTSAAALEALRGAHPIVELILQYRELSKLKSTYLTRLPRLVHPRTGRLHTRFNQTATATGRLSSSDPNLQNIPVRTPLGQRIRKAFVAEEGWLLLAADYSQIELRVLAHLSGDENLKRVFREGKDIHTETAAWMFGVDPALVDPKMRRAAKTVNFGVLYGMSAHRLSQELGIDYKEAEAFIERYFQSFPKVRAWIERTLEEGRTRGYVETLFGRRRYVPDLASRVRSVREAAERMAWNMPVQGTAADLMKIAMVKLFPRLKPLGAHLLLQVHDELVLEVPEDRAEEAKALVKEVMENAYPLDVPLEVEVGVGRDWLEAKQD

SEQ ID NO: 365 - DNA, 2538 bp, synthetic construct
  misc_feature 1..2538: note = DNA Polymerase Variant
  source 1..2538: mol_type = other DNA
atgcaccatcatcatcatcatggcggtagcggcatgttaccgctgtttgatttggaagaaccaccaaaacgcgtgctgcttgttgacggccatcatctggcgtatcgtaccttctacgcactgagccttacgacctcacgtggtgagcctgtccagatggtgtatgggtttgctcgctccctgctgaaagccctgaaggaagatggtcaagccgtagtagtggttttcgatgcgaaagcaccgtcgtttcgtcacgaagcgtacgaggcctataaagctggccgcgcaccgaccccggaagactttccgcgtcagttagcgctcgtcaaacgcctcgtggatttgctgggattagttcgcttggaagctcctggctacgaggcggacgacgtgctcggtacactggccaagaaagcagaacgtgaaggcatggaggtctgcattcttaccggtgatcgcgatttcttccagctgctgtctgagaaagtgagcgttttgctgcccgatggcacgttagtaaccccgaaagatgtgcaagagaaatatggagttccgccagaacgttgggtggactttcgcgcactgactggtgatcgttcagacaacatcccgggcgttgccgggattggtgaaaagacggcgctgcgcctgctggcagaatggggctcggtggaaaatctgctcaagaaccttgatcgtgtgaaacctgatagcttacgccgcaagatcgaagcccacctggaagacttgcgtctgagtctggatcttgtccgtattcgcaccgatctgccgttggaagtagactttaaagctctgcgtcgtcgcacacccgatttagaggggttacgcgcgttcctcgaagaactggagtttggctccctgctgcatgaattcggtttgttgggcggagagaaaccgcgtgaagaagcaccatggccgccgcccgaaggtgcctttgtcggctttcttctgtcacgcaaagagccaatgtgggcggaactgttagctcttgcagccgccgcggaagggcgtgttcaccgcgcgacctctcctgtcgaggccctcgctgacctcaaagaagcacgtggtttcttggcgaaagatttagccgtgcttgcattacgcgaaggcgttgcgctcgatccgacggacgacccgcttttggtggcttatttgctcgatcctgcgaataccaacccggaatacatcgcccgtcgttacggcggcgagtttactgaagatgcggcagaacgcgcgttgcttagcgaacgcctcttccagacgttatttccacgtctttcggagaaattactctggctctatcaggaagtcgaacgtccattgagtcgcgtgcttgcccatatggaggctcgcggtgtgcgcttagatgttccgttgttagaagcactcagcttcgagttggagaaagaactggaacgtcttgaagacgaagtctttcgtttagcggggcatcccttcaatctcaactctcgcgaccaattggagaaagtgctctttgatgaattaggtttaacccctgtcacgcgtacagagaagaccggcaaacgttccacttcggcagccgccttggaagcacttcgtggtgctcacccgatcgtcgagttgattttgcagtaccgcgagctcagcaaactcaaatcaacctatcttgataggttacctcgtcttgttcatccacgtacgggtcgtttacacacccgcttcaatcaaacggcgacagccaccgggcgcttgtcgtcgagtgacccgaacctccagaatattccagtgcgcacgccgctgggccaacgcattcgtaaagcgtttgttgcggaagaaggttggttattacttgcggccgattactcccagatcgaacttcgtgtattggcgcatctctctggcgacgagaatcttaaacgcgtgtttcgcgaaggcaaggatattcacactgaaaccgcagcctggatgttcggggtggacccagccttagtggaccccaagatgcgtcgtgccgccaagaccgtcaactttggcgtactctatggtatgtcagcacatcgtcttagtcaggaattgggcattgactacaaagaagctgaagcgtttatcgagcgctatttccaatcctttccgaaagttcgcgcgtggattgaacgtaccctcgaagaaggtcgcactcgcggctatgtggaaacgttattcgggcgtcgtcgctacgttccagatcttgcatctcgtgtccgctcagtgcgcgaagctgctgagcgtatggcctggaatatgcctgttcagggaacagcggcggacctcatgaagatcgccatggtgaaattgtttccgcgcttgaaacccttaggagcccaccttcttttacaggtgcatgatgaattggtcttggaagtacccgaggatcgcgcagaagaagccaaagcactcgtgaaagaggttatggaaaacgcgtatccgttagatgttccgttggaggtcgaagtgggtgtaggccgtgattggcttgaagcgaaacaagactaatga

SEQ ID NO: 366 - protein, 844 aa, synthetic construct
  REGION 1..844: note = DNA Polymerase Variant
MHHHHHHGGSGMLPLFDLEEPPKRVLLVDGHHLAYRTFYALSLTTSRGEPVQMVYGFARSLLKALKEDGQAVVVVFDAKAPSFRHEAYEAYKAGRAPTPEDFPRQLALVKRLVDLLGLVRLEAPGYEADDVLGTLAKKAEREGMEVCILTGDRDFFQLLSEKVSVLLPDGTLVTPKDVQEKYGVPPERWVDFRALTGDRSDNIPGVAGIGEKTALRLLAEWGSVENLLKNLDRVKPDSLRRKIEAHLEDLRLSLDLVRIRTDLPLEVDFKALRRRTPDLEGLRAFLEELEFGSLLHEFGLLGGEKPREEAPWPPPEGAFVGFLLSRKEPMWAELLALAAAAEGRVHRATSPVEALADLKEARGFLAKDLAVLALREGVALDPTDDPLLVAYLLDPANTNPEYIARRYGGEFTEDAAERALLSERLFQTLFPRLSEKLLWLYQEVERPLSRVLAHMEARGVRLDVPLLEALSFELEKELERLEDEVFRLAGHPFNLNSRDQLEKVLFDELGLTPVTRTEKTGKRSTSAAALEALRGAHPIVELILQYRELSKLKSTYLDRLPRLVHPRTGRLHTRFNQTATATGRLSSSDPNLQNIPVRTPLGQRIRKAFVAEEGWLLLAADYSQIELRVLAHLSGDENLKRVFREGKDIHTETAAWMFGVDPALVDPKMRRAAKTVNFGVLYGMSAHRLSQELGIDYKEAEAFIERYFQSFPKVRAWIERTLEEGRTRGYVETLFGRRRYVPDLASRVRSVREAAERMAWNMPVQGTAADLMKIAMVKLFPRLKPLGAHLLLQVHDELVLEVPEDRAEEAKALVKEVMENAYPLDVPLEVEVGVGRDWLEAKQD

SEQ ID NO: 367 - DNA, 2538 bp, synthetic construct
  misc_feature 1..2538: note = DNA Polymerase Variant
  source 1..2538: mol_type = other DNA
atgcaccatcatcatcatcatggcggtagcggcatgttaccgctgtttgatttggaagaaccaccaaaacgcgtgctgcttgttgacggccatcatctggcgtatcgtaccttctacgcactgagccttacgacctcacgtggtgagcctgtccagatggtgtatgggtttgctcgctccctgctgaaagccctgaaggaagatggtcaagccgtagtagtggttttcgatgcgaaagcaccgtcgtttcgtcacgaagcgtacgaggcctataaagctggccgcgcaccgaccccggaagactttccgcgtcagttagcgctcgtcaaacgcctcgtggatttgctgggattagttcgcttggaagctcctggctacgaggcggacgacgtgctcggtacactggccaagaaagcagaacgtgaaggcatggaggtctgcattcttaccggtgatcgcgatttcttccagctgctgtctgagaaagtgagcgttttgctgcccgatggcacgttagtaaccccgaaagatctgcaagagaaatatggagttccgccagaacgttgggtggactttcgcgcactgactggtgatcgttcagacaacatcccgggcgttgccgggattggtgaaaagacggcgctgcgcctgctggcagaatggggctcggtggaaaatctgctcaagaaccttgatcgtgtgaaacctgatagcttacgccgcaagatcgaagcccacctggaagacttgcgtctgagtctggatcttgcgcgtattcgcaccgatctgccgttggaagtagactttaaagctctgcgtcgtcgcacacccgatttagaggggttacgcgcgttcctcgaagaactggagtttggctccctgctgcatgaattcggtttgttgggcggagagaaaccgcgtgaagaagcaccatggccgccgcccgaaggtgcctttgtcggctttcttctgtcacgcaaagagccaatgtgggcggaactgttagctcttgcagccgccgcggaagggcgtgttcaccgcgcgacctctcctgtcgaggccctcgctgacctcaaagaagcacgtggtttcttggcgaaagatttagccgtgcttgcattacgcgaaggcgttgcgctcgatccgacggacgacccgcttttggtggcttatttgctcgatcctgcgaataccaacccggaaggcgtagcccgtcgttacggcggcgagtttactgaagatgcggcagaacgcgcgttgcttagcgaacgcctcttccagacgttatttccacgtctttcggagaaattactctggctctatcaggaagtcgaacgtccattgagtcgcgtgcttgcccatatggaggctcgcggtgtgcgcttagatgttccgttgttagaagcactcagcttcgagttggagaaagaactggaacgtcttgaaggcgaagtctttcgtttagcggggcatcccttcaatctcaactctcgcgaccaattggagaaagtgctctttgatgaattaggtttaacccctgtcacgcgtacagagaagaccggcaaacgttccacttcggcagctgccttggaagcacttcgtggtgctcacccgatcgtcgagttgattttgcagtaccgcgagctcagcaaactcaaaaatacctatattactaggttacctcgtcttgttcatccacgtacgggtcgtttacacacccgcttcaatcaaacggcgacagccaccgggcgcttgtcgtcgagtgacccgaacctccagaatattccagtgcgcacgccgctgggccaacgcattcgtaaagcgtttgttgcggaagaaggttggttattacttgcggccgattactcccagatcgaacttcgtgtattggcgcatctctctggcgacgagaatcttaaacgcgtgtttcgcgaaggcaaggatattcacactgaaaccgcagcctggatgttcggggtggacccagccttagtggaccccaagatgcgtcgtgccgccaagaccgtcaactttggcgtactctatggtatgtcagcacatcgtcttagtcaggaattgggcattgactacaaagaagctgaagcgtttatcgagcgctatttccaatcctttccgaaagttcgcgcgtggattgaacgtaccctcgaagaaggtcgcactcgcggctatgtggaaacgttattcgggcgtcgtcgctacgttccagatcttgcatctcgtgtccgctcagtgcgcgaagctgctgagcgtatggcctggaatatgcctgttcagggaacagcggcggacctcatgaagatcgccatggtgaaattgtttccgcgcttgaaacccttaggagcccaccttcttttacaggtgcatgatgaattggtcttggaagtacccgaggatcgcgcagaagaagccaaagcactcgtgaaagaggttatggaaaacgcgtatccgttagatgttccgttggaggtcgaagtgggtgtaggccgtgattggcttgaagcgaaacaagactaatga

SEQ ID NO: 368 - protein, 844 aa, synthetic construct
  REGION 1..844: note = DNA Polymerase Variant
MHHHHHHGGSGMLPLFDLEEPPKRVLLVDGHHLAYRTFYALSLTTSRGEPVQMVYGFARSLLKALKEDGQAVVVVFDAKAPSFRHEAYEAYKAGRAPTPEDFPRQLALVKRLVDLLGLVRLEAPGYEADDVLGTLAKKAEREGMEVCILTGDRDFFQLLSEKVSVLLPDGTLVTPKDLQEKYGVPPERWVDFRALTGDRSDNIPGVAGIGEKTALRLLAEWGSVENLLKNLDRVKPDSLRRKIEAHLEDLRLSLDLARIRTDLPLEVDFKALRRRTPDLEGLRAFLEELEFGSLLHEFGLLGGEKPREEAPWPPPEGAFVGFLLSRKEPMWAELLALAAAAEGRVHRATSPVEALADLKEARGFLAKDLAVLALREGVALDPTDDPLLVAYLLDPANTNPEGVARRYGGEFTEDAAERALLSERLFQTLFPRLSEKLLWLYQEVERPLSRVLAHMEARGVRLDVPLLEALSFELEKELERLEGEVFRLAGHPFNLNSRDQLEKVLFDELGLTPVTRTEKTGKRSTSAAALEALRGAHPIVELILQYRELSKLKNTYITRLPRLVHPRTGRLHTRFNQTATATGRLSSSDPNLQNIPVRTPLGQRIRKAFVAEEGWLLLAADYSQIELRVLAHLSGDENLKRVFREGKDIHTETAAWMFGVDPALVDPKMRRAAKTVNFGVLYGMSAHRLSQELGIDYKEAEAFIERYFQSFPKVRAWIERTLEEGRTRGYVETLFGRRRYVPDLASRVRSVREAAERMAWNMPVQGTAADLMKIAMVKLFPRLKPLGAHLLLQVHDELVLEVPEDRAEEAKALVKEVMENAYPLDVPLEVEVGVGRDWLEAKQD

SEQ ID NO: 369 - DNA, 2538 bp, synthetic construct
  misc_feature 1..2538: note = DNA Polymerase Variant
  source 1..2538: mol_type = other DNA
atgcaccatcatcatcatcatggcggtagcggcatgttaccgctgtttgatttggaagaaccaccaaaacgcgtgctgcttgttgacggccatcatctggcgtatcgtaccttctacgcactgagccttacgacctcacgtggtgagcctgtccagatggtgtatgggtttgctcgctccctgctgaaagccctgaaggaagatggtcaagccgtagtagtggttttcgatgcgaaagcaccgtcgtttcgtcacgaagcgtacgaggcctataaagctggccgcgcaccgaccccggaagactttccgcgtcagttagcgctcgtcaaacgcctcgtggatttgctgggattagttcgcttggaagctcctggctacgaggcggacgacgtgctcggtacactggccaagaaagcagaacgtgaaggcatggaggtctgcattcttaccggtgatcgcgatttcttccagctgctgtctgagaaagtgagcgttttgctgcccgatggcacgttagtaaccccgaaagatgtccaagagaaatatggagttccgccagaacgttgggtggactttcgcgcactgactggtgatcgttcagacaacatcccgggcgttgccgggattggtgaaaagacggcgctgcgcctgctggcagaatggggctcggtggaaaatctgctcaagaaccttgatcgtgtgaaacctgatagcttacgccgcaagatcgaagcccacctggaagacttgcgtctgagtctggatcttgcccgtattcgcaccgatctgccgttggaagtagactttaaagctctgcgtcgtcgcacacccgatttagaggggttacgcgcgttcctcgaagaactggagtttggctccctgctgcatgaattcggtttgttgggcggagagaaaccgcgtgaagaagcaccatggccgccgcccgaaggtgcctttgtcggctttcttctgtcacgcaaagagccaatgtgggcggaactgttagctcttgcagccgccgcggaagggcgtgttcaccgcgcgacctctcctgtcgaggccctcgctgacctcaaagaagcacgtggtttcttggcgaaagatttagccgtgcttgcattacgcgaaggcgttgcgctcgatccgacggacgacccgcttttggtggcttatttgctcgatcctgcgaataccaacccggaaggcgtagcccgtcgttacggcggcgagtttactgaagatgcggcagaacgcgcgttgcttagcgaacgcctcttccagacgttatttccacgtctttcggagaaattactctggctctatcaggaagtcgaacgtccattgagtcgcgtgcttgcccatatggaggctcgcggtgtgcgcttagatgttccgttgttagaagcactcagcttcgagttggagaaagaactggaacgtcttgaaggcgaagtctttcgtttagcggggcatcccttcaatctcaactctcgcgaccaattggagaaagtgctctttgatgaattaggtttaacccctgtcacgcgtacagagaagaccggcaaacgttccacttcggcagctgccttggaagcacttcgtggtgctcacccgatcgtcgagttgattttgcagtaccgcgagctcagcaaactcaaaaatacctatattgataggttacctcgtcttgttcatccacgtacgggtcgtttacacacccgcttcaatcaaacggcgacagccaccgggcgcttgtcgtcgagtgacccgaacctccagaatattccagtgcgcacgccgctgggccaacgcattcgtaaagcgtttgttgcggaagaaggttggttattacttgcggccgattactcccagatcgaacttcgtgtattggcgcatctctctggcgacgagaatcttaaacgcgtgtttcgcgaaggcaaggatattcacactgaaaccgcagcctggatgttcggggtggacccagccttagtggaccccaagatgcgtcgtgccgccaagaccgtcaactttggcgtactctatggtatgtcagcacatcgtcttagtcaggaattgggcattgactacaaagaagctgaagcgtttatcgagcgctatttccaatcctttccgaaagttcgcgcgtggattgaacgtaccctcgaagaaggtcgcactcgcggctatgtggaaacgttattcgggcgtcgtcgctacgttccagatcttgcatctcgtgtccgctcagtgcgcgaagctgctgagcgtatggcctggaatatgcctgttcagggaacagcggcggacctcatgaagatcgccatggtgaaattgtttccgcgcttgaaacccttaggagcccaccttcttttacaggtgcatgatgaattggtcttggaagtacccgaggatcgcgcagaagaagccaaagcactcgtgaaagaggttatggaaaacgcgtatccgttagatgttccgttggaggtcgaagtgggtgtaggccgtgattggcttgaagcgaaacaagactaatga

SEQ ID NO: 370 - protein, 844 aa, synthetic construct
  REGION 1..844: note = DNA Polymerase Variant
MHHHHHHGGSGMLPLFDLEEPPKRVLLVDGHHLAYRTFYALSLTTSRGEPVQMVYGFARSLLKALKEDGQAVVVVFDAKAPSFRHEAYEAYKAGRAPTPEDFPRQLALVKRLVDLLGLVRLEAPGYEADDVLGTLAKKAEREGMEVCILTGDRDFFQLLSEKVSVLLPDGTLVTPKDVQEKYGVPPERWVDFRALTGDRSDNIPGVAGIGEKTALRLLAEWGSVENLLKNLDRVKPDSLRRKIEAHLEDLRLSLDLARIRTDLPLEVDFKALRRRTPDLEGLRAFLEELEFGSLLHEFGLLGGEKPREEAPWPPPEGAFVGFLLSRKEPMWAELLALAAAAEGRVHRATSPVEALADLKEARGFLAKDLAVLALREGVALDPTDDPLLVAYLLDPANTNPEGVARRYGGEFTEDAAERALLSERLFQTLFPRLSEKLLWLYQEVERPLSRVLAHMEARGVRLDVPLLEALSFELEKELERLEGEVFRLAGHPFNLNSRDQLEKVLFDELGLTPVTRTEKTGKRSTSAAALEALRGAHPIVELILQYRELSKLKNTYIDRLPRLVHPRTGRLHTRFNQTATATGRLSSSDPNLQNIPVRTPLGQRIRKAFVAEEGWLLLAADYSQIELRVLAHLSGDENLKRVFREGKDIHTETAAWMFGVDPALVDPKMRRAAKTVNFGVLYGMSAHRLSQELGIDYKEAEAFIERYFQSFPKVRAWIERTLEEGRTRGYVETLFGRRRYVPDLASRVRSVREAAERMAWNMPVQGTAADLMKIAMVKLFPRLKPLGAHLLLQVHDELVLEVPEDRAEEAKALVKEVMENAYPLDVPLEVEVGVGRDWLEAKQD

SEQ ID NO: 371 - DNA, 2538 bp, synthetic construct
  misc_feature 1..2538: note = DNA Polymerase Variant
  source 1..2538: mol_type = other DNA
atgcaccatcatcatcatcatggcggtagcggcatgttaccgctgtttgatttggaagaaccaccaaaacgcgtgctgcttgttgacggccatcatctggcgtatcgtaccttctacgcactgagccttacgacctcacgtggtgagcctgtccagatggtgtatgggtttgctcgctccctgctgaaagccctgaaggaagatggtcaagccgtagtagtggttttcgatgcgaaagcaccgtcgtttcgtcacgaagcgtacgaggcctataaagctggccgcgcaccgaccccggaagactttccgcgtcagttagcgctcgtcaaacgcctcgtggatttgctgggattagttcgcttggaagctcctggctacgaggcggacgacgtgctcggtacactggccaagaaagcagaacgtgaaggcatggaggtctgcattcttaccggtgatcgcgatttcttccagctgctgtctgagaaagtgagcgttttgctgcccgatggcacgttagtaaccccgaaagatctgcaagagaaatatggagttccgccagaacgttgggtggactttcgcgcactgactggtgatcgttcagacaacatcccgggcgttgccgggattggtgaaaagacggcgctgcgcctgctggcagaatggggctcggtggaaaatctgctcaagaaccttgatcgtgtgaaacctgatagcttacgccgcaagatcgaagcccacctggaagacttgcgtctgagtctggatcttgcgcgtattcgcaccgatctgccgttggaagtagactttaaagctctgcgtcgtcgcacacccgatttagaggggttacgcgcgttcctcgaagaactggagtttggctccctgctgcatgaattcggtttgttgggcggagagaaaccgcgtgaagaagcaccatggccgccgcccgaaggtgcctttgtcggctttcttctgtcacgcaaagagccaatgtgggcggaactgttagctcttgcagccgccgcggaagggcgtgttcaccgcgcgacctctcctgtcgaggccctcgctgacctcaaagaagcacgtggtttcttggcgaaagatttagccgtgcttgcattacgcgaaggcgttgcgctcgatccgacggacgacccgcttttggtggcttatttgctcgatcctgcgaataccaacccggaaggcgtagcccgtcgttacggcggcgagtttactgaagatgcggcagaacgcgcgttgcttagcgaacgcctcttccagacgttatttccacgtctttcggagaaattactctggctctatcaggaagtcgaacgtccattgagtcgcgtgcttgcccatatggaggctcgcggtgtgcgcttagatgttccgttgttagaagcactcagcttcgagttggagaaagaactggaacgtcttgaagacgaagtctttcgtttagcggggcatcccttcaatctcaactctcgcgaccaattggagaaagtgctctttgatgaattaggtttaacccctgtcacgcgtacagagaagaccggcaaacgttccacttcggcagccgccttggaagcacttcgtggtgctcacccgatcgtcaacttgattttgctgtaccgcgagctcagcaaactcaaaaatacctatattgataggttacctcgtcttgttcatccacgtacgggtcgtttacacacccgcttcaatcaaacggcgacagccaccgggcgcttgtcgtcgagtgacccgaacctccagaatattccagtgcgcacgccgctgggccaacacattcgtaaagcgtttgttgcggaagaaggttggttattacttgcggccgattactcccagatcgaacttcgtgtattggcgcatctctctggcgacgagaatcttaaacgcgtgtttcgcgaaggcaaggatattcacactgaaaccgcagcctggatgttcggggtggacccagccttagtggaccccaagatgcgtcgtgccgccaagaccgtcaactttggcgtactctatggtatgtcagcacatcgtcttagtcaggaattgggcattgactacaaagaagctgaagcgtttatcgagcgctatttccaatcctttccgaaagttcgcgcgtggattgaacgtaccctcgaagaaggtcgcactcgcggctatgtggaaacgttattcgggcgtcgtcgctacgttccagatcttgcatctcgtgtccgctcagtgcgcgaagctgctgagcgtatggcctggaatatgcctgttcagggaacagcggcggacctcatgaagatcgccatggtgaaattgtttccgcgcttgaaacccttaggagcccaccttcttttacaggtgcatgatgaattggtcttggaagtacccgaggatcgcgcagaagaagccaaagcactcgtgaaagaggttatggaaaacgcgtatccgttagatgttccgttggaggtcgaagtgggtgtaggccgtgattggcttgaagcgaaacaagactaatga

SEQ ID NO: 372 - protein, 844 aa, synthetic construct
  REGION 1..844: note = DNA Polymerase Variant
MHHHHHHGGSGMLPLFDLEEPPKRVLLVDGHHLAYRTFYALSLTTSRGEPVQMVYGFARSLLKALKEDGQAVVVVFDAKAPSFRHEAYEAYKAGRAPTPEDFPRQLALVKRLVDLLGLVRLEAPGYEADDVLGTLAKKAEREGMEVCILTGDRDFFQLLSEKVSVLLPDGTLVTPKDLQEKYGVPPERWVDFRALTGDRSDNIPGVAGIGEKTALRLLAEWGSVENLLKNLDRVKPDSLRRKIEAHLEDLRLSLDLARIRTDLPLEVDFKALRRRTPDLEGLRAFLEELEFGSLLHEFGLLGGEKPREEAPWPPPEGAFVGFLLSRKEPMWAELLALAAAAEGRVHRATSPVEALADLKEARGFLAKDLAVLALREGVALDPTDDPLLVAYLLDPANTNPEGVARRYGGEFTEDAAERALLSERLFQTLFPRLSEKLLWLYQEVERPLSRVLAHMEARGVRLDVPLLEALSFELEKELERLEDEVFRLAGHPFNLNSRDQLEKVLFDELGLTPVTRTEKTGKRSTSAAALEALRGAHPIVNLILLYRELSKLKNTYIDRLPRLVHPRTGRLHTRFNQTATATGRLSSSDPNLQNIPVRTPLGQHIRKAFVAEEGWLLLAADYSQIELRVLAHLSGDENLKRVFREGKDIHTETAAWMFGVDPALVDPKMRRAAKTVNFGVLYGMSAHRLSQELGIDYKEAEAFIERYFQSFPKVRAWIERTLEEGRTRGYVETLFGRRRYVPDLASRVRSVREAAERMAWNMPVQGTAADLMKIAMVKLFPRLKPLGAHLLLQVHDELVLEVPEDRAEEAKALVKEVMENAYPLDVPLEVEVGVGRDWLEAKQD

SEQ ID NO: 373 - DNA, 2538 bp, synthetic construct
  misc_feature 1..2538: note = DNA Polymerase Variant
  source 1..2538: mol_type = other DNA
atgcaccatcatcatcatcatggcggtagcggcatgttaccgctgtttgatttggaagaaccaccaaaacgcgtgctgcttgttgacggccatcatctggcgtatcgtaccttctacgcactgagccttacgacctcacgtggtgagcctgtccagatggtgtatgggtttgctcgctccctgctgaaagccctgaaggaagatggtcaagccgtagtagtggttttcgatgcgaaagcaccgtcgtttcgtcacgaagcgtacgaggcctataaagctggccgcgcaccgaccccggaagactttccgcgtcagttagcgctcgtcaaacgcctcgtggatttgctgggattagttcgcttggaagctcctggctacgaggcggacgacgtgctcggtacactggccaagaaagcagaacgtgaaggcatggaggtctgcattcttaccggtgatcgcgatttcttccagctgctgtctgagaaagtgagcgttttgctgcccgatggcacgttagtaaccccgaaagatgtccaagagaaatatggagttccgccagaacgttgggtggactttcgcgcactgactggtgatcgttcagacaacatcccgggcgttgccgggattggtgaaaagacggcgctgcgcctgctggcagaatggggctcggtggaaaatctgctcaagaaccttgatcgtgtgaaacctgatagcttacgccgcaagatcgaagcccacctggaagacttgcgtctgagtctggatcttgcgcgtattcgcaccgatctgccgttggaagtagactttaaagctctgcgtcgtcgcacacccgatttagaggggttacgcgcgttcctcgaagaactggagtttggctccctgctgcatgaattcggtttgttgggcggagagaaaccgcgtgaagaagcaccatggccgccgcccgaaggtgcctttgtcggctttcttctgtcacgcaaagagccaatgtgggcggaactgttagctcttgcagccgccgcggaagggcgtgttcaccgcgcgacctctcctgtcgaggccctcgctgacctcaaagaagcacgtggtttcttggcgaaagatttagccgtgcttgcattacgcgaaggcgttgcgctcgatccgacggacgacccgcttttggtggcttatttgctcgatcctgcgaataccaacccggaaggcgtagcccgtcgttacggcggcgagtttactgaagatgcggcagaacgcgcgttgcttagcgaacgcctcttccagacgttatttccacgtctttcggagaaattactctggctctatcaggaagtcgaacgtccattgagtcgcgtgcttgcccatatggaggctcgcggtgtgcgcttagatgttccgttgttagaagcactcagcttcgagttggagaaagaactggaacgtcttgaaggcgaagtctttcgtttagcggggcatcccttcaatctcaactctcgcgaccaattggagaaagtgctctttgatgaattaggtttaacccctgtcacgcgtacagagaagaccggcaaacgttccacttcggcagccgccttggaagcacttcgtggtgctcacccgatcgtcgagttgattttgcagtaccgcgagctcagcaaactcaaatcaacctatcttgataggttacctcgtcttgttcatccacgtacgggtcgtttacacacccgcttcaatcaaacggcgacagccaccgggcgcttgtcgtcgagtgacccgaacctccagaatattccagtgcgcacgccgctgggccaacgcattcgtaaagcgtttgttgcggaagaaggttggttattacttgcggccgattactcccagatcgaacttcgtgtattggcgcatctctctggcgacgagaatcttaaacgcgtgtttcgcgaaggcaaggatattcacactgaaaccgcagcctggatgttcgggcttgacccagccttagtggaccccaagatgcgtcgtgccgccaagaccgtcaactttggcgtactctatggtatgtcagcacatcgtcttagtcaggaattgggcattgactacaaagaagctgaagcgtttatcgagcgctatttccaatcctttccgaaagttcgcgcgtggattgaacgtaccctcgaagaaggtcgcactcgcggctatgtggaaacgttattcgggcgtcgtcgctacgttccagatcttgcatctcgtgtccgctcagtgcgcgaagctgctgagcgtatggcctggaatatgcctgttcagggaacagcggcggacctcatgaagatcgccatggtgaaattgtttccgcgcttgaaacccttaggagcccaccttctttttcaggtgcatgatgaattggtcttggaagtacccgaggatcgcgcagaagaagccaaagcactcgtgaaagaggttatggaaaacgcgtatccgttagatgttccgttggaggtcgaagtgggtgtaggccgtgattggcttgaagcgaaacaagactaatga

SEQ ID NO: 374 - protein, 844 aa, synthetic construct
  REGION 1..844: note = DNA Polymerase Variant
MHHHHHHGGSGMLPLFDLEEPPKRVLLVDGHHLAYRTFYALSLTTSRGEPVQMVYGFARSLLKALKEDGQAVVVVFDAKAPSFRHEAYEAYKAGRAPTPEDFPRQLALVKRLVDLLGLVRLEAPGYEADDVLGTLAKKAEREGMEVCILTGDRDFFQLLSEKVSVLLPDGTLVTPKDVQEKYGVPPERWVDFRALTGDRSDNIPGVAGIGEKTALRLLAEWGSVENLLKNLDRVKPDSLRRKIEAHLEDLRLSLDLARIRTDLPLEVDFKALRRRTPDLEGLRAFLEELEFGSLLHEFGLLGGEKPREEAPWPPPEGAFVGFLLSRKEPMWAELLALAAAAEGRVHRATSPVEALADLKEARGFLAKDLAVLALREGVALDPTDDPLLVAYLLDPANTNPEGVARRYGGEFTEDAAERALLSERLFQTLFPRLSEKLLWLYQEVERPLSRVLAHMEARGVRLDVPLLEALSFELEKELERLEGEVFRLAGHPFNLNSRDQLEKVLFDELGLTPVTRTEKTGKRSTSAAALEALRGAHPIVELILQYRELSKLKSTYLDRLPRLVHPRTGRLHTRFNQTATATGRLSSSDPNLQNIPVRTPLGQRIRKAFVAEEGWLLLAADYSQIELRVLAHLSGDENLKRVFREGKDIHTETAAWMFGLDPALVDPKMRRAAKTVNFGVLYGMSAHRLSQELGIDYKEAEAFIERYFQSFPKVRAWIERTLEEGRTRGYVETLFGRRRYVPDLASRVRSVREAAERMAWNMPVQGTAADLMKIAMVKLFPRLKPLGAHLLFQVHDELVLEVPEDRAEEAKALVKEVMENAYPLDVPLEVEVGVGRDWLEAKQD

SEQ ID NO: 375 - DNA, 2538 bp, synthetic construct
  misc_feature 1..2538: note = DNA Polymerase Variant
  source 1..2538: mol_type = other DNA
atgcaccatcatcatcatcatggcggtagcggcatgttaccgctgtttgatttggaagaaccaccaaaacgcgtgctgcttgttgacggccatcatctggcgtatcgtaccttctacgcactgagccttacgacctcacgtggtgagcctgtccagatggtgtatgggtttgctcgctccctgctgaaagccctgaaggaagatggtcaagccgtagtagtggttttcgatgcgaaagcaccgtcgtttcgtcacgaagcgtacgaggcctataaagctggccgcgcaccgaccccggaagactttccgcgtcagttagcgctcgtcaaacgcctcgtggatttgctgggattagttcgcttggaagctcctggctacgaggcggacgacgtgctcggtacactggccaagaaagcagaacgtgaaggcatggaggtctgcattcttaccggtgatcgcgatttcttccagctgctgtctgagaaagtgagcgttttgctgcccgatggcacgttagtaaccccgaaagatgtccaagagaaatatggagttccgccagaacgttgggtggactttcgcgcactgactggtgatcgttcagacaacatcccgggcgttgccgggattggtgaaaagacggcgctgcgcctgctggcagaatggggctcggtggaaaatctgctcaagaaccttgatcgtgtgaaacctgatagcttacgccgcaagatcgaagcccacctggaagacttgcgtctgagtctggatcttgcgcgtattcgcaccgatctgccgttggaagtagactttaaagctctgcgtcgtcgcacacccgatttagaggggttacgcgcgttcctcgaagaactggagtttggctccctgctgcatgaattcggtttgttgggcggagagaaaccgcgtgaagaagcaccatggccgccgcccgaaggtgcctttgtcggctttcttctgtcacgcaaagagccaatgtgggcggaactgttagctcttgcagccgccgcggaagggcgtgttcaccgcgcgacctctcctgtcgaggccctcgctgacctcaaagaagcacgtggtttcttggcgaaagatttagccgtgcttgcattacgcgaaggtgttgcgctcgatccgacggacgacccgcttttggtggcttatttgctcgatcctgcgaataccaacccggaatacatcgcccgtcgttacggcggcgagtttactgaagatgcggcagaacgcgcgttgcttagcgaacgcctcttccagacgttatttccacgtctttcggagaaattactctggctctatcaggaagtcgaacgtccattgagtcgcgtgcttgcccatatggaggctcgcggtgtgcgcttagatgttccgttgttagaagcactcagcttcgagttggagaaagaactggaacgtcttgaagacgaagtctttcgtttagcggggcatcccttcaatctcaactctcgcgaccaattggagaaagtgctctttgatgaattaggtttaacccctgtcacgcgtacagagaagaccggcaaacgttccacttcggcagctgccttggaagcacttcgtggtgctcacccgatcgtcgagttgattttgcagtaccgcgagctcagcaaactcaaatcaacctatcttgataggttacctcgtcttgttcatccacgtacgggtcgtttacacacccgcttcaatcaaacggcgacagccaccgggcgcttgtcgtcgagtgacccgaacctccagaatattccagtgcgcacgccgctgggccaacacattcgtaaagcgtttgttgcggaagaaggttggttattacttgcggccgattactcccagatcgaacttcgtgtattggcgcatctctctggcgacgagaatcttaaacgcgtgtttcgcgaaggcaaggatattcacactgaaaccgcagcctggatgttcggggtggacccagccttagtggaccccaagatgcgtcgtgccgccaagaccgtcaactttggcgtactctatggtatgtcagcacatcgtcttagtcaggaattgggcattgactacaaagaagctgaagcgtttatcgagcgctatttccaatcctttccgaaagttcgcgcgtggattgaacgtaccctcgaagaaggtcgcactcgcggctatgtggaaacgttattcgggcgtcgtcgctacgttccagatcttgcatctcgtgtccgctcagtgcgcgaagctgctgagcgtatggcctggaatatgcctgttcagggaacagcggcggacctcatgaagatcgccatggtgaaattgtttccgcgcttgaaacccttaggagcccaccttcttttacaggtgcatgatgaattggtcttggaagtacccgaggatcgcgcagaagaagccaaagcactcgtgaaagaggttatggaaaacgcgtatccgttagatgttccgttggaggtcgaagtgggtgtaggccgtgattggcttgaagcgaaacaagactaatga

SEQ ID NO: 376 - protein, 844 aa, synthetic construct
  REGION 1..844: note = DNA Polymerase Variant
MHHHHHHGGSGMLPLFDLEEPPKRVLLVDGHHLAYRTFYALSLTTSRGEPVQMVYGFARSLLKALKEDGQAVVVVFDAKAPSFRHEAYEAYKAGRAPTPEDFPRQLALVKRLVDLLGLVRLEAPGYEADDVLGTLAKKAEREGMEVCILTGDRDFFQLLSEKVSVLLPDGTLVTPKDVQEKYGVPPERWVDFRALTGDRSDNIPGVAGIGEKTALRLLAEWGSVENLLKNLDRVKPDSLRRKIEAHLEDLRLSLDLARIRTDLPLEVDFKALRRRTPDLEGLRAFLEELEFGSLLHEFGLLGGEKPREEAPWPPPEGAFVGFLLSRKEPMWAELLALAAAAEGRVHRATSPVEALADLKEARGFLAKDLAVLALREGVALDPTDDPLLVAYLLDPANTNPEYIARRYGGEFTEDAAERALLSERLFQTLFPRLSEKLLWLYQEVERPLSRVLAHMEARGVRLDVPLLEALSFELEKELERLEDEVFRLAGHPFNLNSRDQLEKVLFDELGLTPVTRTEKTGKRSTSAAALEALRGAHPIVELILQYRELSKLKSTYLDRLPRLVHPRTGRLHTRFNQTATATGRLSSSDPNLQNIPVRTPLGQHIRKAFVAEEGWLLLAADYSQIELRVLAHLSGDENLKRVFREGKDIHTETAAWMFGVDPALVDPKMRRAAKTVNFGVLYGMSAHRLSQELGIDYKEAEAFIERYFQSFPKVRAWIERTLEEGRTRGYVETLFGRRRYVPDLASRVRSVREAAERMAWNMPVQGTAADLMKIAMVKLFPRLKPLGAHLLLQVHDELVLEVPEDRAEEAKALVKEVMENAYPLDVPLEVEVGVGRDWLEAKQD

SEQ ID NO: 377 - DNA, 2538 bp, synthetic construct
  misc_feature 1..2538: note = DNA Polymerase Variant
  source 1..2538: mol_type = other DNA
atgcaccatcatcatcatcatggcggtagcggcatgttaccgctgtttgatttggaagaaccaccaaaacgcgtgctgcttgttgacggccatcatctggcgtatcgtaccttctacgcactgagccttacgacctcacgtggtgagcctgtccagatggtgtatgggtttgctcgctccctgctgaaagccctgaaggaagatggtcaagccgtagtagtggttttcgatgcgaaagcaccgtcgtttcgtcacgaagcgtacgaggcctataaagctggccgcgcaccgaccccggaagactttccgcgtcagttagcgctcgtcaaacgcctcgtggatttgctgggattagttcgcttggaagctcctggctacgaggcggacgacgtgctcggtacactggccaagaaagcagaacgtgaaggcatggaggtctgcattcttaccggtgatcgcgatttcttccagctgctgtctgagaaagtgagcgttttgctgcccgatggcacgttagtaaccccgaaagatctgcaagagaaatatggagttccgccagaacgttgggtggactttcgcgcactgactggtgatcgttcagacaacatcccgggcgttgccgggattggtgaaaagacggcgctgcgcctgctggcagaatggggctcggtggaaaatctgctcaagaaccttgatcgtgtgaaacctgatagcttacgccgcaagatcgaagcccacctggaagacttgcgtctgagtctggatcttgcgcgtattcgcaccgatctgccgttggaagtagactttaaagctctgcgtcgtcgcacacccgatttagaggggttacgcgcgttcctcgaagaactggagtttggctccctgctgcatgaattcggtttgttgggcggagagaaaccgcgtgaagaagcaccatggccgccgcccgaaggtgcctttgtcggctttcttctgtcacgcaaagagccaatgtgggcggaactgttagctcttgcagccgccgcggaagggcgtgttcaccgcgcgacctctcctgtcgaggccctcgctgacctcaaagaagcacgtggtttcttggcgaaagatttagccgtgcttgcattacgcgaaggcgttgcgctcgatccgacggacgacccgcttttggtggcttatttgctcgatcctgcgaataccaacccggaaggcgtagcccgtcgttacggcggcgagtttactgaagatgcggcagaacgcgcgttgcttagcgaacgcctcttccagacgttatttccacgtctttcggagaaattactctggctctatcaggaagtcgaacgtccattgagtcgcgtgcttgcccatatggaggctcgcggtgtgcgcttagatgttccgttgttagaagcactcagcttcgagttggagaaagaactggaacgtcttgaaggcgaagtctttcgtttagcggggcatcccttcaatctcaactctcgcgaccaattggagaaagtgctctttgatgaattaggtttaacccctgtcacgcgtacagagaagaccggcaaacgttccacttcggcagccgccttggaagcacttcgtggtgctcacccgatcgtcgagttgattttgcagtaccgcgagctcagcaaactcaaatcaacctatcttgataggttacctcgtcttgttcatccacgtacgggtcgtttacacacccgcttcaatcaaacggcgacagccaccgggcgcttgtcgtcgagtgacccgaacctccagaatattccagtgcgcacgccgctgggccaacgcattcgtaaagcgtttgttgcggaagaaggttggttattacttgcggccgattactcccagatcgaacttcgtgtattggcgcatctctctggcgacgagaatcttaaacgcgtgtttcgcgaaggcaaggatattcacactgaaaccgcagcctggatgttcgggcttgacccagccttagtggaccccaagatgcgtcgtgccgccaagaccgtcaactttggcgtactctatggtatgtcagcacatcgtcttagtcaggaattgggcattgactacaaagaagctgaagcgtttatcgagcgctatttccaatcctttccgaaagttcgcgcgtggattgaacgtaccctcgaagaaggtcgcactcgcggctatgtggaaacgttattcgggcgtcgtcgctacgttccagatcttgcatctcgtgtccgctcagtgcgcgaagctgctgagcgtatggcctggaatatgcctgttcagggaacagcggcggacctcatgaagatcgccatggtgaaattgtttccgcgcttgaaacccttaggagcccaccttcttttacaggtgcatgatgaattggtcttggaagtacccgaggatcgcgcagaagaagccaaagcactcgtgaaagaggttatggaaaacgcgtatccgttagatgttccgttggaggtcgaagtgggtgtaggccgtgattggcttgaagcgaaacaagactaatga

SEQ ID NO: 378 - protein, 844 aa, synthetic construct
  REGION 1..844: note = DNA Polymerase Variant
MHHHHHHGGSGMLPLFDLEEPPKRVLLVDGHHLAYRTFYALSLTTSRGEPVQMVYGFARSLLKALKEDGQAVVVVFDAKAPSFRHEAYEAYKAGRAPTPEDFPRQLALVKRLVDLLGLVRLEAPGYEADDVLGTLAKKAEREGMEVCILTGDRDFFQLLSEKVSVLLPDGTLVTPKDLQEKYGVPPERWVDFRALTGDRSDNIPGVAGIGEKTALRLLAEWGSVENLLKNLDRVKPDSLRRKIEAHLEDLRLSLDLARIRTDLPLEVDFKALRRRTPDLEGLRAFLEELEFGSLLHEFGLLGGEKPREEAPWPPPEGAFVGFLLSRKEPMWAELLALAAAAEGRVHRATSPVEALADLKEARGFLAKDLAVLALREGVALDPTDDPLLVAYLLDPANTNPEGVARRYGGEFTEDAAERALLSERLFQTLFPRLSEKLLWLYQEVERPLSRVLAHMEARGVRLDVPLLEALSFELEKELERLEGEVFRLAGHPFNLNSRDQLEKVLFDELGLTPVTRTEKTGKRSTSAAALEALRGAHPIVELILQYRELSKLKSTYLDRLPRLVHPRTGRLHTRFNQTATATGRLSSSDPNLQNIPVRTPLGQRIRKAFVAEEGWLLLAADYSQIELRVLAHLSGDENLKRVFREGKDIHTETAAWMFGLDPALVDPKMRRAAKTVNFGVLYGMSAHRLSQELGIDYKEAEAFIERYFQSFPKVRAWIERTLEEGRTRGYVETLFGRRRYVPDLASRVRSVREAAERMAWNMPVQGTAADLMKIAMVKLFPRLKPLGAHLLLQVHDELVLEVPEDRAEEAKALVKEVMENAYPLDVPLEVEVGVGRDWLEAKQD

SEQ ID NO: 379 - DNA, 2538 bp, synthetic construct
  misc_feature 1..2538: note = DNA Polymerase Variant
  source 1..2538: mol_type = other DNA
atgcaccatcatcatcatcatggcggtagcggcatgttaccgctgtttgatttggaagaaccaccaaaacgcgtgctgcttgttgacggccatcatctggcgtatcgtaccttctacgcactgagccttacgacctcacgtggtgagcctgtccagatggtgtatgggtttgctcgctccctgctgaaagccctgaaggaagatggtcaagccgtagtagtggttttcgatgcgaaagcaccgtcgtttcgtcacgaagcgtacgaggcctataaagctggccgcgcaccgaccccggaagactttccgcgtcagttagcgctcgtcaaacgcctcgtggatttgctgggattagttcgcttggaagctcctggctacgaggcggacgacgtgctcggtacactggccaagaaagcagaacgtgaaggcatggaggtctgcattcttaccggtgatcgcgatttcttccagctgctgtctgagaaagtgagcgttttgctgcccgatggcacgttagtaaccccgaaagatgtccaagagaaatatggagttccgccagaacgttgggtggactttcgcgcactgactggtgatcgttcagacaacatcccgggcgttgccgggattggtgaaaagacggcgctgcgcctgctggcagaatggggctcggtggaaaatctgctcaagaaccttgatcgtgtgaaacctgatagcttacgccgcaagatcgaagcccacctggaagacttgcgtctgagtctggatcttgcgcgtattcgcaccgatctgccgttggaagtagactttaaagctctgcgtcgtcgcacacccgatttagaggggttacgcgcgttcctcgaagaactggagtttggctccctgctgcatgaattcggtttgttgggcggagagaaaccgcgtgaagaagcaccatggccgccgcccgaaggtgcctttgtcggctttcttctgtcacgcaaagagccaatgtgggcggaactgttagctcttgcagccgccgcggaagggcgtgttcaccgcgcgacctctcctgtcgaggccctcgctgacctcaaagaagcacgtggtttcttggcgaaagatttagccgtgcttgcattacgcgaaggcgttgcgctcgatccgacggacgacccgcttttggtggcttatttgctcgatcctgcgaataccaacccggaaggcgtagcccgtcgttacggcggcgagtttactgaagatgcggcagaacgcgcgttgcttagcgaacgcctcttccagacgttatttccacgtctttcggagaaattactctggctctatcaggaagtcgaacgtccattgagtcgcgtgcttgcccatatggaggctcgcggtgtgcgcttagatgttccgttgttagaagcactcagcttcgaggctgagaaagaactggaacgtcttgaaggcgaagtctttcgtttagcggggcatcccttcaatctcaactctcgcgaccaattggagaaagtgctctttgatgaattaggtttaacccctgtcacgcgtacagagaagaccggcaaacgttccacttcggcagccgccttggaagcacttcgtggtgctcacccgatcgtcgagttgattttgcagtaccgcgagctcagcaaactcaaatcaacctatcttgataggttacctcgtcttgttcatccacgtacgggtcgtttacacacccgcttcaatcaaacggcgacagccaccgggcgcttgtcgtcgagtgacccgaacctccagaatattccagtgcgcacgccgctgggccaacgcattcgtaaagcgtttgttgcggaagaaggttggttattacttgcggccgattactcccagatcgaacttcgtgtattggcgcatctctctggcgacgagaatcttaaacgcgtgtttcgcgaaggcaaggatattcacactgaaaccgcagcctggatgttcgggcttgacccagccttagtggaccccaagatgcgtcgtgccgccaagaccgtcaactttggcgtactctatggtatgtcagcacatcgtcttagtcaggaattgggcattgactacaaagaagctgaagcgtttatcgagcgctatttccaatcctttccgaaagttcgcgcgtggattgaacgtaccctcgaagaaggtcgcactcgcggctatgtggaaacgttattcgggcgtcgtcgctacgttccagatcttgcatctcgtgtccgctcagtgcgcgaagctgctgagcgtatggcctggaatatgcctgttcagggaacagcggcggacctcatgaagatcgccatggtgaaattgtttccgcgcttgaaacccttaggagcccaccttcttttacaggtgcatgatgaattggtcttggaagtacccgaggatcgcgcagaagaagccaaagcactcgtgaaagaggttatggaaaacgcgtatccgttagatgttccgttggaggtcgaagtgggtgtaggccgtgattggcttgaagcgaaacaagactaatga

SEQ ID NO: 380 - protein, 844 aa, synthetic construct
  REGION 1..844: note = DNA Polymerase Variant
MHHHHHHGGSGMLPLFDLEEPPKRVLLVDGHHLAYRTFYALSLTTSRGEPVQMVYGFARSLLKALKEDGQAVVVVFDAKAPSFRHEAYEAYKAGRAPTPEDFPRQLALVKRLVDLLGLVRLEAPGYEADDVLGTLAKKAEREGMEVCILTGDRDFFQLLSEKVSVLLPDGTLVTPKDVQEKYGVPPERWVDFRALTGDRSDNIPGVAGIGEKTALRLLAEWGSVENLLKNLDRVKPDSLRRKIEAHLEDLRLSLDLARIRTDLPLEVDFKALRRRTPDLEGLRAFLEELEFGSLLHEFGLLGGEKPREEAPWPPPEGAFVGFLLSRKEPMWAELLALAAAAEGRVHRATSPVEALADLKEARGFLAKDLAVLALREGVALDPTDDPLLVAYLLDPANTNPEGVARRYGGEFTEDAAERALLSERLFQTLFPRLSEKLLWLYQEVERPLSRVLAHMEARGVRLDVPLLEALSFEAEKELERLEGEVFRLAGHPFNLNSRDQLEKVLFDELGLTPVTRTEKTGKRSTSAAALEALRGAHPIVELILQYRELSKLKSTYLDRLPRLVHPRTGRLHTRFNQTATATGRLSSSDPNLQNIPVRTPLGQRIRKAFVAEEGWLLLAADYSQIELRVLAHLSGDENLKRVFREGKDIHTETAAWMFGLDPALVDPKMRRAAKTVNFGVLYGMSAHRLSQELGIDYKEAEAFIERYFQSFPKVRAWIERTLEEGRTRGYVETLFGRRRYVPDLASRVRSVREAAERMAWNMPVQGTAADLMKIAMVKLFPRLKPLGAHLLLQVHDELVLEVPEDRAEEAKALVKEVMENAYPLDVPLEVEVGVGRDWLEAKQD

SEQ ID NO: 381 - DNA, 2538 bp, synthetic construct
  misc_feature 1..2538: note = DNA Polymerase Variant
  source 1..2538: mol_type = other DNA
atgcaccatcatcatcatcatggcggtagcggcatgttaccgctgtttgatttggaagaaccaccaaaacgcgtgctgcttgttgacggccatcatctggcgtatcgtaccttctacgcactgagccttacgacctcacgtggtgagcctgtccagatggtgtatgggtttgctcgctccctgctgaaagccctgaaggaagatggtcaagccgtagtagtggttttcgatgcgaaagcaccgtcgtttcgtcacgaagcgtacgaggcctataaagctggccgcgcaccgaccccggaagactttccgcgtcagttagcgctcgtcaaacgcctcgtggatttgctgggattagttcgcttggaagctcctggctacgaggcggacgacgtgctcggtacactggccaagaaagcagaacgtgaaggcatggaggtctgcattcttaccggtgatcgcgatttcttccagctgctgtctgagaaagtgagcgttttgctgcccgatggcacgttagtaaccccgaaagatgtgcaagagaaatatggagttccgccagaacgttgggtggactttcgcgcactgactggtgatcgttcagacaacatcccgggcgttgccgggattggtgaaaagacggcgctgcgcctgctggcagaatggggctcggtggaaaatctgctcaagaaccttgatcgtgtgaaacctgatagcttacgccgcaagatcgaagcccacctggaagacttgcgtctgagtctggatcttgtccgtattcgcaccgatctgccgttggaagtagactttaaagctctgcgtcgtcgcacacccgatttagaggggttacgcgcgttcctcgaagaactggagtttggctccctgctgcatgaattcggtttgttgggcggagagaaaccgcgtgaagaagcaccatggccgccgcccgaaggtgcctttgtcggctttcttctgtcacgcaaagagccaatgtgggcggaactgttagctcttgcagccgccgcggaagggcgtgttcaccgcgcgacctctcctgtcgaggccctcgctgacctcaaagaagcacgtggtttcttggcgaaagatttagccgtgcttgcattacgcgaatgtgttgcgctcgatccgacggacgacccgcttttggtggcttatttgctcgatcctgcgaataccaacccggaaggcgtagcccgtcgttacggcggcgagtttactgaagatgcggcagaacgcgcgttgcttagcgaacgcctcttccagacgttatttccacgtctttcggagaaattactctggctctatcaggaagtcgaacgtccattgagtcgcgtgcttgcccatatggaggctcgcggtgtgcgcttagatgttccgttgttagaagcactcagcttcgagttggagaaagaactggaacgtcttgaaggcgaagtctttcgtttagcggggcatcccttcaatctcaactctcgcgaccaattggagaaagtgctctttgatgaattaggtttaacccctgtcacgcgtacagagaagaccggcaaacgttccacttcggcagccgccttggaagcacttcgtggtgctcacccgatcgtcgacttgattttgcagtaccgcgagctcagcaaactcaaatcaacctatctggataggttacctcgtcttgttcatccacgtacgggtcgtttacacacccgcttcaatcaaacggcgacagccaccgggcgcttgtcgtcgagtgacccgaacctccagaatattccagtgcgcacgccgctgggccaacacattcgtaaagcgtttgttgcggaagaaggttggttattacttgcggccgattactcccagatcgaacttcgtgtattggcgcatctctctggcgacgagaatcttaaacgcgtgtttcgcgaaggcaaggatattcacactgaaaccgcagcctggatgttcgggcttgacccagccttagtggaccccaagatgcgtcgtgccgccaagaccgtcaactttggcgtactctatggtatgtcagcacatcgtcttagtcaggaattgggcattgactacaaagaagctgaagcgtttatcgagcgctatttccaatcctttccgaaagttcgcgcgtggattgaacgtaccctcgaagaaggtcgcactcgcggctatgtggaaacgttattcgggcgtcgtcgctacgttccagatcttgcatctcgtgtccgctcagtgcgcgaagctgctgagcgtatggcctggaatatgcctgttcagggaacagcggcggacctcatgaagatcgccatggtgaaattgtttccgcgcttgaaacccttaggagcccaccttcttttacaggtgcatgatgaattggtcttggaagtacccgaggatcgcgcagaagaagccaaagcactcgtgaaagaggttatggaaaacgcgtatccgttagatgttccgttggaggtcgaagtgggtgtaggccgtgattggcttgaagcgaaacaagactaatga

SEQ ID NO: 382 - protein, 844 aa, synthetic construct
  REGION 1..844: note = DNA Polymerase Variant
MHHHHHHGGSGMLPLFDLEEPPKRVLLVDGHHLAYRTFYALSLTTSRGEPVQMVYGFARSLLKALKEDGQAVVVVFDAKAPSFRHEAYEAYKAGRAPTPEDFPRQLALVKRLVDLLGLVRLEAPGYEADDVLGTLAKKAEREGMEVCILTGDRDFFQLLSEKVSVLLPDGTLVTPKDVQEKYGVPPERWVDFRALTGDRSDNIPGVAGIGEKTALRLLAEWGSVENLLKNLDRVKPDSLRRKIEAHLEDLRLSLDLVRIRTDLPLEVDFKALRRRTPDLEGLRAFLEELEFGSLLHEFGLLGGEKPREEAPWPPPEGAFVGFLLSRKEPMWAELLALAAAAEGRVHRATSPVEALADLKEARGFLAKDLAVLALRECVALDPTDDPLLVAYLLDPANTNPEGVARRYGGEFTEDAAERALLSERLFQTLFPRLSEKLLWLYQEVERPLSRVLAHMEARGVRLDVPLLEALSFELEKELERLEGEVFRLAGHPFNLNSRDQLEKVLFDELGLTPVTRTEKTGKRSTSAAALEALRGAHPIVDLILQYRELSKLKSTYLDRLPRLVHPRTGRLHTRFNQTATATGRLSSSDPNLQNIPVRTPLGQHIRKAFVAEEGWLLLAADYSQIELRVLAHLSGDENLKRVFREGKDIHTETAAWMFGLDPALVDPKMRRAAKTVNFGVLYGMSAHRLSQELGIDYKEAEAFIERYFQSFPKVRAWIERTLEEGRTRGYVETLFGRRRYVPDLASRVRSVREAAERMAWNMPVQGTAADLMKIAMVKLFPRLKPLGAHLLLQVHDELVLEVPEDRAEEAKALVKEVMENAYPLDVPLEVEVGVGRDWLEAKQD

SEQ ID NO: 383 - DNA, 2538 bp, synthetic construct
  misc_feature 1..2538: note = DNA Polymerase Variant
  source 1..2538: mol_type = other DNA
atgcaccatcatcatcatcatggcggtagcggcatgttaccgctgtttgatttggaagaaccaccaaaacgcgtgctgcttgttgacggccatcatctggcgtatcgtaccttctacgcactgagccttacgacctcacgtggtgagcctgtccagatggtgtatgggtttgctcgctccctgctgaaagccctgaaggaagatggtcaagccgtagtagtggttttcgatgcgaaagcaccgtcgtttcgtcacgaagcgtacgaggcctataaagctggccgcgcaccgaccccggaagactttccgcgtcagttagcgctcgtcaaacgcctcgtggatttgctgggattagttcgcttggaagctcctggctacgaggcggacgacgtgctcggtacactggccaagaaagcagaacgtgaaggcatggaggtctgcattcttaccggtgatcgcgatttcttccagctgctgtctgagaaagtgagcgttttgctgcccgatggcacgttagtaaccccgaaagatgtccaagagaaatatggagttccgccagaacgttgggtggactttcgcgcactgactggtgatcgttcagacaacatcccgggcgttgccgggattggtgaaaagacggcgctgcgcctgctggcagaatggggctcggtggaaaatctgctcaagaaccttgatcgtgtgaaacctgatagcttacgccgcaagatcgaagcccacctggaagacttgcgtctgagtctggatcttgcgcgtattcgcaccgatctgccgttggaagtagactttaaagctctgcgtcgtcgcacacccgatttagaggggttacgcgcgttcctcgaagaactggagtttggctccctgctgcatgaattcggtttgttgggcggagagaaaccgcgtgaagaagcaccatggccgccgcccgaaggtgcctttgtcggctttcttctgtcacgcaaagagccaatgtgggcggaactgttagctcttgcagccgccgcggaagggcgtgttcaccgcgcgacctctcctgtcgaggccctcgctgacctcaaagaagcacgtggtttcttggcgaaagatttagccgtgcttgcattacgcgaaggcgttgcgctcgatccgacggacgacccgcttttggtggcttatttgctcgatcctgcgaataccaacccggaaggcgtagcccgtcgttacggcggcgagtttactgaagatgcggcagaacgcgcgttgcttagcgaacgcctcttccagacgttatttccacgtctttcggagaaattactctggctctatcaggaagtcgaacgtccattgagtcgcgtgcttgcccatatggaggctcgcggtgtgcgcttagatgttccgttgttagaagcactcagcttcgagttggagaaagaactggaacgtcttgaaggcgaagtctttcgtttagcggggcatcccttcaatctcaactctcgcgaccaattggagaaagtgctctttgatgaattaggtttaacccctgtcacgcgtacagagaagaccggcaaacgttccacttcggcagccgccttggaagcacttcgtggtgctcacccgatcgtcgagttgattttgcagtaccgcgagctcagcaaactcaaatcaacctatcttgataggttacctcgtcttgttcatccacgtacgggtcgtttacacacccgcttcaatcaaacggcgacagccaccgggcgcttgtcgtcgagtgacccgaacctccagaatattccagtgcgcacgccgctgggccaacgcattcgtaaagcgtttgttgcggaagaaggttggttattacttgcggccgattactcccagatcgaacttcgtgtattggcgcatctctctggcgacgagaatcttaaacgcgtgtttcgcgaaggcaaggatattcacactgaaaccgcagcctggatgttcgggcttgacccagccttagtggaccccaagatgcgtcgtgccgccaagaccgtcaactttggcgtactctatggtatgtcagcacatcgtcttagtcaggaattgggcattgactacaaagaagctgaagcgtttatcgagcgctatttccaatcctttccgaaagttcgcgcgtggattgaacgtaccctcgaagaaggtcgcactcgcggctatgtggaaacgttattcgggcgtcgtcgctacgttccacatcttgcatctcgtgtccgctcagtgcgcgaagctgctgagcgtatggcctggaatatgcctgttcagggaacagcggcggacctcatgaagatcgccatggtgaaattgtttccgcgcttgaaacccttaggagcccaccttcttttacaggtgcatgatgaattggtcttggaagtacccgaggatcgcgcagaagaagccaaagcactcgtgaaagaggttatggaaaacgcgtatccgttagatgttccgttggaggtcgaagtgggtgtaggccgtgattggcttgaagcgaaacaagactaatga

SEQ ID NO: 384 - protein, 844 aa, synthetic construct
  REGION 1..844: note = DNA Polymerase Variant
MHHHHHHGGSGMLPLFDLEEPPKRVLLVDGHHLAYRTFYALSLTTSRGEPVQMVYGFARSLLKALKEDGQAVVVVFDAKAPSFRHEAYEAYKAGRAPTPEDFPRQLALVKRLVDLLGLVRLEAPGYEADDVLGTLAKKAEREGMEVCILTGDRDFFQLLSEKVSVLLPDGTLVTPKDVQEKYGVPPERWVDFRALTGDRSDNIPGVAGIGEKTALRLLAEWGSVENLLKNLDRVKPDSLRRKIEAHLEDLRLSLDLARIRTDLPLEVDFKALRRRTPDLEGLRAFLEELEFGSLLHEFGLLGGEKPREEAPWPPPEGAFVGFLLSRKEPMWAELLALAAAAEGRVHRATSPVEALADLKEARGFLAKDLAVLALREGVALDPTDDPLLVAYLLDPANTNPEGVARRYGGEFTEDAAERALLSERLFQTLFPRLSEKLLWLYQEVERPLSRVLAHMEARGVRLDVPLLEALSFELEKELERLEGEVFRLAGHPFNLNSRDQLEKVLFDELGLTPVTRTEKTGKRSTSAAALEALRGAHPIVELILQYRELSKLKSTYLDRLPRLVHPRTGRLHTRFNQTATATGRLSSSDPNLQNIPVRTPLGQRIRKAFVAEEGWLLLAADYSQIELRVLAHLSGDENLKRVFREGKDIHTETAAWMFGLDPALVDPKMRRAAKTVNFGVLYGMSAHRLSQELGIDYKEAEAFIERYFQSFPKVRAWIERTLEEGRTRGYVETLFGRRRYVPHLASRVRSVREAAERMAWNMPVQGTAADLMKIAMVKLFPRLKPLGAHLLLQVHDELVLEVPEDRAEEAKALVKEVMENAYPLDVPLEVEVGVGRDWLEAKQD

SEQ ID NO: 385 - DNA, 2538 bp, synthetic construct
  misc_feature 1..2538: note = DNA Polymerase Variant
  source 1..2538: mol_type = other DNA
atgcaccatcatcatcatcatggcggtagcggcatgttaccgctgtttgatttggaagaaccaccaaaacgcgtgctgcttgttgacggccatcatctggcgtatcgtaccttctacgcactgagccttacgacctcacgtggtgagcctgtccagatggtgtatgggtttgctcgctccctgctgaaagccctgaaggaagatggtcaagccgtagtagtggttttcgatgcgaaagcaccgtcgtttcgtcacgaagcgtacgaggcctataaagctggccgcgcaccgaccccggaagactttccgcgtcagttagcgctcgtcaaacgcctcgtggatttgctgggattagttcgcttggaagctcctggctacgaggcggacgacgtgctcggtacactggccaagaaagcagaacgtgaaggcatggaggtctgcattcttaccggtgatcgcgatttcttccagctgctgtctgagaaagtgagcgttttgctgcccgatggcacgttagtaaccccgaaagatgtccaagagaaatatggagttccgccagaacgttgggtggactttcgcgcactgactggtgatcgttcagacaacatcccgggcgttgccgggattggtgaaaagacggcgctgcgcctgctggcagaatggggctcggtggaaaatctgctcaagaaccttgatcgtgtgaaacctgatagcttacgccgcaagatcgaagcccacctggaagacttgcgtctgagtctggatcttgcgcgtattcgcaccgatctgccgttggaagtagactttaaagctctgcgtcgtcgcacacccgatttagaggggttacgcgcgttcctcgaagaactggagtttggctccctgctgcatgaattcggtttgttgggcggagagaaaccgcgtgaagaagcaccatggccgccgcccgaaggtgcctttgtcggctttcttctgtcacgcaaagagccaatgtgggcggaactgttagctcttgcagccgccgcggaagggcgtgttcaccgcgcgacctctcctgtcgaggccctcgctgacctcaaagaagcacgtggtttcttggcgaaagatttagccgtgcttgcattacgcgaaggcgttgcgctcgatccgacggacgacccgcttttggtggcttatttgctcgatcctttgaataccaacccggaaggcgtagcccgtcgttacggcggcgagtttactgaagatgcggcagaacgcgcgttgcttagcgaacgcctcttccagacgttatttccacgtctttcggagaaattactctggctctatcaggaagtcgaacgtccattgagtcgcgtgcttgcccatatggaggctcgcggtgtgcgcttagatgttccgttgttagaagcactcagcttcgagttggagaaagaactggaacgtcttgaaggcgaagtctttcgtttagcggggcatcccttcaatctcaactctcgcgaccaattggagaaagtgctctttgatgaattaggtttaacccctgtcacgcgtacagagaagaccggcaaacgttccacttcggcagccgccttggaagcacttcgtggtgctcacccgatcgtcgagttgattttgcagtaccgcgagctcagcaaactcaaatcaacctatcttgataggttacctcgtcttgttcatccacgtacgggtcgtttacacacccgcttcaatcaaacggcgacagccaccgggcgcttgtcgtcgagtgacccgaacctccagaatattccagtgcgcacgccgctgggccaacgcattcgtaaagcgtttgttgcggaagaaggttggttattacttgcggccgattactcccagatcgaacttcgtgtattggcgcatctctctggcgacgagaatcttaaacgcgtgtttcgcgaaggcaaggatattcacactgaaaccgcagcctggatgttcgggcttgacccagccttagtggaccccaagatgcgtcgtgccgccaagaccgtcaactttggcgtactctatggtatgtcagcacatcgtcttagtcaggaattgggcattgactacaaagaagctgaagcgtttatcgagcgctatttccaatcctttccgaaagttcgcgcgtggattgaacgtaccctcgaagaaggtcgcactcgcggctatgtggaaacgttattcgggcgtcgtcgctacgttccagatcttgcatctcgtgtccgctcagtgcgcgaagctgctgagcgtatggcctggaatatgcctgttcagggaacagcggcggacctcatgaagatcgccatggtgaaattgtttccgcgcttgaaacccttaggagcccaccttcttttacaggtgcatgatgaattggtcttggaagtacccgaggatcgcgcagaagaagccaaagcactcgtgaaagaggttatggaaaacgcgtatccgttagatgttccgttggaggtcgaagtgggtgtaggccgtgattggcttgaagcgaaacaagactaatga

SEQ ID NO: 386 - protein, 844 aa, synthetic construct
  REGION 1..844: note = DNA Polymerase Variant
MHHHHHHGGSGMLPLFDLEEPPKRVLLVDGHHLAYRTFYALSLTTSRGEPVQMVYGFARSLLKALKEDGQAVVVVFDAKAPSFRHEAYEAYKAGRAPTPEDFPRQLALVKRLVDLLGLVRLEAPGYEADDVLGTLAKKAEREGMEVCILTGDRDFFQLLSEKVSVLLPDGTLVTPKDVQEKYGVPPERWVDFRALTGDRSDNIPGVAGIGEKTALRLLAEWGSVENLLKNLDRVKPDSLRRKIEAHLEDLRLSLDLARIRTDLPLEVDFKALRRRTPDLEGLRAFLEELEFGSLLHEFGLLGGEKPREEAPWPPPEGAFVGFLLSRKEPMWAELLALAAAAEGRVHRATSPVEALADLKEARGFLAKDLAVLALREGVALDPTDDPLLVAYLLDPLNTNPEGVARRYGGEFTEDAAERALLSERLFQTLFPRLSEKLLWLYQEVERPLSRVLAHMEARGVRLDVPLLEALSFELEKELERLEGEVFRLAGHPFNLNSRDQLEKVLFDELGLTPVTRTEKTGKRSTSAAALEALRGAHPIVELILQYRELSKLKSTYLDRLPRLVHPRTGRLHTRFNQTATATGRLSSSDPNLQNIPVRTPLGQRIRKAFVAEEGWLLLAADYSQIELRVLAHLSGDENLKRVFREGKDIHTETAAWMFGLDPALVDPKMRRAAKTVNFGVLYGMSAHRLSQELGIDYKEAEAFIERYFQSFPKVRAWIERTLEEGRTRGYVETLFGRRRYVPDLASRVRSVREAAERMAWNMPVQGTAADLMKIAMVKLFPRLKPLGAHLLLQVHDELVLEVPEDRAEEAKALVKEVMENAYPLDVPLEVEVGVGRDWLEAKQD

SEQ ID NO: 387 - DNA, 2538 bp, synthetic construct
  misc_feature 1..2538: note = DNA Polymerase Variant
  source 1..2538: mol_type = other DNA
atgcaccatcatcatcatcatggcggtagcggcatgttaccgctgtttgatttggaagaaccaccaaaacgcgtgctgcttgttgacggccatcatctggcgtatcgtaccttctacgcactgagccttacgacctcacgtggtgagcctgtccagatggtgtatgggtttgctcgctccctgctgaaagccctgaaggaagatggtcaagccgtagtagtggttttcgatgcgaaagcaccgtcgtttcgtcacgaagcgtacgaggcctataaagctggccgcgcaccgaccccggaagactttccgcgtcagttagcgctcgtcaaacgcctcgtggatttgctgggattagttcgcttggaagctcctggctacgaggcggacgacgtgctcggtacactggccaagaaagcagaacgtgaaggcatggaggtctgcattcttaccggtgatcgcgatttcttccagctgctgtctgagaaagtgagcgttttgctgcccgatggcacgttagtaaccccgaaagatgtccaagagaaatatggagttccgccagaacgttgggtggactttcgcgcactgactggtgatcgttcagacaacatcccgggcgttgccgggattggtgaaaagacggcgctgcgcctgctggcagaatggggctcggtggaaaatctgctcaagaaccttgatcgtgtgaaacctgatagcttacgccgcaagatcgaagcccacctggaagacttgcgtctgagtctggatcttgcgcgtattcgcaccgatctgccgttggaagtagactttaaagctctgcgtcgtcgcacacccgatttagaggggttacgcgcgttcctcgaagaactggagtttggctccctgctgcatgaattcggtttgttgggcggagagaaaccgcgtgaagaagcaccatggccgccgcccgaaggtgcctttgtcggctttcttctgtcacgcaaagagccaatgtgggcggaactgttagctcttgcagccgccgcggaagggcgtgttcaccgcgcgacctctcctgtcgaggccctcgctgacctcaaagaagcacgtggtttcttggcgaaagatttagccgtgcttgcattacgcgaaggcgttgcgctcgatccgacggacgacccgcttttggtggcttatttgctcgatcctgcgaataccaacccggaaggcgtagcccgtcgttacggcggcgagtttactgaagatgcggcagaacgcgcgttgcttagcgaacgcctcttccagacgttatttccacgtctttcggagaaattactctggctctatcaggaagtcgaacgtccattgagtcgcgtgcttgcccatatggaggctcgcggtgtgcgcttagatgttccgttgttagaagcactcagcttcgagttggagaaagaactggaacgtcttgaaggcgaagtctttcgtttagcggggcatcccttcaatctcaactctcgcgaccaattggagaaagtgctctttgatgaattaggtttaacccctgtcacgcgtacagagaagaccggcaaacgttccacttcggcagccgccttggaagcacttcgtggtgctcacccgatcgtcgagttgattttgcagtaccgcgagctcagcaaactcaaatcaacctatcttgataggttacctcgtcttgttcatccacgtacgggtcgtttacacacccgcttcaatcaaacggcgacagccaccgggcgcttgtcgtcgagtgacccgaacctccagaatattccagtgcgcacgccgctgggccaacgcattcgtaaagcgtttgttgcggaagaaggttggttattacttgcggccgattactcccagatcgaacttcgtgtattggcgcatctctctggcgacgagaatcttaaacgcgtgtttcgcgaaggcaaggatattcacactgaaaccgcagcctggatgttcgggcttgacccagccttagtggaccccaagatgcgtcgtgccgccaagaccgtcaactttggcgtactctatggtatgtcagcacatcgtcttagtcaggaattgggcattgactacaaagaagctgaagcgtttatcgagcgctatttccaatcctttccgaaagttcgcgcgtggattgaacgtaccctcgaagaaggtcgcactcgcggctatgtggaaacgttattcgggcgtcgtcgctacgttccagtgcttgcatctcgtgtccgctcagtgcgcgaagctgctgagcgtatggcctggaatatgcctgttcagggaacagcggcggacctcatgaagatcgccatggtgaaattgtttccgcgcttgaaacccttaggagcccaccttcttttacaggtgcatgatgaattggtcttggaagtacccgaggatcgcgcagaagaagccaaagcactcgtgaaagaggttatggaaaacgcgtatccgttagatgttccgttggaggtcgaagtgggtgtaggccgtgattggcttgaagcgaaacaagactaatga

SEQ ID NO: 388 - protein, 844 aa, synthetic construct
  REGION 1..844: note = DNA Polymerase Variant
MHHHHHHGGSGMLPLFDLEEPPKRVLLVDGHHLAYRTFYALSLTTSRGEPVQMVYGFARSLLKALKEDGQAVVVVFDAKAPSFRHEAYEAYKAGRAPTPEDFPRQLALVKRLVDLLGLVRLEAPGYEADDVLGTLAKKAEREGMEVCILTGDRDFFQLLSEKVSVLLPDGTLVTPKDVQEKYGVPPERWVDFRALTGDRSDNIPGVAGIGEKTALRLLAEWGSVENLLKNLDRVKPDSLRRKIEAHLEDLRLSLDLARIRTDLPLEVDFKALRRRTPDLEGLRAFLEELEFGSLLHEFGLLGGEKPREEAPWPPPEGAFVGFLLSRKEPMWAELLALAAAAEGRVHRATSPVEALADLKEARGFLAKDLAVLALREGVALDPTDDPLLVAYLLDPANTNPEGVARRYGGEFTEDAAERALLSERLFQTLFPRLSEKLLWLYQEVERPLSRVLAHMEARGVRLDVPLLEALSFELEKELERLEGEVFRLAGHPFNLNSRDQLEKVLFDELGLTPVTRTEKTGKRSTSAAALEALRGAHPIVELILQYRELSKLKSTYLDRLPRLVHPRTGRLHTRFNQTATATGRLSSSDPNLQNIPVRTPLGQRIRKAFVAEEGWLLLAADYSQIELRVLAHLSGDENLKRVFREGKDIHTETAAWMFGLDPALVDPKMRRAAKTVNFGVLYGMSAHRLSQELGIDYKEAEAFIERYFQSFPKVRAWIERTLEEGRTRGYVETLFGRRRYVPVLASRVRSVREAAERMAWNMPVQGTAADLMKIAMVKLFPRLKPLGAHLLLQVHDELVLEVPEDRAEEAKALVKEVMENAYPLDVPLEVEVGVGRDWLEAKQD

SEQ ID NO: 389 - DNA, 2538 bp, synthetic construct
  misc_feature 1..2538: note = DNA Polymerase Variant
  source 1..2538: mol_type = other DNA
atgcaccatcatcatcatcatggcggtagcggcatgttaccgctgtttgatttggaagaaccaccaaaacgcgtgctgcttgttgacggccatcatctggcgtatcgtaccttctacgcactgagccttacgacctcacgtggtgagcctgtccagatggtgtatgggtttgctcgctccctgctgaaagccctgaaggaagatggtcaagccgtagtagtggttttcgatgcgaaagcaccgtcgtttcgtcacgaagcgtacgaggcctataaagctggccgcgcaccgaccccggaagactttccgcgtcagttagcgctcgtcaaacgcctcgtggatttgctgggattagttcgcttggaagctcctggctacgaggcggacgacgtgctcggtacactggccaagaaagcagaacgtgaaggcatggaggtctgcattcttaccggtgatcgcgatttcttccagctgctgtctgagaaagtgagcgttttgctgcccgatggcacgttagtaaccccgaaagatgtccaagagaaatatggagttccgccagaacgttgggtggactttcgcgcactgactggtgatcgttcagacaacatcccgggcgttgccgggattggtgaaaagacggcgctgcgcctgctggcagaatggggctcggtggaaaatctgctcaagaaccttgatcgtgtgaaacctgatagcttacgccgcaagatcgaagcccacctggaagacttgcgtctgagtctggatcttgcgcgtattcgcaccgatctgccgttggaagtagactttaaagctctgcgtcgtcgcacacccgatttagaggggttacgcgcgttcctcgaagaactggagtttggctccctgctgcatgaattcggtttgttgggcggagagaaaccgcgtgaagaagcaccatggccgccgcccgaaggtgcctttgtcggctttcttctgtcacgcaaagagccaatgtgggcggaactgttagctcttgcagccgccgcggaagggcgtgttcaccgcgcgacctctcctgtcgaggccctcgctgacctcaaagaagcacgtggtttcttggcgaaagatttagccgtgcttgcattacgcgaaggcgttgcgctcgatccgacggacgacccgcttttggtggcttatttgctcgatcctcgtaataccaacccggaaggcgtagcccgtcgttacggcggcgagtttactgaagatgcggcagaacgcgcgttgcttagcgaacgcctcttccagacgttatttccacgtctttcggagaaattactctggctctatcaggaagtcgaacgtccattgagtcgcgtgcttgcccatatggaggctcgcggtgtgcgcttagatgttccgttgttagaagcactcagcttcgagttggagaaagaactggaacgtcttgaaggcgaagtctttcgtttagcggggcatcccttcaatctcaactctcgcgaccaattggagaaagtgctctttgatgaattaggtttaacccctgtcacgcgtacagagaagaccggcaaacgttccacttcggcagccgccttggaagcacttcgtggtgctcacccgatcgtcgagttgattttgcagtaccgcgagctcagcaaactcaaatcaacctatcttgataggttacctcgtcttgttcatccacgtacgggtcgtttacacacccgcttcaatcaaacggcgacagccaccgggcgcttgtcgtcgagtgacccgaacctccagaatattccagtgcgcacgccgctgggccaacgcattcgtaaagcgtttgttgcggaagaaggttggttattacttgcggccgattactcccagatcgaacttcgtgtattggcgcatctctctggcgacgagaatcttaaacgcgtgtttcgcgaaggcaaggatattcacactgaaaccgcagcctggatgttcgggcttgacccagccttagtggaccccaagatgcgtcgtgccgccaagaccgtcaactttggcgtactctatggtatgtcagcacatcgtcttagtcaggaattgggcattgactacaaagaagctgaagcgtttatcgagcgctatttccaatcctttccgaaagttcgcgcgtggattgaacgtaccctcgaagaaggtcgcactcgcggctatgtggaaacgttattcgggcgtcgtcgctacgttccagatcttgcatctcgtgtccgctcagtgcgcgaagctgctgagcgtatggcctggaatatgcctgttcagggaacagcggcggacctcatgaagatcgccatggtgaaattgtttccgcgcttgaaacccttaggagcccaccttcttttacaggtgcatgatgaattggtcttggaagtacccgaggatcgcgcagaagaagccaaagcactcgtgaaagaggttatggaaaacgcgtatccgttagatgttccgttggaggtcgaagtgggtgtaggccgtgattggcttgaagcgaaacaagactaatga

SEQ ID NO: 390 - protein, 844 aa, synthetic construct
  REGION 1..844: note = DNA Polymerase Variant
MHHHHHHGGSGMLPLFDLEEPPKRVLLVDGHHLAYRTFYALSLTTSRGEPVQMVYGFARSLLKALKEDGQAVVVVFDAKAPSFRHEAYEAYKAGRAPTPEDFPRQLALVKRLVDLLGLVRLEAPGYEADDVLGTLAKKAEREGMEVCILTGDRDFFQLLSEKVSVLLPDGTLVTPKDVQEKYGVPPERWVDFRALTGDRSDNIPGVAGIGEKTALRLLAEWGSVENLLKNLDRVKPDSLRRKIEAHLEDLRLSLDLARIRTDLPLEVDFKALRRRTPDLEGLRAFLEELEFGSLLHEFGLLGGEKPREEAPWPPPEGAFVGFLLSRKEPMWAELLALAAAAEGRVHRATSPVEALADLKEARGFLAKDLAVLALREGVALDPTDDPLLVAYLLDPRNTNPEGVARRYGGEFTEDAAERALLSERLFQTLFPRLSEKLLWLYQEVERPLSRVLAHMEARGVRLDVPLLEALSFELEKELERLEGEVFRLAGHPFNLNSRDQLEKVLFDELGLTPVTRTEKTGKRSTSAAALEALRGAHPIVELILQYRELSKLKSTYLDRLPRLVHPRTGRLHTRFNQTATATGRLSSSDPNLQNIPVRTPLGQRIRKAFVAEEGWLLLAADYSQIELRVLAHLSGDENLKRVFREGKDIHTETAAWMFGLDPALVDPKMRRAAKTVNFGVLYGMSAHRLSQELGIDYKEAEAFIERYFQSFPKVRAWIERTLEEGRTRGYVETLFGRRRYVPDLASRVRSVREAAERMAWNMPVQGTAADLMKIAMVKLFPRLKPLGAHLLLQVHDELVLEVPEDRAEEAKALVKEVMENAYPLDVPLEVEVGVGRDWLEAKQD

SEQ ID NO: 391 - DNA, 2538 bp, synthetic construct
  misc_feature 1..2538: note = DNA Polymerase Variant
  source 1..2538: mol_type = other DNA
atgcaccatcatcatcatcatggcggtagcggcatgttaccgctgtttgatttggaagaaccaccaaaacgcgtgctgcttgttgacggccatcatctggcgtatcgtaccttctacgcactgagccttacgacctcacgtggtgagcctgtccagatggtgtatgggtttgctcgctccctgctgaaagccctgaaggaagatggtcaagccgtagtagtggttttcgatgcgaaagcaccgtcgtttcgtcacgaagcgtacgaggcctataaagctggccgcgcaccgaccccggaagactttccgcgtcagttagcgctcgtcaaacgcctcgtggatttgctgggattagttcgcttggaagctcctggctacgaggcggacgacgtgctcggtacactggccaagaaagcagaacgtgaaggcatggaggtctgcattcttaccggtgatcgcgatttcttccagctgctgtctgagaaagtgagcgttttgctgcccgatggcacgttagtaaccccgaaagatgtccaagagaaatatggagttccgccagaacgttgggtggactttcgcgcactgactggtgatcgttcagacaacatcccgggcgttgccgggattggtgaaaagacggcgctgcgcctgctggcagaatggggctcggtggaaaatctgctcaagaaccttgatcgtgtgaaacctgatagcttacgccgcaagatcgaagcccacctggaagacttgcgtctgagtctggatcttgcgcgtattcgcaccgatctgccgttggaagtagactttaaagctctgcgtcgtcgcacacccgatttagaggggttacgcgcgttcctcgaagaactggagtttggctccctgctgcatgaattcggtttgttgggcggagagaaaccgcgtgaagaagcaccatggccgccgcccgaaggtgcctttgtcggctttcttctgtcacgcaaagagccaatgtgggcggaactgttagctcttgcagccgccgcggaagggcgtgttcaccgcgcgacctctcctgtcgaggccctcgctgacctcaaagaagcacgtggtttcttggcgaaagatttagccgtgcttgcattacgcgaaggcgttgcgctcgatccgacggacgacccgcttttggtggcttatttgctcgatcctgcgaataccaacccggaaggcgtagcccgtcgttacggcggcgagtttactgaagatgcggcagaacgcgcgttgcttagcgaacgcctcttccagacgttatttccacgtctttcggagaaattactctggctctatcaggaagtcgaacgtccattgagtcgcgtgcttgcccatatggaggctcgcggtgtgcgcttagatgttccgttgttagaagcactcagcttcgagttggagaaagaactgttgcgtcttgaaggcgaagtctttcgtttagcggggcatcccttcaatctcaactctcgcgaccaattggagaaagtgctctttgatgaattaggtttaacccctgtcacgcgtacagagaagaccggcaaacgttccacttcggcagccgccttggaagcacttcgtggtgctcacccgatcgtcgagttgattttgcagtaccgcgagctcagcaaactcaaatcaacctatcttgataggttacctcgtcttgttcatccacgtacgggtcgtttacacacccgcttcaatcaaacggcgacagccaccgggcgcttgtcgtcgagtgacccgaacctccagaatattccagtgcgcacgccgctgggccaacgcattcgtaaagcgtttgttgcggaagaaggttggttattacttgcggccgattactcccagatcgaacttcgtgtattggcgcatctctctggcgacgagaatcttaaacgcgtgtttcgcgaaggcaaggatattcacactgaaaccgcagcctggatgttcgggcttgacccagccttagtggaccccaagatgcgtcgtgccgccaagaccgtcaactttggcgtactctatggtatgtcagcacatcgtcttagtcaggaattgggcattgactacaaagaagctgaagcgtttatcgagcgctatttccaatcctttccgaaagttcgcgcgtggattgaacgtaccctcgaagaaggtcgcactcgcggctatgtggaaacgttattcgggcgtcgtcgctacgttccagatcttgcatctcgtgtccgctcagtgcgcgaagctgctgagcgtatggcctggaatatgcctgttcagggaacagcggcggacctcatgaagatcgccatggtgaaattgtttccgcgcttgaaacccttaggagcccaccttcttttacaggtgcatgatgaattggtcttggaagtacccgaggatcgcgcagaagaagccaaagcactcgtgaaagaggttatggaaaacgcgtatccgttagatgttccgttggaggtcgaagtgggtgtaggccgtgattggcttgaagcgaaacaagactaatga

SEQ ID NO: 392 - protein, 844 aa, synthetic construct
  REGION 1..844: note = DNA Polymerase Variant
MHHHHHHGGSGMLPLFDLEEPPKRVLLVDGHHLAYRTFYALSLTTSRGEPVQMVYGFARSLLKALKEDGQAVVVVFDAKAPSFRHEAYEAYKAGRAPTPEDFPRQLALVKRLVDLLGLVRLEAPGYEADDVLGTLAKKAEREGMEVCILTGDRDFFQLLSEKVSVLLPDGTLVTPKDVQEKYGVPPERWVDFRALTGDRSDNIPGVAGIGEKTALRLLAEWGSVENLLKNLDRVKPDSLRRKIEAHLEDLRLSLDLARIRTDLPLEVDFKALRRRTPDLEGLRAFLEELEFGSLLHEFGLLGGEKPREEAPWPPPEGAFVGFLLSRKEPMWAELLALAAAAEGRVHRATSPVEALADLKEARGFLAKDLAVLALREGVALDPTDDPLLVAYLLDPANTNPEGVARRYGGEFTEDAAERALLSERLFQTLFPRLSEKLLWLYQEVERPLSRVLAHMEARGVRLDVPLLEALSFELEKELLRLEGEVFRLAGHPFNLNSRDQLEKVLFDELGLTPVTRTEKTGKRSTSAAALEALRGAHPIVELILQYRELSKLKSTYLDRLPRLVHPRTGRLHTRFNQTATATGRLSSSDPNLQNIPVRTPLGQRIRKAFVAEEGWLLLAADYSQIELRVLAHLSGDENLKRVFREGKDIHTETAAWMFGLDPALVDPKMRRAAKTVNFGVLYGMSAHRLSQELGIDYKEAEAFIERYFQSFPKVRAWIERTLEEGRTRGYVETLFGRRRYVPDLASRVRSVREAAERMAWNMPVQGTAADLMKIAMVKLFPRLKPLGAHLLLQVHDELVLEVPEDRAEEAKALVKEVMENAYPLDVPLEVEVGVGRDWLEAKQD

SEQ ID NO: 393 - DNA, 2538 bp, synthetic construct
  misc_feature 1..2538: note = DNA Polymerase Variant
  source 1..2538: mol_type = other DNA
atgcaccatcatcatcatcatggcggtagcggcatgttaccgctgtttgatttggaagaaccaccaaaacgcgtgctgcttgttgacggccatcatctggcgtatcgtaccttctacgcactgagccttacgacctcacgtggtgagcctgtccagatggtgtatgggtttgctcgctccctgctgaaagccctgaaggaagatggtcaagccgtagtagtggttttcgatgcgaaagcaccgtcgtttcgtcacgaagcgtacgaggcctataaagctggccgcgcaccgaccccggaagactttccgcgtcagttagcgctcgtcaaacgcctcgtggatttgctgggattagttcgcttggaagctcctggctacgaggcggacgacgtgctcggtacactggccaagaaagcagaacgtgaaggcatggaggtctgcattcttaccggtgatcgcgatttcttccagctgctgtctgagaaagtgagcgttttgctgcccgatggcacgttagtaaccccgaaagatgtgcaagagaaatatggagttccgccagaacgttgggtggactttcgcgcactgactggtgatcgttcagacaacatcccgggcgttgccgggattggtgaaaagacggcgctgcgcctgctggcagaatggggctcggtggaaaatctgctcaagaaccttgatcgtgtgaaacctgatagcttacgccgcaagatcgaagcccacctggaagacttgcgtctgagtctggatcttgcccgtattcgcaccgatctgccgttggaagtagactttaaagctctgcgtcgtcgcacacccgatttagaggggttacgcgcgttcctcgaagaactggagtttggctccctgctgcatgaattcggtttgttgggcggagagaaaccgcgtgaagaagcaccatggccgccgcccgaaggtgcctttgtcggctttcttctgtcacgcaaagagccaatgtgggcggaactgttagctcttgcagccgccgcggaagggcgtgttcaccgcgcgacctctcctgtcgaggccctcgctgacctcaaagaagcacgtggtttcttggcgaaagatttagccgtgcttgcattacgcgaatgtgttgcgctcgatccgacggacgacccgcttttggtggcttatttgctcgatcctgcgaataccaacccggaaggtatcgcccgtcgttacggcggcgagtttactgaagatgcggcagaacgcgcgttgcttagcgaacgcctcttccagacgttatttccacgtctttcggagaaattactctggctctatcaggaagtcgaacgtccattgagtcgcgtgcttgcccatatggaggctcgcggtgtgcgcttagatgttccgttgttagaagcactcagcttcgagttggagaaagaactggaacgtcttgaaggcgaagtctttcgtttagcggggcatcccttcaatctcaactctcgcgaccaattggagaaagtgctctttgatgaattaggtttaacccctgtcacgcgtacagagaagaccggcaaacgttccacttcggcagctgccttggaagcacttcgtggtgctcacccgatcgtcgacttgattttgcagtaccgcgagctcagcaaactcaaatcaacctatctggataggttacctcgtcttgttcatccacgtacgggtcgtttacacacccgcttcaatcaaacggcgacagccaccgggcgcttgtcgtcgagtgacccgaacctccagaatattccagtgcgcacgccgctgggccaacacattcgtaaagcgtttgttgcggaagaaggttggttattacttgcggccgattactcccagatcgaacttcgtgtattggcgcatctctctggcgacgagaatcttaaacgcgtgtttcgcgaaggcaaggatattcacactgaaaccgcagcctggatgttcgggctggacccagccttagtggaccccaagatgcgtcgtgccgccaagaccgtcaactttggcgtactctatggtatgtcagcacatcgtcttagtcaggaattgggcattgactacaaagaagctgaagcgtttatcgagcgctatttccaatcctttccgaaagttcgcgcgtggattgaacgtaccctcgaagaaggtcgcactcgcggctatgtggaaacgttattcgggcgtcgtcgctacgttccagatcttgcatctcgtgtccgctcagtgcgcgaagctgctgagcgtatggcctggaatatgcctgttcagggaacagcggcggacctcatgaagatcgccatggtgaaattgtttccgcgcttgaaacccttaggagcccaccttcttttacaggtgcatgatgaattggtcttggaagtacccgaggatcgcgcagaagaagccaaagcactcgtgaaagaggttatggaaaacgcgtatccgttagatgttccgttggaggtcgaagtgggtgtaggccgtgattggcttgaagcgaaacaagactaatga

SEQ ID NO: 394 - protein, 844 aa, synthetic construct
  REGION 1..844: note = DNA Polymerase Variant
MHHHHHHGGSGMLPLFDLEEPPKRVLLVDGHHLAYRTFYALSLTTSRGEPVQMVYGFARSLLKALKEDGQAVVVVFDAKAPSFRHEAYEAYKAGRAPTPEDFPRQLALVKRLVDLLGLVRLEAPGYEADDVLGTLAKKAEREGMEVCILTGDRDFFQLLSEKVSVLLPDGTLVTPKDVQEKYGVPPERWVDFRALTGDRSDNIPGVAGIGEKTALRLLAEWGSVENLLKNLDRVKPDSLRRKIEAHLEDLRLSLDLARIRTDLPLEVDFKALRRRTPDLEGLRAFLEELEFGSLLHEFGLLGGEKPREEAPWPPPEGAFVGFLLSRKEPMWAELLALAAAAEGRVHRATSPVEALADLKEARGFLAKDLAVLALRECVALDPTDDPLLVAYLLDPANTNPEGIARRYGGEFTEDAAERALLSERLFQTLFPRLSEKLLWLYQEVERPLSRVLAHMEARGVRLDVPLLEALSFELEKELERLEGEVFRLAGHPFNLNSRDQLEKVLFDELGLTPVTRTEKTGKRSTSAAALEALRGAHPIVDLILQYRELSKLKSTYLDRLPRLVHPRTGRLHTRFNQTATATGRLSSSDPNLQNIPVRTPLGQHIRKAFVAEEGWLLLAADYSQIELRVLAHLSGDENLKRVFREGKDIHTETAAWMFGLDPALVDPKMRRAAKTVNFGVLYGMSAHRLSQELGIDYKEAEAFIERYFQSFPKVRAWIERTLEEGRTRGYVETLFGRRRYVPDLASRVRSVREAAERMAWNMPVQGTAADLMKIAMVKLFPRLKPLGAHLLLQVHDELVLEVPEDRAEEAKALVKEVMENAYPLDVPLEVEVGVGRDWLEAKQD

SEQ ID NO: 395 - DNA, 2538 bp, synthetic construct
  misc_feature 1..2538: note = DNA Polymerase Variant
  source 1..2538: mol_type = other DNA
atgcaccatcatcatcatcatggcggtagcggcatgttaccgctgtttgatttggaagaaccaccaaaacgcgtgctgcttgttgacggccatcatctggcgtatcgtaccttctacgcactgagccttacgacctcacgtggtgagcctgtccagatggtgtatgggtttgctcgctccctgctgaaagccctgaaggaagatggtcaagccgtagtagtggttttcgatgcgaaagcaccgtcgtttcgtcacgaagcgtacgaggcctataaagctggccgcgcaccgaccccggaagactttccgcgtcagttagcgctcgtcaaacgcctcgtggatttgctgggattagttcgcttggaagctcctggctacgaggcggacgacgtgctcggtacactggccaagaaagcagaacgtgaaggcatggaggtctgcattcttaccggtgatcgcgatttcttccagctgctgtctgagaaagtgagcgttttgctgcccgatggcacgttagtaaccccgaaagatgtccaagagaaatatggagttccgccagaacgttgggtggactttcgcgcactgactggtgatcgttcagacaacatcccgggcgttgccgggattggtgaaaagacggcgctgcgcctgctggcagaatggggctcggtggaaaatctgctcaagaaccttgatcgtgtgaaacctgatagcttacgccgcaagatcgaagcccacctggaagacttgcgtctgagtctggatcttgcgcgtattcgcaccgatctgccgttggaagtagactttaaagctctgcgtcgtcgcacacccgatttagaggggttacgcgcgttcctcgaagaactggagtttggctccctgctgcatgaattcggtttgttgggcggagagaaaccgcgtgaagaagcaccatggccgccgcccgaaggtgcctttgtcggctttcttctgtcacgcaaagagccaatgtgggcggaactgttagctcttgcagccgccgcggaagggcgtgttcaccgcgcgacctctcctgtcgaggccctcgctgacctcaaagaagcacgtggtttcttggcgaaagatttagccgtgcttgcattacgcgaaggcgttgcgctcgatccgacggacgacccgcttttggtggcttatttgctcgatcctgcgaataccaacccggaaggcgtagcccgtcgttacggcggcgagtttactgaagatgcggcagaacgcgcgttgcttagcgaacgcctcttccagacgttatttccacgtctttcggagaaattactctggctctatcaggaagtcgaacgtccattgagtcgcgtgcttgcccatatggaggctcgcggtgtgcgcttagatgttccgttgttagaagcactcagcttcgagttggctaaagaactggaacgtcttgaaggcgaagtctttcgtttagcggggcatcccttcaatctcaactctcgcgaccaattggagaaagtgctctttgatgaattaggtttaacccctgtcacgcgtacagagaagaccggcaaacgttccacttcggcagccgccttggaagcacttcgtggtgctcacccgatcgtcgagttgattttgcagtaccgcgagctcagcaaactcaaatcaacctatcttgataggttacctcgtcttgttcatccacgtacgggtcgtttacacacccgcttcaatcaaacggcgacagccaccgggcgcttgtcgtcgagtgacccgaacctccagaatattccagtgcgcacgccgctgggccaacgcattcgtaaagcgtttgttgcggaagaaggttggttattacttgcggccgattactcccagatcgaacttcgtgtattggcgcatctctctggcgacgagaatcttaaacgcgtgtttcgcgaaggcaaggatattcacactgaaaccgcagcctggatgttcgggcttgacccagccttagtggaccccaagatgcgtcgtgccgccaagaccgtcaactttggcgtactctatggtatgtcagcacatcgtcttagtcaggaattgggcattgactacaaagaagctgaagcgtttatcgagcgctatttccaatcctttccgaaagttcgcgcgtggattgaacgtaccctcgaagaaggtcgcactcgcggctatgtggaaacgttattcgggcgtcgtcgctacgttccagatcttgcatctcgtgtccgctcagtgcgcgaagctgctgagcgtatggcctggaatatgcctgttcagggaacagcggcggacctcatgaagatcgccatggtgaaattgtttccgcgcttgaaacccttaggagcccaccttcttttacaggtgcatgatgaattggtcttggaagtacccgaggatcgcgcagaagaagccaaagcactcgtgaaagaggttatggaaaacgcgtatccgttagatgttccgttggaggtcgaagtgggtgtaggccgtgattggcttgaagcgaaacaagactaatga

SEQ ID NO: 396 - protein, 844 aa, synthetic construct
  REGION 1..844: note = DNA Polymerase Variant
MHHHHHHGGSGMLPLFDLEEPPKRVLLVDGHHLAYRTFYALSLTTSRGEPVQMVYGFARSLLKALKEDGQAVVVVFDAKAPSFRHEAYEAYKAGRAPTPEDFPRQLALVKRLVDLLGLVRLEAPGYEADDVLGTLAKKAEREGMEVCILTGDRDFFQLLSEKVSVLLPDGTLVTPKDVQEKYGVPPERWVDFRALTGDRSDNIPGVAGIGEKTALRLLAEWGSVENLLKNLDRVKPDSLRRKIEAHLEDLRLSLDLARIRTDLPLEVDFKALRRRTPDLEGLRAFLEELEFGSLLHEFGLLGGEKPREEAPWPPPEGAFVGFLLSRKEPMWAELLALAAAAEGRVHRATSPVEALADLKEARGFLAKDLAVLALREGVALDPTDDPLLVAYLLDPANTNPEGVARRYGGEFTEDAAERALLSERLFQTLFPRLSEKLLWLYQEVERPLSRVLAHMEARGVRLDVPLLEALSFELAKELERLEGEVFRLAGHPFNLNSRDQLEKVLFDELGLTPVTRTEKTGKRSTSAAALEALRGAHPIVELILQYRELSKLKSTYLDRLPRLVHPRTGRLHTRFNQTATATGRLSSSDPNLQNIPVRTPLGQRIRKAFVAEEGWLLLAADYSQIELRVLAHLSGDENLKRVFREGKDIHTETAAWMFGLDPALVDPKMRRAAKTVNFGVLYGMSAHRLSQELGIDYKEAEAFIERYFQSFPKVRAWIERTLEEGRTRGYVETLFGRRRYVPDLASRVRSVREAAERMAWNMPVQGTAADLMKIAMVKLFPRLKPLGAHLLLQVHDELVLEVPEDRAEEAKALVKEVMENAYPLDVPLEVEVGVGRDWLEAKQD

SEQ ID NO: 397 - DNA, 2538 bp, synthetic construct
  misc_feature 1..2538: note = DNA Polymerase Variant
  source 1..2538: mol_type = other DNA
atgcaccatcatcatcatcatggcggtagcggcatgttaccgctgtttgatttggaagaaccaccaaaacgcgtgctgcttgttgacggccatcatctggcgtatcgtaccttctacgcactgagccttacgacctcacgtggtgagcctgtccagatggtgtatgggtttgctcgctccctgctgaaagccctgaaggaagatggtcaagccgtagtagtggttttcgatgcgaaagcaccgtcgtttcgtcacgaagcgtacgaggcctataaagctggccgcgcaccgaccccggaagactttccgcgtcagttagcgctcgtcaaacgcctcgtggatttgctgggattagttcgcttggaagctcctggctacgaggcggacgacgtgctcggtacactggccaagaaagcagaacgtgaaggcatggaggtctgcattcttaccggtgatcgcgatttcttccagctgctgtctgagaaagtgagcgttttgctgcccgatggcacgttagtaaccccgaaagatctgcaagagaaatatggagttccgccagaacgttgggtggactttcgcgcactgactggtgatcgttcagacaacatcccgggcgttgccgggattggtgaaaagacggcgctgcgcctgctggcagaatggggctcggtggaaaatctgctcaagaaccttgatcgtgtgaaacctgatagcttacgccgcaagatcgaagcccacctggaagacttgcgtctgagtctggatcttgtccgtattcgcaccgatctgccgttggaagtagactttaaagctctgcgtcgtcgcacacccgatttagaggggttacgcgcgttcctcgaagaactggagtttggctccctgctgcatgaattcggtttgttgggcggagagaaaccgcgtgaagaagcaccatggccgccgcccgaaggtgcctttgtcggctttcttctgtcacgcaaagagccaatgtgggcggaactgttagctcttgcagccgccgcggaagggcgtgttcaccgcgcgacctctcctgtcgaggccctcgctgacctcaaagaagcacgtggtttcttggcgaaagatttagccgtgcttgcattacgcgaaggtgttgcgctcgatccgacggacgacccgcttttggtggcttatttgctcgatcctgcgaataccaacccggaaggtatcgcccgtcgttacggcggcgagtttactgaagatgcggcagaacgcgcgttgcttagcgaacgcctcttccagacgttatttccacgtctttcggagaaattactctggctctatcaggaagtcgaacgtccattgagtcgcgtgcttgcccatatggaggctcgcggtgtgcgcttagatgttccgttgttagaagcactcagcttcgagttggagaaagaactggaacgtcttgaaggcgaagtctttcgtttagcggggcatcccttcaatctcaactctcgcgaccaattggagaaagtgctctttgatgaattaggtttaacccctgtcacgcgtacagagaagaccggcaaacgttccacttcggcaggtgccttggaagcacttcgtggtgctcacccgatcgtcgagttgattttgcagtaccgcgagctcagcaaactcaaatcaacctatcttgataggttacctcgtcttgttcatccacgtacgggtcgtttacacacccgcttcaatcaaacggcgacagccaccgggcgcttgtcgtcgagtgacccgaacctccagaatattccagtgcgcacgccgctgggccaacgcattcgtaaagcgtttgttgcggaagaaggttggttattacttgcggccgattactcccagatcgaacttcgtgtattggcgcatctctctggcgacgagaatcttaaacgcgtgtttcgcgaaggcaaggatattcacactgaaaccgcagcctggatgttcgggctggacccagccttagtggaccccaagatgcgtcgtgccgccaagaccgtcaactttggcgtactctatggtatgtcagcacatcgtcttagtcaggaattgggcattgactacaaagaagctgaagcgtttatcgagcgctatttccaatcctttccgaaagttcgcgcgtggattgaacgtaccctcgaagaaggtcgcactcgcggctatgtggaaacgttattcgggcgtcgtcgctacgttccagatcttgcatctcgtgtccgctcagtgcgcgaagctgctgagcgtatggcctggaatatgcctgttcagggaacagcggcggacctcatgaagatcgccatggtgaaattgtttccgcgcttgaaacccttaggagcccaccttcttttacaggtgcatgatgaattggtcttggaagtacccgaggatcgcgcagaagaagccaaagcactcgtgaaagaggttatggaaaacgcgtatccgttagatgttccgttggaggtcgaagtgggtgtaggccgtgattggcttgaagcgaaacaagactaatga

SEQ ID NO: 398 - protein, 844 aa, synthetic construct
  REGION 1..844: note = DNA Polymerase Variant
MHHHHHHGGSGMLPLFDLEEPPKRVLLVDGHHLAYRTFYALSLTTSRGEPVQMVYGFARSLLKALKEDGQAVVVVFDAKAPSFRHEAYEAYKAGRAPTPEDFPRQLALVKRLVDLLGLVRLEAPGYEADDVLGTLAKKAEREGMEVCILTGDRDFFQLLSEKVSVLLPDGTLVTPKDLQEKYGVPPERWVDFRALTGDRSDNIPGVAGIGEKTALRLLAEWGSVENLLKNLDRVKPDSLRRKIEAHLEDLRLSLDLVRIRTDLPLEVDFKALRRRTPDLEGLRAFLEELEFGSLLHEFGLLGGEKPREEAPWPPPEGAFVGFLLSRKEPMWAELLALAAAAEGRVHRATSPVEALADLKEARGFLAKDLAVLALREGVALDPTDDPLLVAYLLDPANTNPEGIARRYGGEFTEDAAERALLSERLFQTLFPRLSEKLLWLYQEVERPLSRVLAHMEARGVRLDVPLLEALSFELEKELERLEGEVFRLAGHPFNLNSRDQLEKVLFDELGLTPVTRTEKTGKRSTSAGALEALRGAHPIVELILQYRELSKLKSTYLDRLPRLVHPRTGRLHTRFNQTATATGRLSSSDPNLQNIPVRTPLGQRIRKAFVAEEGWLLLAADYSQIELRVLAHLSGDENLKRVFREGKDIHTETAAWMFGLDPALVDPKMRRAAKTVNFGVLYGMSAHRLSQELGIDYKEAEAFIERYFQSFPKVRAWIERTLEEGRTRGYVETLFGRRRYVPDLASRVRSVREAAERMAWNMPVQGTAADLMKIAMVKLFPRLKPLGAHLLLQVHDELVLEVPEDRAEEAKALVKEVMENAYPLDVPLEVEVGVGRDWLEAKQD

SEQ ID NO: 399 - DNA, 2538 bp, synthetic construct
  misc_feature 1..2538: note = DNA Polymerase Variant
  source 1..2538: mol_type = other DNA
atgcaccatcatcatcatcatggcggtagcggcatgttaccgctgtttgatttggaagaaccaccaaaacgcgtgctgcttgttgacggccatcatctggcgtatcgtaccttctacgcactgagccttacgacctcacgtggtgagcctgtccagatggtgtatgggtttgctcgctccctgctgaaagccctgaaggaagatggtcaagccgtagtagtggttttcgatgcgaaagcaccgtcgtttcgtcacgaagcgtacgaggcctataaagctggccgcgcaccgaccccggaagactttccgcgtcagttagcgctcgtcaaacgcctcgtggatttgctgggattagttcgcttggaagctcctggctacgaggcggacgacgtgctcggtacactggccaagaaagcagaacgtgaaggcatggaggtctgcattcttaccggtgatcgcgatttcttccagctgctgtctgagaaagtgagcgttttgctgcccgatggcacgttagtaaccccgaaagatgtccaagagaaatatggagttccgccagaacgttgggtggactttcgcgcactgactggtgatcgttcagacaacatcccgggcgttgccgggattggtgaaaagacggcgctgcgcctgctggcagaatggggctcggtggaaaatctgctcaagaaccttgatcgtgtgaaacctgatagcttacgccgcaagatcgaagcccacctggaagacttgcgtctgagtctggatcttgcgcgtattcgcaccgatctgccgttggaagtagactttaaagctctgcgtcgtcgcacacccgatttagaggggttacgcgcgttcctcgaagaactggagtttggctccctgctgcatgaattcggtttgttgggcggagagaaaccgcgtgaagaagcaccatggccgccgcccgaaggtgcctttgtcggctttcttctgtcacgcaaagagccaatgtgggcggaactgttagctcttgcagccgccgcggaagggcgtgttcaccgcgcgacctctcctgtcgaggccctcgctgacctcaaagaagcacgtggtttcttggcgaaagatttagccgtgcttgcattacgcgaaggcgttgcgctcgatccgacggacgacccgcttttggtggcttatttgctcgatcctgcgaataccaacccggaaggcgtagcccgtcgttacggcggcgagtttactgaagatgcggcagaacgcgcgttgcttagcgaacgcctcttccagacgttatttccacgtctttcggagaaattactctggctctatcaggaagtcgaacgtccaattagtcgcgtgcttgcccatatggaggctcgcggtgtgcgcttagatgttccgttgttagaagcactcagcttcgagttggagaaagaactggaacgtcttgaaggcgaagtctttcgtttagcggggcatcccttcaatctcaactctcgcgaccaattggagaaagtgctctttgatgaattaggtttaacccctgtcacgcgtacagagaagaccggcaaacgttccacttcggcagccgccttggaagcacttcgtggtgctcacccgatcgtcgagttgattttgcagtaccgcgagctcagcaaactcaaatcaacctatcttgataggttacctcgtcttgttcatccacgtacgggtcgtttacacacccgcttcaatcaaacggcgacagccaccgggcgcttgtcgtcgagtgacccgaacctccagaatattccagtgcgcacgccgctgggccaacgcattcgtaaagcgtttgttgcggaagaaggttggttattacttgcggccgattactcccagatcgaacttcgtgtattggcgcatctctctggcgacgagaatcttaaacgcgtgtttcgcgaaggcaaggatattcacactgaaaccgcagcctggatgttcgggcttgacccagccttagtggaccccaagatgcgtcgtgccgccaagaccgtcaactttggcgtactctatggtatgtcagcacatcgtcttagtcaggaattgggcattgactacaaagaagctgaagcgtttatcgagcgctatttccaatcctttccgaaagttcgcgcgtggattgaacgtaccctcgaagaaggtcgcactcgcggctatgtggaaacgttattcgggcgtcgtcgctacgttccagatcttgcatctcgtgtccgctcagtgcgcgaagctgctgagcgtatggcctggaatatgcctgttcagggaacagcggcggacctcatgaagatcgccatggtgaaattgtttccgcgcttgaaacccttaggagcccaccttcttttacaggtgcatgatgaattggtcttggaagtacccgaggatcgcgcagaagaagccaaagcactcgtgaaagaggttatggaaaacgcgtatccgttagatgttccgttggaggtcgaagtgggtgtaggccgtgattggcttgaagcgaaacaagactaatga

SEQ ID NO: 400 - protein, 844 aa, synthetic construct
  REGION 1..844: note = DNA Polymerase Variant
MHHHHHHGGSGMLPLFDLEEPPKRVLLVDGHHLAYRTFYALSLTTSRGEPVQMVYGFARSLLKALKEDGQAVVVVFDAKAPSFRHEAYEAYKAGRAPTPEDFPRQLALVKRLVDLLGLVRLEAPGYEADDVLGTLAKKAEREGMEVCILTGDRDFFQLLSEKVSVLLPDGTLVTPKDVQEKYGVPPERWVDFRALTGDRSDNIPGVAGIGEKTALRLLAEWGSVENLLKNLDRVKPDSLRRKIEAHLEDLRLSLDLARIRTDLPLEVDFKALRRRTPDLEGLRAFLEELEFGSLLHEFGLLGGEKPREEAPWPPPEGAFVGFLLSRKEPMWAELLALAAAAEGRVHRATSPVEALADLKEARGFLAKDLAVLALREGVALDPTDDPLLVAYLLDPANTNPEGVARRYGGEFTEDAAERALLSERLFQTLFPRLSEKLLWLYQEVERPISRVLAHMEARGVRLDVPLLEALSFELEKELERLEGEVFRLAGHPFNLNSRDQLEKVLFDELGLTPVTRTEKTGKRSTSAAALEALRGAHPIVELILQYRELSKLKSTYLDRLPRLVHPRTGRLHTRFNQTATATGRLSSSDPNLQNIPVRTPLGQRIRKAFVAEEGWLLLAADYSQIELRVLAHLSGDENLKRVFREGKDIHTETAAWMFGLDPALVDPKMRRAAKTVNFGVLYGMSAHRLSQELGIDYKEAEAFIERYFQSFPKVRAWIERTLEEGRTRGYVETLFGRRRYVPDLASRVRSVREAAERMAWNMPVQGTAADLMKIAMVKLFPRLKPLGAHLLLQVHDELVLEVPEDRAEEAKALVKEVMENAYPLDVPLEVEVGVGRDWLEAKQD

SEQ ID NO: 401 - DNA, 2538 bp, synthetic construct
  misc_feature 1..2538: note = DNA Polymerase Variant
  source 1..2538: mol_type = other DNA
atgcaccatcatcatcatcatggcggtagcggcatgttaccgctgtttgatttggaagaaccaccaaaacgcgtgctgcttgttgacggccatcatctggcgtatcgtaccttctacgcactgagccttacgacctcacgtggtgagcctgtccagatggtgtatgggtttgctcgctccctgctgaaagccctgaaggaagatggtcaagccgtagtagtggttttcgatgcgaaagcaccgtcgtttcgtcacgaagcgtacgaggcctataaagctggccgcgcaccgaccccggaagactttccgcgtcagttagcgctcgtcaaacgcctcgtggatttgctgggattagttcgcttggaagctcctggctacgaggcggacgacgtgctcggtacactggccaagaaagcagaacgtgaaggcatggaggtctgcattcttaccggtgatcgcgatttcttccagctgctgtctgagaaagtgagcgttttgctgcccgatggcacgttagtaaccccgaaagatgtccaagagaaatatggagttccgccagaacgttgggtggactttcgcgcactgactggtgatcgttcagacaacatcccgggcgttgccgggattggtgaaaagacggcgctgcgcctgctggcagaatggggctcggtggaaaatctgctcaagaaccttgatcgtgtgaaacctgatagcttacgccgcaagatcgaagcccacctggaagacttgcgtctgagtctggatcttgcgcgtattcgcaccgatctgccgttggaagtagactttaaagctctgcgtcgtcgcacacccgatttagaggggttacgcgcgttcctcgaagaactggagtttggctccctgctgcatgaattcggtttgttgggcggagagaaaccgcgtgaagaagcaccatggccgccgcccgaaggtgcctttgtcggctttcttctgtcacgcaaagagccaatgtgggcggaactgttagctcttgcagccgccgcggaagggcgtgttcaccgcgcgacctctcctgtcgaggccctcgctgacctcaaagaagcacgtggtttcttggcgaaagatttagccgtgcttgcattacgcgaaggcgttgcgctcgatccgacggacgacccgcttttggtggcttatttgctcgatcctgcgaataccaacccggaaggcgtagcccgtcgttacggcggcgagtttactgaagatgcggcagaacgcgcgttgcttagcgaacgcctcttccagacgttatttccacgtctttcggagaaattactctggctctatcaggaagtcgaacgtccattgagtcgcgtgcttgcccatatggaggctcgcggtgtgcgcttagatgttccgttgttagaagcactcagcttcgagttggagaaagaactggaacgtcttgaaggcgaagtctttcgtttagcggggcatcccttcaatctcaactctcgcgaccaattggagaaagtgctctttgatgaattaggtttaacccctgtcacgcgtacagagaagaccggcaaacgttccacttcggcagccgccttggaagcacttcgtggtgctcacccgatcgtcgagttgattttgcagtaccgcgagctcagcaaactcaaatcaacctatcttgataggttacctcgtcttgttcatccacgtacgggtcgtttacacacccgcttcaattctacggcgacagccaccgggcgcttgtcgtcgagtgacccgaacctccagaatattccagtgcgcacgccgctgggccaacgcattcgtaaagcgtttgttgcggaagaaggttggttattacttgcggccgattactcccagatcgaacttcgtgtattggcgcatctctctggcgacgagaatcttaaacgcgtgtttcgcgaaggcaaggatattcacactgaaaccgcagcctggatgttcgggcttgacccagccttagtggaccccaagatgcgtcgtgccgccaagaccgtcaactttggcgtactctatggtatgtcagcacatcgtcttagtcaggaattgggcattgactacaaagaagctgaagcgtttatcgagcgctatttccaatcctttccgaaagttcgcgcgtggattgaacgtaccctcgaagaaggtcgcactcgcggctatgtggaaacgttattcgggcgtcgtcgctacgttccagatcttgcatctcgtgtccgctcagtgcgcgaagctgctgagcgtatggcctggaatatgcctgttcagggaacagcggcggacctcatgaagatcgccatggtgaaattgtttccgcgcttgaaacccttaggagcccaccttcttttacaggtgcatgatgaattggtcttggaagtacccgaggatcgcgcagaagaagccaaagcactcgtgaaagaggttatggaaaacgcgtatccgttagatgttccgttggaggtcgaagtgggtgtaggccgtgattggcttgaagcgaaacaagactaatga

SEQ ID NO: 402 - protein, 844 aa, synthetic construct
  REGION 1..844: note = DNA Polymerase Variant
MHHHHHHGGSGMLPLFDLEEPPKRVLLVDGHHLAYRTFYALSLTTSRGEPVQMVYGFARSLLKALKEDGQAVVVVFDAKAPSFRHEAYEAYKAGRAPTPEDFPRQLALVKRLVDLLGLVRLEAPGYEADDVLGTLAKKAEREGMEVCILTGDRDFFQLLSEKVSVLLPDGTLVTPKDVQEKYGVPPERWVDFRALTGDRSDNIPGVAGIGEKTALRLLAEWGSVENLLKNLDRVKPDSLRRKIEAHLEDLRLSLDLARIRTDLPLEVDFKALRRRTPDLEGLRAFLEELEFGSLLHEFGLLGGEKPREEAPWPPPEGAFVGFLLSRKEPMWAELLALAAAAEGRVHRATSPVEALADLKEARGFLAKDLAVLALREGVALDPTDDPLLVAYLLDPANTNPEGVARRYGGEFTEDAAERALLSERLFQTLFPRLSEKLLWLYQEVERPLSRVLAHMEARGVRLDVPLLEALSFELEKELERLEGEVFRLAGHPFNLNSRDQLEKVLFDELGLTPVTRTEKTGKRSTSAAALEALRGAHPIVELILQYRELSKLKSTYLDRLPRLVHPRTGRLHTRFNSTATATGRLSSSDPNLQNIPVRTPLGQRIRKAFVAEEGWLLLAADYSQIELRVLAHLSGDENLKRVFREGKDIHTETAAWMFGLDPALVDPKMRRAAKTVNFGVLYGMSAHRLSQELGIDYKEAEAFIERYFQSFPKVRAWIERTLEEGRTRGYVETLFGRRRYVPDLASRVRSVREAAERMAWNMPVQGTAADLMKIAMVKLFPRLKPLGAHLLLQVHDELVLEVPEDRAEEAKALVKEVMENAYPLDVPLEVEVGVGRDWLEAKQD

SEQ ID NO: 403 - DNA, 2538 bp, synthetic construct
  misc_feature 1..2538: note = DNA Polymerase Variant
  source 1..2538: mol_type = other DNA
atgcaccatcatcatcatcatggcggtagcggcatgttaccgctgtttgatttggaagaaccaccaaaacgcgtgctgcttgttgacggccatcatctggcgtatcgtaccttctacgcactgagccttacgacctcacgtggtgagcctgtccagatggtgtatgggtttgctcgctccctgctgaaagccctgaaggaagatggtcaagccgtagtagtggttttcgatgcgaaagcaccgtcgtttcgtcacgaagcgtacgaggcctataaagctggccgcgcaccgaccccggaagactttccgcgtcagttagcgctcgtcaaacgcctcgtggatttgctgggattagttcgcttggaagctcctggctacgaggcggacgacgtgctcggtacactggccaagaaagcagaacgtgaaggcatggaggtctgcattcttaccggtgatcgcgatttcttccagctgctgtctgagaaagtgagcgttttgctgcccgatggcacgttagtaaccccgaaagatgtccaagagaaatatggagttccgccagaacgttgggtggactttcgcgcactgactggtgatcgttcagacaacatcccgggcgttgccgggattggtgaaaagacggcgctgcgcctgctggcagaatggggctcggtggaaaatctgctcaagaaccttgatcgtgtgaaacctgatagcttacgccgcaagatcgaagcccacctggaagacttgcgtctgagtctggatcttgcgcgtattcgcaccgatctgccgttggaagtagactttaaagctctgcgtcgtcgcacacccgatttagaggggttacgcgcgttcctcgaagaactggagtttggctccctgctgcatgaattcggtttgttgggcggagagaaaccgcgtgaagaagcaccatggccgccgcccgaaggtgcctttgtcggctttcttctgtcacgcaaagagccaatgtgggcggaactgttagctcttgcagccgccgcggaagggcgtgttcaccgcgcgacctctcctgtcgaggccctcgctgacctcaaagaagcacgtggtttcttggcgaaagatttagccgtgcttgcattacgcgaaggcgttgcgctcgatccgacggacgacccgcttttggtggcttatttgctcgatggtgcgaataccaacccggaaggcgtagcccgtcgttacggcggcgagtttactgaagatgcggcagaacgcgcgttgcttagcgaacgcctcttccagacgttatttccacgtctttcggagaaattactctggctctatcaggaagtcgaacgtccattgagtcgcgtgcttgcccatatggaggctcgcggtgtgcgcttagatgttccgttgttagaagcactcagcttcgagttggagaaagaactggaacgtcttgaaggcgaagtctttcgtttagcggggcatcccttcaatctcaactctcgcgaccaattggagaaagtgctctttgatgaattaggtttaacccctgtcacgcgtacagagaagaccggcaaacgttccacttcggcagccgccttggaagcacttcgtggtgctcacccgatcgtcgagttgattttgcagtaccgcgagctcagcaaactcaaatcaacctatcttgataggttacctcgtcttgttcatccacgtacgggtcgtttacacacccgcttcaatcaaacggcgacagccaccgggcgcttgtcgtcgagtgacccgaacctccagaatattccagtgcgcacgccgctgggccaacgcattcgtaaagcgtttgttgcggaagaaggttggttattacttgcggccgattactcccagatcgaacttcgtgtattggcgcatctctctggcgacgagaatcttaaacgcgtgtttcgcgaaggcaaggatattcacactgaaaccgcagcctggatgttcgggcttgacccagccttagtggaccccaagatgcgtcgtgccgccaagaccgtcaactttggcgtactctatggtatgtcagcacatcgtcttagtcaggaattgggcattgactacaaagaagctgaagcgtttatcgagcgctatttccaatcctttccgaaagttcgcgcgtggattgaacgtaccctcgaagaaggtcgcactcgcggctatgtggaaacgttattcgggcgtcgtcgctacgttccagatcttgcatctcgtgtccgctcagtgcgcgaagctgctgagcgtatggcctggaatatgcctgttcagggaacagcggcggacctcatgaagatcgccatggtgaaattgtttccgcgcttgaaacccttaggagcccaccttcttttacaggtgcatgatgaattggtcttggaagtacccgaggatcgcgcagaagaagccaaagcactcgtgaaagaggttatggaaaacgcgtatccgttagatgttccgttggaggtcgaagtgggtgtaggccgtgattggcttgaagcgaaacaagactaatga

SEQ ID NO: 404 - protein, 844 aa, synthetic construct
  REGION 1..844: note = DNA Polymerase Variant
MHHHHHHGGSGMLPLFDLEEPPKRVLLVDGHHLAYRTFYALSLTTSRGEPVQMVYGFARSLLKALKEDGQAVVVVFDAKAPSFRHEAYEAYKAGRAPTPEDFPRQLALVKRLVDLLGLVRLEAPGYEADDVLGTLAKKAEREGMEVCILTGDRDFFQLLSEKVSVLLPDGTLVTPKDVQEKYGVPPERWVDFRALTGDRSDNIPGVAGIGEKTALRLLAEWGSVENLLKNLDRVKPDSLRRKIEAHLEDLRLSLDLARIRTDLPLEVDFKALRRRTPDLEGLRAFLEELEFGSLLHEFGLLGGEKPREEAPWPPPEGAFVGFLLSRKEPMWAELLALAAAAEGRVHRATSPVEALADLKEARGFLAKDLAVLALREGVALDPTDDPLLVAYLLDGANTNPEGVARRYGGEFTEDAAERALLSERLFQTLFPRLSEKLLWLYQEVERPLSRVLAHMEARGVRLDVPLLEALSFELEKELERLEGEVFRLAGHPFNLNSRDQLEKVLFDELGLTPVTRTEKTGKRSTSAAALEALRGAHPIVELILQYRELSKLKSTYLDRLPRLVHPRTGRLHTRFNQTATATGRLSSSDPNLQNIPVRTPLGQRIRKAFVAEEGWLLLAADYSQIELRVLAHLSGDENLKRVFREGKDIHTETAAWMFGLDPALVDPKMRRAAKTVNFGVLYGMSAHRLSQELGIDYKEAEAFIERYFQSFPKVRAWIERTLEEGRTRGYVETLFGRRRYVPDLASRVRSVREAAERMAWNMPVQGTAADLMKIAMVKLFPRLKPLGAHLLLQVHDELVLEVPEDRAEEAKALVKEVMENAYPLDVPLEVEVGVGRDWLEAKQD

SEQ ID NO: 405 - DNA, 2538 bp, synthetic construct
  misc_feature 1..2538: note = DNA Polymerase Variant
  source 1..2538: mol_type = other DNA
atgcaccatcatcatcatcatggcggtagcggcatgttaccgctgtttgatttggaagaaccaccaaaacgcgtgctgcttgttgacggccatcatctggcgtatcgtaccttctacgcactgagccttacgacctcacgtggtgagcctgtccagatggtgtatgggtttgctcgctccctgctgaaagccctgaaggaagatggtcaagccgtagtagtggttttcgatgcgaaagcaccgtcgtttcgtcacgaagcgtacgaggcctataaagctggccgcgcaccgaccccggaagactttccgcgtcagttagcgctcgtcaaacgcctcgtggatttgctgggattagttcgcttggaagctcctggctacgaggcggacgacgtgctcggtacactggccaagaaagcagaacgtgaaggcatggaggtctgcattcttaccggtgatcgcgatttcttccagctgctgtctgagaaagtgagcgttttgctgcccgatggcacgttagtaaccccgaaagatgtccaagagaaatatggagttccgccagaacgttgggtggactttcgcgcactgactggtgatcgttcagacaacatcccgggcgttgccgggattggtgaaaagacggcgctgcgcctgctggcagaatggggctcggtggaaaatctgctcaagaaccttgatcgtgtgaaacctgatagcttacgccgcaagatcgaagcccacctggaagacttgcgtctgagtctggatcttgcgcgtattcgcaccgatctgccgttggaagtagactttaaagctctgcgtcgtcgcacacccgatttagaggggttacgcgcgttcctcgaagaactggagtttggctccctgctgcatgaattcggtttgttgggcggagagaaaccgcgtgaagaagcaccatggccgccgcccgaaggtgcctttgtcggctttcttctgtcacgcaaagagccaatgtgggcggaactgttagctcttgcagccgccgcggaagggcgtgttcaccgcgcgacctctcctgtcgaggccctcgctgacctcaaagaagcacgtggtttcttggcgaaagatttagccgtgcttgcattacgcgaaggcgttgcgctcgatccgacggacgacccgcttttggtggcttatttgctcgatcctgcgaataccaacccggaaggcgtagcccgtcgttacggcggcgagtttactgaagatgcggcagaacgcgcgttgcttagcgaacgcctcttccagacgttatttccacgtctttcggagaaattactctggctctatcaggaagtcgaacgtccattgagtcgcgtgcttgcccatatggaggctcgcggtgtgcgcttagatgttccgttgttagaagcactcagcttcgagttggagaaagaactggaacgtcttgaaggcgaagtctttcgtttagcggggcatcccttcaatctcaactctcgcgaccaattggagaaagtgctctttgatgaattaggtttaacccctgtcacgcgtacagagaagaccggcaaacgttccacttcggcagccgccttggaagcacttcgtggtgctcacccgatcgtcgagttgattttgcagtaccgcgagctcagcaaactcaaatcaacctatcttgataggttacctcgtcttgttcatccacgtacgggtcgtttacacacccgcttcaatcaaacggcgacagccaccgggcgcttgtcgtcgagtgacccgaacctccagaatattccagtgcgcacgccgctgggccaacgcattcgtaaagcgtttgttgcggaagaaggttggttattacttgcggccgattactcccagatcgaacttcgtgtattggcgcatctctctggcgacgagaatcttaaacgcgtgtttcgcgaaggcaaggatattcacactgaaaccgcagcctggatgttcgggcttgacccagccttagtggaccccaagatgcgtcgtgccgccaagaccgtcaactttggcgtactctatggtatgtcagcacatcgtcttagtcaggaattgggcattgactacaaagaagctgaagcgtttatcgagcgctatttccaatcctttccgaaagttcgcgcgtggattgaacgtaccctcgaagaaggtcgcactcgcggctatgtggaaacgttattcgggcgtcgtcgctacgttccagatcttgcatctcgtgtccgctcagtgcgcgaagctgctgagcgtatggcctggaatatgcctgttcagggaacagcgcaggacctcatgaagatcgccatggtgaaattgtttccgcgcttgaaacccttaggagcccaccttcttttacaggtgcatgatgaattggtcttggaagtacccgaggatcgcgcagaagaagccaaagcactcgtgaaagaggttatggaaaacgcgtatccgttagatgttccgttggaggtcgaagtgggtgtaggccgtgattggcttgaagcgaaacaagactaatga

SEQ ID NO: 406 - protein, 844 aa, synthetic construct
  REGION 1..844: note = DNA Polymerase Variant
MHHHHHHGGSGMLPLFDLEEPPKRVLLVDGHHLAYRTFYALSLTTSRGEPVQMVYGFARSLLKALKEDGQAVVVVFDAKAPSFRHEAYEAYKAGRAPTPEDFPRQLALVKRLVDLLGLVRLEAPGYEADDVLGTLAKKAEREGMEVCILTGDRDFFQLLSEKVSVLLPDGTLVTPKDVQEKYGVPPERWVDFRALTGDRSDNIPGVAGIGEKTALRLLAEWGSVENLLKNLDRVKPDSLRRKIEAHLEDLRLSLDLARIRTDLPLEVDFKALRRRTPDLEGLRAFLEELEFGSLLHEFGLLGGEKPREEAPWPPPEGAFVGFLLSRKEPMWAELLALAAAAEGRVHRATSPVEALADLKEARGFLAKDLAVLALREGVALDPTDDPLLVAYLLDPANTNPEGVARRYGGEFTEDAAERALLSERLFQTLFPRLSEKLLWLYQEVERPLSRVLAHMEARGVRLDVPLLEALSFELEKELERLEGEVFRLAGHPFNLNSRDQLEKVLFDELGLTPVTRTEKTGKRSTSAAALEALRGAHPIVELILQYRELSKLKSTYLDRLPRLVHPRTGRLHTRFNQTATATGRLSSSDPNLQNIPVRTPLGQRIRKAFVAEEGWLLLAADYSQIELRVLAHLSGDENLKRVFREGKDIHTETAAWMFGLDPALVDPKMRRAAKTVNFGVLYGMSAHRLSQELGIDYKEAEAFIERYFQSFPKVRAWIERTLEEGRTRGYVETLFGRRRYVPDLASRVRSVREAAERMAWNMPVQGTAQDLMKIAMVKLFPRLKPLGAHLLLQVHDELVLEVPEDRAEEAKALVKEVMENAYPLDVPLEVEVGVGRDWLEAKQD

SEQ ID NO: 407 - DNA, 2538 bp, synthetic construct
  misc_feature 1..2538: note = DNA Polymerase Variant
  source 1..2538: mol_type = other DNA
atgcaccatcatcatcatcatggcggtagcggcatgttaccgctgtttgatttggaagaaccaccaaaacgcgtgctgcttgttgacggccatcatctggcgtatcgtaccttctacgcactgagccttacgacctcacgtggtgagcctgtccagatggtgtatgggtttgctcgctccctgctgaaagccctgaaggaagatggtcaagccgtagtagtggttttcgatgcgaaagcaccgtcgtttcgtcacgaagcgtacgaggcctataaagctggccgcgcaccgaccccggaagactttccgcgtcagttagcgctcgtcaaacgcctcgtggatttgctgggattagttcgcttggaagctcctggctacgaggcggacgacgtgctcggtacactggccaagaaagcagaacgtgaaggcatggaggtctgcattcttaccggtgatcgcgatttcttccagctgctgtctgagaaagtgagcgttttgctgcccgatggcacgttagtaaccccgaaagatgtccaagagaaatatggagttccgccagaacgttgggtggactttcgcgcactgactggtgatcgttcagacaacatcccgggcgttgccgggattggtgaaaagacggcgctgcgcctgctggcagaatggggctcggtggaaaatctgctcaagaaccttgatcgtgtgaaacctgatagcttacgccgcaagatcgaagcccacctggaagacttgcgtctgagtctggatcttgcgcgtattcgcaccgatctgccgttggaagtagactttaaagctctgcgtcgtcgcacacccgatttagaggggttacgcgcgttcctcgaagaactggagtttggctccctgctgcatgaattcggtttgttgggcggagagaaaccgcgtgaagaagcaccatggccgccgcccgaaggtgcctttgtcggctttcttctgtcacgcaaagagccaatgtgggcggaactgttagctcttgcagccgccgcggaagggcgtgttcaccgcgcgacctctcctgtcgaggccctcgctgacctcaaagaagcacgtggtttcttggcgaaagatttagccgtgcttgcattacgcgaaggcgttgcgctcgatccgacggacgacccgcttttggtggcttatttgctcgatcctgcgaataccaacccggaaggcgtagcccgtcgttacggcggcgagtttactgaagatgcggcagaacgcgcgttgcttagcgaacgcctcttccagacgttatttccacgtctttcggagaaattactctggctctatcaggaagtcgaacgtccattgagtcgcgtgcttgcccatatggaggctcgcggtgtgcgcttagatgttccgttgttagaagcactcagcttcgagttggttaaagaactggaacgtcttgaaggcgaagtctttcgtttagcggggcatcccttcaatctcaactctcgcgaccaattggagaaagtgctctttgatgaattaggtttaacccctgtcacgcgtacagagaagaccggcaaacgttccacttcggcagccgccttggaagcacttcgtggtgctcacccgatcgtcgagttgattttgcagtaccgcgagctcagcaaactcaaatcaacctatcttgataggttacctcgtcttgttcatccacgtacgggtcgtttacacacccgcttcaatcaaacggcgacagccaccgggcgcttgtcgtcgagtgacccgaacctccagaatattccagtgcgcacgccgctgggccaacgcattcgtaaagcgtttgttgcggaagaaggttggttattacttgcggccgattactcccagatcgaacttcgtgtattggcgcatctctctggcgacgagaatcttaaacgcgtgtttcgcgaaggcaaggatattcacactgaaaccgcagcctggatgttcgggcttgacccagccttagtggaccccaagatgcgtcgtgccgccaagaccgtcaactttggcgtactctatggtatgtcagcacatcgtcttagtcaggaattgggcattgactacaaagaagctgaagcgtttatcgagcgctatttccaatcctttccgaaagttcgcgcgtggattgaacgtaccctcgaagaaggtcgcactcgcggctatgtggaaacgttattcgggcgtcgtcgctacgttccagatcttgcatctcgtgtccgctcagtgcgcgaagctgctgagcgtatggcctggaatatgcctgttcagggaacagcggcggacctcatgaagatcgccatggtgaaattgtttccgcgcttgaaacccttaggagcccaccttcttttacaggtgcatgatgaattggtcttggaagtacccgaggatcgcgcagaagaagccaaagcactcgtgaaagaggttatggaaaacgcgtatccgttagatgttccgttggaggtcgaagtgggtgtaggccgtgattggcttgaagcgaaacaagactaatga

SEQ ID NO: 408 - protein, 844 aa, synthetic construct
  REGION 1..844: note = DNA Polymerase Variant
MHHHHHHGGSGMLPLFDLEEPPKRVLLVDGHHLAYRTFYALSLTTSRGEPVQMVYGFARSLLKALKEDGQAVVVVFDAKAPSFRHEAYEAYKAGRAPTPEDFPRQLALVKRLVDLLGLVRLEAPGYEADDVLGTLAKKAEREGMEVCILTGDRDFFQLLSEKVSVLLPDGTLVTPKDVQEKYGVPPERWVDFRALTGDRSDNIPGVAGIGEKTALRLLAEWGSVENLLKNLDRVKPDSLRRKIEAHLEDLRLSLDLARIRTDLPLEVDFKALRRRTPDLEGLRAFLEELEFGSLLHEFGLLGGEKPREEAPWPPPEGAFVGFLLSRKEPMWAELLALAAAAEGRVHRATSPVEALADLKEARGFLAKDLAVLALREGVALDPTDDPLLVAYLLDPANTNPEGVARRYGGEFTEDAAERALLSERLFQTLFPRLSEKLLWLYQEVERPLSRVLAHMEARGVRLDVPLLEALSFELVKELERLEGEVFRLAGHPFNLNSRDQLEKVLFDELGLTPVTRTEKTGKRSTSAAALEALRGAHPIVELILQYRELSKLKSTYLDRLPRLVHPRTGRLHTRFNQTATATGRLSSSDPNLQNIPVRTPLGQRIRKAFVAEEGWLLLAADYSQIELRVLAHLSGDENLKRVFREGKDIHTETAAWMFGLDPALVDPKMRRAAKTVNFGVLYGMSAHRLSQELGIDYKEAEAFIERYFQSFPKVRAWIERTLEEGRTRGYVETLFGRRRYVPDLASRVRSVREAAERMAWNMPVQGTAADLMKIAMVKLFPRLKPLGAHLLLQVHDELVLEVPEDRAEEAKALVKEVMENAYPLDVPLEVEVGVGRDWLEAKQD

SEQ ID NO: 409 - DNA, 2538 bp, synthetic construct
  misc_feature 1..2538: note = DNA Polymerase Variant
  source 1..2538: mol_type = other DNA
atgcaccatcatcatcatcatggcggtagcggcatgttaccgctgtttgatttggaagaaccaccaaaacgcgtgctgcttgttgacggccatcatctggcgtatcgtaccttctacgcactgagccttacgacctcacgtggtgagcctgtccagatggtgtatgggtttgctcgctccctgctgaaagccctgaaggaagatggtcaagccgtagtagtggttttcgatgcgaaagcaccgtcgtttcgtcacgaagcgtacgaggcctataaagctggccgcgcaccgaccccggaagactttccgcgtcagttagcgctcgtcaaacgcctcgtggatttgctgggattagttcgcttggaagctcctggctacgaggcggacgacgtgctcggtacactggccaagaaagcagaacgtgaaggcatggaggtctgcattcttaccggtgatcgcgatttcttccagctgctgtctgagaaagtgagcgttttgctgcccgatggcacgttagtaaccccgaaagatgtccaagagaaatatggagttccgccagaacgttgggtggactttcgcgcactgactggtgatcgttcagacaacatcccgggcgttgccgggattggtgaaaagacggcgctgcgcctgctggcagaatggggctcggtggaaaatctgctcaagaaccttgatcgtgtgaaacctgatagcttacgccgcaagatcgaagcccacctggaagacttgcgtctgagtctggatcttgcgcgtattcgcaccgatctgccgttggaagtagactttaaagctctgcgtcgtcgcacacccgatttagaggggttacgcgcgttcctcgaagaactggagtttggctccctgctgcatgaattcggtttgttgggcggagagaaaccgcgtgaagaagcaccatggccgccgcccgaaggtgcctttgtcggctttcttctgtcacgcaaagagccaatgtgggcggaactgttagctcttgcagccgccgcggaagggcgtgttcaccgcgcgacctctcctgtcgaggccctcgctgacctcaaagaagcacgtggtttcttggcgaaagatttagccgtgcttgcattacgcgaaggcgttgcgctcgatccgacggacgacccgcttttggtggcttatttgctcgatcctgcgaataccaacccggaaggcgtagcccgtcgttacggcggcgagtttactgaagatgcggcagaacgcgcgttgcttagcgaacgcctcttccagacgttatttccacgtctttcggagaaattactctggctctatcaggaagtcgaacgtccatgtagtcgcgtgcttgcccatatggaggctcgcggtgtgcgcttagatgttccgttgttagaagcactcagcttcgagttggagaaagaactggaacgtcttgaaggcgaagtctttcgtttagcggggcatcccttcaatctcaactctcgcgaccaattggagaaagtgctctttgatgaattaggtttaacccctgtcacgcgtacagagaagaccggcaaacgttccacttcggcagccgccttggaagcacttcgtggtgctcacccgatcgtcgagttgattttgcagtaccgcgagctcagcaaactcaaatcaacctatcttgataggttacctcgtcttgttcatccacgtacgggtcgtttacacacccgcttcaatcaaacggcgacagccaccgggcgcttgtcgtcgagtgacccgaacctccagaatattccagtgcgcacgccgctgggccaacgcattcgtaaagcgtttgttgcggaagaaggttggttattacttgcggccgattactcccagatcgaacttcgtgtattggcgcatctctctggcgacgagaatcttaaacgcgtgtttcgcgaaggcaaggatattcacactgaaaccgcagcctggatgttcgggcttgacccagccttagtggaccccaagatgcgtcgtgccgccaagaccgtcaactttggcgtactctatggtatgtcagcacatcgtcttagtcaggaattgggcattgactacaaagaagctgaagcgtttatcgagcgctatttccaatcctttccgaaagttcgcgcgtggattgaacgtaccctcgaagaaggtcgcactcgcggctatgtggaaacgttattcgggcgtcgtcgctacgttccagatcttgcatctcgtgtccgctcagtgcgcgaagctgctgagcgtatggcctggaatatgcctgttcagggaacagcggcggacctcatgaagatcgccatggtgaaattgtttccgcgcttgaaacccttaggagcccaccttcttttacaggtgcatgatgaattggtcttggaagtacccgaggatcgcgcagaagaagccaaagcactcgtgaaagaggttatggaaaacgcgtatccgttagatgttccgttggaggtcgaagtgggtgtaggccgtgattggcttgaagcgaaacaagactaatga

SEQ ID NO: 410 - protein, 844 aa, synthetic construct
  REGION 1..844: note = DNA Polymerase Variant
MHHHHHHGGSGMLPLFDLEEPPKRVLLVDGHHLAYRTFYALSLTTSRGEPVQMVYGFARSLLKALKEDGQAVVVVFDAKAPSFRHEAYEAYKAGRAPTPEDFPRQLALVKRLVDLLGLVRLEAPGYEADDVLGTLAKKAEREGMEVCILTGDRDFFQLLSEKVSVLLPDGTLVTPKDVQEKYGVPPERWVDFRALTGDRSDNIPGVAGIGEKTALRLLAEWGSVENLLKNLDRVKPDSLRRKIEAHLEDLRLSLDLARIRTDLPLEVDFKALRRRTPDLEGLRAFLEELEFGSLLHEFGLLGGEKPREEAPWPPPEGAFVGFLLSRKEPMWAELLALAAAAEGRVHRATSPVEALADLKEARGFLAKDLAVLALREGVALDPTDDPLLVAYLLDPANTNPEGVARRYGGEFTEDAAERALLSERLFQTLFPRLSEKLLWLYQEVERPCSRVLAHMEARGVRLDVPLLEALSFELEKELERLEGEVFRLAGHPFNLNSRDQLEKVLFDELGLTPVTRTEKTGKRSTSAAALEALRGAHPIVELILQYRELSKLKSTYLDRLPRLVHPRTGRLHTRFNQTATATGRLSSSDPNLQNIPVRTPLGQRIRKAFVAEEGWLLLAADYSQIELRVLAHLSGDENLKRVFREGKDIHTETAAWMFGLDPALVDPKMRRAAKTVNFGVLYGMSAHRLSQELGIDYKEAEAFIERYFQSFPKVRAWIERTLEEGRTRGYVETLFGRRRYVPDLASRVRSVREAAERMAWNMPVQGTAADLMKIAMVKLFPRLKPLGAHLLLQVHDELVLEVPEDRAEEAKALVKEVMENAYPLDVPLEVEVGVGRDWLEAKQD

SEQ ID NO: 411 - DNA, 2538 bp, synthetic construct
  misc_feature 1..2538: note = DNA Polymerase Variant
  source 1..2538: mol_type = other DNA
atgcaccatcatcatcatcatggcggtagcggcatgttaccgctgtttgatttggaagaaccaccaaaacgcgtgctgcttgttgacggccatcatctggcgtatcgtaccttctacgcactgagccttacgacctcacgtggtgagcctgtccagatggtgtatgggtttgctcgctccctgctgaaagccctgaaggaagatggtcaagccgtagtagtggttttcgatgcgaaagcaccgtcgtttcgtcacgaagcgtacgaggcctataaagctggccgcgcaccgaccccggaagactttccgcgtcagttagcgctcgtcaaacgcctcgtggatttgctgggattagttcgcttggaagctcctggctacgaggcggacgacgtgctcggtacactggccaagaaagcagaacgtgaaggcatggaggtctgcattcttaccggtgatcgcgatttcttccagctgctgtctgagaaagtgagcgttttgctgcccgatggcacgttagtaaccccgaaagatgtccaagagaaatatggagttccgccagaacgttgggtggactttcgcgcactgactggtgatcgttcagacaacatcccgggcgttgccgggattggtgaaaagacggcgctgcgcctgctggcagaatggggctcggtggaaaatctgctcaagaaccttgatcgtgtgaaacctgatagcttacgccgcaagatcgaagcccacctggaagacttgcgtctgagtctggatcttgcgcgtattcgcaccgatctgccgttggaagtagactttaaagctctgcgtcgtcgcacacccgatttagaggggttacgcgcgttcctcgaagaactggagtttggctccctgctgcatgaattcggtttgttgggcggagagaaaccgcgtgaagaagcaccatggccgccgcccgaaggtgcctttgtcggctttcttctgtcacgcaaagagccaatgtgggcggaactgttagctcttgcagccgccgcggaagggcgtgttcaccgcgcgacctctcctgtcgaggccctcgctgacctcaaagaagcacgtggtttcttggcgaaagatttagccgtgcttgcattacgcgaaggcgttgcgctcgatccgacggacgacccgcttttggtggcttatttgctcgatcctgcgaataccaacccggaaggcgtagcccgtcgttacggcggcgagtttactgaagatgcggcagaacgcgcgttgcttagcgaacgcctcttccagacgttatttccacgtctttcggagaaattactctggctctatcaggaagtcgaacgtccattgagtcgcgtgcttgcccatatggaggctcgcggtgtgcgcttagatgttccgttgttagaagcactcagcttcgagttggagaaagaactggaacgtcttgaaggcgaagtctttcgtttagcggggcatcccttcaatctcaactctcgcgaccaattggagaaagtgctctttgatgaattaggtttaacccctgtcacgcgtacagagaagaccggcaaacgttccacttcggcagccgccttggaagcacttcgtggtgctcacccgatcgtcgagttgattttgcagtaccgcgagctcagcaaactcaaatcaacctatcttgataggttacctcgtcttgttcatccacgtacgggtcgtttacacacccgcttcaatcaaacggcgacagccaccgggcgcttgtcgtcgagtgacccgaacctccagaatattccagtgcgcacgccgctgggccaacgcattcgtaaagcgtttgttgcggaagaaggttggttattacttgcggccgattactcccagatcgaacttcgtgtattggcgcatctctctggcgacgagaatcttaaacgcgtgtttcgcgaaggcaaggatattcacactgaaaccgcagcctggatgttcgggcttgacccagccttagtggaccccaagatgcgtcgtgccgccaagaccgtcaactttggcgtactctatggtatgtcagcacatcgtcttagttgggaattgggcattgactacaaagaagctgaagcgtttatcgagcgctatttccaatcctttccgaaagttcgcgcgtggattgaacgtaccctcgaagaaggtcgcactcgcggctatgtggaaacgttattcgggcgtcgtcgctacgttccagatcttgcatctcgtgtccgctcagtgcgcgaagctgctgagcgtatggcctggaatatgcctgttcagggaacagcggcggacctcatgaagatcgccatggtgaaattgtttccgcgcttgaaacccttaggagcccaccttcttttacaggtgcatgatgaattggtcttggaagtacccgaggatcgcgcagaagaagccaaagcactcgtgaaagaggttatggaaaacgcgtatccgttagatgttccgttggaggtcgaagtgggtgtaggccgtgattggcttgaagcgaaacaagactaatga

SEQ ID NO: 412 - protein, 844 aa, synthetic construct
  REGION 1..844: note = DNA Polymerase Variant
MHHHHHHGGSGMLPLFDLEEPPKRVLLVDGHHLAYRTFYALSLTTSRGEPVQMVYGFARSLLKALKEDGQAVVVVFDAKAPSFRHEAYEAYKAGRAPTPEDFPRQLALVKRLVDLLGLVRLEAPGYEADDVLGTLAKKAEREGMEVCILTGDRDFFQLLSEKVSVLLPDGTLVTPKDVQEKYGVPPERWVDFRALTGDRSDNIPGVAGIGEKTALRLLAEWGSVENLLKNLDRVKPDSLRRKIEAHLEDLRLSLDLARIRTDLPLEVDFKALRRRTPDLEGLRAFLEELEFGSLLHEFGLLGGEKPREEAPWPPPEGAFVGFLLSRKEPMWAELLALAAAAEGRVHRATSPVEALADLKEARGFLAKDLAVLALREGVALDPTDDPLLVAYLLDPANTNPEGVARRYGGEFTEDAAERALLSERLFQTLFPRLSEKLLWLYQEVERPLSRVLAHMEARGVRLDVPLLEALSFELEKELERLEGEVFRLAGHPFNLNSRDQLEKVLFDELGLTPVTRTEKTGKRSTSAAALEALRGAHPIVELILQYRELSKLKSTYLDRLPRLVHPRTGRLHTRFNQTATATGRLSSSDPNLQNIPVRTPLGQRIRKAFVAEEGWLLLAADYSQIELRVLAHLSGDENLKRVFREGKDIHTETAAWMFGLDPALVDPKMRRAAKTVNFGVLYGMSAHRLSWELGIDYKEAEAFIERYFQSFPKVRAWIERTLEEGRTRGYVETLFGRRRYVPDLASRVRSVREAAERMAWNMPVQGTAADLMKIAMVKLFPRLKPLGAHLLLQVHDELVLEVPEDRAEEAKALVKEVMENAYPLDVPLEVEVGVGRDWLEAKQD

SEQ ID NO: 413 - DNA, 2538 bp, synthetic construct
  misc_feature 1..2538: note = DNA Polymerase Variant
  source 1..2538: mol_type = other DNA
atgcaccatcatcatcatcatggcggtagcggcatgttaccgctgtttgatttggaagaaccaccaaaacgcgtgctgcttgttgacggccatcatctggcgtatcgtaccttctacgcactgagccttacgacctcacgtggtgagcctgtccagatggtgtatgggtttgctcgctccctgctgaaagccctgaaggaagatggtcaagccgtagtagtggttttcgatgcgaaagcaccgtcgtttcgtcacgaagcgtacgaggcctataaagctggccgcgcaccgaccccggaagactttccgcgtcagttagcgctcgtcaaacgcctcgtggatttgctgggattagttcgcttggaagctcctggctacgaggcggacgacgtgctcggtacactggccaagaaagcagaacgtgaaggcatggaggtctgcattcttaccggtgatcgcgatttcttccagctgctgtctgagaaagtgagcgttttgctgcccgatggcacgttagtaaccccgaaagatgtccaagagaaatatggagttccgccagaacgttgggtggactttcgcgcactgactggtgatcgttcagacaacatcccgggcgttgccgggattggtgaaaagacggcgctgcgcctgctggcagaatggggctcggtggaaaatctgctcaagaaccttgatcgtgtgaaacctgatagcttacgccgcaagatcgaagcccacctggaagacttgcgtctgagtctggatcttgcgcgtattcgcaccgatctgccgttggaagtagactttaaagctctgcgtcgtcgcacacccgatttagaggggttacgcgcgttcctcgaagaactggagtttggctccctgctgcatgaattcggtttgttgggcggagagaaaccgcgtgaagaagcaccatggccgccgcccgaaggtgcctttgtcggctttcttctgtcacgcaaagagccaatgtgggcggaactgttagctcttgcagccgccgcggaagggcgtgttcaccgcgcgacctctcctgtcgaggccctcgctgacctcaaagaagcacgtggtttcttggcgaaagatttagccgtgcttgcattacgcgaaggcgttgcgctcgatccgacggacgacccgcttttggtggcttatttgctcgatcctgcgaataccaacccggaaggcgtagcccgtcgttacggcggcgagtttactgaagatgcggcagaacgcgcgttgcttagcgaacgcctcttccagacgttatttccacgtctttcggagaaattactctggctctatcaggaagtcgaacgtccattgagtcgcgtgcttgcccatatggaggctcgcggtgtgcgcttagatgttccgttgttagaagcactcagcttcgagttggagaaagaactggaacgtcttgaaggcgaagtctttcgtttagcggggcatcccttcaatctcaactctcgcgaccaattggagaaagtgctctttgatgaattaggtttaacccctgtcacgcgtacagagaagaccggcaaacgttccacttcggcagccgccttggaagcacttcgtggtgctcacccgatcgtcgagttgattttgcagtaccgcgagctcagcaaactcaaatcaacctatcttgataggttacctcgtcttgttcatccacgtacgggtcgtttacacacccgcttcaatcaaacggcgacagccaccgggcgcttgtcgtcgagtgacccgaacctccagaatattccagtgcgcacgccgctgggccaacgcattcgtaaagcgtttgttgcggaagaaggttggttattacttgcggccgattactcccagatcgaacttcgtgtattggcgcatctctctggcgacgagaatcttaaacgcgtgtttcgcgaaggcaaggatattcacactgaaaccgcagcctggatgttcgggcttgacccagccttagtggaccccaagatgcgtcgtgccgccaagaccgtcttgtttggcgtactctatggtatgtcagcacatcgtcttagtcaggaattgggcattgactacaaagaagctgaagcgtttatcgagcgctatttccaatcctttccgaaagttcgcgcgtggattgaacgtaccctcgaagaaggtcgcactcgcggctatgtggaaacgttattcgggcgtcgtcgctacgttccagatcttgcatctcgtgtccgctcagtgcgcgaagctgctgagcgtatggcctggaatatgcctgttcagggaacagcggcggacctcatgaagatcgccatggtgaaattgtttccgcgcttgaaacccttaggagcccaccttcttttacaggtgcatgatgaattggtcttggaagtacccgaggatcgcgcagaagaagccaaagcactcgtgaaagaggttatggaaaacgcgtatccgttagatgttccgttggaggtcgaagtgggtgtaggccgtgattggcttgaagcgaaacaagactaatga

SEQ ID NO: 414 - protein, 844 aa, synthetic construct
  REGION 1..844: note = DNA Polymerase Variant
MHHHHHHGGSGMLPLFDLEEPPKRVLLVDGHHLAYRTFYALSLTTSRGEPVQMVYGFARSLLKALKEDGQAVVVVFDAKAPSFRHEAYEAYKAGRAPTPEDFPRQLALVKRLVDLLGLVRLEAPGYEADDVLGTLAKKAEREGMEVCILTGDRDFFQLLSEKVSVLLPDGTLVTPKDVQEKYGVPPERWVDFRALTGDRSDNIPGVAGIGEKTALRLLAEWGSVENLLKNLDRVKPDSLRRKIEAHLEDLRLSLDLARIRTDLPLEVDFKALRRRTPDLEGLRAFLEELEFGSLLHEFGLLGGEKPREEAPWPPPEGAFVGFLLSRKEPMWAELLALAAAAEGRVHRATSPVEALADLKEARGFLAKDLAVLALREGVALDPTDDPLLVAYLLDPANTNPEGVARRYGGEFTEDAAERALLSERLFQTLFPRLSEKLLWLYQEVERPLSRVLAHMEARGVRLDVPLLEALSFELEKELERLEGEVFRLAGHPFNLNSRDQLEKVLFDELGLTPVTRTEKTGKRSTSAAALEALRGAHPIVELILQYRELSKLKSTYLDRLPRLVHPRTGRLHTRFNQTATATGRLSSSDPNLQNIPVRTPLGQRIRKAFVAEEGWLLLAADYSQIELRVLAHLSGDENLKRVFREGKDIHTETAAWMFGLDPALVDPKMRRAAKTVLFGVLYGMSAHRLSQELGIDYKEAEAFIERYFQSFPKVRAWIERTLEEGRTRGYVETLFGRRRYVPDLASRVRSVREAAERMAWNMPVQGTAADLMKIAMVKLFPRLKPLGAHLLLQVHDELVLEVPEDRAEEAKALVKEVMENAYPLDVPLEVEVGVGRDWLEAKQD

SEQ ID NO: 415 - DNA, 2538 bp, synthetic construct
  misc_feature 1..2538: note = DNA Polymerase Variant
  source 1..2538: mol_type = other DNA
atgcaccatcatcatcatcatggcggtagcggcatgttaccgctgtttgatttggaagaaccaccaaaacgcgtgctgcttgttgacggccatcatctggcgtatcgtaccttctacgcactgagccttacgacctcacgtggtgagcctgtccagatggtgtatgggtttgctcgctccctgctgaaagccctgaaggaagatggtcaagccgtagtagtggttttcgatgcgaaagcaccgtcgtttcgtcacgaagcgtacgaggcctataaagctggccgcgcaccgaccccggaagactttccgcgtcagttagcgctcgtcaaacgcctcgtggatttgctgggattagttcgcttggaagctcctggctacgaggcggacgacgtgctcggtacactggccaagaaagcagaacgtgaaggcatggaggtctgcattcttaccggtgatcgcgatttcttccagctgctgtctgagaaagtgagcgttttgctgcccgatggcacgttagtaaccccgaaagatgtccaagagaaatatggagttccgccagaacgttgggtggactttcgcgcactgactggtgatcgttcagacaacatcccgggcgttgccgggattggtgaaaagacggcgctgcgcctgctggcagaatggggctcggtggaaaatctgctcaagaaccttgatcgtgtgaaacctgatagcttacgccgcaagatcgaagcccacctggaagacttgcgtctgagtctggatcttgcgcgtattcgcaccgatctgccgttggaagtagactttaaagctctgcgtcgtcgcacacccgatttagaggggttacgcgcgttcctcgaagaactggagtttggctccctgctgcatgaattcggtttgttgggcggagagaaaccgcgtgaagaagcaccatggccgccgcccgaaggtgcctttgtcggctttcttctgtcacgcaaagagccaatgtgggcggaactgttagctcttgcagccgccgcggaagggcgtgttcaccgcgcgacctctcctgtcgaggccctcgctgacctcaaagaagcacgtggtttcttggcgaaagatttagccgtgcttgcattacgcgaaggcgttgcgctcgatccgacggacgacccgcttttggtggcttatttgctcgatcctgcgaataccaacccggaaggcgtagcccgtcgttacggcggcgagtttactgaagatgcggcagaacgcgcgttgcttagcgaacgcctcttccagacgttatttccacgtctttcggagaaattactctggctctatcaggaagtcgaacgtccattgagtcgcgtgcttgcccatatggaggctcgcggtgtgcgcttagatgttccgttgttagaagcactcagcttcgagttggagaaagaactggaacgtcttgaaggcgaagtctttcgtttagcggggcatcccttcaatctcaactctcgcgaccaattggagaaagtgctctttgatgaattaggtttaacccctgtcacgcgtacagagaagaccggcaaacgttccacttcggcagccgccttggaagcacttcgtggtgctcacccgatcgtcgagttgattttgcagtaccgcgagctcagcaaactcaaatcaacctatcttgataggttacctcgtcttgttcatccacgtacgggtcgtttacacacccgcttcaatcaaacggcgacagccaccgggcgcttgtcgtcgagtgacccgaacctccagaatattccagtgcgcacgccgctgggccaacgcattcgtaaagcgtttgttgcggaagaaggttggttattacttgcggccgattactcccagatcgaacttcgtgtattggcgcatctctctggcgacgagaatcttaaacgcgtgtttcgcgaaggcaaggatattcacactgaaaccgcagcctggatgttcgggcttgacccagccttagtggaccccaagatgcgtcgtgccgccaagaccgtcaactttggcgtactctatggtatgtcagcacatcgtcttagtcaggaattgggcattgactacaaagaagctgaagcgtttttggagcgctatttccaatcctttccgaaagttcgcgcgtggattgaacgtaccctcgaagaaggtcgcactcgcggctatgtggaaacgttattcgggcgtcgtcgctacgttccagatcttgcatctcgtgtccgctcagtgcgcgaagctgctgagcgtatggcctggaatatgcctgttcagggaacagcggcggacctcatgaagatcgccatggtgaaattgtttccgcgcttgaaacccttaggagcccaccttcttttacaggtgcatgatgaattggtcttggaagtacccgaggatcgcgcagaagaagccaaagcactcgtgaaagaggttatggaaaacgcgtatccgttagatgttccgttggaggtcgaagtgggtgtaggccgtgattggcttgaagcgaaacaagactaatga

SEQ ID NO: 416 - protein, 844 aa, synthetic construct
  REGION 1..844: note = DNA Polymerase Variant
MHHHHHHGGSGMLPLFDLEEPPKRVLLVDGHHLAYRTFYALSLTTSRGEPVQMVYGFARSLLKALKEDGQAVVVVFDAKAPSFRHEAYEAYKAGRAPTPEDFPRQLALVKRLVDLLGLVRLEAPGYEADDVLGTLAKKAEREGMEVCILTGDRDFFQLLSEKVSVLLPDGTLVTPKDVQEKYGVPPERWVDFRALTGDRSDNIPGVAGIGEKTALRLLAEWGSVENLLKNLDRVKPDSLRRKIEAHLEDLRLSLDLARIRTDLPLEVDFKALRRRTPDLEGLRAFLEELEFGSLLHEFGLLGGEKPREEAPWPPPEGAFVGFLLSRKEPMWAELLALAAAAEGRVHRATSPVEALADLKEARGFLAKDLAVLALREGVALDPTDDPLLVAYLLDPANTNPEGVARRYGGEFTEDAAERALLSERLFQTLFPRLSEKLLWLYQEVERPLSRVLAHMEARGVRLDVPLLEALSFELEKELERLEGEVFRLAGHPFNLNSRDQLEKVLFDELGLTPVTRTEKTGKRSTSAAALEALRGAHPIVELILQYRELSKLKSTYLDRLPRLVHPRTGRLHTRFNQTATATGRLSSSDPNLQNIPVRTPLGQRIRKAFVAEEGWLLLAADYSQIELRVLAHLSGDENLKRVFREGKDIHTETAAWMFGLDPALVDPKMRRAAKTVNFGVLYGMSAHRLSQELGIDYKEAEAFLERYFQSFPKVRAWIERTLEEGRTRGYVETLFGRRRYVPDLASRVRSVREAAERMAWNMPVQGTAADLMKIAMVKLFPRLKPLGAHLLLQVHDELVLEVPEDRAEEAKALVKEVMENAYPLDVPLEVEVGVGRDWLEAKQD

SEQ ID NO: 417 - DNA, 2538 bp, synthetic construct
  misc_feature 1..2538: note = DNA Polymerase Variant
  source 1..2538: mol_type = other DNA
atgcaccatcatcatcatcatggcggtagcggcatgttaccgctgtttgatttggaagaaccaccaaaacgcgtgctgcttgttgacggccatcatctggcgtatcgtaccttctacgcactgagccttacgacctcacgtggtgagcctgtccagatggtgtatgggtttgctcgctccctgctgaaagccctgaaggaagatggtcaagccgtagtagtggttttcgatgcgaaagcaccgtcgtttcgtcacgaagcgtacgaggcctataaagctggccgcgcaccgaccccggaagactttccgcgtcagttagcgctcgtcaaacgcctcgtggatttgctgggattagttcgcttggaagctcctggctacgaggcggacgacgtgctcggtacactggccaagaaagcagaacgtgaaggcatggaggtctgcattcttaccggtgatcgcgatttcttccagctgctgtctgagaaagtgagcgttttgctgcccgatggcacgttagtaaccccgaaagatgtgcaagagaaatatggagttccgccagaacgttgggtggactttcgcgcactgactggtgatcgttcagacaacatcccgggcgttgccgggattggtgaaaagacggcgctgcgcctgctggcagaatggggctcggtggaaaatctgctcaagaaccttgatcgtgtgaaacctgatagcttacgccgcaagatcgaagcccacctggaagacttgcgtctgagtctggatcttgcgcgtattcgcaccgatctgccgttggaagtagactttaaagctctgcgtcgtcgcacacccgatttagaggggttacgcgcgttcctcgaagaactggagtttggctccctgctgcatgaattcggtttgttgggcggagagaaaccgcgtgaagaagcaccatggccgccgcccgaaggtgcctttgtcggctttcttctgtcacgcaaagagccaatgtgggcggaactgttagctcttgcagccgccgcggaagggcgtgttcaccgcgcgacctctcctgtcgaggccctcgctgacctcaaagaagcacgtggtttcttggcgaaagatttagccgtgcttgcattacgcgaatgtgttgcgctcgatccgacggacgacccgcttttggtggcttatttgctcgatcctgcgaataccaacccggaaggtgtcgcccgtcgttacggcggcgagtttactgaagatgcggcagaacgcgcgttgcttagcgaacgcctcttccagacgttatttccacgtctttcggagaaattactctggctctatcaggaagtcgaacgtccattgagtcgcgtgcttgcccatatggaggctcgcggtgtgcgcttagatgttccgttgttagaagcactcagcttcgagttggagaaagaactggaacgtcttgaaggcgaagtctttcgtttagcggggcatcccttcaatctcaactctcgcgaccaattggagaaagtgctctttgatgaattaggtttaacccctgtcacgcgtacagagaagaccggcaaacgttccacttcggcagccgccttggaagcacttcgtggtgctcacccgatcgtcaacttgattttgcagtatcgcgagctcagcaaactcaaatcaacctatcttgataggttacctcgtcttgttcatccacgtacgggtcgtttacacacccgctggaatcaaacggcgacagccaccgggcgcttgtcgtcgagtgacccgaacctccagaatattccagtgcgcacgccgctgggccaacacattcgtaaagcgtttgttgcggaagaaggttggttattacttgcggccgattactcccagatcgaacttcgtgtattggcgcatctctctggcgacgagaatcttaaacgcgtgtttcgcgaaggcaaggatattcacactgaaaccgcagcctggatgttcggggtggacccagccttagtggaccccaagatgcgtcgtgccgccaagaccgtcaactttggcgtactctatggtatgtcagcacatcgtcttagtcaggaattgggcattgactacaaagaagctgaagcgtttatcgagcgctatttccaatcctttccgaaagttcgcgcgtggattgaacgtaccctcgaagaaggtcgcactcgcggctatgtggaaacgttattcgggcgtcgtcgctacgttccagatcttgcatctcgtgtccgctcagtgcgcgaagctgctgagcgtatggcctggaatatgcctgttcagggaacagcggcggacctcatgaagatcgccatggtgaaattgtttccgcgcttgaaacccttaggagcccaccttcttttacaggtgcatgatgaattggtcttggaagtacccgaggatcgcgcagaagaagccaaagcactcgtgaaagaggttatggaaaacgcgtatccgttagatgttccgttggaggtcgaagtgggtgtaggccgtgattggcttgaagcgaaacaagactaatga

SEQ ID NO: 418 - protein, 844 aa, synthetic construct
  REGION 1..844: note = DNA Polymerase Variant
MHHHHHHGGSGMLPLFDLEEPPKRVLLVDGHHLAYRTFYALSLTTSRGEPVQMVYGFARSLLKALKEDGQAVVVVFDAKAPSFRHEAYEAYKAGRAPTPEDFPRQLALVKRLVDLLGLVRLEAPGYEADDVLGTLAKKAEREGMEVCILTGDRDFFQLLSEKVSVLLPDGTLVTPKDVQEKYGVPPERWVDFRALTGDRSDNIPGVAGIGEKTALRLLAEWGSVENLLKNLDRVKPDSLRRKIEAHLEDLRLSLDLARIRTDLPLEVDFKALRRRTPDLEGLRAFLEELEFGSLLHEFGLLGGEKPREEAPWPPPEGAFVGFLLSRKEPMWAELLALAAAAEGRVHRATSPVEALADLKEARGFLAKDLAVLALRECVALDPTDDPLLVAYLLDPANTNPEGVARRYGGEFTEDAAERALLSERLFQTLFPRLSEKLLWLYQEVERPLSRVLAHMEARGVRLDVPLLEALSFELEKELERLEGEVFRLAGHPFNLNSRDQLEKVLFDELGLTPVTRTEKTGKRSTSAAALEALRGAHPIVNLILQYRELSKLKSTYLDRLPRLVHPRTGRLHTRWNQTATATGRLSSSDPNLQNIPVRTPLGQHIRKAFVAEEGWLLLAADYSQIELRVLAHLSGDENLKRVFREGKDIHTETAAWMFGVDPALVDPKMRRAAKTVNFGVLYGMSAHRLSQELGIDYKEAEAFIERYFQSFPKVRAWIERTLEEGRTRGYVETLFGRRRYVPDLASRVRSVREAAERMAWNMPVQGTAADLMKIAMVKLFPRLKPLGAHLLLQVHDELVLEVPEDRAEEAKALVKEVMENAYPLDVPLEVEVGVGRDWLEAKQD

SEQ ID NO: 419 - DNA, 2538 bp, synthetic construct
  misc_feature 1..2538: note = DNA Polymerase Variant
  source 1..2538: mol_type = other DNA
atgcaccatcatcatcatcatggcggtagcggcatgttaccgctgtttgatttggaagaaccaccaaaacgcgtgctgcttgttgacggccatcatctggcgtatcgtaccttctacgcactgagccttacgacctcacgtggtgagcctgtccagatggtgtatgggtttgctcgctccctgctgaaagccctgaaggaagatggtcaagccgtagtagtggttttcgatgcgaaagcaccgtcgtttcgtcacgaagcgtacgaggcctataaagctggccgcgcaccgaccccggaagactttccgcgtcagttagcgctcgtcaaacgcctcgtggatttgctgggattagttcgcttggaagctcctggctacgaggcggacgacgtgctcggtacactggccaagaaagcagaacgtgaaggcatggaggtctgcattcttaccggtgatcgcgatttcttccagctgctgtctgagaaagtgagcgttttgctgcccgatggcacgttagtaaccccgaaagatctgcaagagaaatatggagttccgccagaacgttgggtggactttcgcgcactgactggtgatcgttcagacaacatcccgggcgttgccgggattggtgaaaagacggcgctgcgcctgctggcagaatggggctcggtggaaaatctgctcaagaaccttgatcgtgtgaaacctgatagcttacgccgcaagatcgaagcccacctggaagacttgcgtctgagtctggatcttgtccgtattcgcaccgatctgccgttggaagtagactttaaagctctgcgtcgtcgcacacccgatttagaggggttacgcgcgttcctcgaagaactggagtttggctccctgctgcatgaattcggtttgttgggcggagagaaaccgcgtgaagaagcaccatggccgccgcccgaaggtgcctttgtcggctttcttctgtcacgcaaagagccaatgtgggcggaactgttagctcttgcagccgccgcggaagggcgtgttcaccgcgcgacctctcctgtcgaggccctcgctgacctcaaagaagcacgtggtttcttggcgaaagatttagccgtgcttgcattacgcgaaggcgttgcgctcgatccgacggacgacccgcttttggtggcttatttgctcgatcctgcgaataccaacccggaaggtgtcgcccgtcgttacggcggcgagtttactgaagatgcggcagaacgcgcgttgcttagcgaacgcctcttccagacgttatttccacgtctttcggagaaattactctggctctatcaggaagtcgaacgtccattgagtcgcgtgcttgcccatatggaggctcgcggtgtgcgcttagatgttccgttgttagaagcactcagcttcgagttggagaaagaactggaacgtcttgaaggcgaagtctttcgtttagcggggcatcccttcaatctcaactctcgcgaccaattggagaaagtgctctttgatgaattaggtttaacccctgtcacgcgtacagagaagaccggcaaacgttccacttcggcagctgccttggaagcacttcgtggtgctcacccgatcgtcgagttgattttgcagtaccgcgagctcagcaaactcaaatcaacctatcttgataggttacctcgtcttgttcatccacgtacgggtcgtttacacacccgcttcaatcaaacggcgacagccaccgggcgcttgtcgtcgagtgacccgaacctccagaatattccagtgcgcacgccgactggccaacacattcgtaaagcgtttgttgcggaagaaggttggttattacttgcggccgattactcccagatcgaacttcgtgtattggcgcatctctctggcgacgagaatcttaaacgcgtgtttcgcgaaggcaaggatattcacactgaaaccgcagcctggatgttcgggctggacccagccttagtggaccccaagatgcgtcgtgccgccaagaccgtcaactttggcgtactctatggtatgtcagcacatcgtcttagtcaggaattgggcattgactacaaagaagctgaagcgtttatcgagcgctatttccaatcctttccgaaagttcgcgcgtggattgaacgtaccctcgaagaaggtcgcactcgcggctatgtggaaacgttattcgggcgtcgtcgctacgttccagatcttgcatctcgtgtccgctcagtgcgcgaagctgctgagcgtatggcctggaatatgcctgttcagggaacagcggcggacctcatgaagatcgccatggtgaaattgtttccgcgcttgaaacccttaggagcccaccttcttttacaggtgcatgatgaattggtcttggaagtacccgaggatcgcgcagaagaagccaaagcactcgtgaaagaggttatggaaaacgcgtatccgttagatgttccgttggaggtcgaagtgggtgtaggccgtgattggcttgaagcgaaacaagactaatga

SEQ ID NO: 420 - protein, 844 aa, synthetic construct
  REGION 1..844: note = DNA Polymerase Variant
MHHHHHHGGSGMLPLFDLEEPPKRVLLVDGHHLAYRTFYALSLTTSRGEPVQMVYGFARSLLKALKEDGQAVVVVFDAKAPSFRHEAYEAYKAGRAPTPEDFPRQLALVKRLVDLLGLVRLEAPGYEADDVLGTLAKKAEREGMEVCILTGDRDFFQLLSEKVSVLLPDGTLVTPKDLQEKYGVPPERWVDFRALTGDRSDNIPGVAGIGEKTALRLLAEWGSVENLLKNLDRVKPDSLRRKIEAHLEDLRLSLDLVRIRTDLPLEVDFKALRRRTPDLEGLRAFLEELEFGSLLHEFGLLGGEKPREEAPWPPPEGAFVGFLLSRKEPMWAELLALAAAAEGRVHRATSPVEALADLKEARGFLAKDLAVLALREGVALDPTDDPLLVAYLLDPANTNPEGVARRYGGEFTEDAAERALLSERLFQTLFPRLSEKLLWLYQEVERPLSRVLAHMEARGVRLDVPLLEALSFELEKELERLEGEVFRLAGHPFNLNSRDQLEKVLFDELGLTPVTRTEKTGKRSTSAAALEALRGAHPIVELILQYRELSKLKSTYLDRLPRLVHPRTGRLHTRFNQTATATGRLSSSDPNLQNIPVRTPTGQHIRKAFVAEEGWLLLAADYSQIELRVLAHLSGDENLKRVFREGKDIHTETAAWMFGLDPALVDPKMRRAAKTVNFGVLYGMSAHRLSQELGIDYKEAEAFIERYFQSFPKVRAWIERTLEEGRTRGYVETLFGRRRYVPDLASRVRSVREAAERMAWNMPVQGTAADLMKIAMVKLFPRLKPLGAHLLLQVHDELVLEVPEDRAEEAKALVKEVMENAYPLDVPLEVEVGVGRDWLEAKQD

SEQ ID NO: 421 - DNA, 2538 bp, synthetic construct
  misc_feature 1..2538: note = DNA Polymerase Variant
  source 1..2538: mol_type = other DNA
atgcaccatcatcatcatcatggcggtagcggcatgttaccgctgtttgatttggaagaaccaccaaaacgcgtgctgcttgttgacggccatcatctggcgtatcgtaccttctacgcactgagccttacgacctcacgtggtgagcctgtccagatggtgtatgggtttgctcgctccctgctgaaagccctgaaggaagatggtcaagccgtagtagtggttttcgatgcgaaagcaccgtcgtttcgtcacgaagcgtacgaggcctataaagctggccgcgcaccgaccccggaagactttccgcgtcagttagcgctcgtcaaacgcctcgtggatttgctgggattagttcgcttggaagctcctggctacgaggcggacgacgtgctcggtacactggccaagaaagcagaacgtgaaggcatggaggtctgcattcttaccggtgatcgcgatttcttccagctgctgtctgagaaagtgagcgttttgctgcccgatggcacgttagtaaccccgaaagatgtccaagagaaatatggagttccgccagaacgttgggtggactttcgcgcactgactggtgatcgttcagacaacatcccgggcgttgccgggattggtgaaaagacggcgctgcgcctgctggcagaatggggctcggtggaaaatctgctcaagaaccttgatcgtgtgaaacctgatagcttacgccgcaagatcgaagcccacctggaagacttgcgtctgagtctggatcttgcgcgtattcgcaccgatctgccgttggaagtagactttaaagctctgcgtcgtcgcacacccgatttagaggggttacgcgcgttcctcgaagaactggagtttggctccctgctgcatgaattcggtttgttgggcggagagaaaccgcgtgaagaagcaccatggccgccgcccgaaggtgcctttgtcggctttcttctgtcacgcaaagagccaatgtgggcggaactgttagctcttgcagccgccgcggaagggcgtgttcaccgcgcgacctctcctgtcgaggccctcgctgacctcaaagaagcacgtggtttcttggcgaaagatttagccgtgcttgcattacgcgaaggcgttgcgctcgatccgacggacgacccgcttttggtggcttatttgctcgatcctgcgaataccaacccggaaggcgtagcccgtcgttacggcggcgagtttactgaagatgcggcagaacgcgcgttgcttagcgaacgcctcttccagacgttatttccacgtctttcggagaaattactctggctctatcaggaagtcgaacgtccattgagtcgcgtgcttgcccatatggaggctcgcggtgtgcgcttagatgttccgttgttagaagcactcagcttcgagttggagaaagaactggaacgtcttgaaggcgaagtctttcgtttagcggggcatcccttcaatctcaactctcgcgaccaattggagaaagtgctctttgatgaattaggtttaacccctgtcacgcgtacagagaagaccggcaaacgttccacttcggcagccgccttggaagcacttcgtggtgctcacccgatcgtcgagttgattttgcagtaccgcgagctcagcaaactcaaatcaacctatcttgataggttacctcgtcttgttcatccacgtacgggtcgtttacacacccgcttcaatcaaacggcgacagccaccgggcgcttgtcgtcgagtgacccgaacctccagaatattccagtgcgcacgccgctgggccaacgcattcgtaaagcgtttgttgcggaagaaggttggttattacttgcggccgattactcccagatcgaacttcgtgtattggcgcatctctctggcgacgagaatcttaaacgcgtgtttcgcgaaggcaaggatattcacactgaaaccgcagcctggatgttcgggcttgacccagccttagtggaccccaagatgcgtcgtgccgccaagaccgtcaactttggcgtactctatggtatgagggcacatcgtcttagtcaggaattgggcattgactacaaagaagctgaagcgtttatcgagcgctatttccaatcctttccgaaagttcgcgcgtggattgaacgtaccctcgaagaaggtcgcactcgcggctatgtggaaacgttattcgggcgtcgtcgctacgttccagatcttgcatctcgtgtccgctcagtgcgcgaagctgctgagcgtatggcctggaatatgcctgttcagggaacagcggcggacctcatgaagatcgccatggtgaaattgtttccgcgcttgaaacccttaggagcccaccttcttttacaggtgcatgatgaattggtcttggaagtacccgaggatcgcgcagaagaagccaaagcactcgtgaaagaggttatggaaaacgcgtatccgttagatgttccgttggaggtcgaagtgggtgtaggccgtgattggcttgaagcgaaacaagactaatga

SEQ ID NO: 422 - protein, 844 aa, synthetic construct
  REGION 1..844: note = DNA Polymerase Variant
MHHHHHHGGSGMLPLFDLEEPPKRVLLVDGHHLAYRTFYALSLTTSRGEPVQMVYGFARSLLKALKEDGQAVVVVFDAKAPSFRHEAYEAYKAGRAPTPEDFPRQLALVKRLVDLLGLVRLEAPGYEADDVLGTLAKKAEREGMEVCILTGDRDFFQLLSEKVSVLLPDGTLVTPKDVQEKYGVPPERWVDFRALTGDRSDNIPGVAGIGEKTALRLLAEWGSVENLLKNLDRVKPDSLRRKIEAHLEDLRLSLDLARIRTDLPLEVDFKALRRRTPDLEGLRAFLEELEFGSLLHEFGLLGGEKPREEAPWPPPEGAFVGFLLSRKEPMWAELLALAAAAEGRVHRATSPVEALADLKEARGFLAKDLAVLALREGVALDPTDDPLLVAYLLDPANTNPEGVARRYGGEFTEDAAERALLSERLFQTLFPRLSEKLLWLYQEVERPLSRVLAHMEARGVRLDVPLLEALSFELEKELERLEGEVFRLAGHPFNLNSRDQLEKVLFDELGLTPVTRTEKTGKRSTSAAALEALRGAHPIVELILQYRELSKLKSTYLDRLPRLVHPRTGRLHTRFNQTATATGRLSSSDPNLQNIPVRTPLGQRIRKAFVAEEGWLLLAADYSQIELRVLAHLSGDENLKRVFREGKDIHTETAAWMFGLDPALVDPKMRRAAKTVNFGVLYGMRAHRLSQELGIDYKEAEAFIERYFQSFPKVRAWIERTLEEGRTRGYVETLFGRRRYVPDLASRVRSVREAAERMAWNMPVQGTAADLMKIAMVKLFPRLKPLGAHLLLQVHDELVLEVPEDRAEEAKALVKEVMENAYPLDVPLEVEVGVGRDWLEAKQD

SEQ ID NO: 423 - DNA, 2538 bp, synthetic construct
  misc_feature 1..2538: note = DNA Polymerase Variant
  source 1..2538: mol_type = other DNA
atgcaccatcatcatcatcatggcggtagcggcatgttaccgctgtttgatttggaagaaccaccaaaacgcgtgctgcttgttgacggccatcatctggcgtatcgtaccttctacgcactgagccttacgacctcacgtggtgagcctgtccagatggtgtatgggtttgctcgctccctgctgaaagccctgaaggaagatggtcaagccgtagtagtggttttcgatgcgaaagcaccgtcgtttcgtcacgaagcgtacgaggcctataaagctggccgcgcaccgaccccggaagactttccgcgtcagttagcgctcgtcaaacgcctcgtggatttgctgggattagttcgcttggaagctcctggctacgaggcggacgacgtgctcggtacactggccaagaaagcagaacgtgaaggcatggaggtctgcattcttaccggtgatcgcgatttcttccagctgctgtctgagaaagtgagcgttttgctgcccgatggcacgttagtaaccccgaaagatgtccaagagaaatatggagttccgccagaacgttgggtggactttcgcgcactgactggtgatcgttcagacaacatcccgggcgttgccgggattggtgaaaagacggcgctgcgcctgctggcagaatggggctcggtggaaaatctgctcaagaaccttgatcgtgtgaaacctgatagcttacgccgcaagatcgaagcccacctggaagacttgcgtctgagtctggatcttgcgcgtattcgcaccgatctgccgttggaagtagactttaaagctctgcgtcgtcgcacacccgatttagaggggttacgcgcgttcctcgaagaactggagtttggctccctgctgcatgaattcggtttgttgggcggagagaaaccgcgtgaagaagcaccatggccgccgcccgaaggtgcctttgtcggctttcttctgtcacgcaaagagccaatgtgggcggaactgttagctcttgcagccgccgcggaagggcgtgttcaccgcgcgacctctcctgtcgaggccctcgctgacctcaaagaagcacgtggtttcttggcgaaagatttagccgtgcttgcattacgcgaatgtgttgcgctcgatccgacggacgacccgcttttggtggcttatttgctcgatcctgcgaataccaacccggaaggcgtagcccgtcgttacggcggcgagtttactgaagatgcggcagaacgcgcgttgcttagcgaacgcctcttccagacgttatttccacgtctttcggagaaattactctggctctatcaggaagtcgaacgtccattgagtcgcgtgcttgcccatatggaggctcgcggtgtgcgcttagatgttccgttgttagaagcactcagcttcgagttggagaaagaactggaacgtcttgaaggcgaagtctttcgtttagcggggcatcccttcaatctcaactctcgcgaccaattggagaaagtgctctttgatgaattaggtttaacccctgtcacgcgtacagagaagaccggcaaacgttccacttcggcagccgccttggaagcacttcgtggtgctcacccgatcgtcgagttgattttgcagtaccgcgagctcagcaaactcaaatcaacctatcttgataggttacctcgtcttgttcatccacgtacgggtcgtttacacacccgcttcaatcaaacggcgacagccaccgggcgcttgtcgtcgagtgacccgaacctccagaatattccagtgcgcacgccgctgggccaacacattcgtaaagcgtttgttgcggaagaaggttggttattacttgcggccgattactcccagatcgaacttcgtgtattggcgcatctctctggcgacgagaatcttaaacgcgtgtttcgcgaaggcaaggatattcacactgaaaccgcagcctggatgttcggggtggacccagccttagtggaccccaagatgcgtcgtgccgccaagaccgtcaactttggcgtactctatggtatgtcagcacatcgtcttagtcaggaattgggcattgactacaaagaagctgaagcgtttatcgagcgctatttccaatcctttccgaaagttcgcgcgtggattgaacgtaccctcgaagaaggtcgcactcgcggctatgtggaaacgttattcgggcgtcgtcgctacgttccagatcttgcatctcgtgtccgctcagtgcgcgaagctgctgagcgtatggcctggaatatgcctgttcagggaacagcggcggacctcatgaagatcgccatggtgaaattgtttccgcgcttgaaacccttaggagcccaccttcttttacaggtgcatgatgaattggtcttggaagtacccgaggatcgcgcagaagaagccaaagcactcgtgaaagaggttatggaaaacgcgtatccgttagatgttccgttggaggtcgaagtgggtgtaggccgtgattggcttgaagcgaaacaagactaatga

SEQ ID NO: 424 - protein, 844 aa, synthetic construct
  REGION 1..844: note = DNA Polymerase Variant
MHHHHHHGGSGMLPLFDLEEPPKRVLLVDGHHLAYRTFYALSLTTSRGEPVQMVYGFARSLLKALKEDGQAVVVVFDAKAPSFRHEAYEAYKAGRAPTPEDFPRQLALVKRLVDLLGLVRLEAPGYEADDVLGTLAKKAEREGMEVCILTGDRDFFQLLSEKVSVLLPDGTLVTPKDVQEKYGVPPERWVDFRALTGDRSDNIPGVAGIGEKTALRLLAEWGSVENLLKNLDRVKPDSLRRKIEAHLEDLRLSLDLARIRTDLPLEVDFKALRRRTPDLEGLRAFLEELEFGSLLHEFGLLGGEKPREEAPWPPPEGAFVGFLLSRKEPMWAELLALAAAAEGRVHRATSPVEALADLKEARGFLAKDLAVLALRECVALDPTDDPLLVAYLLDPANTNPEGVARRYGGEFTEDAAERALLSERLFQTLFPRLSEKLLWLYQEVERPLSRVLAHMEARGVRLDVPLLEALSFELEKELERLEGEVFRLAGHPFNLNSRDQLEKVLFDELGLTPVTRTEKTGKRSTSAAALEALRGAHPIVELILQYRELSKLKSTYLDRLPRLVHPRTGRLHTRFNQTATATGRLSSSDPNLQNIPVRTPLGQHIRKAFVAEEGWLLLAADYSQIELRVLAHLSGDENLKRVFREGKDIHTETAAWMFGVDPALVDPKMRRAAKTVNFGVLYGMSAHRLSQELGIDYKEAEAFIERYFQSFPKVRAWIERTLEEGRTRGYVETLFGRRRYVPDLASRVRSVREAAERMAWNMPVQGTAADLMKIAMVKLFPRLKPLGAHLLLQVHDELVLEVPEDRAEEAKALVKEVMENAYPLDVPLEVEVGVGRDWLEAKQD

SEQ ID NO: 425 - DNA, 2538 bp, synthetic construct
  misc_feature 1..2538: note = DNA Polymerase Variant
  source 1..2538: mol_type = other DNA
atgcaccatcatcatcatcatggcggtagcggcatgttaccgctgtttgatttggaagaaccaccaaaacgcgtgctgcttgttgacggccatcatctggcgtatcgtaccttctacgcactgagccttacgacctcacgtggtgagcctgtccagatggtgtatgggtttgctcgctccctgctgaaagccctgaaggaagatggtcaagccgtagtagtggttttcgatgcgaaagcaccgtcgtttcgtcacgaagcgtacgaggcctataaagctggccgcgcaccgaccccggaagactttccgcgtcagttagcgctcgtcaaacgcctcgtggatttgctgggattagttcgcttggaagctcctggctacgaggcggacgacgtgctcggtacactggccaagaaagcagaacgtgaaggcatggaggtctgcattcttaccggtgatcgcgatttcttccagctgctgtctgagaaagtgagcgttttgctgcccgatggcacgttagtaaccccgaaagatgtccaagagaaatatggagttccgccagaacgttgggtggactttcgcgcactgactggtgatcgttcagacaacatcccgggcgttgccgggattggtgaaaagacggcgctgcgcctgctggcagaatggggctcggtggaaaatctgctcaagaaccttgatcgtgtgaaacctgatagcttacgccgcaagatcgaagcccacctggaagacttgcgtctgagtctggatcttgcgcgtattcgcaccgatctgccgttggaagtagactttaaagctctgcgtcgtcgcacacccgatttagaggggttacgcgcgttcctcgaagaactggagtttggctccctgctgcatgaattcggtttgttgggcggagagaaaccgcgtgaagaagcaccatggccgccgcccgaaggtgcctttgtcggctttcttctgtcacgcaaagagccaatgtgggcggaactgttagctcttgcagccgccgcggaagggcgtgttcaccgcgcgacctctcctgtcgaggccctcgctgacctcaaagaagcacgtggtttcttggcgaaagatttagccgtgcttgcattacgcgaaggcgttgcgctcgatccgacggacgacccgcttttggtggcttatttgctcgatcctgcgaataccaacccggaaggcgtagcccgtcgttacggcggcgagtttactgaagatgcggcagaacgcgcgttgcttagcgaacgcctcttccagacgttatttccacgtctttcggagaaattactctggctctatcaggaagtcgaacgtccattgagtcgcgtgcttgcccatatggaggctcgcggtgtgcgcttagatgttccgttgttagaagcactcagcttcgagttggagaaagaactggaacgtcttgaaggcgaagtctttcgtttagcggggcatcccttcaatctcaactctcgcgaccaattggagaaagtgctctttgatgaattaggtttaacccctgtcacgcgtacagagaagaccggcaaacgttccacttcggcagccgccttggaagcacttcgtggtgctcacccgatcgtcgagttgattttgcagtaccgcgagctcagcaaactcaaatcaacctatcttgataggttacctcgtcttgttcatccacgtacgggtcgtttacacacccgcttcaatcaaacggcgacagccaccgggcgcttgtcgtcgagtgacccgaacctccagaatattccagtgcgcacgccgctgggccaacgcattcgtaaagcgtttgttgcggaagaaggttggttattacttgcggccgattactcccagatcgaacttcgtgtattggcgcatctctctggcgacgagaatcttaaacgcgtgtttcgcgaaggcaaggatattcacactgaaaccgcagcctggatgttcgggcttgacccagccttagtggaccccaagatgcgtcgtgccgccaagaccgtcaactttggcgtactctatggtatgtcagcacatcgtcttagtcaggaattgggcattgactacaaagaagctgaagcgtttatcgagcgctatttccaatcctttccgaaagttcgcgcgtggattgaacgtaccctcgaagaaggtcgcactcgcggctatgtggaaacgttattcgggcgtcgtcgctacgttccagatcttgcatctcgtgtcatgtcagtgcgcgaagctgctgagcgtatggcctggaatatgcctgttcagggaacagcggcggacctcatgaagatcgccatggtgaaattgtttccgcgcttgaaacccttaggagcccaccttcttttacaggtgcatgatgaattggtcttggaagtacccgaggatcgcgcagaagaagccaaagcactcgtgaaagaggttatggaaaacgcgtatccgttagatgttccgttggaggtcgaagtgggtgtaggccgtgattggcttgaagcgaaacaagactaatga

SEQ ID NO: 426 - protein, 844 aa, synthetic construct
  REGION 1..844: note = DNA Polymerase Variant
MHHHHHHGGSGMLPLFDLEEPPKRVLLVDGHHLAYRTFYALSLTTSRGEPVQMVYGFARSLLKALKEDGQAVVVVFDAKAPSFRHEAYEAYKAGRAPTPEDFPRQLALVKRLVDLLGLVRLEAPGYEADDVLGTLAKKAEREGMEVCILTGDRDFFQLLSEKVSVLLPDGTLVTPKDVQEKYGVPPERWVDFRALTGDRSDNIPGVAGIGEKTALRLLAEWGSVENLLKNLDRVKPDSLRRKIEAHLEDLRLSLDLARIRTDLPLEVDFKALRRRTPDLEGLRAFLEELEFGSLLHEFGLLGGEKPREEAPWPPPEGAFVGFLLSRKEPMWAELLALAAAAEGRVHRATSPVEALADLKEARGFLAKDLAVLALREGVALDPTDDPLLVAYLLDPANTNPEGVARRYGGEFTEDAAERALLSERLFQTLFPRLSEKLLWLYQEVERPLSRVLAHMEARGVRLDVPLLEALSFELEKELERLEGEVFRLAGHPFNLNSRDQLEKVLFDELGLTPVTRTEKTGKRSTSAAALEALRGAHPIVELILQYRELSKLKSTYLDRLPRLVHPRTGRLHTRFNQTATATGRLSSSDPNLQNIPVRTPLGQRIRKAFVAEEGWLLLAADYSQIELRVLAHLSGDENLKRVFREGKDIHTETAAWMFGLDPALVDPKMRRAAKTVNFGVLYGMSAHRLSQELGIDYKEAEAFIERYFQSFPKVRAWIERTLEEGRTRGYVETLFGRRRYVPDLASRVMSVREAAERMAWNMPVQGTAADLMKIAMVKLFPRLKPLGAHLLLQVHDELVLEVPEDRAEEAKALVKEVMENAYPLDVPLEVEVGVGRDWLEAKQD

SEQ ID NO: 427 - DNA, 2538 bp, synthetic construct
  misc_feature 1..2538: note = DNA Polymerase Variant
  source 1..2538: mol_type = other DNA
atgcaccatcatcatcatcatggcggtagcggcatgttaccgctgtttgatttggaagaaccaccaaaacgcgtgctgcttgttgacggccatcatctggcgtatcgtaccttctacgcactgagccttacgacctcacgtggtgagcctgtccagatggtgtatgggtttgctcgctccctgctgaaagccctgaaggaagatggtcaagccgtagtagtggttttcgatgcgaaagcaccgtcgtttcgtcacgaagcgtacgaggcctataaagctggccgcgcaccgaccccggaagactttccgcgtcagttagcgctcgtcaaacgcctcgtggatttgctgggattagttcgcttggaagctcctggctacgaggcggacgacgtgctcggtacactggccaagaaagcagaacgtgaaggcatggaggtctgcattcttaccggtgatcgcgatttcttccagctgctgtctgagaaagtgagcgttttgctgcccgatggcacgttagtaaccccgaaagatgtccaagagaaatatggagttccgccagaacgttgggtggactttcgcgcactgactggtgatcgttcagacaacatcccgggcgttgccgggattggtgaaaagacggcgctgcgcctgctggcagaatggggctcggtggaaaatctgctcaagaaccttgatcgtgtgaaacctgatagcttacgccgcaagatcgaagcccacctggaagacttgcgtctgagtctggatcttgcgcgtattcgcaccgatctgccgttggaagtagactttaaagctctgcgtcgtcgcacacccgatttagaggggttacgcgcgttcctcgaagaactggagtttggctccctgctgcatgaattcggtttgttgggcggagagaaaccgcgtgaagaagcaccatggccgccgcccgaaggtgcctttgtcggctttcttctgtcacgcaaagagccaatgtgggcggaactgttagctcttgcagccgccgcggaagggcgtgttcaccgcgcgacctctcctgtcgaggccctcgctgacctcaaagaagcacgtggtttcttggcgaaagatttagccgtgcttgcattacgcgaaggcgttgcgctcgatccgacggacgacccgcttttggtggcttatttgctcgatccttttaataccaacccggaaggcgtagcccgtcgttacggcggcgagtttactgaagatgcggcagaacgcgcgttgcttagcgaacgcctcttccagacgttatttccacgtctttcggagaaattactctggctctatcaggaagtcgaacgtccattgagtcgcgtgcttgcccatatggaggctcgcggtgtgcgcttagatgttccgttgttagaagcactcagcttcgagttggagaaagaactggaacgtcttgaaggcgaagtctttcgtttagcggggcatcccttcaatctcaactctcgcgaccaattggagaaagtgctctttgatgaattaggtttaacccctgtcacgcgtacagagaagaccggcaaacgttccacttcggcagccgccttggaagcacttcgtggtgctcacccgatcgtcgagttgattttgcagtaccgcgagctcagcaaactcaaatcaacctatcttgataggttacctcgtcttgttcatccacgtacgggtcgtttacacacccgcttcaatcaaacggcgacagccaccgggcgcttgtcgtcgagtgacccgaacctccagaatattccagtgcgcacgccgctgggccaacgcattcgtaaagcgtttgttgcggaagaaggttggttattacttgcggccgattactcccagatcgaacttcgtgtattggcgcatctctctggcgacgagaatcttaaacgcgtgtttcgcgaaggcaaggatattcacactgaaaccgcagcctggatgttcgggcttgacccagccttagtggaccccaagatgcgtcgtgccgccaagaccgtcaactttggcgtactctatggtatgtcagcacatcgtcttagtcaggaattgggcattgactacaaagaagctgaagcgtttatcgagcgctatttccaatcctttccgaaagttcgcgcgtggattgaacgtaccctcgaagaaggtcgcactcgcggctatgtggaaacgttattcgggcgtcgtcgctacgttccagatcttgcatctcgtgtccgctcagtgcgcgaagctgctgagcgtatggcctggaatatgcctgttcagggaacagcggcggacctcatgaagatcgccatggtgaaattgtttccgcgcttgaaacccttaggagcccaccttcttttacaggtgcatgatgaattggtcttggaagtacccgaggatcgcgcagaagaagccaaagcactcgtgaaagaggttatggaaaacgcgtatccgttagatgttccgttggaggtcgaagtgggtgtaggccgtgattggcttgaagcgaaacaagactaatga

SEQ ID NO: 428 - protein, 844 aa, synthetic construct
  REGION 1..844: note = DNA Polymerase Variant
MHHHHHHGGSGMLPLFDLEEPPKRVLLVDGHHLAYRTFYALSLTTSRGEPVQMVYGFARSLLKALKEDGQAVVVVFDAKAPSFRHEAYEAYKAGRAPTPEDFPRQLALVKRLVDLLGLVRLEAPGYEADDVLGTLAKKAEREGMEVCILTGDRDFFQLLSEKVSVLLPDGTLVTPKDVQEKYGVPPERWVDFRALTGDRSDNIPGVAGIGEKTALRLLAEWGSVENLLKNLDRVKPDSLRRKIEAHLEDLRLSLDLARIRTDLPLEVDFKALRRRTPDLEGLRAFLEELEFGSLLHEFGLLGGEKPREEAPWPPPEGAFVGFLLSRKEPMWAELLALAAAAEGRVHRATSPVEALADLKEARGFLAKDLAVLALREGVALDPTDDPLLVAYLLDPFNTNPEGVARRYGGEFTEDAAERALLSERLFQTLFPRLSEKLLWLYQEVERPLSRVLAHMEARGVRLDVPLLEALSFELEKELERLEGEVFRLAGHPFNLNSRDQLEKVLFDELGLTPVTRTEKTGKRSTSAAALEALRGAHPIVELILQYRELSKLKSTYLDRLPRLVHPRTGRLHTRFNQTATATGRLSSSDPNLQNIPVRTPLGQRIRKAFVAEEGWLLLAADYSQIELRVLAHLSGDENLKRVFREGKDIHTETAAWMFGLDPALVDPKMRRAAKTVNFGVLYGMSAHRLSQELGIDYKEAEAFIERYFQSFPKVRAWIERTLEEGRTRGYVETLFGRRRYVPDLASRVRSVREAAERMAWNMPVQGTAADLMKIAMVKLFPRLKPLGAHLLLQVHDELVLEVPEDRAEEAKALVKEVMENAYPLDVPLEVEVGVGRDWLEAKQD

SEQ ID NO: 429 - DNA, 2538 bp, synthetic construct
  misc_feature 1..2538: note = DNA Polymerase Variant
  source 1..2538: mol_type = other DNA
atgcaccatcatcatcatcatggcggtagcggcatgttaccgctgtttgatttggaagaaccaccaaaacgcgtgctgcttgttgacggccatcatctggcgtatcgtaccttctacgcactgagccttacgacctcacgtggtgagcctgtccagatggtgtatgggtttgctcgctccctgctgaaagccctgaaggaagatggtcaagccgtagtagtggttttcgatgcgaaagcaccgtcgtttcgtcacgaagcgtacgaggcctataaagctggccgcgcaccgaccccggaagactttccgcgtcagttagcgctcgtcaaacgcctcgtggatttgctgggattagttcgcttggaagctcctggctacgaggcggacgacgtgctcggtacactggccaagaaagcagaacgtgaaggcatggaggtctgcattcttaccggtgatcgcgatttcttccagctgctgtctgagaaagtgagcgttttgctgcccgatggcacgttagtaaccccgaaagatgtccaagagaaatatggagttccgccagaacgttgggtggactttcgcgcactgactggtgatcgttcagacaacatcccgggcgttgccgggattggtgaaaagacggcgctgcgcctgctggcagaatggggctcggtggaaaatctgctcaagaaccttgatcgtgtgaaacctgatagcttacgccgcaagatcgaagcccacctggaagacttgcgtctgagtctggatcttgcgcgtattcgcaccgatctgccgttggaagtagactttaaagctctgcgtcgtcgcacacccgatttagaggggttacgcgcgttcctcgaagaactggagtttggctccctgctgcatgaattcggtttgttgggcggagagaaaccgcgtgaagaagcaccatggccgccgcccgaaggtgcctttgtcggctttcttctgtcacgcaaagagccaatgtgggcggaactgttagctcttgcagccgccgcggaagggcgtgttcaccgcgcgacctctcctgtcgaggccctcgctgacctcaaagaagcacgtggtttcttggcgaaagatttagccgtgcttgcattacgcgaaggcgttgcgctcgatccgacggacgacccgcttttggtggcttatttgctcgatcatgcgaataccaacccggaaggcgtagcccgtcgttacggcggcgagtttactgaagatgcggcagaacgcgcgttgcttagcgaacgcctcttccagacgttatttccacgtctttcggagaaattactctggctctatcaggaagtcgaacgtccattgagtcgcgtgcttgcccatatggaggctcgcggtgtgcgcttagatgttccgttgttagaagcactcagcttcgagttggagaaagaactggaacgtcttgaaggcgaagtctttcgtttagcggggcatcccttcaatctcaactctcgcgaccaattggagaaagtgctctttgatgaattaggtttaacccctgtcacgcgtacagagaagaccggcaaacgttccacttcggcagccgccttggaagcacttcgtggtgctcacccgatcgtcgagttgattttgcagtaccgcgagctcagcaaactcaaatcaacctatcttgataggttacctcgtcttgttcatccacgtacgggtcgtttacacacccgcttcaatcaaacggcgacagccaccgggcgcttgtcgtcgagtgacccgaacctccagaatattccagtgcgcacgccgctgggccaacgcattcgtaaagcgtttgttgcggaagaaggttggttattacttgcggccgattactcccagatcgaacttcgtgtattggcgcatctctctggcgacgagaatcttaaacgcgtgtttcgcgaaggcaaggatattcacactgaaaccgcagcctggatgttcgggcttgacccagccttagtggaccccaagatgcgtcgtgccgccaagaccgtcaactttggcgtactctatggtatgtcagcacatcgtcttagtcaggaattgggcattgactacaaagaagctgaagcgtttatcgagcgctatttccaatcctttccgaaagttcgcgcgtggattgaacgtaccctcgaagaaggtcgcactcgcggctatgtggaaacgttattcgggcgtcgtcgctacgttccagatcttgcatctcgtgtccgctcagtgcgcgaagctgctgagcgtatggcctggaatatgcctgttcagggaacagcggcggacctcatgaagatcgccatggtgaaattgtttccgcgcttgaaacccttaggagcccaccttcttttacaggtgcatgatgaattggtcttggaagtacccgaggatcgcgcagaagaagccaaagcactcgtgaaagaggttatggaaaacgcgtatccgttagatgttccgttggaggtcgaagtgggtgtaggccgtgattggcttgaagcgaaacaagactaatga

SEQ ID NO: 430 - protein, 844 aa, synthetic construct
  REGION 1..844: note = DNA Polymerase Variant
MHHHHHHGGSGMLPLFDLEEPPKRVLLVDGHHLAYRTFYALSLTTSRGEPVQMVYGFARSLLKALKEDGQAVVVVFDAKAPSFRHEAYEAYKAGRAPTPEDFPRQLALVKRLVDLLGLVRLEAPGYEADDVLGTLAKKAEREGMEVCILTGDRDFFQLLSEKVSVLLPDGTLVTPKDVQEKYGVPPERWVDFRALTGDRSDNIPGVAGIGEKTALRLLAEWGSVENLLKNLDRVKPDSLRRKIEAHLEDLRLSLDLARIRTDLPLEVDFKALRRRTPDLEGLRAFLEELEFGSLLHEFGLLGGEKPREEAPWPPPEGAFVGFLLSRKEPMWAELLALAAAAEGRVHRATSPVEALADLKEARGFLAKDLAVLALREGVALDPTDDPLLVAYLLDHANTNPEGVARRYGGEFTEDAAERALLSERLFQTLFPRLSEKLLWLYQEVERPLSRVLAHMEARGVRLDVPLLEALSFELEKELERLEGEVFRLAGHPFNLNSRDQLEKVLFDELGLTPVTRTEKTGKRSTSAAALEALRGAHPIVELILQYRELSKLKSTYLDRLPRLVHPRTGRLHTRFNQTATATGRLSSSDPNLQNIPVRTPLGQRIRKAFVAEEGWLLLAADYSQIELRVLAHLSGDENLKRVFREGKDIHTETAAWMFGLDPALVDPKMRRAAKTVNFGVLYGMSAHRLSQELGIDYKEAEAFIERYFQSFPKVRAWIERTLEEGRTRGYVETLFGRRRYVPDLASRVRSVREAAERMAWNMPVQGTAADLMKIAMVKLFPRLKPLGAHLLLQVHDELVLEVPEDRAEEAKALVKEVMENAYPLDVPLEVEVGVGRDWLEAKQD

SEQ ID NO: 431 - DNA, 2538 bp, synthetic construct
  misc_feature 1..2538: note = DNA Polymerase Variant
  source 1..2538: mol_type = other DNA
atgcaccatcatcatcatcatggcggtagcggcatgttaccgctgtttgatttggaagaaccaccaaaacgcgtgctgcttgttgacggccatcatctggcgtatcgtaccttctacgcactgagccttacgacctcacgtggtgagcctgtccagatggtgtatgggtttgctcgctccctgctgaaagccctgaaggaagatggtcaagccgtagtagtggttttcgatgcgaaagcaccgtcgtttcgtcacgaagcgtacgaggcctataaagctggccgcgcaccgaccccggaagactttccgcgtcagttagcgctcgtcaaacgcctcgtggatttgctgggattagttcgcttggaagctcctggctacgaggcggacgacgtgctcggtacactggccaagaaagcagaacgtgaaggcatggaggtctgcattcttaccggtgatcgcgatttcttccagctgctgtctgagaaagtgagcgttttgctgcccgatggcacgttagtaaccccgaaagatgtccaagagaaatatggagttccgccagaacgttgggtggactttcgcgcactgactggtgatcgttcagacaacatcccgggcgttgccgggattggtgaaaagacggcgctgcgcctgctggcagaatggggctcggtggaaaatctgctcaagaaccttgatcgtgtgaaacctgatagcttacgccgcaagatcgaagcccacctggaagacttgcgtctgagtctggatcttgcgcgtattcgcaccgatctgccgttggaagtagactttaaagctctgcgtcgtcgcacacccgatttagaggggttacgcgcgttcctcgaagaactggagtttggctccctgctgcatgaattcggtttgttgggcggagagaaaccgcgtgaagaagcaccatggccgccgcccgaaggtgcctttgtcggctttcttctgtcacgcaaagagccaatgtgggcggaactgttagctcttgcagccgccgcggaagggcgtgttcaccgcgcgacctctcctgtcgaggccctcgctgacctcaaagaagcacgtggtttcttggcgaaagatttagccgtgcttgcattacgcgaaggcgttgcgctcgatccgacggacgacccgcttttggtggcttatttgctcgatcctgcgaataccaacccggaaggcgtagcccgtcgttacggcggcgagtttactgaagatgcggcagaacgcgcgttgcttagcgaacgcctcttccagacgttatttccacgtctttcggagaaattactctggctctatcaggaagtcgaacgtccattgagtcgcgtgcttgcccatatggaggctcgcggtgtgcgcttagatgttccgttgttagaagcactcagcttcgagttgtctaaagaactggaacgtcttgaaggcgaagtctttcgtttagcggggcatcccttcaatctcaactctcgcgaccaattggagaaagtgctctttgatgaattaggtttaacccctgtcacgcgtacagagaagaccggcaaacgttccacttcggcagccgccttggaagcacttcgtggtgctcacccgatcgtcgagttgattttgcagtaccgcgagctcagcaaactcaaatcaacctatcttgataggttacctcgtcttgttcatccacgtacgggtcgtttacacacccgcttcaatcaaacggcgacagccaccgggcgcttgtcgtcgagtgacccgaacctccagaatattccagtgcgcacgccgctgggccaacgcattcgtaaagcgtttgttgcggaagaaggttggttattacttgcggccgattactcccagatcgaacttcgtgtattggcgcatctctctggcgacgagaatcttaaacgcgtgtttcgcgaaggcaaggatattcacactgaaaccgcagcctggatgttcgggcttgacccagccttagtggaccccaagatgcgtcgtgccgccaagaccgtcaactttggcgtactctatggtatgtcagcacatcgtcttagtcaggaattgggcattgactacaaagaagctgaagcgtttatcgagcgctatttccaatcctttccgaaagttcgcgcgtggattgaacgtaccctcgaagaaggtcgcactcgcggctatgtggaaacgttattcgggcgtcgtcgctacgttccagatcttgcatctcgtgtccgctcagtgcgcgaagctgctgagcgtatggcctggaatatgcctgttcagggaacagcggcggacctcatgaagatcgccatggtgaaattgtttccgcgcttgaaacccttaggagcccaccttcttttacaggtgcatgatgaattggtcttggaagtacccgaggatcgcgcagaagaagccaaagcactcgtgaaagaggttatggaaaacgcgtatccgttagatgttccgttggaggtcgaagtgggtgtaggccgtgattggcttgaagcgaaacaagactaatga

SEQ ID NO: 432 - protein, 844 aa, synthetic construct
  REGION 1..844: note = DNA Polymerase Variant
MHHHHHHGGSGMLPLFDLEEPPKRVLLVDGHHLAYRTFYALSLTTSRGEPVQMVYGFARSLLKALKEDGQAVVVVFDAKAPSFRHEAYEAYKAGRAPTPEDFPRQLALVKRLVDLLGLVRLEAPGYEADDVLGTLAKKAEREGMEVCILTGDRDFFQLLSEKVSVLLPDGTLVTPKDVQEKYGVPPERWVDFRALTGDRSDNIPGVAGIGEKTALRLLAEWGSVENLLKNLDRVKPDSLRRKIEAHLEDLRLSLDLARIRTDLPLEVDFKALRRRTPDLEGLRAFLEELEFGSLLHEFGLLGGEKPREEAPWPPPEGAFVGFLLSRKEPMWAELLALAAAAEGRVHRATSPVEALADLKEARGFLAKDLAVLALREGVALDPTDDPLLVAYLLDPANTNPEGVARRYGGEFTEDAAERALLSERLFQTLFPRLSEKLLWLYQEVERPLSRVLAHMEARGVRLDVPLLEALSFELSKELERLEGEVFRLAGHPFNLNSRDQLEKVLFDELGLTPVTRTEKTGKRSTSAAALEALRGAHPIVELILQYRELSKLKSTYLDRLPRLVHPRTGRLHTRFNQTATATGRLSSSDPNLQNIPVRTPLGQRIRKAFVAEEGWLLLAADYSQIELRVLAHLSGDENLKRVFREGKDIHTETAAWMFGLDPALVDPKMRRAAKTVNFGVLYGMSAHRLSQELGIDYKEAEAFIERYFQSFPKVRAWIERTLEEGRTRGYVETLFGRRRYVPDLASRVRSVREAAERMAWNMPVQGTAADLMKIAMVKLFPRLKPLGAHLLLQVHDELVLEVPEDRAEEAKALVKEVMENAYPLDVPLEVEVGVGRDWLEAKQD

SEQ ID NO: 433 - DNA, 2538 bp, synthetic construct
  misc_feature 1..2538: note = DNA Polymerase Variant
  source 1..2538: mol_type = other DNA
atgcaccatcatcatcatcatggcggtagcggcatgttaccgctgtttgatttggaagaaccaccaaaacgcgtgctgcttgttgacggccatcatctggcgtatcgtaccttctacgcactgagccttacgacctcacgtggtgagcctgtccagatggtgtatgggtttgctcgctccctgctgaaagccctgaaggaagatggtcaagccgtagtagtggttttcgatgcgaaagcaccgtcgtttcgtcacgaagcgtacgaggcctataaagctggccgcgcaccgaccccggaagactttccgcgtcagttagcgctcgtcaaacgcctcgtggatttgctgggattagttcgcttggaagctcctggctacgaggcggacgacgtgctcggtacactggccaagaaagcagaacgtgaaggcatggaggtctgcattcttaccggtgatcgcgatttcttccagctgctgtctgagaaagtgagcgttttgctgcccgatggcacgttagtaaccccgaaagatgtccaagagaaatatggagttccgccagaacgttgggtggactttcgcgcactgactggtgatcgttcagacaacatcccgggcgttgccgggattggtgaaaagacggcgctgcgcctgctggcagaatggggctcggtggaaaatctgctcaagaaccttgatcgtgtgaaacctgatagcttacgccgcaagatcgaagcccacctggaagacttgcgtctgagtctggatcttgcgcgtattcgcaccgatctgccgttggaagtagactttaaagctctgcgtcgtcgcacacccgatttagaggggttacgcgcgttcctcgaagaactggagtttggctccctgctgcatgaattcggtttgttgggcggagagaaaccgcgtgaagaagcaccatggccgccgcccgaaggtgcctttgtcggctttcttctgtcacgcaaagagccaatgtgggcggaactgttagctcttgcagccgccgcggaagggcgtgttcaccgcgcgacctctcctgtcgaggccctcgctgacctcaaagaagcacgtggtttcttggcgaaagatttagccgtgcttgcattacgcgaaggcgttgcgctcgatccgacggacgacccgcttttggtggcttatttgctcgatcctgcgaataccaacccggaaggcgtagcccgtcgttacggcggcgagtttactgaagatgcggcagaacgcgcgttgcttagcgaacgcctcttccagacgttatttccacgtctttcggagaaattactctggctctatcaggaagtcgaacgtccattgagtcgcgtgcttgcccatatggaggctcgcggtgtgcgcttagatgttccgttgttagaagcactcagcttcgagtgtgagaaagaactggaacgtcttgaaggcgaagtctttcgtttagcggggcatcccttcaatctcaactctcgcgaccaattggagaaagtgctctttgatgaattaggtttaacccctgtcacgcgtacagagaagaccggcaaacgttccacttcggcagccgccttggaagcacttcgtggtgctcacccgatcgtcgagttgattttgcagtaccgcgagctcagcaaactcaaatcaacctatcttgataggttacctcgtcttgttcatccacgtacgggtcgtttacacacccgcttcaatcaaacggcgacagccaccgggcgcttgtcgtcgagtgacccgaacctccagaatattccagtgcgcacgccgctgggccaacgcattcgtaaagcgtttgttgcggaagaaggttggttattacttgcggccgattactcccagatcgaacttcgtgtattggcgcatctctctggcgacgagaatcttaaacgcgtgtttcgcgaaggcaaggatattcacactgaaaccgcagcctggatgttcgggcttgacccagccttagtggaccccaagatgcgtcgtgccgccaagaccgtcaactttggcgtactctatggtatgtcagcacatcgtcttagtcaggaattgggcattgactacaaagaagctgaagcgtttatcgagcgctatttccaatcctttccgaaagttcgcgcgtggattgaacgtaccctcgaagaaggtcgcactcgcggctatgtggaaacgttattcgggcgtcgtcgctacgttccagatcttgcatctcgtgtccgctcagtgcgcgaagctgctgagcgtatggcctggaatatgcctgttcagggaacagcggcggacctcatgaagatcgccatggtgaaattgtttccgcgcttgaaacccttaggagcccaccttcttttacaggtgcatgatgaattggtcttggaagtacccgaggatcgcgcagaagaagccaaagcactcgtgaaagaggttatggaaaacgcgtatccgttagatgttccgttggaggtcgaagtgggtgtaggccgtgattggcttgaagcgaaacaagactaatga

SEQ ID NO: 434 - protein, 844 aa, synthetic construct
  REGION 1..844: note = DNA Polymerase Variant
MHHHHHHGGSGMLPLFDLEEPPKRVLLVDGHHLAYRTFYALSLTTSRGEPVQMVYGFARSLLKALKEDGQAVVVVFDAKAPSFRHEAYEAYKAGRAPTPEDFPRQLALVKRLVDLLGLVRLEAPGYEADDVLGTLAKKAEREGMEVCILTGDRDFFQLLSEKVSVLLPDGTLVTPKDVQEKYGVPPERWVDFRALTGDRSDNIPGVAGIGEKTALRLLAEWGSVENLLKNLDRVKPDSLRRKIEAHLEDLRLSLDLARIRTDLPLEVDFKALRRRTPDLEGLRAFLEELEFGSLLHEFGLLGGEKPREEAPWPPPEGAFVGFLLSRKEPMWAELLALAAAAEGRVHRATSPVEALADLKEARGFLAKDLAVLALREGVALDPTDDPLLVAYLLDPANTNPEGVARRYGGEFTEDAAERALLSERLFQTLFPRLSEKLLWLYQEVERPLSRVLAHMEARGVRLDVPLLEALSFECEKELERLEGEVFRLAGHPFNLNSRDQLEKVLFDELGLTPVTRTEKTGKRSTSAAALEALRGAHPIVELILQYRELSKLKSTYLDRLPRLVHPRTGRLHTRFNQTATATGRLSSSDPNLQNIPVRTPLGQRIRKAFVAEEGWLLLAADYSQIELRVLAHLSGDENLKRVFREGKDIHTETAAWMFGLDPALVDPKMRRAAKTVNFGVLYGMSAHRLSQELGIDYKEAEAFIERYFQSFPKVRAWIERTLEEGRTRGYVETLFGRRRYVPDLASRVRSVREAAERMAWNMPVQGTAADLMKIAMVKLFPRLKPLGAHLLLQVHDELVLEVPEDRAEEAKALVKEVMENAYPLDVPLEVEVGVGRDWLEAKQD

SEQ ID NO: 435 - DNA, 2538 bp, synthetic construct
  misc_feature 1..2538: note = DNA Polymerase Variant
  source 1..2538: mol_type = other DNA
atgcaccatcatcatcatcatggcggtagcggcatgttaccgctgtttgatttggaagaaccaccaaaacgcgtgctgcttgttgacggccatcatctggcgtatcgtaccttctacgcactgagccttacgacctcacgtggtgagcctgtccagatggtgtatgggtttgctcgctccctgctgaaagccctgaaggaagatggtcaagccgtagtagtggttttcgatgcgaaagcaccgtcgtttcgtcacgaagcgtacgaggcctataaagctggccgcgcaccgaccccggaagactttccgcgtcagttagcgctcgtcaaacgcctcgtggatttgctgggattagttcgcttggaagctcctggctacgaggcggacgacgtgctcggtacactggccaagaaagcagaacgtgaaggcatggaggtctgcattcttaccggtgatcgcgatttcttccagctgctgtctgagaaagtgagcgttttgctgcccgatggcacgttagtaaccccgaaagatgtccaagagaaatatggagttccgccagaacgttgggtggactttcgcgcactgactggtgatcgttcagacaacatcccgggcgttgccgggattggtgaaaagacggcgctgcgcctgctggcagaatggggctcggtggaaaatctgctcaagaaccttgatcgtgtgaaacctgatagcttacgccgcaagatcgaagcccacctggaagacttgcgtctgagtctggatcttgcgcgtattcgcaccgatctgccgttggaagtagactttaaagctctgcgtcgtcgcacacccgatttagaggggttacgcgcgttcctcgaagaactggagtttggctccctgctgcatgaattcggtttgttgggcggagagaaaccgcgtgaagaagcaccatggccgccgcccgaaggtgcctttgtcggctttcttctgtcacgcaaagagccaatgtgggcggaactgttagctcttgcagccgccgcggaagggcgtgttcaccgcgcgacctctcctgtcgaggccctcgctgacctcaaagaagcacgtggtttcttggcgaaagatttagccgtgcttgcattacgcgaaggcgttgcgctcgatccgacggacgacccgcttttggtggcttatttgctcgatcctgcgaataccaacccggaaggcgtagcccgtcgttacggcggcgagtttactgaagatgcggcagaacgcgcgttgcttagcgaacgcctcttccagacgttatttccacgtctttcggagaaattactctggctctatcaggaagtcgaacgtccattgagtcgcgtgcttgcccatatggaggctcgcggtgtgcgcttagatgttccgttgttagaagcactcagcttcgagttggagaaagaactggaacgtctttctggcgaagtctttcgtttagcggggcatcccttcaatctcaactctcgcgaccaattggagaaagtgctctttgatgaattaggtttaacccctgtcacgcgtacagagaagaccggcaaacgttccacttcggcagccgccttggaagcacttcgtggtgctcacccgatcgtcgagttgattttgcagtaccgcgagctcagcaaactcaaatcaacctatcttgataggttacctcgtcttgttcatccacgtacgggtcgtttacacacccgcttcaatcaaacggcgacagccaccgggcgcttgtcgtcgagtgacccgaacctccagaatattccagtgcgcacgccgctgggccaacgcattcgtaaagcgtttgttgcggaagaaggttggttattacttgcggccgattactcccagatcgaacttcgtgtattggcgcatctctctggcgacgagaatcttaaacgcgtgtttcgcgaaggcaaggatattcacactgaaaccgcagcctggatgttcgggcttgacccagccttagtggaccccaagatgcgtcgtgccgccaagaccgtcaactttggcgtactctatggtatgtcagcacatcgtcttagtcaggaattgggcattgactacaaagaagctgaagcgtttatcgagcgctatttccaatcctttccgaaagttcgcgcgtggattgaacgtaccctcgaagaaggtcgcactcgcggctatgtggaaacgttattcgggcgtcgtcgctacgttccagatcttgcatctcgtgtccgctcagtgcgcgaagctgctgagcgtatggcctggaatatgcctgttcagggaacagcggcggacctcatgaagatcgccatggtgaaattgtttccgcgcttgaaacccttaggagcccaccttcttttacaggtgcatgatgaattggtcttggaagtacccgaggatcgcgcagaagaagccaaagcactcgtgaaagaggttatggaaaacgcgtatccgttagatgttccgttggaggtcgaagtgggtgtaggccgtgattggcttgaagcgaaacaagactaatga

SEQ ID NO: 436 - protein, 844 aa, synthetic construct
  REGION 1..844: note = DNA Polymerase Variant
MHHHHHHGGSGMLPLFDLEEPPKRVLLVDGHHLAYRTFYALSLTTSRGEPVQMVYGFARSLLKALKEDGQAVVVVFDAKAPSFRHEAYEAYKAGRAPTPEDFPRQLALVKRLVDLLGLVRLEAPGYEADDVLGTLAKKAEREGMEVCILTGDRDFFQLLSEKVSVLLPDGTLVTPKDVQEKYGVPPERWVDFRALTGDRSDNIPGVAGIGEKTALRLLAEWGSVENLLKNLDRVKPDSLRRKIEAHLEDLRLSLDLARIRTDLPLEVDFKALRRRTPDLEGLRAFLEELEFGSLLHEFGLLGGEKPREEAPWPPPEGAFVGFLLSRKEPMWAELLALAAAAEGRVHRATSPVEALADLKEARGFLAKDLAVLALREGVALDPTDDPLLVAYLLDPANTNPEGVARRYGGEFTEDAAERALLSERLFQTLFPRLSEKLLWLYQEVERPLSRVLAHMEARGVRLDVPLLEALSFELEKELERLSGEVFRLAGHPFNLNSRDQLEKVLFDELGLTPVTRTEKTGKRSTSAAALEALRGAHPIVELILQYRELSKLKSTYLDRLPRLVHPRTGRLHTRFNQTATATGRLSSSDPNLQNIPVRTPLGQRIRKAFVAEEGWLLLAADYSQIELRVLAHLSGDENLKRVFREGKDIHTETAAWMFGLDPALVDPKMRRAAKTVNFGVLYGMSAHRLSQELGIDYKEAEAFIERYFQSFPKVRAWIERTLEEGRTRGYVETLFGRRRYVPDLASRVRSVREAAERMAWNMPVQGTAADLMKIAMVKLFPRLKPLGAHLLLQVHDELVLEVPEDRAEEAKALVKEVMENAYPLDVPLEVEVGVGRDWLEAKQD

SEQ ID NO: 437 - DNA, 2538 bp, synthetic construct
  misc_feature 1..2538: note = DNA Polymerase Variant
  source 1..2538: mol_type = other DNA
atgcaccatcatcatcatcatggcggtagcggcatgttaccgctgtttgatttggaagaaccaccaaaacgcgtgctgcttgttgacggccatcatctggcgtatcgtaccttctacgcactgagccttacgacctcacgtggtgagcctgtccagatggtgtatgggtttgctcgctccctgctgaaagccctgaaggaagatggtcaagccgtagtagtggttttcgatgcgaaagcaccgtcgtttcgtcacgaagcgtacgaggcctataaagctggccgcgcaccgaccccggaagactttccgcgtcagttagcgctcgtcaaacgcctcgtggatttgctgggattagttcgcttggaagctcctggctacgaggcggacgacgtgctcggtacactggccaagaaagcagaacgtgaaggcatggaggtctgcattcttaccggtgatcgcgatttcttccagctgctgtctgagaaagtgagcgttttgctgcccgatggcacgttagtaaccccgaaagatgtccaagagaaatatggagttccgccagaacgttgggtggactttcgcgcactgactggtgatcgttcagacaacatcccgggcgttgccgggattggtgaaaagacggcgctgcgcctgctggcagaatggggctcggtggaaaatctgctcaagaaccttgatcgtgtgaaacctgatagcttacgccgcaagatcgaagcccacctggaagacttgcgtctgagtctggatcttgcgcgtattcgcaccgatctgccgttggaagtagactttaaagctctgcgtcgtcgcacacccgatttagaggggttacgcgcgttcctcgaagaactggagttgggctccctgctgcatgaattcggtttgttgggcggagagaaaccgcgtgaagaagcaccatggccgccgcccgaaggtgcctttgtcggctttcttctgtcacgcaaagagccaatgtgggcggaactgttagctcttgcagccgccgcggaagggcgtgttcaccgcgcgacctctcctgtcgaggccctcgctgacctcaaagaagcacgtggtttcttggcgaaagatttagccgtgcttgcattacgcgaaggcgttgcgctcgatccgacggacgacccgcttttggtggcttatttgctcgatcctgcgaataccaacccggaaggcgtagcccgtcgttacggcggcgagtttactgaagatgcggcagaacgcgcgttgcttagcgaacgcctcttccagacgttatttccacgtctttcggagaaattactctggctctatcaggaagtcgaacgtccattgagtcgcgtgcttgcccatatggaggctcgcggtgtgcgcttagatgttccgttgttagaagcactcagcttcgagttggagaaagaactggaacgtcttgaaggcgaagtctttcgtttagcggggcatcccttcaatctcaactctcgcgaccaattggagaaagtgctctttgatgaattaggtttaacccctgtcacgcgtacagagaagaccggcaaacgttccacttcggcagccgccttggaagcacttcgtggtgctcacccgatcgtcgagttgattttgcagtaccgcgagctcagcaaactcaaatcaacctatcttgataggttacctcgtcttgttcatccacgtacgggtcgtttacacacccgcttcaatcaaacggcgacagccaccgggcgcttgtcgtcgagtgacccgaacctccagaatattccagtgcgcacgccgctgggccaacgcattcgtaaagcgtttgttgcggaagaaggttggttattacttgcggccgattactcccagatcgaacttcgtgtattggcgcatctctctggcgacgagaatcttaaacgcgtgtttcgcgaaggcaaggatattcacactgaaaccgcagcctggatgttcgggcttgacccagccttagtggaccccaagatgcgtcgtgccgccaagaccgtcaactttggcgtactctatggtatgtcagcacatcgtcttagtcaggaattgggcattgactacaaagaagctgaagcgtttatcgagcgctatttccaatcctttccgaaagttcgcgcgtggattgaacgtaccctcgaagaaggtcgcactcgcggctatgtggaaacgttattcgggcgtcgtcgctacgttccagatcttgcatctcgtgtccgctcagtgcgcgaagctgctgagcgtatggcctggaatatgcctgttcagggaacagcggcggacctcatgaagatcgccatggtgaaattgtttccgcgcttgaaacccttaggagcccaccttcttttacaggtgcatgatgaattggtcttggaagtacccgaggatcgcgcagaagaagccaaagcactcgtgaaagaggttatggaaaacgcgtatccgttagatgttccgttggaggtcgaagtgggtgtaggccgtgattggcttgaagcgaaacaagactaatga

SEQ ID NO: 438 - protein, 844 aa, synthetic construct
  REGION 1..844: note = DNA Polymerase Variant
MHHHHHHGGSGMLPLFDLEEPPKRVLLVDGHHLAYRTFYALSLTTSRGEPVQMVYGFARSLLKALKEDGQAVVVVFDAKAPSFRHEAYEAYKAGRAPTPEDFPRQLALVKRLVDLLGLVRLEAPGYEADDVLGTLAKKAEREGMEVCILTGDRDFFQLLSEKVSVLLPDGTLVTPKDVQEKYGVPPERWVDFRALTGDRSDNIPGVAGIGEKTALRLLAEWGSVENLLKNLDRVKPDSLRRKIEAHLEDLRLSLDLARIRTDLPLEVDFKALRRRTPDLEGLRAFLEELELGSLLHEFGLLGGEKPREEAPWPPPEGAFVGFLLSRKEPMWAELLALAAAAEGRVHRATSPVEALADLKEARGFLAKDLAVLALREGVALDPTDDPLLVAYLLDPANTNPEGVARRYGGEFTEDAAERALLSERLFQTLFPRLSEKLLWLYQEVERPLSRVLAHMEARGVRLDVPLLEALSFELEKELERLEGEVFRLAGHPFNLNSRDQLEKVLFDELGLTPVTRTEKTGKRSTSAAALEALRGAHPIVELILQYRELSKLKSTYLDRLPRLVHPRTGRLHTRFNQTATATGRLSSSDPNLQNIPVRTPLGQRIRKAFVAEEGWLLLAADYSQIELRVLAHLSGDENLKRVFREGKDIHTETAAWMFGLDPALVDPKMRRAAKTVNFGVLYGMSAHRLSQELGIDYKEAEAFIERYFQSFPKVRAWIERTLEEGRTRGYVETLFGRRRYVPDLASRVRSVREAAERMAWNMPVQGTAADLMKIAMVKLFPRLKPLGAHLLLQVHDELVLEVPEDRAEEAKALVKEVMENAYPLDVPLEVEVGVGRDWLEAKQD

SEQ ID NO: 439 - DNA, 2538 bp, synthetic construct
  misc_feature 1..2538: note = DNA Polymerase Variant
  source 1..2538: mol_type = other DNA
atgcaccatcatcatcatcatggcggtagcggcatgttaccgctgtttgatttggaagaaccaccaaaacgcgtgctgcttgttgacggccatcatctggcgtatcgtaccttctacgcactgagccttacgacctcacgtggtgagcctgtccagatggtgtatgggtttgctcgctccctgctgaaagccctgaaggaagatggtcaagccgtagtagtggttttcgatgcgaaagcaccgtcgtttcgtcacgaagcgtacgaggcctataaagctggccgcgcaccgaccccggaagactttccgcgtcagttagcgctcgtcaaacgcctcgtggatttgctgggattagttcgcttggaagctcctggctacgaggcggacgacgtgctcggtacactggccaagaaagcagaacgtgaaggcatggaggtctgcattcttaccggtgatcgcgatttcttccagctgctgtctgagaaagtgagcgttttgctgcccgatggcacgttagtaaccccgaaagatgtccaagagaaatatggagttccgccagaacgttgggtggactttcgcgcactgactggtgatcgttcagacaacatcccgggcgttgccgggattggtgaaaagacggcgctgcgcctgctggcagaatggggctcggtggaaaatctgctcaagaaccttgatcgtgtgaaacctgatagcttacgccgcaagatcgaagcccacctggaagacttgcgtctgagtctggatcttgcgcgtattcgcaccgatctgccgttggaagtagactttaaagctctgcgtcgtcgcacacccgatttagaggggttacgcgcgttcctcgaagaactggagtttggctccctgctgcatgaattcggtttgttgggcggagagaaaccgcgtgaagaagcaccatggccgccgcccgaaggtgcctttgtcggctttcttctgtcacgcaaagagccaatgtgggcggaactgttagctcttgcagccgccgcggaagggcgtgttcaccgcgcgacctctcctgtcgaggccctcgctgacctcaaagaagcacgtggtttcttggcgaaagatttagccgtgcttgcattacgcgaaggcgttgcgctcgatccgacggacgacccgcttttggtggcttatttgctcgatcctgcgaataccaacccggaaggcgtagcccgtcgttacggcggcgagtttactgaagatgcggcagaacgcgcgttgcttagcgaacgcctcttccagacgttatttccacgtctttcggagaaattactctggctctatcaggaagtcgaacgtccagtgagtcgcgtgcttgcccatatggaggctcgcggtgtgcgcttagatgttccgttgttagaagcactcagcttcgagttggagaaagaactggaacgtcttgaaggcgaagtctttcgtttagcggggcatcccttcaatctcaactctcgcgaccaattggagaaagtgctctttgatgaattaggtttaacccctgtcacgcgtacagagaagaccggcaaacgttccacttcggcagccgccttggaagcacttcgtggtgctcacccgatcgtcgagttgattttgcagtaccgcgagctcagcaaactcaaatcaacctatcttgataggttacctcgtcttgttcatccacgtacgggtcgtttacacacccgcttcaatcaaacggcgacagccaccgggcgcttgtcgtcgagtgacccgaacctccagaatattccagtgcgcacgccgctgggccaacgcattcgtaaagcgtttgttgcggaagaaggttggttattacttgcggccgattactcccagatcgaacttcgtgtattggcgcatctctctggcgacgagaatcttaaacgcgtgtttcgcgaaggcaaggatattcacactgaaaccgcagcctggatgttcgggcttgacccagccttagtggaccccaagatgcgtcgtgccgccaagaccgtcaactttggcgtactctatggtatgtcagcacatcgtcttagtcaggaattgggcattgactacaaagaagctgaagcgtttatcgagcgctatttccaatcctttccgaaagttcgcgcgtggattgaacgtaccctcgaagaaggtcgcactcgcggctatgtggaaacgttattcgggcgtcgtcgctacgttccagatcttgcatctcgtgtccgctcagtgcgcgaagctgctgagcgtatggcctggaatatgcctgttcagggaacagcggcggacctcatgaagatcgccatggtgaaattgtttccgcgcttgaaacccttaggagcccaccttcttttacaggtgcatgatgaattggtcttggaagtacccgaggatcgcgcagaagaagccaaagcactcgtgaaagaggttatggaaaacgcgtatccgttagatgttccgttggaggtcgaagtgggtgtaggccgtgattggcttgaagcgaaacaagactaatga

SEQ ID NO: 440 - protein, 844 aa, synthetic construct
  REGION 1..844: note = DNA Polymerase Variant
MHHHHHHGGSGMLPLFDLEEPPKRVLLVDGHHLAYRTFYALSLTTSRGEPVQMVYGFARSLLKALKEDGQAVVVVFDAKAPSFRHEAYEAYKAGRAPTPEDFPRQLALVKRLVDLLGLVRLEAPGYEADDVLGTLAKKAEREGMEVCILTGDRDFFQLLSEKVSVLLPDGTLVTPKDVQEKYGVPPERWVDFRALTGDRSDNIPGVAGIGEKTALRLLAEWGSVENLLKNLDRVKPDSLRRKIEAHLEDLRLSLDLARIRTDLPLEVDFKALRRRTPDLEGLRAFLEELEFGSLLHEFGLLGGEKPREEAPWPPPEGAFVGFLLSRKEPMWAELLALAAAAEGRVHRATSPVEALADLKEARGFLAKDLAVLALREGVALDPTDDPLLVAYLLDPANTNPEGVARRYGGEFTEDAAERALLSERLFQTLFPRLSEKLLWLYQEVERPVSRVLAHMEARGVRLDVPLLEALSFELEKELERLEGEVFRLAGHPFNLNSRDQLEKVLFDELGLTPVTRTEKTGKRSTSAAALEALRGAHPIVELILQYRELSKLKSTYLDRLPRLVHPRTGRLHTRFNQTATATGRLSSSDPNLQNIPVRTPLGQRIRKAFVAEEGWLLLAADYSQIELRVLAHLSGDENLKRVFREGKDIHTETAAWMFGLDPALVDPKMRRAAKTVNFGVLYGMSAHRLSQELGIDYKEAEAFIERYFQSFPKVRAWIERTLEEGRTRGYVETLFGRRRYVPDLASRVRSVREAAERMAWNMPVQGTAADLMKIAMVKLFPRLKPLGAHLLLQVHDELVLEVPEDRAEEAKALVKEVMENAYPLDVPLEVEVGVGRDWLEAKQD

SEQ ID NO: 441 - DNA, 2538 bp, synthetic construct
  misc_feature 1..2538: note = DNA Polymerase Variant
  source 1..2538: mol_type = other DNA
atgcaccatcatcatcatcatggcggtagcggcatgttaccgctgtttgatttggaagaaccaccaaaacgcgtgctgcttgttgacggccatcatctggcgtatcgtaccttctacgcactgagccttacgacctcacgtggtgagcctgtccagatggtgtatgggtttgctcgctccctgctgaaagccctgaaggaagatggtcaagccgtagtagtggttttcgatgcgaaagcaccgtcgtttcgtcacgaagcgtacgaggcctataaagctggccgcgcaccgaccccggaagactttccgcgtcagttagcgctcgtcaaacgcctcgtggatttgctgggattagttcgcttggaagctcctggctacgaggcggacgacgtgctcggtacactggccaagaaagcagaacgtgaaggcatggaggtctgcattcttaccggtgatcgcgatttcttccagctgctgtctgagaaagtgagcgttttgctgcccgatggcacgttagtaaccccgaaagatgtccaagagaaatatggagttccgccagaacgttgggtggactttcgcgcactgactggtgatcgttcagacaacatcccgggcgttgccgggattggtgaaaagacggcgctgcgcctgctggcagaatggggctcggtggaaaatctgctcaagaaccttgatcgtgtgaaacctgatagcttacgccgcaagatcgaagcccacctggaagacttgcgtctgagtctggatcttgcgcgtattcgcaccgatctgccgttggaagtagactttaaagctctgcgtcgtcgcacacccgatttagaggggttacgcgcgttcctcgaagaactggagtttggctccctgctgcatgaattcggtttgttgggcggagagaaaccgcgtgaagaagcaccatggccgccgcccgaaggtgcctttgtcggctttcttctgtcacgcaaagagccaatgtgggcggaactgttagctcttgcagccgccgcggaagggcgtgttcaccgcgcgacctctcctgtcgaggccctcgctgacctcaaagaagcacgtggtttcttggcgaaagatttagccgtgcttgcattacgcgaaggcgttgcgctcgatccgacggacgacccgcttttggtggcttatttgctcgatcctgcgaataccaacccggaaggcgtagcccgtcgttacggcggcgagtttactgaagatgcggcagaacgcgcgttgcttagcgaacgcctcttccagacgttatttccacgtctttcggagaaattactctggctctatcaggaagtcgaacgtccattgagtcgcgtgcttgcccatatggaggctcgcggtgtgcgcttagatgttccgttgttagaagcactcagcttcgagttggagaaagaactggaacgtcttgaaggcgaagtctttcgtttagcggggcatcccttcaatctcaactctcgcgaccaattggagaaagtgctctttgatgaattaggtttaacccctgtcacgcgtacagagaagaccggcaaacgttccacttcggcagccgccttggaagcacttcgtggtgctcacccgatcgtcgagttgattttgcagtaccgcgagctcagcaaactcaaatcaacctatcttgataggttacctcgtcttgttcatccacgtacgggtcgtttacacacccgcttcaatcaaacgcagacagccaccgggcgcttgtcgtcgagtgacccgaacctccagaatattccagtgcgcacgccgctgggccaacgcattcgtaaagcgtttgttgcggaagaaggttggttattacttgcggccgattactcccagatcgaacttcgtgtattggcgcatctctctggcgacgagaatcttaaacgcgtgtttcgcgaaggcaaggatattcacactgaaaccgcagcctggatgttcgggcttgacccagccttagtggaccccaagatgcgtcgtgccgccaagaccgtcaactttggcgtactctatggtatgtcagcacatcgtcttagtcaggaattgggcattgactacaaagaagctgaagcgtttatcgagcgctatttccaatcctttccgaaagttcgcgcgtggattgaacgtaccctcgaagaaggtcgcactcgcggctatgtggaaacgttattcgggcgtcgtcgctacgttccagatcttgcatctcgtgtccgctcagtgcgcgaagctgctgagcgtatggcctggaatatgcctgttcagggaacagcggcggacctcatgaagatcgccatggtgaaattgtttccgcgcttgaaacccttaggagcccaccttcttttacaggtgcatgatgaattggtcttggaagtacccgaggatcgcgcagaagaagccaaagcactcgtgaaagaggttatggaaaacgcgtatccgttagatgttccgttggaggtcgaagtgggtgtaggccgtgattggcttgaagcgaaacaagactaatga

SEQ ID NO: 442 - protein, 844 aa, synthetic construct
  REGION 1..844: note = DNA Polymerase Variant
MHHHHHHGGSGMLPLFDLEEPPKRVLLVDGHHLAYRTFYALSLTTSRGEPVQMVYGFARSLLKALKEDGQAVVVVFDAKAPSFRHEAYEAYKAGRAPTPEDFPRQLALVKRLVDLLGLVRLEAPGYEADDVLGTLAKKAEREGMEVCILTGDRDFFQLLSEKVSVLLPDGTLVTPKDVQEKYGVPPERWVDFRALTGDRSDNIPGVAGIGEKTALRLLAEWGSVENLLKNLDRVKPDSLRRKIEAHLEDLRLSLDLARIRTDLPLEVDFKALRRRTPDLEGLRAFLEELEFGSLLHEFGLLGGEKPREEAPWPPPEGAFVGFLLSRKEPMWAELLALAAAAEGRVHRATSPVEALADLKEARGFLAKDLAVLALREGVALDPTDDPLLVAYLLDPANTNPEGVARRYGGEFTEDAAERALLSERLFQTLFPRLSEKLLWLYQEVERPLSRVLAHMEARGVRLDVPLLEALSFELEKELERLEGEVFRLAGHPFNLNSRDQLEKVLFDELGLTPVTRTEKTGKRSTSAAALEALRGAHPIVELILQYRELSKLKSTYLDRLPRLVHPRTGRLHTRFNQTQTATGRLSSSDPNLQNIPVRTPLGQRIRKAFVAEEGWLLLAADYSQIELRVLAHLSGDENLKRVFREGKDIHTETAAWMFGLDPALVDPKMRRAAKTVNFGVLYGMSAHRLSQELGIDYKEAEAFIERYFQSFPKVRAWIERTLEEGRTRGYVETLFGRRRYVPDLASRVRSVREAAERMAWNMPVQGTAADLMKIAMVKLFPRLKPLGAHLLLQVHDELVLEVPEDRAEEAKALVKEVMENAYPLDVPLEVEVGVGRDWLEAKQD

SEQ ID NO: 443 - DNA, 2538 bp, synthetic construct
  misc_feature 1..2538: note = DNA Polymerase Variant
  source 1..2538: mol_type = other DNA
atgcaccatcatcatcatcatggcggtagcggcatgttaccgctgtttgatttggaagaaccaccaaaacgcgtgctgcttgttgacggccatcatctggcgtatcgtaccttctacgcactgagccttacgacctcacgtggtgagcctgtccagatggtgtatgggtttgctcgctccctgctgaaagccctgaaggaagatggtcaagccgtagtagtggttttcgatgcgaaagcaccgtcgtttcgtcacgaagcgtacgaggcctataaagctggccgcgcaccgaccccggaagactttccgcgtcagttagcgctcgtcaaacgcctcgtggatttgctgggattagttcgcttggaagctcctggctacgaggcggacgacgtgctcggtacactggccaagaaagcagaacgtgaaggcatggaggtctgcattcttaccggtgatcgcgatttcttccagctgctgtctgagaaagtgagcgttttgctgcccgatggcacgttagtaaccccgaaagatctgcaagagaaatatggagttccgccagaacgttgggtggactttcgcgcactgactggtgatcgttcagacaacatcccgggcgttgccgggattggtgaaaagacggcgctgcgcctgctggcagaatggggctcggtggaaaatctgctcaagaaccttgatcgtgtgaaacctgatagcttacgccgcaagatcgaagcccacctggaagacttgcgtctgagtctggatcttgcgcgtattcgcaccgatctgccgttggaagtagactttaaagctctgcgtcgtcgcacacccgatttagaggggttacgcgcgttcctcgaagaactggagtttggctccctgctgcatgaattcggtttgttgggcggagagaaaccgcgtgaagaagcaccatggccgccgcccgaaggtgcctttgtcggctttcttctgtcacgcaaagagccaatgtgggcggaactgttagctcttgcagccgccgcggaagggcgtgttcaccgcgcgacctctcctgtcgaggccctcgctgacctcaaagaagcacgtggtttcttggcgaaagatttagccgtgcttgcattacgcgaaggcgttgcgctcgatccgacggacgacccgcttttggtggcttatttgctcgatcctgcgaataccaacccggaaggcgtagcccgtcgttacggcggcgagtttactgaagatgcggcagaacgcgcgttgcttagcgaacgcctcttccagacgttatttccacgtctttcggagaaattactctggctctatcaggaagtcgaacgtccattgagtcgcgtgcttgcccatatggaggctcgcggtgtgcgcttagatgttccgttgttagaagcactcagcttcgagttggagaaagaactggaacgtcttgaaggcgaagtctttcgtttagcggggcatcccttcaatctcaactctcgcgaccaattggagaaagtgctctttgatgaattaggtttaacccctgtcacgcgtacagagaagaccggcaaacgttccacttcggcagctgccttggaagcacttcgtggtgctcacccgatcgtcggcttgattttgcagtatcgcgagctctgcaaactcaaaagtacctatctggataggttacctcgtcttgttcatccacgtacgggtcgtttacacacccgcttcaatcaaacggcgacagccaccgggcgcttgtcgtcgagtgacccgaacctccagaatattccagtgcgcacgccgctgggccaacacattcgtaaagcgtttgttgcggaagaaggttggttattacttgcggccgattactcccagatcgaacttcgtgtattggcgcatctctctggcgacgagaatcttaaacgcgtgtttcgcgaaggcaaggatattcacactgaaaccgcagcctggatgttcgggcttgacccagccttagtggaccccaagatgcgtcgtgccgccaagaccgtcaactttggcgtactctatggtatgtcagcacatcgtcttagtcaggaattgggcattgactacaaagaagctgaagcgtttatcgagcgctatttccaatcctttccgaaagttcgcgcgtggattgaacgtaccctcgaagaaggtcgcactcgcggctatgtggaaacgttattcgggcgtcgtcgctacgttccagatcttgcatctcgtgtccgctcagtgcgcgaagctgctgagcgtatggcctggaatatgcctgttcagggaacagcggcggacctcatgaagatcgccatggtgaaattgtttccgcgcttgaaacccttaggagcccaccttcttttacaggtgcatgatgaattggtcttggaagtacccgaggatcgcgcagaagaagccaaagcactcgtgaaagaggttatggaaaacgcgtatccgttagatgttccgttggaggtcgaagtgggtgtaggccgtgattggcttgaagcgaaacaagactaatga

SEQ ID NO: 444 - protein, 844 aa, synthetic construct
  REGION 1..844: note = DNA Polymerase Variant
MHHHHHHGGSGMLPLFDLEEPPKRVLLVDGHHLAYRTFYALSLTTSRGEPVQMVYGFARSLLKALKEDGQAVVVVFDAKAPSFRHEAYEAYKAGRAPTPEDFPRQLALVKRLVDLLGLVRLEAPGYEADDVLGTLAKKAEREGMEVCILTGDRDFFQLLSEKVSVLLPDGTLVTPKDLQEKYGVPPERWVDFRALTGDRSDNIPGVAGIGEKTALRLLAEWGSVENLLKNLDRVKPDSLRRKIEAHLEDLRLSLDLARIRTDLPLEVDFKALRRRTPDLEGLRAFLEELEFGSLLHEFGLLGGEKPREEAPWPPPEGAFVGFLLSRKEPMWAELLALAAAAEGRVHRATSPVEALADLKEARGFLAKDLAVLALREGVALDPTDDPLLVAYLLDPANTNPEGVARRYGGEFTEDAAERALLSERLFQTLFPRLSEKLLWLYQEVERPLSRVLAHMEARGVRLDVPLLEALSFELEKELERLEGEVFRLAGHPFNLNSRDQLEKVLFDELGLTPVTRTEKTGKRSTSAAALEALRGAHPIVGLILQYRELCKLKSTYLDRLPRLVHPRTGRLHTRFNQTATATGRLSSSDPNLQNIPVRTPLGQHIRKAFVAEEGWLLLAADYSQIELRVLAHLSGDENLKRVFREGKDIHTETAAWMFGLDPALVDPKMRRAAKTVNFGVLYGMSAHRLSQELGIDYKEAEAFIERYFQSFPKVRAWIERTLEEGRTRGYVETLFGRRRYVPDLASRVRSVREAAERMAWNMPVQGTAADLMKIAMVKLFPRLKPLGAHLLLQVHDELVLEVPEDRAEEAKALVKEVMENAYPLDVPLEVEVGVGRDWLEAKQD

SEQ ID NO: 445 - DNA, 2538 bp, synthetic construct
  misc_feature 1..2538: note = DNA Polymerase Variant
  source 1..2538: mol_type = other DNA
atgcaccatcatcatcatcatggcggtagcggcatgttaccgctgtttgatttggaagaaccaccaaaacgcgtgctgcttgttgacggccatcatctggcgtatcgtaccttctacgcactgagccttacgacctcacgtggtgagcctgtccagatggtgtatgggtttgctcgctccctgctgaaagccctgaaggaagatggtcaagccgtagtagtggttttcgatgcgaaagcaccgtcgtttcgtcacgaagcgtacgaggcctataaagctggccgcgcaccgaccccggaagactttccgcgtcagttagcgctcgtcaaacgcctcgtggatttgctgggattagttcgcttggaagctcctggctacgaggcggacgacgtgctcggtacactggccaagaaagcagaacgtgaaggcatggaggtctgcattcttaccggtgatcgcgatttcttccagctgctgtctgagaaagtgagcgttttgctgcccgatggcacgttagtaaccccgaaagatgtccaagagaaatatggagttccgccagaacgttgggtggactttcgcgcactgactggtgatcgttcagacaacatcccgggcgttgccgggattggtgaaaagacggcgctgcgcctgctggcagaatggggctcggtggaaaatctgctcaagaaccttgatcgtgtgaaacctgatagcttacgccgcaagatcgaagcccacctggaagacttgcgtctgagtctggatcttgcgcgtattcgcaccgatctgccgttggaagtagactttaaagctctgcgtcgtcgcacacccgatttagaggggttacgcgcgttcctcgaagaactggagtttggctccctgctgcatgaattcggtttgttgggcggagagaaaccgcgtgaagaagcaccatggccgccgcccgaaggtgcctttgtcggctttcttctgtcacgcaaagagccaatgtgggcggaactgttagctcttgcagccgccgcggaagggcgtgttcaccgcgcgacctctcctgtcgaggccctcgctgacctcaaagaagcacgtggtttcttggcgaaagatttagccgtgcttgcattacgcgaaggcgttgcgctcgatccgacggacgacccgcttttggtggcttatttgctcgatcctgcgaataccaacccggaaggcgtagcccgtcgttacggcggcgagtttactgaagatgcggcagaacgcgcgttgcttagcgaacgcctcttccagacgttatttccacgtctttcggagaaattactctggctctatcaggaagtcgaacgtccattgagtcgcgtgcttgcccatatggaggctcgcggtgtgcgcttagatgttccgttgttagaagcactcagcttcgagttggagaaagtgctggaacgtcttgaaggcgaagtctttcgtttagcggggcatcccttcaatctcaactctcgcgaccaattggagaaagtgctctttgatgaattaggtttaacccctgtcacgcgtacagagaagaccggcaaacgttccacttcggcagccgccttggaagcacttcgtggtgctcacccgatcgtcgagttgattttgcagtaccgcgagctcagcaaactcaaatcaacctatcttgataggttacctcgtcttgttcatccacgtacgggtcgtttacacacccgcttcaatcaaacggcgacagccaccgggcgcttgtcgtcgagtgacccgaacctccagaatattccagtgcgcacgccgctgggccaacgcattcgtaaagcgtttgttgcggaagaaggttggttattacttgcggccgattactcccagatcgaacttcgtgtattggcgcatctctctggcgacgagaatcttaaacgcgtgtttcgcgaaggcaaggatattcacactgaaaccgcagcctggatgttcgggcttgacccagccttagtggaccccaagatgcgtcgtgccgccaagaccgtcaactttggcgtactctatggtatgtcagcacatcgtcttagtcaggaattgggcattgactacaaagaagctgaagcgtttatcgagcgctatttccaatcctttccgaaagttcgcgcgtggattgaacgtaccctcgaagaaggtcgcactcgcggctatgtggaaacgttattcgggcgtcgtcgctacgttccagatcttgcatctcgtgtccgctcagtgcgcgaagctgctgagcgtatggcctggaatatgcctgttcagggaacagcggcggacctcatgaagatcgccatggtgaaattgtttccgcgcttgaaacccttaggagcccaccttcttttacaggtgcatgatgaattggtcttggaagtacccgaggatcgcgcagaagaagccaaagcactcgtgaaagaggttatggaaaacgcgtatccgttagatgttccgttggaggtcgaagtgggtgtaggccgtgattggcttgaagcgaaacaagactaatga

SEQ ID NO: 446 - protein, 844 aa, synthetic construct
  REGION 1..844: note = DNA Polymerase Variant
MHHHHHHGGSGMLPLFDLEEPPKRVLLVDGHHLAYRTFYALSLTTSRGEPVQMVYGFARSLLKALKEDGQAVVVVFDAKAPSFRHEAYEAYKAGRAPTPEDFPRQLALVKRLVDLLGLVRLEAPGYEADDVLGTLAKKAEREGMEVCILTGDRDFFQLLSEKVSVLLPDGTLVTPKDVQEKYGVPPERWVDFRALTGDRSDNIPGVAGIGEKTALRLLAEWGSVENLLKNLDRVKPDSLRRKIEAHLEDLRLSLDLARIRTDLPLEVDFKALRRRTPDLEGLRAFLEELEFGSLLHEFGLLGGEKPREEAPWPPPEGAFVGFLLSRKEPMWAELLALAAAAEGRVHRATSPVEALADLKEARGFLAKDLAVLALREGVALDPTDDPLLVAYLLDPANTNPEGVARRYGGEFTEDAAERALLSERLFQTLFPRLSEKLLWLYQEVERPLSRVLAHMEARGVRLDVPLLEALSFELEKVLERLEGEVFRLAGHPFNLNSRDQLEKVLFDELGLTPVTRTEKTGKRSTSAAALEALRGAHPIVELILQYRELSKLKSTYLDRLPRLVHPRTGRLHTRFNQTATATGRLSSSDPNLQNIPVRTPLGQRIRKAFVAEEGWLLLAADYSQIELRVLAHLSGDENLKRVFREGKDIHTETAAWMFGLDPALVDPKMRRAAKTVNFGVLYGMSAHRLSQELGIDYKEAEAFIERYFQSFPKVRAWIERTLEEGRTRGYVETLFGRRRYVPDLASRVRSVREAAERMAWNMPVQGTAADLMKIAMVKLFPRLKPLGAHLLLQVHDELVLEVPEDRAEEAKALVKEVMENAYPLDVPLEVEVGVGRDWLEAKQD

SEQ ID NO: 447 - DNA, 2538 bp, synthetic construct
  misc_feature 1..2538: note = DNA Polymerase Variant
  source 1..2538: mol_type = other DNA
atgcaccatcatcatcatcatggcggtagcggcatgttaccgctgtttgatttggaagaaccaccaaaacgcgtgctgcttgttgacggccatcatctggcgtatcgtaccttctacgcactgagccttacgacctcacgtggtgagcctgtccagatggtgtatgggtttgctcgctccctgctgaaagccctgaaggaagatggtcaagccgtagtagtggttttcgatgcgaaagcaccgtcgtttcgtcacgaagcgtacgaggcctataaagctggccgcgcaccgaccccggaagactttccgcgtcagttagcgctcgtcaaacgcctcgtggatttgctgggattagttcgcttggaagctcctggctacgaggcggacgacgtgctcggtacactggccaagaaagcagaacgtgaaggcatggaggtctgcattcttaccggtgatcgcgatttcttccagctgctgtctgagaaagtgagcgttttgctgcccgatggcacgttagtaaccccgaaagatctgcaagagaaatatggagttccgccagaacgttgggtggactttcgcgcactgactggtgatcgttcagacaacatcccgggcgttgccgggattggtgaaaagacggcgctgcgcctgctggcagaatggggctcggtggaaaatctgctcaagaaccttgatcgtgtgaaacctgatagcttacgccgcaagatcgaagcccacctggaagacttgcgtctgagtctggatcttgtccgtattcgcaccgatctgccgttggaagtagactttaaagctctgcgtcgtcgcacacccgatttagaggggttacgcgcgttcctcgaagaactggagtttggctccctgctgcatgaattcggtttgttgggcggagagaaaccgcgtgaagaagcaccatggccgccgcccgaaggtgcctttgtcggctttcttctgtcacgcaaagagccaatgtgggcggaactgttagctcttgcagccgccgcggaagggcgtgttcaccgcgcgacctctcctgtcgaggccctcgctgacctcaaagaagcacgtggtttcttggcgaaagatttagccgtgcttgcattacgcgaaggcgttgcgctcgatccgacggacgacccgcttttggtggcttatttgctcgatcctgcgaataccaacccggaaggtgtcgcccgtcgttacggcggcgagtttactgaagatgcggcagaacgcgcgttgcttagcgaacgcctcttccagacgttatttccacgtctttcggagaaattactctggctctatcaggaagtcgaacgtccattgagtcgcgtgcttgcccatatggaggctcgcggtgtgcgcttagatgttccgttgttagaagcactcagcttcgagttggagaaagaactggaacgtcttgaaggcgaagtctttcgtttagcggggcatcccttcaatctcaactctcgcgaccaattggagaaagtgctctttgatgaattaggtttaacccctgtcacgcgtacagagaagaccggcaaacgttccacttcggcagctgccttggaagcacttcgtggtgctcacccgatcgtcgagttgattttgcagtaccgcgagctcagcaaactcaaatcaacctatcttgataggttacctcgtcttgttcatccacgtacgggtcgtttacacacccgcttcaatcaaacggcgacagccaccgggcgcttgtcgtcgagtgacccgaacctccagaatattccagtgcgcacgccgctgggccaacgcattcgtaaagcgtttgttgcggaagaaggttggttattacttgcggccgattactcccagatcgaacttcgtgtattggcgcatctctctggcgacgagaatcttaaacgcgtgtttcgcgaaggcaaggatattcacactgaaaccgcagcctggatgttcgggcttgacccagccttagtggaccccaagatgcgtcgtgccgccaagaccgtcaactttggcgtactctatggtatgtcagcacatcgtcttagtcaggaattgggcattgactacaaagaagctgaagcgtttatcgagcgctatttccaatcctttccgaaagttcgcgcgtggattgaacgtaccctcgaagaaggtcgcactcgcggctatgtggaaacgttattcgggcgtcgtcgctacgttccagatcttgcatctcgtgtccgctcagtgcgcgaagctgctgagcgtatggcctggaatatgcctgttcagggaacagcggcggacctcatgaagatcgccatggtgaaattgtttccgcgcttgaaacccttaggagcccaccttcttttacaggtgcatgatgaattggtcttggaagtacccgaggatcgcgcagaagaagccaaagcactcgtgaaagaggttatggaaaacgcgtatccgttagatgttccgttggaggtcgaagtgggtgtaggccgtgattggcttgaagcgaaacaagactaatga

SEQ ID NO: 448 - protein, 844 aa, synthetic construct
  REGION 1..844: note = DNA Polymerase Variant
MHHHHHHGGSGMLPLFDLEEPPKRVLLVDGHHLAYRTFYALSLTTSRGEPVQMVYGFARSLLKALKEDGQAVVVVFDAKAPSFRHEAYEAYKAGRAPTPEDFPRQLALVKRLVDLLGLVRLEAPGYEADDVLGTLAKKAEREGMEVCILTGDRDFFQLLSEKVSVLLPDGTLVTPKDLQEKYGVPPERWVDFRALTGDRSDNIPGVAGIGEKTALRLLAEWGSVENLLKNLDRVKPDSLRRKIEAHLEDLRLSLDLVRIRTDLPLEVDFKALRRRTPDLEGLRAFLEELEFGSLLHEFGLLGGEKPREEAPWPPPEGAFVGFLLSRKEPMWAELLALAAAAEGRVHRATSPVEALADLKEARGFLAKDLAVLALREGVALDPTDDPLLVAYLLDPANTNPEGVARRYGGEFTEDAAERALLSERLFQTLFPRLSEKLLWLYQEVERPLSRVLAHMEARGVRLDVPLLEALSFELEKELERLEGEVFRLAGHPFNLNSRDQLEKVLFDELGLTPVTRTEKTGKRSTSAAALEALRGAHPIVELILQYRELSKLKSTYLDRLPRLVHPRTGRLHTRFNQTATATGRLSSSDPNLQNIPVRTPLGQRIRKAFVAEEGWLLLAADYSQIELRVLAHLSGDENLKRVFREGKDIHTETAAWMFGLDPALVDPKMRRAAKTVNFGVLYGMSAHRLSQELGIDYKEAEAFIERYFQSFPKVRAWIERTLEEGRTRGYVETLFGRRRYVPDLASRVRSVREAAERMAWNMPVQGTAADLMKIAMVKLFPRLKPLGAHLLLQVHDELVLEVPEDRAEEAKALVKEVMENAYPLDVPLEVEVGVGRDWLEAKQD

SEQ ID NO: 449 - DNA, 2538 bp, synthetic construct
  misc_feature 1..2538: note = DNA Polymerase Variant
  source 1..2538: mol_type = other DNA
atgcaccatcatcatcatcatggcggtagcggcatgttaccgctgtttgatttggaagaaccaccaaaacgcgtgctgcttgttgacggccatcatctggcgtatcgtaccttctacgcactgagccttacgacctcacgtggtgagcctgtccagatggtgtatgggtttgctcgctccctgctgaaagccctgaaggaagatggtcaagccgtagtagtggttttcgatgcgaaagcaccgtcgtttcgtcacgaagcgtacgaggcctataaagctggccgcgcaccgaccccggaagactttccgcgtcagttagcgctcgtcaaacgcctcgtggatttgctgggattagttcgcttggaagctcctggctacgaggcggacgacgtgctcggtacactggccaagaaagcagaacgtgaaggcatggaggtctgcattcttaccggtgatcgcgatttcttccagctgctgtctgagaaagtgagcgttttgctgcccgatggcacgttagtaaccccgaaagatgtgcaagagaaatatggagttccgccagaacgttgggtggactttcgcgcactgactggtgatcgttcagacaacatcccgggcgttgccgggattggtgaaaagacggcgctgcgcctgctggcagaatggggctcggtggaaaatctgctcaagaaccttgatcgtgtgaaacctgatagcttacgccgcaagatcgaagcccacctggaagacttgcgtctgagtctggatcttgtccgtattcgcaccgatctgccgttggaagtagactttaaagctctgcgtcgtcgcacacccgatttagaggggttacgcgcgttcctcgaagaactggagtttggctccctgctgcatgaattcggtttgttgggcggagagaaaccgcgtgaagaagcaccatggccgccgcccgaaggtgcctttgtcggctttcttctgtcacgcaaagagccaatgtgggcggaactgttagctcttgcagccgccgcggaagggcgtgttcaccgcgcgacctctcctgtcgaggccctcgctgacctcaaagaagcacgtggtttcttggcgaaagatttagccgtgcttgcattacgcgaaggtgttgcgctcgatccgacggacgacccgcttttggtggcttatttgctcgatcctgcgaataccaacccggaacgtgtcgcccgtcgttacggcggcgagtttactgaagatgcggcagaacgcgcgttgcttagcgaacgcctcttccagacgttatttccacgtctttcggagaaattactctggctctatcaggaagtcgaacgtccattgagtcgcgtgcttgcccatatggaggctcgcggtgtgcgcttagatgttccgttgttagaagcactcagcttcgagttggagaaagaactggaacgtcttgaaggcgaagtctttcgtttagcgtggcatcccttcaatctcaactctcgcgaccaattggagaaagtgctctttgatgaattaggtttaacccctgtcacgcgtacagagaagaccggcaaacgttccacttcggcaggtgccttggaagcacttcgtggtgctcacccgatcgtcggcttgattttgcagtatcgcgagctcagcaaactcaaatcaacctatcttgataggttacctcgtcttgttcatccacgtacgggtcgtttacacacccgcttcaatcaaacggcgacagccaccgggcgcttgtcgtcgagtgacccgaacctccagaatattccagtgcgcacgccgctgggccaacgcattcgtaaagcgtttgttgcggaagaaggttggttattacttgcggccgattactcccagatcgaacttcgtgtattggcgcatctctctggcgacgagaatcttaaacgcgtgtttcgcgaaggcaaggatattcacactgaaaccgcagcctggatgttcggggtggacccagccttagtggaccccaagatgcgtcgtgccgccaagaccgtcaactttggcgtactctatggtatgtcagcacatcgtcttagtcaggaattgggcattgactacaaagaagctgaagcgtttatcgagcgctatttccaatcctttccgaaagttcgcgcgtggattgaacgtaccctcgaagaaggtcgcactcgcggctatgtggaaacgttattcgggcgtcgtcgctacgttccagatcttgcatctcgtgtccgctcagtgcgcgaagctgctgagcgtatggcctggaatatgcctgttcagggaacagcggcggacctcatgaagatcgccatggtgaaattgtttccgcgcttgaaacccttaggagcccaccttcttttacaggtgcatgatgaattggtcttggaagtacccgaggatcgcgcagaagaagccaaagcactcgtgaaagaggttatggaaaacgcgtatccgttagatgttccgttggaggtcgaagtgggtgtaggccgtgattggcttgaagcgaaacaagactaatga

SEQ ID NO: 450 - protein, 844 aa, synthetic construct
  REGION 1..844: note = DNA Polymerase Variant
MHHHHHHGGSGMLPLFDLEEPPKRVLLVDGHHLAYRTFYALSLTTSRGEPVQMVYGFARSLLKALKEDGQAVVVVFDAKAPSFRHEAYEAYKAGRAPTPEDFPRQLALVKRLVDLLGLVRLEAPGYEADDVLGTLAKKAEREGMEVCILTGDRDFFQLLSEKVSVLLPDGTLVTPKDVQEKYGVPPERWVDFRALTGDRSDNIPGVAGIGEKTALRLLAEWGSVENLLKNLDRVKPDSLRRKIEAHLEDLRLSLDLVRIRTDLPLEVDFKALRRRTPDLEGLRAFLEELEFGSLLHEFGLLGGEKPREEAPWPPPEGAFVGFLLSRKEPMWAELLALAAAAEGRVHRATSPVEALADLKEARGFLAKDLAVLALREGVALDPTDDPLLVAYLLDPANTNPERVARRYGGEFTEDAAERALLSERLFQTLFPRLSEKLLWLYQEVERPLSRVLAHMEARGVRLDVPLLEALSFELEKELERLEGEVFRLAWHPFNLNSRDQLEKVLFDELGLTPVTRTEKTGKRSTSAGALEALRGAHPIVGLILQYRELSKLKSTYLDRLPRLVHPRTGRLHTRFNQTATATGRLSSSDPNLQNIPVRTPLGQRIRKAFVAEEGWLLLAADYSQIELRVLAHLSGDENLKRVFREGKDIHTETAAWMFGVDPALVDPKMRRAAKTVNFGVLYGMSAHRLSQELGIDYKEAEAFIERYFQSFPKVRAWIERTLEEGRTRGYVETLFGRRRYVPDLASRVRSVREAAERMAWNMPVQGTAADLMKIAMVKLFPRLKPLGAHLLLQVHDELVLEVPEDRAEEAKALVKEVMENAYPLDVPLEVEVGVGRDWLEAKQD

SEQ ID NO: 451 - DNA, 2538 bp, synthetic construct
  misc_feature 1..2538: note = DNA Polymerase Variant
  source 1..2538: mol_type = other DNA
atgcaccatcatcatcatcatggcggtagcggcatgttaccgctgtttgatttggaagaaccaccaaaacgcgtgctgcttgttgacggccatcatctggcgtatcgtaccttctacgcactgagccttacgacctcacgtggtgagcctgtccagatggtgtatgggtttgctcgctccctgctgaaagccctgaaggaagatggtcaagccgtagtagtggttttcgatgcgaaagcaccgtcgtttcgtcacgaagcgtacgaggcctataaagctggccgcgcaccgaccccggaagactttccgcgtcagttagcgctcgtcaaacgcctcgtggatttgctgggattagttcgcttggaagctcctggctacgaggcggacgacgtgctcggtacactggccaagaaagcagaacgtgaaggcatggaggtctgcattcttaccggtgatcgcgatttcttccagctgctgtctgagaaagtgagcgttttgctgcccgatggcacgttagtaaccccgaaagatgtccaagagaaatatggagttccgccagaacgttgggtggactttcgcgcactgactggtgatcgttcagacaacatcccgggcgttgccgggattggtgaaaagacggcgctgcgcctgctggcagaatggggctcggtggaaaatctgctcaagaaccttgatcgtgtgaaacctgatagcttacgccgcaagatcgaagcccacctggaagacttgcgtctgagtctggatcttgcgcgtattcgcaccgatctgccgttggaagtagactttaaagctctgcgtcgtcgcacacccgatttagaggggttacgcgcgttcctcgaagaactggagtttggctccctgctgcatgaattcggtttgttgggcggagagaaaccgcgtgaagaagcaccatggccgccgcccgaaggtgcctttgtcggctttcttctgtcacgcaaattgccaatgtgggcggaactgttagctcttgcagccgccgcggaagggcgtgttcaccgcgcgacctctcctgtcgaggccctcgctgacctcaaagaagcacgtggtttcttggcgaaagatttagccgtgcttgcattacgcgaaggcgttgcgctcgatccgacggacgacccgcttttggtggcttatttgctcgatcctgcgaataccaacccggaaggcgtagcccgtcgttacggcggcgagtttactgaagatgcggcagaacgcgcgttgcttagcgaacgcctcttccagacgttatttccacgtctttcggagaaattactctggctctatcaggaagtcgaacgtccattgagtcgcgtgcttgcccatatggaggctcgcggtgtgcgcttagatgttccgttgttagaagcactcagcttcgagttggagaaagaactggaacgtcttgaaggcgaagtctttcgtttagcggggcatcccttcaatctcaactctcgcgaccaattggagaaagtgctctttgatgaattaggtttaacccctgtcacgcgtacagagaagaccggcaaacgttccacttcggcagccgccttggaagcacttcgtggtgctcacccgatcgtcgagttgattttgcagtaccgcgagctcagcaaactcaaatcaacctatcttgataggttacctcgtcttgttcatccacgtacgggtcgtttacacacccgcttcaatcaaacggcgacagccaccgggcgcttgtcgtcgagtgacccgaacctccagaatattccagtgcgcacgccgctgggccaacgcattcgtaaagcgtttgttgcggaagaaggttggttattacttgcggccgattactcccagatcgaacttcgtgtattggcgcatctctctggcgacgagaatcttaaacgcgtgtttcgcgaaggcaaggatattcacactgaaaccgcagcctggatgttcgggcttgacccagccttagtggaccccaagatgcgtcgtgccgccaagaccgtcaactttggcgtactctatggtatgtcagcacatcgtcttagtcaggaattgggcattgactacaaagaagctgaagcgtttatcgagcgctatttccaatcctttccgaaagttcgcgcgtggattgaacgtaccctcgaagaaggtcgcactcgcggctatgtggaaacgttattcgggcgtcgtcgctacgttccagatcttgcatctcgtgtccgctcagtgcgcgaagctgctgagcgtatggcctggaatatgcctgttcagggaacagcggcggacctcatgaagatcgccatggtgaaattgtttccgcgcttgaaacccttaggagcccaccttcttttacaggtgcatgatgaattggtcttggaagtacccgaggatcgcgcagaagaagccaaagcactcgtgaaagaggttatggaaaacgcgtatccgttagatgttccgttggaggtcgaagtgggtgtaggccgtgattggcttgaagcgaaacaagactaatga

SEQ ID NO: 452 - protein, 844 aa, synthetic construct
  REGION 1..844: note = DNA Polymerase Variant
MHHHHHHGGSGMLPLFDLEEPPKRVLLVDGHHLAYRTFYALSLTTSRGEPVQMVYGFARSLLKALKEDGQAVVVVFDAKAPSFRHEAYEAYKAGRAPTPEDFPRQLALVKRLVDLLGLVRLEAPGYEADDVLGTLAKKAEREGMEVCILTGDRDFFQLLSEKVSVLLPDGTLVTPKDVQEKYGVPPERWVDFRALTGDRSDNIPGVAGIGEKTALRLLAEWGSVENLLKNLDRVKPDSLRRKIEAHLEDLRLSLDLARIRTDLPLEVDFKALRRRTPDLEGLRAFLEELEFGSLLHEFGLLGGEKPREEAPWPPPEGAFVGFLLSRKLPMWAELLALAAAAEGRVHRATSPVEALADLKEARGFLAKDLAVLALREGVALDPTDDPLLVAYLLDPANTNPEGVARRYGGEFTEDAAERALLSERLFQTLFPRLSEKLLWLYQEVERPLSRVLAHMEARGVRLDVPLLEALSFELEKELERLEGEVFRLAGHPFNLNSRDQLEKVLFDELGLTPVTRTEKTGKRSTSAAALEALRGAHPIVELILQYRELSKLKSTYLDRLPRLVHPRTGRLHTRFNQTATATGRLSSSDPNLQNIPVRTPLGQRIRKAFVAEEGWLLLAADYSQIELRVLAHLSGDENLKRVFREGKDIHTETAAWMFGLDPALVDPKMRRAAKTVNFGVLYGMSAHRLSQELGIDYKEAEAFIERYFQSFPKVRAWIERTLEEGRTRGYVETLFGRRRYVPDLASRVRSVREAAERMAWNMPVQGTAADLMKIAMVKLFPRLKPLGAHLLLQVHDELVLEVPEDRAEEAKALVKEVMENAYPLDVPLEVEVGVGRDWLEAKQD

SEQ ID NO: 453 - DNA, 2538 bp, synthetic construct
  misc_feature 1..2538: note = DNA Polymerase Variant
  source 1..2538: mol_type = other DNA
atgcaccatcatcatcatcatggcggtagcggcatgttaccgctgtttgatttggaagaaccaccaaaacgcgtgctgcttgttgacggccatcatctggcgtatcgtaccttctacgcactgagccttacgacctcacgtggtgagcctgtccagatggtgtatgggtttgctcgctccctgctgaaagccctgaaggaagatggtcaagccgtagtagtggttttcgatgcgaaagcaccgtcgtttcgtcacgaagcgtacgaggcctataaagctggccgcgcaccgaccccggaagactttccgcgtcagttagcgctcgtcaaacgcctcgtggatttgctgggattagttcgcttggaagctcctggctacgaggcggacgacgtgctcggtacactggccaagaaagcagaacgtgaaggcatggaggtctgcattcttaccggtgatcgcgatttcttccagctgctgtctgagaaagtgagcgttttgctgcccgatggcacgttagtaaccccgaaagatgtccaagagaaatatggagttccgccagaacgttgggtggactttcgcgcactgactggtgatcgttcagacaacatcccgggcgttgccgggattggtgaaaagacggcgctgcgcctgctggcagaatggggctcggtggaaaatctgctcaagaaccttgatcgtgtgaaacctgatagcttacgccgcaagatcgaagcccacctggaagacttgcgtctgagtctggatcttgcgcgtattcgcaccgatctgccgttggaagtagactttaaagctctgcgtcgtcgcacacccgatttagaggggttacgcgcgttcctcgaagaactggagtttggctccctgctgcatgaattcggtttgttgggcggagagaaaccgcgtgaagaagcaccatggccgccgcccgaaggtgcctttgtcggctttcttctgtcacgcaaagagccaatgtgggcggaactgttagctcttgcagccgccgcggaagggcgtgttcaccgcgcgacctctcctgtcgaggccctcgctgacctcaaagaagcacgtggtttcttggcgaaagatttagccgtgcttgcattacgcgaaggcgttgcgctcgatccgacggacgacccgcttttggtggcttatttgctcgatagtgcgaataccaacccggaaggcgtagcccgtcgttacggcggcgagtttactgaagatgcggcagaacgcgcgttgcttagcgaacgcctcttccagacgttatttccacgtctttcggagaaattactctggctctatcaggaagtcgaacgtccattgagtcgcgtgcttgcccatatggaggctcgcggtgtgcgcttagatgttccgttgttagaagcactcagcttcgagttggagaaagaactggaacgtcttgaaggcgaagtctttcgtttagcggggcatcccttcaatctcaactctcgcgaccaattggagaaagtgctctttgatgaattaggtttaacccctgtcacgcgtacagagaagaccggcaaacgttccacttcggcagccgccttggaagcacttcgtggtgctcacccgatcgtcgagttgattttgcagtaccgcgagctcagcaaactcaaatcaacctatcttgataggttacctcgtcttgttcatccacgtacgggtcgtttacacacccgcttcaatcaaacggcgacagccaccgggcgcttgtcgtcgagtgacccgaacctccagaatattccagtgcgcacgccgctgggccaacgcattcgtaaagcgtttgttgcggaagaaggttggttattacttgcggccgattactcccagatcgaacttcgtgtattggcgcatctctctggcgacgagaatcttaaacgcgtgtttcgcgaaggcaaggatattcacactgaaaccgcagcctggatgttcgggcttgacccagccttagtggaccccaagatgcgtcgtgccgccaagaccgtcaactttggcgtactctatggtatgtcagcacatcgtcttagtcaggaattgggcattgactacaaagaagctgaagcgtttatcgagcgctatttccaatcctttccgaaagttcgcgcgtggattgaacgtaccctcgaagaaggtcgcactcgcggctatgtggaaacgttattcgggcgtcgtcgctacgttccagatcttgcatctcgtgtccgctcagtgcgcgaagctgctgagcgtatggcctggaatatgcctgttcagggaacagcggcggacctcatgaagatcgccatggtgaaattgtttccgcgcttgaaacccttaggagcccaccttcttttacaggtgcatgatgaattggtcttggaagtacccgaggatcgcgcagaagaagccaaagcactcgtgaaagaggttatggaaaacgcgtatccgttagatgttccgttggaggtcgaagtgggtgtaggccgtgattggcttgaagcgaaacaagactaatga

SEQ ID NO: 454 - protein, 844 aa, synthetic construct
  REGION 1..844: note = DNA Polymerase Variant
MHHHHHHGGSGMLPLFDLEEPPKRVLLVDGHHLAYRTFYALSLTTSRGEPVQMVYGFARSLLKALKEDGQAVVVVFDAKAPSFRHEAYEAYKAGRAPTPEDFPRQLALVKRLVDLLGLVRLEAPGYEADDVLGTLAKKAEREGMEVCILTGDRDFFQLLSEKVSVLLPDGTLVTPKDVQEKYGVPPERWVDFRALTGDRSDNIPGVAGIGEKTALRLLAEWGSVENLLKNLDRVKPDSLRRKIEAHLEDLRLSLDLARIRTDLPLEVDFKALRRRTPDLEGLRAFLEELEFGSLLHEFGLLGGEKPREEAPWPPPEGAFVGFLLSRKEPMWAELLALAAAAEGRVHRATSPVEALADLKEARGFLAKDLAVLALREGVALDPTDDPLLVAYLLDSANTNPEGVARRYGGEFTEDAAERALLSERLFQTLFPRLSEKLLWLYQEVERPLSRVLAHMEARGVRLDVPLLEALSFELEKELERLEGEVFRLAGHPFNLNSRDQLEKVLFDELGLTPVTRTEKTGKRSTSAAALEALRGAHPIVELILQYRELSKLKSTYLDRLPRLVHPRTGRLHTRFNQTATATGRLSSSDPNLQNIPVRTPLGQRIRKAFVAEEGWLLLAADYSQIELRVLAHLSGDENLKRVFREGKDIHTETAAWMFGLDPALVDPKMRRAAKTVNFGVLYGMSAHRLSQELGIDYKEAEAFIERYFQSFPKVRAWIERTLEEGRTRGYVETLFGRRRYVPDLASRVRSVREAAERMAWNMPVQGTAADLMKIAMVKLFPRLKPLGAHLLLQVHDELVLEVPEDRAEEAKALVKEVMENAYPLDVPLEVEVGVGRDWLEAKQD

SEQ ID NO: 455 - DNA, 2538 bp, synthetic construct
  misc_feature 1..2538: note = DNA Polymerase Variant
  source 1..2538: mol_type = other DNA
atgcaccatcatcatcatcatggcggtagcggcatgttaccgctgtttgatttggaagaaccaccaaaacgcgtgctgcttgttgacggccatcatctggcgtatcgtaccttctacgcactgagccttacgacctcacgtggtgagcctgtccagatggtgtatgggtttgctcgctccctgctgaaagccctgaaggaagatggtcaagccgtagtagtggttttcgatgcgaaagcaccgtcgtttcgtcacgaagcgtacgaggcctataaagctggccgcgcaccgaccccggaagactttccgcgtcagttagcgctcgtcaaacgcctcgtggatttgctgggattagttcgcttggaagctcctggctacgaggcggacgacgtgctcggtacactggccaagaaagcagaacgtgaaggcatggaggtctgcattcttaccggtgatcgcgatttcttccagctgctgtctgagaaagtgagcgttttgctgcccgatggcacgttagtaaccccgaaagatgtccaagagaaatatggagttccgccagaacgttgggtggactttcgcgcactgactggtgatcgttcagacaacatcccgggcgttgccgggattggtgaaaagacggcgctgcgcctgctggcagaatggggctcggtggaaaatctgctcaagaaccttgatcgtgtgaaacctgatagcttacgccgcaagatcgaagcccacctggaagacttgcgtctgagtctggatcttgcgcgtattcgcaccgatctgccgttggaagtagactttaaagctctgcgtcgtcgcacacccgatttagaggggttacgcgcgttcctcgaagaactggagtttggctccctgctgcatgaattcggtttgttgggcggagagaaaccgcgtgaagaagcaccatggccgccgcccgaaggtgcctttgtcggctttcttctgtcacgcaaagagccaatgtgggcggaactgttagctcttgcagccgccgcggaagggcgtgttcaccgcgcgacctctcctgtcgaggccctcgctgacctcaaagaagcacgtggtttcttggcgaaagatttagccgtgcttgcattacgcgaaggcgttgcgctcgatccgacggacgacccgcttttggtggcttatttgctcgatcctgcgaataccaacccggaaggcgtagcccgtcgttacggcggcgagtttactgaagatgcggcagaacgcgcgttgcttagcgaacgcctcttccagacgttatttccacgtctttcggagaaattactctggctctatcaggaagtcgaacgtccattgagtcgcgtgcttgcccatatggaggctcgcggtgtgcgcttagatgttccgttgttagaagcactcagcttcgagttggagaaagaactggaacgtcttgaaggcgaagtctttcgtttagcggggcatcccttcaatctcaactctcgcgaccaattggagaaagtgctctttgatgaattaggtttaacccctgtcacgcgtacagagaagaccggcaaacgttccacttcggcagccgccttggaagcacttcgtggtgctcacccgatcgtcgagttgattttgcagtaccgcgagctcagcaaactcaaatcaacctatcttgataggttacctcgtcttgttcatccacgtacgggtcgtttacacacccgcttcaatcaaacggcgacagccaccgggcgcttgtcgtcgagtgacccgaacctccagaatattccagtgcgcacgccgctgggccaacgcattcgtaaagcgtttgttgcggaagaaggttggttattacttgcggccgattactcccagatcgaacttcgtgtattggcgcatctctctggcgacgagaatcttaaacgcgtgtttcgcgaaggcaaggatattcacactgaaaccgcagcctggatgttcgggcttgacccagccttagtggaccccaagatgcgtcgtgccgccaagaccgtcaactttggcgtactctatggtatgtcagcacatcgtcttagtcaggaattgggcattgactacaaagaagctgaagcgtttatcgagcgctatttccaatcctttccgaaagttcgcgcgtggattgaacgtaccctcgaagaaggtcgcactcgcggctatgtggaaacgttattcgggcgtcgtcgcgttgttccagatcttgcatctcgtgtccgctcagtgcgcgaagctgctgagcgtatggcctggaatatgcctgttcagggaacagcggcggacctcatgaagatcgccatggtgaaattgtttccgcgcttgaaacccttaggagcccaccttcttttacaggtgcatgatgaattggtcttggaagtacccgaggatcgcgcagaagaagccaaagcactcgtgaaagaggttatggaaaacgcgtatccgttagatgttccgttggaggtcgaagtgggtgtaggccgtgattggcttgaagcgaaacaagactaatga

SEQ ID NO: 456 - protein, 844 aa, synthetic construct
  REGION 1..844: note = DNA Polymerase Variant
MHHHHHHGGSGMLPLFDLEEPPKRVLLVDGHHLAYRTFYALSLTTSRGEPVQMVYGFARSLLKALKEDGQAVVVVFDAKAPSFRHEAYEAYKAGRAPTPEDFPRQLALVKRLVDLLGLVRLEAPGYEADDVLGTLAKKAEREGMEVCILTGDRDFFQLLSEKVSVLLPDGTLVTPKDVQEKYGVPPERWVDFRALTGDRSDNIPGVAGIGEKTALRLLAEWGSVENLLKNLDRVKPDSLRRKIEAHLEDLRLSLDLARIRTDLPLEVDFKALRRRTPDLEGLRAFLEELEFGSLLHEFGLLGGEKPREEAPWPPPEGAFVGFLLSRKEPMWAELLALAAAAEGRVHRATSPVEALADLKEARGFLAKDLAVLALREGVALDPTDDPLLVAYLLDPANTNPEGVARRYGGEFTEDAAERALLSERLFQTLFPRLSEKLLWLYQEVERPLSRVLAHMEARGVRLDVPLLEALSFELEKELERLEGEVFRLAGHPFNLNSRDQLEKVLFDELGLTPVTRTEKTGKRSTSAAALEALRGAHPIVELILQYRELSKLKSTYLDRLPRLVHPRTGRLHTRFNQTATATGRLSSSDPNLQNIPVRTPLGQRIRKAFVAEEGWLLLAADYSQIELRVLAHLSGDENLKRVFREGKDIHTETAAWMFGLDPALVDPKMRRAAKTVNFGVLYGMSAHRLSQELGIDYKEAEAFIERYFQSFPKVRAWIERTLEEGRTRGYVETLFGRRRVVPDLASRVRSVREAAERMAWNMPVQGTAADLMKIAMVKLFPRLKPLGAHLLLQVHDELVLEVPEDRAEEAKALVKEVMENAYPLDVPLEVEVGVGRDWLEAKQD

SEQ ID NO: 457 - DNA, 2538 bp, synthetic construct
  misc_feature 1..2538: note = DNA Polymerase Variant
  source 1..2538: mol_type = other DNA
atgcaccatcatcatcatcatggcggtagcggcatgttaccgctgtttgatttggaagaaccaccaaaacgcgtgctgcttgttgacggccatcatctggcgtatcgtaccttctacgcactgagccttacgacctcacgtggtgagcctgtccagatggtgtatgggtttgctcgctccctgctgaaagccctgaaggaagatggtcaagccgtagtagtggttttcgatgcgaaagcaccgtcgtttcgtcacgaagcgtacgaggcctataaagctggccgcgcaccgaccccggaagactttccgcgtcagttagcgctcgtcaaacgcctcgtggatttgctgggattagttcgcttggaagctcctggctacgaggcggacgacgtgctcggtacactggccaagaaagcagaacgtgaaggcatggaggtctgcattcttaccggtgatcgcgatttcttccagctgctgtctgagaaagtgagcgttttgctgcccgatggcacgttagtaaccccgaaagatgtgcaagagaaatatggagttccgccagaacgttgggtggactttcgcgcactgactggtgatcgttcagacaacatcccgggcgttgccgggattggtgaaaagacggcgctgcgcctgctggcagaatggggctcggtggaaaatctgctcaagaaccttgatcgtgtgaaacctgatagcttacgccgcaagatcgaagcccacctggaagacttgcgtctgagtctggatcttgcccgtattcgcaccgatctgccgttggaagtagactttaaagctctgcgtcgtcgcacacccgatttagaggggttacgcgcgttcctcgaagaactggagtttggctccctgctgcatgaattcggtttgttgggcggagagaaaccgcgtgaagaagcaccatggccgccgcccgaaggtgcctttgtcggctttcttctgtcacgcaaagagccaatgtgggcggaactgttagctcttgcagccgccgcggaagggcgtgttcaccgcgcgacctctcctgtcgaggccctcgctgacctcaaagaagcacgtggtttcttggcgaaagatttagccgtgcttgcattacgcgaaggcgttgcgctcgatccgacggacgacccgcttttggtggcttatttgctcgatcctgcgaataccaacccggaaggcgtagcccgtcgttacggcggcgagtttactgaagatgcggcagaacgcgcgttgcttagcgaacgcctcttccagacgttatttccacgtctttcggagaaattactctggctctatcaggaagtcgaacgtccattgagtcgcgtgcttgcccatatggaggctcgcggtgtgcgcttagatgttccgttgttagaagcactcagcttcgagttggagaaagaactggaacgtcttgaagacgaagtctttcgtttagcggggcatcccttcaatctcaactctcgcgaccaattggagaaagtgctctttgatgaattaggtttaacccctgtcacgcgtacagagaagaccggcaaacgttccacttcggcagccgccttggaagcacttcgtggtgctcacccgatcgtcgagttgattttgcagtatcgcgagctcagcaaactcaaatcaacctatcttgataggttacctcgtcttgttcatccacgtacgggtcgtttacacacccgcttcaatcaaacggcgacagccaccgggcgcttgtcgtcgagtgacccgaacctccagaatattccagtgcgcacgccgctgggccaacgcattcgtaaagcgtttgttgcggaagaaggttggttattacttgcggccgattactcccagatcgaacttcgtgtattggcgcatctctctggcgacgagaatcttaaacgcgtgtttcgcgaaggcaaggatattcacactgaaaccgcagcctggatgttcggggtggacccagccttagtggaccccaagatgcgtcgtgccgccaagaccgtcaactttggcgtactctatggtatgtcagcacatcgtcttagtcaggaattgggcattgactacaaagaagctgaagcgtttatcgagcgctatttccaatcctttccgaaagttcgcgcgtggattgaacgtaccctcgaagaaggtcgcactcgcggctatgtggaaacgttattcgggcgtcgtcgctacgttccagatcttgcatctcgtgtccgctcagtgcgcgaagctgctgagcgtatggcctggaatatgcctgttcagggaacagcggcggacctcatgaagatcgccatggtgaaattgtttccgcgcttgaaacccttaggagcccaccttcttttacaggtgcatgatgaattggtcttggaagtacccgaggatcgcgcagaagaagccaaagcactcgtgaaagaggttatggaaaacgcgtatccgttagatgttccgttggaggtcgaagtgggtgtaggccgtgattggcttgaagcgaaacaagactaatga

SEQ ID NO: 458 - protein, 844 aa, synthetic construct; identical to SEQ ID NO: 336
  REGION 1..844: note = DNA Polymerase Variant

SEQ ID NO: 459 - DNA, 2538 bp, synthetic construct
  misc_feature 1..2538: note = DNA Polymerase Variant
  source 1..2538: mol_type = other DNA
atgcaccatcatcatcatcatggcggtagcggcatgttaccgctgtttgatttggaagaaccaccaaaacgcgtgctgcttgttgacggccatcatctggcgtatcgtaccttctacgcactgagccttacgacctcacgtggtgagcctgtccagatggtgtatgggtttgctcgctccctgctgaaagccctgaaggaagatggtcaagccgtagtagtggttttcgatgcgaaagcaccgtcgtttcgtcacgaagcgtacgaggcctataaagctggccgcgcaccgaccccggaagactttccgcgtcagttagcgctcgtcaaacgcctcgtggatttgctgggattagttcgcttggaagctcctggctacgaggcggacgacgtgctcggtacactggccaagaaagcagaacgtgaaggcatggaggtctgcattcttaccggtgatcgcgatttcttccagctgctgtctgagaaagtgagcgttttgctgcccgatggcacgttagtaaccccgaaagatgtccaagagaaatatggagttccgccagaacgttgggtggactttcgcgcactgactggtgatcgttcagacaacatcccgggcgttgccgggattggtgaaaagacggcgctgcgcctgctggcagaatggggctcggtggaaaatctgctcaagaaccttgatcgtgtgaaacctgatagcttacgccgcaagatcgaagcccacctggaagacttgcgtctgagtctggatcttgtccgtattcgcaccgatctgccgttggaagtagactttaaagctctgcgtcgtcgcacacccgatttagaggggttacgcgcgttcctcgaagaactggagtttggctccctgctgcatgaattcggtttgttgggcggagagaaaccgcgtgaagaagcaccatggccgccgcccgaaggtgcctttgtcggctttcttctgtcacgcaaagagccaatgtgggcggaactgttagctcttgcagccgccgcggaagggcgtgttcaccgcgcgacctctcctgtcgaggccctcgctgacctcaaagaagcacgtggtttcttggcgaaagatttagccgtgcttgcattacgcgaatgtgttgcgctcgatccgacggacgacccgcttttggtggcttatttgctcgatcctgcgaataccaacccggaaggcgtagcccgtcgttacggcggcgagtttactgaagatgcggcagaacgcgcgttgcttagcgaacgcctcttccagacgttatttccacgtctttcggagaaattactctggctctatcaggaagtcgaacgtccattgagtcgcgtgcttgcccatatggaggctcgcggtgtgcgcttagatgttccgttgttagaagcactcagcttcgagttggagaaagaactggaacgtcttgaaggcgaagtctttcgtttagcggggcatcccttcaatctcaactctcgcgaccaattggagaaagtgctctttgatgaattaggtttaacccctgtcacgcgtacagagaagaccggcaaacgttccacttcggcagccgccttggaagcacttcgtggtgctcacccgatcgtcgagttgattttgcagtatcgcgagctcagcaaactcaaatcaacctatcttgataggttacctcgtcttgttcatccacgtacgggtcgtttacacacccgcttcaatcaaacggcgacagccaccgggcgcttgtcgtcgagtgacccgaacctccagaatattccagtgcgcacgccgctgggccaacgcattcgtaaagcgtttgttgcggaagaaggttggttattacttgcggccgattactcccagatcgaacttcgtgtattggcgcatctctctggcgacgagaatcttaaacgcgtgtttcgcgaaggcaaggatattcacactgaaaccgcagcctggatgttcgggcttgacccagccttagtggaccccaagatgcgtcgtgccgccaagaccgtcaactttggcgtactctatggtatgtcagcacatcgtcttagtcaggaattgggcattgactacaaagaagctgaagcgtttatcgagcgctatttccaatcctttccgaaagttcgcgcgtggattgaacgtaccctcgaagaaggtcgcactcgcggctatgtggaaacgttattcgggcgtcgtcgctacgttccagatcttgcatctcgtgtccgctcagtgcgcgaagctgctgagcgtatggcctggaatatgcctgttcagggaacagcggcggacctcatgaagatcgccatggtgaaattgtttccgcgcttgaaacccttaggagcccaccttcttttacaggtgcatgatgaattggtcttggaagtacccgaggatcgcgcagaagaagccaaagcactcgtgaaagaggttatggaaaacgcgtatccgttagatgttccgttggaggtcgaagtgggtgtaggccgtgattggcttgaagcgaaacaagactaatga

SEQ ID NO: 460 - protein, 844 aa, synthetic construct; identical to SEQ ID NO: 342
  REGION 1..844: note = DNA Polymerase Variant

SEQ ID NO: 461 - DNA, 2538 bp, synthetic construct
  misc_feature 1..2538: note = DNA Polymerase Variant
  source 1..2538: mol_type = other DNA
atgcaccatcatcatcatcatggcggtagcggcatgttaccgctgtttgatttggaagaaccaccaaaacgcgtgctgcttgttgacggccatcatctggcgtatcgtaccttctacgcactgagccttacgacctcacgtggtgagcctgtccagatggtgtatgggtttgctcgctccctgctgaaagccctgaaggaagatggtcaagccgtagtagtggttttcgatgcgaaagcaccgtcgtttcgtcacgaagcgtacgaggcctataaagctggccgcgcaccgaccccggaagactttccgcgtcagttagcgctcgtcaaacgcctcgtggatttgctgggattagttcgcttggaagctcctggctacgaggcggacgacgtgctcggtacactggccaagaaagcagaacgtgaaggcatggaggtctgcattcttaccggtgatcgcgatttcttccagctgctgtctgagaaagtgagcgttttgctgcccgatggcacgttagtaaccccgaaagatgtccaagagaaatatggagttccgccagaacgttgggtggactttcgcgcactgactggtgatcgttcagacaacatcccgggcgttgccgggattggtgaaaagacggcgctgcgcctgctggcagaatggggctcggtggaaaatctgctcaagaaccttgatcgtgtgaaacctgatagcttacgccgcaagatcgaagcccacctggaagacttgcgtctgagtctggatcttgcgcgtattcgcaccgatctgccgttggaagtagactttaaagctctgcgtcgtcgcacacccgatttagaggggttacgcgcgttcctcgaagaactggagtttggctccctgctgcatgaattcggtttgttgggcggagagaaaccgcgtgaagaagcaccatggccgccgcccgaaggtgcctttgtcggctttcttctgtcacgcaaagagccaatgtgggcggaactgttagctcttgcagccgccgcggaagggcgtgttcaccgcgcgacctctcctgtcgaggccctcgctgacctcaaagaagcacgtggtttcttggcgaaagatttagccgtgcttgcattacgcgaaggcgttgcgctcgatccgacggacgacccgcttttggtggcttatttgctcgatcctgcgaataccaacccggaaggcgtagcccgtcgttacggcggcgagtttactgaagatgcggcagaacgcgcgttgcttagcgaacgcctcttccagacgttatttccacgtctttcggagaaattactctggctctatcaggaagtcgaacgtccattgagtcgcgtgcttgcccatatggaggctcgcggtgtgcgcttagatgttccgttgttagaagcactcagcttcgagttggagaaagaactggaacgtcttgaaggcgaagtctttcgtttagcggggcatcccttcaatctcaactctcgcgaccaattggagaaagtgctctttgatgaattaggtttaacccctgtcacgcgtacagagaagaccggcaaacgttccacttcggcagccgccttggaagcacttcgtggtgctcacccgatcgtcgagttgattttgcagtaccgcgagctcagcaaactcaaatcaacctatcttgataggttacctcgtcttgttcatccacgtacgggtcgtttacacacccgcttcaatcaaacgctgacagccaccgggcgcttgtcgtcgagtgacccgaacctccagaatattccagtgcgcacgccgctgggccaacgcattcgtaaagcgtttgttgcggaagaaggttggttattacttgcggccgattactcccagatcgaacttcgtgtattggcgcatctctctggcgacgagaatcttaaacgcgtgtttcgcgaaggcaaggatattcacactgaaaccgcagcctggatgttcgggcttgacccagccttagtggaccccaagatgcgtcgtgccgccaagaccgtcaactttggcgtactctatggtatgtcagcacatcgtcttagtcaggaattgggcattgactacaaagaagctgaagcgtttatcgagcgctatttccaatcctttccgaaagttcgcgcgtggattgaacgtaccctcgaagaaggtcgcactcgcggctatgtggaaacgttattcgggcgtcgtcgctacgttccagatcttgcatctcgtgtccgctcagtgcgcgaagctgctgagcgtatggcctggaatatgcctgttcagggaacagcggcggacctcatgaagatcgccatggtgaaattgtttccgcgcttgaaacccttaggagcccaccttcttttacaggtgcatgatgaattggtcttggaagtacccgaggatcgcgcagaagaagccaaagcactcgtgaaagaggttatggaaaacgcgtatccgttagatgttccgttggaggtcgaagtgggtgtaggccgtgattggcttgaagcgaaacaagactaatga

SEQ ID NO: 462 - protein, 844 aa, synthetic construct
  REGION 1..844: note = DNA Polymerase Variant
MHHHHHHGGSGMLPLFDLEEPPKRVLLVDGHHLAYRTFYALSLTTSRGEPVQMVYGFARSLLKALKEDGQAVVVVFDAKAPSFRHEAYEAYKAGRAPTPEDFPRQLALVKRLVDLLGLVRLEAPGYEADDVLGTLAKKAEREGMEVCILTGDRDFFQLLSEKVSVLLPDGTLVTPKDVQEKYGVPPERWVDFRALTGDRSDNIPGVAGIGEKTALRLLAEWGSVENLLKNLDRVKPDSLRRKIEAHLEDLRLSLDLARIRTDLPLEVDFKALRRRTPDLEGLRAFLEELEFGSLLHEFGLLGGEKPREEAPWPPPEGAFVGFLLSRKEPMWAELLALAAAAEGRVHRATSPVEALADLKEARGFLAKDLAVLALREGVALDPTDDPLLVAYLLDPANTNPEGVARRYGGEFTEDAAERALLSERLFQTLFPRLSEKLLWLYQEVERPLSRVLAHMEARGVRLDVPLLEALSFELEKELERLEGEVFRLAGHPFNLNSRDQLEKVLFDELGLTPVTRTEKTGKRSTSAAALEALRGAHPIVELILQYRELSKLKSTYLDRLPRLVHPRTGRLHTRFNQTLTATGRLSSSDPNLQNIPVRTPLGQRIRKAFVAEEGWLLLAADYSQIELRVLAHLSGDENLKRVFREGKDIHTETAAWMFGLDPALVDPKMRRAAKTVNFGVLYGMSAHRLSQELGIDYKEAEAFIERYFQSFPKVRAWIERTLEEGRTRGYVETLFGRRRYVPDLASRVRSVREAAERMAWNMPVQGTAADLMKIAMVKLFPRLKPLGAHLLLQVHDELVLEVPEDRAEEAKALVKEVMENAYPLDVPLEVEVGVGRDWLEAKQD

SEQ ID NO: 463 - DNA, 2538 bp, synthetic construct
  misc_feature 1..2538: note = DNA Polymerase Variant
  source 1..2538: mol_type = other DNA
atgcaccatcatcatcatcatggcggtagcggcatgttaccgctgtttgatttggaagaaccaccaaaacgcgtgctgcttgttgacggccatcatctggcgtatcgtaccttctacgcactgagccttacgacctcacgtggtgagcctgtccagatggtgtatgggtttgctcgctccctgctgaaagccctgaaggaagatggtcaagccgtagtagtggttttcgatgcgaaagcaccgtcgtttcgtcacgaagcgtacgaggcctataaagctggccgcgcaccgaccccggaagactttccgcgtcagttagcgctcgtcaaacgcctcgtggatttgctgggattagttcgcttggaagctcctggctacgaggcggacgacgtgctcggtacactggccaagaaagcagaacgtgaaggcatggaggtctgcattcttaccggtgatcgcgatttcttccagctgctgtctgagaaagtgagcgttttgctgcccgatggcacgttagtaaccccgaaagatgtccaagagaaatatggagttccgccagaacgttgggtggactttcgcgcactgactggtgatcgttcagacaacatcccgggcgttgccgggattggtgaaaagacggcgctgcgcctgctggcagaatggggctcggtggaaaatctgctcaagaaccttgatcgtgtgaaacctgatagcttacgccgcaagatcgaagcccacctggaagacttgcgtctgagtctggatcttgcgcgtattcgcaccgatctgccgttggaagtagactttaaagctctgcgtcgtcgcacacccgatttagaggggttacgcgcgttcctcgaagaactggagtttggctccctgctgcatgaattcggtttgttgggcggagagaaaccgcgtgaagaagcaccatggccgccgcccgaaggtgcctttgtcggctttcttctgtcacgcaaagagccaatgtgggcggaactgttagctcttgcagccgccgcggaagggcgtgttcaccgcgcgacctctcctgtcgaggccctcgctgacctcaaagaagcacgtggtttcttggcgaaacatttagccgtgcttgcattacgcgaaggcgttgcgctcgatccgacggacgacccgcttttggtggcttatttgctcgatcctgcgaataccaacccggaaggcgtagcccgtcgttacggcggcgagtttactgaagatgcggcagaacgcgcgttgcttagcgaacgcctcttccagacgttatttccacgtctttcggagaaattactctggctctatcaggaagtcgaacgtccattgagtcgcgtgcttgcccatatggaggctcgcggtgtgcgcttagatgttccgttgttagaagcactcagcttcgagttggagaaagaactggaacgtcttgaaggcgaagtctttcgtttagcggggcatcccttcaatctcaactctcgcgaccaattggagaaagtgctctttgatgaattaggtttaacccctgtcacgcgtacagagaagaccggcaaacgttccacttcggcagccgccttggaagcacttcgtggtgctcacccgatcgtcgagttgattttgcagtaccgcgagctcagcaaactcaaatcaacctatcttgataggttacctcgtcttgttcatccacgtacgggtcgtttacacacccgcttcaatcaaacggcgacagccaccgggcgcttgtcgtcgagtgacccgaacctccagaatattccagtgcgcacgccgctgggccaacgcattcgtaaagcgtttgttgcggaagaaggttggttattacttgcggccgattactcccagatcgaacttcgtgtattggcgcatctctctggcgacgagaatcttaaacgcgtgtttcgcgaaggcaaggatattcacactgaaaccgcagcctggatgttcgggcttgacccagccttagtggaccccaagatgcgtcgtgccgccaagaccgtcaactttggcgtactctatggtatgtcagcacatcgtcttagtcaggaattgggcattgactacaaagaagctgaagcgtttatcgagcgctatttccaatcctttccgaaagttcgcgcgtggattgaacgtaccctcgaagaaggtcgcactcgcggctatgtggaaacgttattcgggcgtcgtcgctacgttccagatcttgcatctcgtgtccgctcagtgcgcgaagctgctgagcgtatggcctggaatatgcctgttcagggaacagcggcggacctcatgaagatcgccatggtgaaattgtttccgcgcttgaaacccttaggagcccaccttcttttacaggtgcatgatgaattggtcttggaagtacccgaggatcgcgcagaagaagccaaagcactcgtgaaagaggttatggaaaacgcgtatccgttagatgttccgttggaggtcgaagtgggtgtaggccgtgattggcttgaagcgaaacaagactaatga

SEQ ID NO: 464 - protein, 844 aa, synthetic construct
  REGION 1..844: note = DNA Polymerase Variant
MHHHHHHGGSGMLPLFDLEEPPKRVLLVDGHHLAYRTFYALSLTTSRGEPVQMVYGFARSLLKALKEDGQAVVVVFDAKAPSFRHEAYEAYKAGRAPTPEDFPRQLALVKRLVDLLGLVRLEAPGYEADDVLGTLAKKAEREGMEVCILTGDRDFFQLLSEKVSVLLPDGTLVTPKDVQEKYGVPPERWVDFRALTGDRSDNIPGVAGIGEKTALRLLAEWGSVENLLKNLDRVKPDSLRRKIEAHLEDLRLSLDLARIRTDLPLEVDFKALRRRTPDLEGLRAFLEELEFGSLLHEFGLLGGEKPREEAPWPPPEGAFVGFLLSRKEPMWAELLALAAAAEGRVHRATSPVEALADLKEARGFLAKHLAVLALREGVALDPTDDPLLVAYLLDPANTNPEGVARRYGGEFTEDAAERALLSERLFQTLFPRLSEKLLWLYQEVERPLSRVLAHMEARGVRLDVPLLEALSFELEKELERLEGEVFRLAGHPFNLNSRDQLEKVLFDELGLTPVTRTEKTGKRSTSAAALEALRGAHPIVELILQYRELSKLKSTYLDRLPRLVHPRTGRLHTRFNQTATATGRLSSSDPNLQNIPVRTPLGQRIRKAFVAEEGWLLLAADYSQIELRVLAHLSGDENLKRVFREGKDIHTETAAWMFGLDPALVDPKMRRAAKTVNFGVLYGMSAHRLSQELGIDYKEAEAFIERYFQSFPKVRAWIERTLEEGRTRGYVETLFGRRRYVPDLASRVRSVREAAERMAWNMPVQGTAADLMKIAMVKLFPRLKPLGAHLLLQVHDELVLEVPEDRAEEAKALVKEVMENAYPLDVPLEVEVGVGRDWLEAKQD

SEQ ID NO: 465 - DNA, 2538 bp, synthetic construct
  misc_feature 1..2538: note = DNA Polymerase Variant
  source 1..2538: mol_type = other DNA
atgcaccatcatcatcatcatggcggtagcggcatgttaccgctgtttgatttggaagaaccaccaaaacgcgtgctgcttgttgacggccatcatctggcgtatcgtaccttctacgcactgagccttacgacctcacgtggtgagcctgtccagatggtgtatgggtttgctcgctccctgctgaaagccctgaaggaagatggtcaagccgtagtagtggttttcgatgcgaaagcaccgtcgtttcgtcacgaagcgtacgaggcctataaagctggccgcgcaccgaccccggaagactttccgcgtcagttagcgctcgtcaaacgcctcgtggatttgctgggattagttcgcttggaagctcctggctacgaggcggacgacgtgctcggtacactggccaagaaagcagaacgtgaaggcatggaggtctgcattcttaccggtgatcgcgatttcttccagctgctgtctgagaaagtgagcgttttgctgcccgatggcacgttagtaaccccgaaagatgtccaagagaaatatggagttccgccagaacgttgggtggactttcgcgcactgactggtgatcgttcagacaacatcccgggcgttgccgggattggtgaaaagacggcgctgcgcctgctggcagaatggggctcggtggaaaatctgctcaagaaccttgatcgtgtgaaacctgatagcttacgccgcaagatcgaagcccacctggaagacttgcgtctgagtctggatcttgcgcgtattcgcaccgatctgccgttggaagtagactttaaagctctgcgtcgtcgcacacccgatttagaggggttacgcgcgttcctcgaagaactggagtttggctccctgctgcatgaattcggtttgttgggcggagagaaaccgcgtgaagaagcaccatggccgccgcccgaaggtgcctttgtcggctttcttctgtcacgcaaagagccaatgtgggcggaactgttagctcttgcagccgccgcggaagggcgtgttcaccgcgcgacctctcctgtcgaggccctcgctgacctcaaagaagcacgtggtttcttggcgaaagatttagccgtgcttgcattacgcgaaggcgttgcgctcgatccgacggacgacccgcttttggtggcttatttgctcgatcctgcgaataccaacccggaaggcgtagcccgtcgttacggcggcgagtttactgaagatgcggcagaacgcgcgttgcttagcgaacgcctcttccagacgttatttccacgtctttcggagaaattactctggctctatcaggaagtcgaacgtccattgagtcgcgtgcttgcccatatggaggctcgcggtgtgcgcttagatgttccgttgttagaagcactcagcttcgagttggagaaagaactggaacgtcttgaaggcgaagtctttcgtttagcggggcatcccttcaatctcaactctcgcgaccaattggagaaagtgctctttgatgaattaggtttaacccctgtcacgcgtacagagaagaccggcaaacgttccacttcggcagccgccttggaagcacttcgtggtgctcacccgatcgtcgagttgattttgcagtaccgcgagctcagcaaactcaaatcaacctatcttgataggttacctcgtcttgttcatccacgtacgggtcgtttacacacccgcttcaatcaaacggcgacagccaccgggcgcttgtcgtcgagtgacccgaacctccagaatattccagtgcgcacgccgctgggccaacgcattcgtaaagcgtttgttgcggaagaaggttggttattacttgcggccgattactcccagatcgaacttcgtgtattggcgcatctctctggcgacgagaatcttaaacgcgtgtttcgcgaaggcaaggatattcacactgaaaccgcagcctggatgttcgggcttgacccagccttagtggaccccaagatgcgtcgtgccgccaagaccgtcaactttggcgtactctatggtatgtcagcacatcgtcttagtcaggaattgggcattgactacaaagaagctgaagcgtttatcgagcgctatttccaatcctttccgaaagttcgcgcgtggattgaacgtaccctcgaagaaggtcgcactcgcggctatgtggaaacgttattcgggcgtcgtcgctacgttccagatcttgcatctcgtgtccgctcagtgcgcgaagctgctgagcgtatggcctggaatatgcctgttcagggaacagcggcggacctcatgaagatcgccatggtgaaattgtttccgcgcttgaaacccttaggagcccaccttctttatcaggtgcatgatgaattggtcttggaagtacccgaggatcgcgcagaagaagccaaagcactcgtgaaagaggttatggaaaacgcgtatccgttagatgttccgttggaggtcgaagtgggtgtaggccgtgattggcttgaagcgaaacaagactaatga

SEQ ID NO: 466 - protein, 844 aa, synthetic construct
  REGION 1..844: note = DNA Polymerase Variant
MHHHHHHGGSGMLPLFDLEEPPKRVLLVDGHHLAYRTFYALSLTTSRGEPVQMVYGFARSLLKALKEDGQAVVVVFDAKAPSFRHEAYEAYKAGRAPTPEDFPRQLALVKRLVDLLGLVRLEAPGYEADDVLGTLAKKAEREGMEVCILTGDRDFFQLLSEKVSVLLPDGTLVTPKDVQEKYGVPPERWVDFRALTGDRSDNIPGVAGIGEKTALRLLAEWGSVENLLKNLDRVKPDSLRRKIEAHLEDLRLSLDLARIRTDLPLEVDFKALRRRTPDLEGLRAFLEELEFGSLLHEFGLLGGEKPREEAPWPPPEGAFVGFLLSRKEPMWAELLALAAAAEGRVHRATSPVEALADLKEARGFLAKDLAVLALREGVALDPTDDPLLVAYLLDPANTNPEGVARRYGGEFTEDAAERALLSERLFQTLFPRLSEKLLWLYQEVERPLSRVLAHMEARGVRLDVPLLEALSFELEKELERLEGEVFRLAGHPFNLNSRDQLEKVLFDELGLTPVTRTEKTGKRSTSAAALEALRGAHPIVELILQYRELSKLKSTYLDRLPRLVHPRTGRLHTRFNQTATATGRLSSSDPNLQNIPVRTPLGQRIRKAFVAEEGWLLLAADYSQIELRVLAHLSGDENLKRVFREGKDIHTETAAWMFGLDPALVDPKMRRAAKTVNFGVLYGMSAHRLSQELGIDYKEAEAFIERYFQSFPKVRAWIERTLEEGRTRGYVETLFGRRRYVPDLASRVRSVREAAERMAWNMPVQGTAADLMKIAMVKLFPRLKPLGAHLLYQVHDELVLEVPEDRAEEAKALVKEVMENAYPLDVPLEVEVGVGRDWLEAKQD

SEQ ID NO: 467 - DNA, 2538 bp, synthetic construct
  misc_feature 1..2538: note = DNA Polymerase Variant
  source 1..2538: mol_type = other DNA
atgcaccatcatcatcatcatggcggtagcggcatgttaccgctgtttgatttggaagaaccaccaaaacgcgtgctgcttgttgacggccatcatctggcgtatcgtaccttctacgcactgagccttacgacctcacgtggtgagcctgtccagatggtgtatgggtttgctcgctccctgctgaaagccctgaaggaagatggtcaagccgtagtagtggttttcgatgcgaaagcaccgtcgtttcgtcacgaagcgtacgaggcctataaagctggccgcgcaccgaccccggaagactttccgcgtcagttagcgctcgtcaaacgcctcgtggatttgctgggattagttcgcttggaagctcctggctacgaggcggacgacgtgctcggtacactggccaagaaagcagaacgtgaaggcatggaggtctgcattcttaccggtgatcgcgatttcttccagctgctgtctgagaaagtgagcgttttgctgcccgatggcacgttagtaaccccgaaagatgtccaagagaaatatggagttccgccagaacgttgggtggactttcgcgcactgactggtgatcgttcagacaacatcccgggcgttgccgggattggtgaaaagacggcgctgcgcctgctggcagaatggggctcggtggaaaatctgctcaagaaccttgatcgtgtgaaacctgatagcttacgccgcaagatcgaagcccacctggaagacttgcgtctgagtctggatcttgcgcgtattcgcaccgatctgccgttggaagtagactttaaagctctgcgtcgtcgcacacccgatttagaggggttacgcgcgttcctcgaagaactggagtttggctccctgctgcatgaattcggtttgttgggcggagagaaaccgcgtgaagaagcaccatggccgccgcccgaaggtgcctttgtcggctttcttctgtcacgcaaagagccaatgtgggcggaactgttagctcttgcagccgccgcggaagggcgtgttcaccgcgcgacctctcctgtcgaggccctcgctgacctcaaagaagcacgtggtttcttggcgaaagatttagccgtgcttgcattacgcgaaggcgttgcgctcgatccgacggacgacccgcttttggtggcttatttgctcgatcctgcgaataccaacccggaaggcgtagcccgtcgttacggcggcgagtttactgaagatgcggcagaacgcgcgttgcttagcgaacgcctcttccagacgttatttccacgtctttcggagaaattactctggctctatcaggaagtcgaacgtccattgagtcgcgtgcttgcccatatggaggctcgcggtgtgcgcttagatgttccgttgttagaagcactcagcttcgagttggagaaagaactggaacgtcttgaaggcgaagtctttcgtttagcggggcatcccttcaatctcaactctcgcgaccaattggagaaagtgctctttgatgaattaggtttaacccctgtcacgcgtacagagaagaccggcaaacgttccacttcggcagccgccttggaagcacttcgtggtgctcacccgatcgtcgagttgattttgcagtaccgcgagctcagcaaactcaaatcaacctatcttgataggttacctcgtcttgttcatccacgtacgggtcgtttacacacccgcttcaatcaaacggcgacagccaccgggcgcttgtcgtcgagtgacccgaacctccagaatattccagtgcgcacgccgctgggccaacgcattcgtaaagcgtttgttgcggaagaaggttggttattacttgcggccgattactcccagatcgaacttcgtgtattggcgcatctctctggcgacgagaatcttaaacgcgtgtttcgcgaaggcaaggatattcacactgaaaccgcagcctggatgttcgggcttgacccagccttagtggaccccaagatgcgtcgtgccgccaagaccgtcaactttggcgtactctatggtatgtcagcacatcgtcttagtcaggaattgggcattgactacaaagaagctgaagcgtttatcgagcgctatttccaatcctttccgaaagttcgcgcgtggattgaacgtgctctcgaagaaggtcgcactcgcggctatgtggaaacgttattcgggcgtcgtcgctacgttccagatcttacatctcgtgtccgctcagtgcgcgaagctgctgagcgtatggcctggaatatgcctgttcagggaacagcggcggacctcatgaagatcgccatggtgaaattgtttccgcgcttgaaacccttaggagcccaccttcttttacaggtgcatgatgaattggtcttggaagtacccgaggatcgcgcagaagaagccaaagcactcgtgaaagaggttatggaaaacgcgtatccgttagatgttccgttggaggtcgaagtgggtgtaggccgtgattggcttgaagcgaaacaagactaatga

SEQ ID NO: 468 - protein, 844 aa, synthetic construct
  REGION 1..844: note = DNA Polymerase Variant
MHHHHHHGGSGMLPLFDLEEPPKRVLLVDGHHLAYRTFYALSLTTSRGEPVQMVYGFARSLLKALKEDGQAVVVVFDAKAPSFRHEAYEAYKAGRAPTPEDFPRQLALVKRLVDLLGLVRLEAPGYEADDVLGTLAKKAEREGMEVCILTGDRDFFQLLSEKVSVLLPDGTLVTPKDVQEKYGVPPERWVDFRALTGDRSDNIPGVAGIGEKTALRLLAEWGSVENLLKNLDRVKPDSLRRKIEAHLEDLRLSLDLARIRTDLPLEVDFKALRRRTPDLEGLRAFLEELEFGSLLHEFGLLGGEKPREEAPWPPPEGAFVGFLLSRKEPMWAELLALAAAAEGRVHRATSPVEALADLKEARGFLAKDLAVLALREGVALDPTDDPLLVAYLLDPANTNPEGVARRYGGEFTEDAAERALLSERLFQTLFPRLSEKLLWLYQEVERPLSRVLAHMEARGVRLDVPLLEALSFELEKELERLEGEVFRLAGHPFNLNSRDQLEKVLFDELGLTPVTRTEKTGKRSTSAAALEALRGAHPIVELILQYRELSKLKSTYLDRLPRLVHPRTGRLHTRFNQTATATGRLSSSDPNLQNIPVRTPLGQRIRKAFVAEEGWLLLAADYSQIELRVLAHLSGDENLKRVFREGKDIHTETAAWMFGLDPALVDPKMRRAAKTVNFGVLYGMSAHRLSQELGIDYKEAEAFIERYFQSFPKVRAWIERALEEGRTRGYVETLFGRRRYVPDLTSRVRSVREAAERMAWNMPVQGTAADLMKIAMVKLFPRLKPLGAHLLLQVHDELVLEVPEDRAEEAKALVKEVMENAYPLDVPLEVEVGVGRDWLEAKQD

SEQ ID NO: 469 - DNA, 2538 bp, synthetic construct; identical to SEQ ID NO: 379
  misc_feature 1..2538: note = DNA Polymerase Variant
  source 1..2538: mol_type = other DNA

SEQ ID NO: 470 - protein, 844 aa, synthetic construct; identical to SEQ ID NO: 380
  REGION 1..844: note = DNA Polymerase Variant

SEQ ID NO: 471 - DNA, 2538 bp, synthetic construct; identical to SEQ ID NO: 383
  misc_feature 1..2538: note = DNA Polymerase Variant
  source 1..2538: mol_type = other DNA

SEQ ID NO: 472 - protein, 844 aa, synthetic construct; identical to SEQ ID NO: 384
  REGION 1..844: note = DNA Polymerase Variant

SEQ ID NO: 473 - DNA, 2538 bp, synthetic construct
  misc_feature 1..2538: note = DNA Polymerase Variant
  source 1..2538: mol_type = other DNA
atgcaccatcatcatcatcatggcggtagcggcatgttaccgctgtttgatttggaagaaccaccaaaacgcgtgctgcttgttgacggccatcatctggcgtatcgtaccttctacgcactgagccttacgacctcacgtggtgagcctgtccagatggtgtatgggtttgctcgctccctgctgaaagccctgaaggaagatggtcaagccgtagtagtggttttcgatgcgaaagcaccgtcgtttcgtcacgaagcgtacgaggcctataaagctggccgcgcaccgaccccggaagactttccgcgtcagttagcgctcgtcaaacgcctcgtggatttgctgggattagttcgcttggaagctcctggctacgaggcggacgacgtgctcggtacactggccaagaaagcagaacgtgaaggcatggaggtctgcattcttaccggtgatcgcgatttcttccagctgctgtctgagaaagtgagcgttttgctgcccgatggcacgttagtaaccccgaaagatgtccaagagaaatatggagttccgccagaacgttgggtggactttcgcgcactgactggtgatcgttcagacaacatcccgggcgttgccgggattggtgaaaagacggcgctgcgcctgctggcagaatggggctcggtggaaaatctgctcaagaaccttgatcgtgtgaaacctgatagcttacgccgcaagatcgaagcccacctggaagacttgcgtctgagtctggatcttgcgcgtattcgcaccgatctgccgttggaagtagactttaaagctctgcgtcgtcgcacacccgatttagaggggttacgcgcgttcctcgaagaactggagtttggctccctgctgcatgaattcggtttgttgggcggagagaaaccgcgtgaagaagcaccatggccgccgcccgaaggtgcctttgtcggctttcttctgtcacgcaaagagccaatgtgggcggaactgttagctcttgcagccgccgcggaagggcgtgttcaccgcgcgacctctcctgtcgaggccctcgctgacctcaaagaagcacgtggtttcttggcgaaagatttagccgtgcttgcattacgcgaaggcgttgcgctcgatccgacggacgacccgcttttggtggcttatttgctcgatcctgcgaataccaacccggaaggcgtagcccgtcgttacggcggcgagtttactgaagatgcggcagaacgcgcgttgcttagcgaacgcctcttccagacgttatttccacgtctttcggagaaattactctggctctatcaggaagtcgaacgtccattgagtcgcgtgcttgcccatatggaggctcgcggtgtgcgcttagatgttccgttgttagaagcactcagcttcgagttggagaaagaactggaacgtcttgaaggcgaagtctttcgtttagcggggcatcccttcaatctcaactctcgcgaccaattggagaaagtgctctttgatgaattaggtttaacccctgtcacgcgtacagagaagaccggcaaacgttccacttcggcagccgccttggaagcacttcgtggtgctcacccgatcgtcgagttgattttgcagtaccgcgagctcagcaaactcaaatcaacctatcttgataggttacctcgtcttgttcatccacgtacgggtcgtttacacacccgcttcaatcaagcggcgacagccaccgggcgcttgtcgtcgagtgacccgaacctccagaatattccagtgcgcacgccgctgggccaacgcattcgtaaagcgtttgttgcggaagaaggttggttattacttgcggccgattactcccagatcgaacttcgtgtattggcgcatctctctggcgacgagaatcttaaacgcgtgtttcgcgaaggcaaggatattcacactgaaaccgcagcctggatgttcgggcttgacccagccttagtggaccccaagatgcgtcgtgccgccaagaccgtcaactttggcgtactctatggtatgtcagcacatcgtcttagtcaggaattgggcattgactacaaagaagctgaagcgtttatcgagcgctatttccaatcctttccgaaagttcgcgcgtggattgaacgtaccctcgaagaaggtcgcactcgcggctatgtggaaacgttattcgggcgtcgtcgctacgttccagatcttgcatctcgtgtccgctcagtgcgcgaagctgctgagcgtatggcctggaatatgcctgttcagggaacagcggcggacctcatgaagatcgccatggtgaaattgtttccgcgcttgaaacccttaggagcccaccttcttttacaggtgcatgatgaattggtcttggaagtacccgaggatcgcgcagaagaagccaaagcactcgtgaaagaggttatggaaaacgcgtatccgttagatgttccgttggaggtcgaagtgggtgtaggccgtgattggcttgaagcgaaacaagactaatga

SEQ ID NO: 474 - protein, 844 aa, synthetic construct
  REGION 1..844: note = DNA Polymerase Variant
MHHHHHHGGSGMLPLFDLEEPPKRVLLVDGHHLAYRTFYALSLTTSRGEPVQMVYGFARSLLKALKEDGQAVVVVFDAKAPSFRHEAYEAYKAGRAPTPEDFPRQLALVKRLVDLLGLVRLEAPGYEADDVLGTLAKKAEREGMEVCILTGDRDFFQLLSEKVSVLLPDGTLVTPKDVQEKYGVPPERWVDFRALTGDRSDNIPGVAGIGEKTALRLLAEWGSVENLLKNLDRVKPDSLRRKIEAHLEDLRLSLDLARIRTDLPLEVDFKALRRRTPDLEGLRAFLEELEFGSLLHEFGLLGGEKPREEAPWPPPEGAFVGFLLSRKEPMWAELLALAAAAEGRVHRATSPVEALADLKEARGFLAKDLAVLALREGVALDPTDDPLLVAYLLDPANTNPEGVARRYGGEFTEDAAERALLSERLFQTLFPRLSEKLLWLYQEVERPLSRVLAHMEARGVRLDVPLLEALSFELEKELERLEGEVFRLAGHPFNLNSRDQLEKVLFDELGLTPVTRTEKTGKRSTSAAALEALRGAHPIVELILQYRELSKLKSTYLDRLPRLVHPRTGRLHTRFNQAATATGRLSSSDPNLQNIPVRTPLGQRIRKAFVAEEGWLLLAADYSQIELRVLAHLSGDENLKRVFREGKDIHTETAAWMFGLDPALVDPKMRRAAKTVNFGVLYGMSAHRLSQELGIDYKEAEAFIERYFQSFPKVRAWIERTLEEGRTRGYVETLFGRRRYVPDLASRVRSVREAAERMAWNMPVQGTAADLMKIAMVKLFPRLKPLGAHLLLQVHDELVLEVPEDRAEEAKALVKEVMENAYPLDVPLEVEVGVGRDWLEAKQD

SEQ ID NO: 475 - DNA, 2538 bp, synthetic construct
  misc_feature 1..2538: note = DNA Polymerase Variant
  source 1..2538: mol_type = other DNA
atgcaccatcatcatcatcatggcggtagcggcatgttaccgctgtttgatttggaagaaccaccaaaacgcgtgctgcttgttgacggccatcatctggcgtatcgtaccttctacgcactgagccttacgacctcacgtggtgagcctgtccagatggtgtatgggtttgctcgctccctgctgaaagccctgaaggaagatggtcaagccgtagtagtggttttcgatgcgaaagcaccgtcgtttcgtcacgaagcgtacgaggcctataaagctggccgcgcaccgaccccggaagactttccgcgtcagttagcgctcgtcaaacgcctcgtggatttgctgggattagttcgcttggaagctcctggctacgaggcggacgacgtgctcggtacactggccaagaaagcagaacgtgaaggcatggaggtctgcattcttaccggtgatcgcgatttcttccagctgctgtctgagaaagtgagcgttttgctgcccgatggcacgttagtaaccccgaaagatgtccaagagaaatatggagttccgccagaacgttgggtggactttcgcgcactgactggtgatcgttcagacaacatcccgggcgttgccgggattggtgaaaagacggcgctgcgcctgctggcagaatggggctcggtggaaaatctgctcaagaaccttgatcgtgtgaaacctgatagcttacgccgcaagatcgaagcccacctggaagacttgcgtctgagtctggatcttgcgcgtattcgcaccgatctgccgttggaagtagactttaaagctctgcgtcgtcgcacacccgatttagaggggttacgcgcgttcctcgaagaactggagtttggctccctgctgcatgaattcggtttgttgggcggagagaaaccgcgtgaagaagcaccatggccgccgcccgaaggtgcctttgtcggctttcttctgtcacgcaaagagccaatgtgggcggaactgttagctcttgcagccgccgcggaagggcgtgttcaccgcgcgacctctcctgtcgaggccctcgctgacctcaaagaagcacgtggtttcttggcgaaagatttagccgtgcttgcattacgcgaaggcgttgcgctcgatccgacggacgacccgcttttggtggcttatttgctcgatcctgcgaataccaacccggaaggcgtagcccgtcgttacggcggcgagtttactgaagatgcggcagaacgcgcgttgcttagcgaacgcctcttccagacgttatttccacgtctttcggagaaattactctggctctatcaggaagtcgaacgtccattgagtcgcgtgcttgcccatatggaggctcgcggtgtgcgcttagatgttccgttgttagaagcactcagcttcgagttggagaaagaactggaacgtcttgaaggcgaagtctttcgtttagcggggcatcccttcaatctcaactctcgcgaccaattggagaaagtgctctttgatgaattaggtttaacccctgtcacgcgtacagagaagaccggcaaacgttccacttcggcagccgccttggaagcacttcgtggtgctcacccgatcgtcgagttgattttgcagtaccgcgagctcagcaaactcaaatcaacctatcttgataggttacctcgtcttgttcatccacgtacgggtcgtttacacacccgcttcaatcaaacggcgacagccaccgggcgcttgtcgtcgagtgacccgaacctccagaatattccagtgcgcacgccgctgggccaacgcattcgtaaagcgtttgttgcggaagaaggttggttattacttgcggccgattactcccagatcgaacttcgtgtattggcgcatctctctggcgacgagaatcttaaacgcgtgtttcgcgaaggcaaggatattcacactgaaaccgcagcctggatgttcgggcttgacccagccttagtggaccccaagatgcgtcgtgccgccaagaccgtcaactttggcgtactctatggtatgtcagcagcgcgtcttagtcaggaattgggcattgactacaaagaagctgaagcgtttatcgagcgctatttccaatcctttccgaaagttcgcgcgtggattgaacgtaccctcgaagaaggtcgcactcgcggctatgtggaaacgttattcgggcgtcgtcgctacgttccagatcttgcatctcgtgtccgctcagtgcgcgaagctgctgagcgtatggcctggaatatgcctgttcagggaacagcggcggacctcatgaagatcgccatggtgaaattgtttccgcgcttgaaacccttaggagcccaccttcttttacaggtgcatgatgaattggtcttggaagtacccgaggatcgcgcagaagaagccaaagcactcgtgaaagaggttatggaaaacgcgtatccgttagatgttccgttggaggtcgaagtgggtgtaggccgtgattggcttgaagcgaaacaagactaatga

SEQ ID NO: 476 - protein, 844 aa, synthetic construct
  REGION 1..844: note = DNA Polymerase Variant
MHHHHHHGGSGMLPLFDLEEPPKRVLLVDGHHLAYRTFYALSLTTSRGEPVQMVYGFARSLLKALKEDGQAVVVVFDAKAPSFRHEAYEAYKAGRAPTPEDFPRQLALVKRLVDLLGLVRLEAPGYEADDVLGTLAKKAEREGMEVCILTGDRDFFQLLSEKVSVLLPDGTLVTPKDVQEKYGVPPERWVDFRALTGDRSDNIPGVAGIGEKTALRLLAEWGSVENLLKNLDRVKPDSLRRKIEAHLEDLRLSLDLARIRTDLPLEVDFKALRRRTPDLEGLRAFLEELEFGSLLHEFGLLGGEKPREEAPWPPPEGAFVGFLLSRKEPMWAELLALAAAAEGRVHRATSPVEALADLKEARGFLAKDLAVLALREGVALDPTDDPLLVAYLLDPANTNPEGVARRYGGEFTEDAAERALLSERLFQTLFPRLSEKLLWLYQEVERPLSRVLAHMEARGVRLDVPLLEALSFELEKELERLEGEVFRLAGHPFNLNSRDQLEKVLFDELGLTPVTRTEKTGKRSTSAAALEALRGAHPIVELILQYRELSKLKSTYLDRLPRLVHPRTGRLHTRFNQTATATGRLSSSDPNLQNIPVRTPLGQRIRKAFVAEEGWLLLAADYSQIELRVLAHLSGDENLKRVFREGKDIHTETAAWMFGLDPALVDPKMRRAAKTVNFGVLYGMSAARLSQELGIDYKEAEAFIERYFQSFPKVRAWIERTLEEGRTRGYVETLFGRRRYVPDLASRVRSVREAAERMAWNMPVQGTAADLMKIAMVKLFPRLKPLGAHLLLQVHDELVLEVPEDRAEEAKALVKEVMENAYPLDVPLEVEVGVGRDWLEAKQD

SEQ ID NO: 477 - DNA, 2538 bp, synthetic construct
  misc_feature 1..2538: note = DNA Polymerase Variant
  source 1..2538: mol_type = other DNA
atgcaccatcatcatcatcatggcggtagcggcatgttaccgctgtttgatttggaagaaccaccaaaacgcgtgctgcttgttgacggccatcatctggcgtatcgtaccttctacgcactgagccttacgacctcacgtggtgagcctgtccagatggtgtatgggtttgctcgctccctgctgaaagccctgaaggaagatggtcaagccgtagtagtggttttcgatgcgaaagcaccgtcgtttcgtcacgaagcgtacgaggcctataaagctggccgcgcaccgaccccggaagactttccgcgtcagttagcgctcgtcaaacgcctcgtggatttgctgggattagttcgcttggaagctcctggctacgaggcggacgacgtgctcggtacactggccaagaaagcagaacgtgaaggcatggaggtctgcattcttaccggtgatcgcgatttcttccagctgctgtctgagaaagtgagcgttttgctgcccgatggcacgttagtaaccccgaaagatgtgcaagagaaatatggagttccgccagaacgttgggtggactttcgcgcactgactggtgatcgttcagacaacatcccgggcgttgccgggattggtgaaaagacggcgctgcgcctgctggcagaatggggctcggtggaaaatctgctcaagaaccttgatcgtgtgaaacctgatagcttacgccgcaagatcgaagcccacctggaagacttgcgtctgagtctggatcttgcgcgtattcgcaccgatctgccgttggaagtagactttaaagctctgcgtcgtcgcacacccgatttagaggggttacgcgcgttcctcgaagaactggagtttggctccctgctgcatgaattcggtttgttgggcggagagaaaccgcgtgaagaagcaccatggccgccgcccgaaggtgcctttgtcggctttcttctgtcacgcaaagagccaatgtgggcggaactgttagctcttgcagccgccgcggaagggcgtgttcaccgcgcgacctctcctgtcgaggccctcgctgacctcaaagaagcacgtggtttcttggcgaaagatttagccgtgcttgcattacgcgaaggtgttgcgctcgatccgacggacgacccgcttttggtggcttatttgctcgatcctgcgaataccaacccggaaggcgtagcccgtcgttacggcggcgagtttactgaagatgcggcagaacgcgcgttgcttagcgaacgcctcttccagacgttatttccacgtctttcggagaaattactctggctctatcaggaagtcgaacgtccattgagtcgcgtgcttgcccatatggaggctcgcggtgtgcgcttagatgttccgttgttagaagcactcagcttcgagttggagaaagaactggaacgtcttgaaggcgaagtctttcgtttagcggggcatcccttcaatctcaactctcgcgaccaattggagaaagtgctctttgatgaattaggtttaacccctgtcacgcgtacagagaagaccggcaaacgttccacttcggcagctgccttggaagcacttcgtggtgctcacccgatcgtcgacttgattttgcagtaccgcgagctcagcaaactcaaatcaacctatcttgataggttacctcgtcttgttcatccacgtacgggtcgtttacacacccgcttcaatcaaacggcgacagccaccgggcgcttgtcgtcgagtgacccgaacctccagaatattccagtgcgcacgccgactggccaacacattcgtaaagcgtttgttgcggaagaaggttggttattacttgcggccgattactcccagatcgaacttcgtgtattggcgcatctctctggcgacgagaatcttaaacgcgtgtttcgcgaaggcaaggatattcacactgaaaccgcagcctggatgttcgggcttgacccagccttagtggaccccaagatgcgtcgtgccgccaagaccgtcaactttggcgtactctatggtatgtcagcacatcgtcttagtcaggaattgggcattgactacaaagaagctgaagcgtttatcgagcgctatttccaatcctttccgaaagttcgcgcgtggattgaacgtaccctcgaagaaggtcgcactcgcggctatgtggaaacgttattcgggcgtcgtcgctacgttccagatcttgcatctcgtgtccgctcagtgcgcgaagctgctgagcgtatggcctggaatatgcctgttcagggaacagcggcggacctcatgaagatcgccatggtgaaattgtttccgcgcttgaaacccttaggagcccaccttcttttacaggtgcatgatgaattggtcttggaagtacccgaggatcgcgcagaagaagccaaagcactcgtgaaagaggttatggaaaacgcgtatccgttagatgttccgttggaggtcgaagtgggtgtaggccgtgattggcttgaagcgaaacaagactaatga

SEQ ID NO: 478 - protein, 844 aa, synthetic construct
  REGION 1..844: note = DNA Polymerase Variant
MHHHHHHGGSGMLPLFDLEEPPKRVLLVDGHHLAYRTFYALSLTTSRGEPVQMVYGFARSLLKALKEDGQAVVVVFDAKAPSFRHEAYEAYKAGRAPTPEDFPRQLALVKRLVDLLGLVRLEAPGYEADDVLGTLAKKAEREGMEVCILTGDRDFFQLLSEKVSVLLPDGTLVTPKDVQEKYGVPPERWVDFRALTGDRSDNIPGVAGIGEKTALRLLAEWGSVENLLKNLDRVKPDSLRRKIEAHLEDLRLSLDLARIRTDLPLEVDFKALRRRTPDLEGLRAFLEELEFGSLLHEFGLLGGEKPREEAPWPPPEGAFVGFLLSRKEPMWAELLALAAAAEGRVHRATSPVEALADLKEARGFLAKDLAVLALREGVALDPTDDPLLVAYLLDPANTNPEGVARRYGGEFTEDAAERALLSERLFQTLFPRLSEKLLWLYQEVERPLSRVLAHMEARGVRLDVPLLEALSFELEKELERLEGEVFRLAGHPFNLNSRDQLEKVLFDELGLTPVTRTEKTGKRSTSAAALEALRGAHPIVDLILQYRELSKLKSTYLDRLPRLVHPRTGRLHTRFNQTATATGRLSSSDPNLQNIPVRTPTGQHIRKAFVAEEGWLLLAADYSQIELRVLAHLSGDENLKRVFREGKDIHTETAAWMFGLDPALVDPKMRRAAKTVNFGVLYGMSAHRLSQELGIDYKEAEAFIERYFQSFPKVRAWIERTLEEGRTRGYVETLFGRRRYVPDLASRVRSVREAAERMAWNMPVQGTAADLMKIAMVKLFPRLKPLGAHLLLQVHDELVLEVPEDRAEEAKALVKEVMENAYPLDVPLEVEVGVGRDWLEAKQD

SEQ ID NO: 479 - DNA, 2538 bp, synthetic construct
  misc_feature 1..2538: note = DNA Polymerase Variant
  source 1..2538: mol_type = other DNA
atgcaccatcatcatcatcatggcggtagcggcatgttaccgctgtttgatttggaagaaccaccaaaacgcgtgctgcttgttgacggccatcatctggcgtatcgtaccttctacgcactgagccttacgacctcacgtggtgagcctgtccagatggtgtatgggtttgctcgctccctgctgaaagccctgaaggaagatggtcaagccgtagtagtggttttcgatgcgaaagcaccgtcgtttcgtcacgaagcgtacgaggcctataaagctggccgcgcaccgaccccggaagactttccgcgtcagttagcgctcgtcaaacgcctcgtggatttgctgggattagttcgcttggaagctcctggctacgaggcggacgacgtgctcggtacactggccaagaaagcagaacgtgaaggcatggaggtctgcattcttaccggtgatcgcgatttcttccagctgctgtctgagaaagtgagcgttttgctgcccgatggcacgttagtaaccccgaaagatgtccaagagaaatatggagttccgccagaacgttgggtggactttcgcgcactgactggtgatcgttcagacaacatcccgggcgttgccgggattggtgaaaagacggcgctgcgcctgctggcagaatggggctcggtggaaaatctgctcaagaaccttgatcgtgtgaaacctgatagcttacgccgcaagatcgaagcccacctggaagacttgcgtctgagtctggatcttgcgcgtattcgcaccgatctgccgttggaagtagactttaaagctctgcgtcgtcgcacacccgatttagaggggttacgcgcgttcctcgaagaactggagtttggctccctgctgcatgaattcggtttgttgggcggagagaaaccgcgtgaagaagcaccatggccgccgcccgaaggtgcctttgtcggctttcttctgtcacgcaaagttccaatgtgggcggaactgttagctcttgcagccgccgcggaagggcgtgttcaccgcgcgacctctcctgtcgaggccctcgctgacctcaaagaagcacgtggtttcttggcgaaagatttagccgtgcttgcattacgcgaaggcgttgcgctcgatccgacggacgacccgcttttggtggcttatttgctcgatcctgcgaataccaacccggaaggcgtagcccgtcgttacggcggcgagtttactgaagatgcggcagaacgcgcgttgcttagcgaacgcctcttccagacgttatttccacgtctttcggagaaattactctggctctatcaggaagtcgaacgtccattgagtcgcgtgcttgcccatatggaggctcgcggtgtgcgcttagatgttccgttgttagaagcactcagcttcgagttggagaaagaactggaacgtcttgaaggcgaagtctttcgtttagcggggcatcccttcaatctcaactctcgcgaccaattggagaaagtgctctttgatgaattaggtttaacccctgtcacgcgtacagagaagaccggcaaacgttccacttcggcagccgccttggaagcacttcgtggtgctcacccgatcgtcgagttgattttgcagtaccgcgagctcagcaaactcaaatcaacctatcttgataggttacctcgtcttgttcatccacgtacgggtcgtttacacacccgcttcaatcaaacggcgacagccaccgggcgcttgtcgtcgagtgacccgaacctccagaatattccagtgcgcacgccgctgggccaacgcattcgtaaagcgtttgttgcggaagaaggttggttattacttgcggccgattactcccagatcgaacttcgtgtattggcgcatctctctggcgacgagaatcttaaacgcgtgtttcgcgaaggcaaggatattcacactgaaaccgcagcctggatgttcgggcttgacccagccttagtggaccccaagatgcgtcgtgccgccaagaccgtcaactttggcgtactctatggtatgtcagcacatcgtcttagtcaggaattgggcattgactacaaagaagctgaagcgtttatcgagcgctatttccaatcctttccgaaagttcgcgcgtggattgaacgtaccctcgaagaaggtcgcactcgcggctatgtggaaacgttattcgggcgtcgtcgctacgttccagatcttgcatctcgtgtccgctcagtgcgcgaagctgctgagcgtatggcctggaatatgcctgttcagggaacagcggcggacctcatgaagatcgccatggtgaaattgtttccgcgcttgaaacccttaggagcccaccttcttttacaggtgcatgatgaattggtcttggaagtacccgaggatcgcgcagaagaagccaaagcactcgtgaaagaggttatggaaaacgcgtatccgttagatgttccgttggaggtcgaagtgggtgtaggccgtgattggcttgaagcgaaacaagactaatga

SEQ ID NO: 480 - protein, 844 aa, synthetic construct
  REGION 1..844: note = DNA Polymerase Variant
MHHHHHHGGSGMLPLFDLEEPPKRVLLVDGHHLAYRTFYALSLTTSRGEPVQMVYGFARSLLKALKEDGQAVVVVFDAKAPSFRHEAYEAYKAGRAPTPEDFPRQLALVKRLVDLLGLVRLEAPGYEADDVLGTLAKKAEREGMEVCILTGDRDFFQLLSEKVSVLLPDGTLVTPKDVQEKYGVPPERWVDFRALTGDRSDNIPGVAGIGEKTALRLLAEWGSVENLLKNLDRVKPDSLRRKIEAHLEDLRLSLDLARIRTDLPLEVDFKALRRRTPDLEGLRAFLEELEFGSLLHEFGLLGGEKPREEAPWPPPEGAFVGFLLSRKVPMWAELLALAAAAEGRVHRATSPVEALADLKEARGFLAKDLAVLALREGVALDPTDDPLLVAYLLDPANTNPEGVARRYGGEFTEDAAERALLSERLFQTLFPRLSEKLLWLYQEVERPLSRVLAHMEARGVRLDVPLLEALSFELEKELERLEGEVFRLAGHPFNLNSRDQLEKVLFDELGLTPVTRTEKTGKRSTSAAALEALRGAHPIVELILQYRELSKLKSTYLDRLPRLVHPRTGRLHTRFNQTATATGRLSSSDPNLQNIPVRTPLGQRIRKAFVAEEGWLLLAADYSQIELRVLAHLSGDENLKRVFREGKDIHTETAAWMFGLDPALVDPKMRRAAKTVNFGVLYGMSAHRLSQELGIDYKEAEAFIERYFQSFPKVRAWIERTLEEGRTRGYVETLFGRRRYVPDLASRVRSVREAAERMAWNMPVQGTAADLMKIAMVKLFPRLKPLGAHLLLQVHDELVLEVPEDRAEEAKALVKEVMENAYPLDVPLEVEVGVGRDWLEAKQD

SEQ ID NO: 481 - DNA, 2538 bp, synthetic construct
  misc_feature 1..2538: note = DNA Polymerase Variant
  source 1..2538: mol_type = other DNA
atgcaccatcatcatcatcatggcggtagcggcatgttaccgctgtttgatttggaagaaccaccaaaacgcgtgctgcttgttgacggccatcatctggcgtatcgtaccttctacgcactgagccttacgacctcacgtggtgagcctgtccagatggtgtatgggtttgctcgctccctgctgaaagccctgaaggaagatggtcaagccgtagtagtggttttcgatgcgaaagcaccgtcgtttcgtcacgaagcgtacgaggcctataaagctggccgcgcaccgaccccggaagactttccgcgtcagttagcgctcgtcaaacgcctcgtggatttgctgggattagttcgcttggaagctcctggctacgaggcggacgacgtgctcggtacactggccaagaaagcagaacgtgaaggcatggaggtctgcattcttaccggtgatcgcgatttcttccagctgctgtctgagaaagtgagcgttttgctgcccgatggcacgttagtaaccccgaaagatgtccaagagaaatatggagttccgccagaacgttgggtggactttcgcgcactgactggtgatcgttcagacaacatcccgggcgttgccgggattggtgaaaagacggcgctgcgcctgctggcagaatggggctcggtggaaaatctgctcaagaaccttgatcgtgtgaaacctgatagcttacgccgcaagatcgaagcccacctggaagacttgcgtctgagtctggatcttgcgcgtattcgcaccgatctgccgttggaagtagactttaaagctctgcgtcgtcgcacacccgatttagaggggttacgcgcgttcctcgaagaactggagtttggctccctgctgcatgaattcggtttgttgggcggagagaaaccgcgtgaagaagcaccatggccgccgcccgaaggtgcctttgtcggctttcttctgtcacgcaaagagccaatgtgggcggaactgttagctcttgcagccgccgcggaagggcgtgttcaccgcgcgacctctcctgtcgaggccctcgctgacctcaaagaagcacgtggtttcttggcgaaagatttagccgtgcttgcattacgcgaaggcgttgcgctcgatccgacggacgacccgcttttggtggcttatttgctcgatcctctgaataccaacccggaaggcgtagcccgtcgttacggcggcgagtttactgaagatgcggcagaacgcgcgttgcttagcgaacgcctcttccagacgttatttccacgtctttcggagaaattactctggctctatcaggaagtcgaacgtccattgagtcgcgtgcttgcccatatggaggctcgcggtgtgcgcttagatgttccgttgttagaagcactcagcttcgagttggagaaagaactggaacgtcttgaaggcgaagtctttcgtttagcggggcatcccttcaatctcaactctcgcgaccaattggagaaagtgctctttgatgaattaggtttaacccctgtcacgcgtacagagaagaccggcaaacgttccacttcggcagccgccttggaagcacttcgtggtgctcacccgatcgtcgagttgattttgcagtaccgcgagctcagcaaactcaaatcaacctatcttgataggttacctcgtcttgttcatccacgtacgggtcgtttacacacccgcttcaatcaaacggcgacagccaccgggcgcttgtcgtcgagtgacccgaacctccagaatattccagtgcgcacgccgctgggccaacgcattcgtaaagcgtttgttgcggaagaaggttggttattacttgcggccgattactcccagatcgaacttcgtgtattggcgcatctctctggcgacgagaatcttaaacgcgtgtttcgcgaaggcaaggatattcacactgaaaccgcagcctggatgttcgggcttgacccagccttagtggaccccaagatgcgtcgtgccgccaagaccgtcaactttggcgtactctatggtatgtcagcacatcgtcttagtcaggaattgggcattgactacaaagaagctgaagcgtttatcgagcgctatttccaatcctttccgaaagttcgcgcgtggattgaacgtaccctcgaagaaggtcgcactcgcggctatgtggaaacgttattcgggcgtcgtcgctacgttccagatcttgcatctcgtgtccgctcagtgcgcgaagctgctgagcgtatggcctggaatatgcctgttcagggaacagcggcggacctcatgaagatcgccatggtgaaattgtttccgcgcttgaaacccttaggagcccaccttcttttacaggtgcatgatgaattggtcttggaagtacccgaggatcgcgcagaagaagccaaagcactcgtgaaagaggttatggaaaacgcgtatccgttagatgttccgttggaggtcgaagtgggtgtaggccgtgattggcttgaagcgaaacaagactaatga

SEQ ID NO: 482 - protein, 844 aa, synthetic construct; identical to SEQ ID NO: 386
  REGION 1..844: note = DNA Polymerase Variant

SEQ ID NO: 483 - DNA, 2538 bp, synthetic construct
  misc_feature 1..2538: note = DNA Polymerase Variant
  source 1..2538: mol_type = other DNA
atgcaccatcatcatcatcatggcggtagcggcatgttaccgctgtttgatttggaagaaccaccaaaacgcgtgctgcttgttgacggccatcatctggcgtatcgtaccttctacgcactgagccttacgacctcacgtggtgagcctgtccagatggtgtatgggtttgctcgctccctgctgaaagccctgaaggaagatggtcaagccgtagtagtggttttcgatgcgaaagcaccgtcgtttcgtcacgaagcgtacgaggcctataaagctggccgcgcaccgaccccggaagactttccgcgtcagttagcgctcgtcaaacgcctcgtggatttgctgggattagttcgcttggaagctcctggctacgaggcggacgacgtgctcggtacactggccaagaaagcagaacgtgaaggcatggaggtctgcattcttaccggtgatcgcgatttcttccagctgctgtctgagaaagtgagcgttttgctgcccgatggcacgttagtaaccccgaaagatgtccaagagaaatatggagttccgccagaacgttgggtggactttcgcgcactgactggtgatcgttcagacaacatcccgggcgttgccgggattggtgaaaagacggcgctgcgcctgctggcagaatggggctcggtggaaaatctgctcaagaaccttgatcgtgtgaaacctgatagcttacgccgcaagatcgaagcccacctggaagacttgcgtctgagtctggatcttgcgcgtattcgcaccgatctgccgttggaagtagactttaaagctctgcgtcgtcgcacacccgatttagaggggttacgcgcgttcctcgaagaactggagtttggctccctgctgcatgaattcggtttgttgggcggagagaaaccgcgtgaagaagcaccatggccgccgcccgaaggtgcctttgtcggctttcttctgtcacgcaaagagccaatgtgggcggaactgttagctcttgcagccgccgcggaagggcgtgttcaccgcgcgacctctcctgtcgaggccctcgctgacctcaaagaagcacgtggtttcttggcgaaagatttagccgtgcttgcattacgcgaaggcgttgcgctcgatccgacggacgacccgcttttggtggcttatttgctcgatcctgcgaataccaacccggaaggcgtagcccgtcgttacggcggcgagtttactgaagatgcggcagaacgcgcgttgcttagcgaacgcctcttccagacgttatttccacgtctttcggagaaattactctggctctatcaggaagtcgaacgtccattgagtcgcgtgcttgcccatatggaggctcgcggtgtgcgcttagatgttccgttgttagaagcactcagcttcgagttgtataaagaactggaacgtcttgaaggcgaagtctttcgtttagcggggcatcccttcaatctcaactctcgcgaccaattggagaaagtgctctttgatgaattaggtttaacccctgtcacgcgtacagagaagaccggcaaacgttccacttcggcagccgccttggaagcacttcgtggtgctcacccgatcgtcgagttgattttgcagtaccgcgagctcagcaaactcaaatcaacctatcttgataggttacctcgtcttgttcatccacgtacgggtcgtttacacacccgcttcaatcaaacggcgacagccaccgggcgcttgtcgtcgagtgacccgaacctccagaatattccagtgcgcacgccgctgggccaacgcattcgtaaagcgtttgttgcggaagaaggttggttattacttgcggccgattactcccagatcgaacttcgtgtattggcgcatctctctggcgacgagaatcttaaacgcgtgtttcgcgaaggcaaggatattcacactgaaaccgcagcctggatgttcgggcttgacccagccttagtggaccccaagatgcgtcgtgccgccaagaccgtcaactttggcgtactctatggtatgtcagcacatcgtcttagtcaggaattgggcattgactacaaagaagctgaagcgtttatcgagcgctatttccaatcctttccgaaagttcgcgcgtggattgaacgtaccctcgaagaaggtcgcactcgcggctatgtggaaacgttattcgggcgtcgtcgctacgttccagatcttgcatctcgtgtccgctcagtgcgcgaagctgctgagcgtatggcctggaatatgcctgttcagggaacagcggcggacctcatgaagatcgccatggtgaaattgtttccgcgcttgaaacccttaggagcccaccttcttttacaggtgcatgatgaattggtcttggaagtacccgaggatcgcgcagaagaagccaaagcactcgtgaaagaggttatggaaaacgcgtatccgttagatgttccgttggaggtcgaagtgggtgtaggccgtgattggcttgaagcgaaacaagactaatga

SEQ ID NO: 484 - protein, 844 aa, synthetic construct
  REGION 1..844: note = DNA Polymerase Variant
MHHHHHHGGSGMLPLFDLEEPPKRVLLVDGHHLAYRTFYALSLTTSRGEPVQMVYGFARSLLKALKEDGQAVVVVFDAKAPSFRHEAYEAYKAGRAPTPEDFPRQLALVKRLVDLLGLVRLEAPGYEADDVLGTLAKKAEREGMEVCILTGDRDFFQLLSEKVSVLLPDGTLVTPKDVQEKYGVPPERWVDFRALTGDRSDNIPGVAGIGEKTALRLLAEWGSVENLLKNLDRVKPDSLRRKIEAHLEDLRLSLDLARIRTDLPLEVDFKALRRRTPDLEGLRAFLEELEFGSLLHEFGLLGGEKPREEAPWPPPEGAFVGFLLSRKEPMWAELLALAAAAEGRVHRATSPVEALADLKEARGFLAKDLAVLALREGVALDPTDDPLLVAYLLDPANTNPEGVARRYGGEFTEDAAERALLSERLFQTLFPRLSEKLLWLYQEVERPLSRVLAHMEARGVRLDVPLLEALSFELYKELERLEGEVFRLAGHPFNLNSRDQLEKVLFDELGLTPVTRTEKTGKRSTSAAALEALRGAHPIVELILQYRELSKLKSTYLDRLPRLVHPRTGRLHTRFNQTATATGRLSSSDPNLQNIPVRTPLGQRIRKAFVAEEGWLLLAADYSQIELRVLAHLSGDENLKRVFREGKDIHTETAAWMFGLDPALVDPKMRRAAKTVNFGVLYGMSAHRLSQELGIDYKEAEAFIERYFQSFPKVRAWIERTLEEGRTRGYVETLFGRRRYVPDLASRVRSVREAAERMAWNMPVQGTAADLMKIAMVKLFPRLKPLGAHLLLQVHDELVLEVPEDRAEEAKALVKEVMENAYPLDVPLEVEVGVGRDWLEAKQD

SEQ ID NO: 485 - DNA, 2538 bp, synthetic construct
  misc_feature 1..2538: note = DNA Polymerase Variant
  source 1..2538: mol_type = other DNA
atgcaccatcatcatcatcatggcggtagcggcatgttaccgctgtttgatttggaagaaccaccaaaacgcgtgctgcttgttgacggccatcatctggcgtatcgtaccttctacgcactgagccttacgacctcacgtggtgagcctgtccagatggtgtatgggtttgctcgctccctgctgaaagccctgaaggaagatggtcaagccgtagtagtggttttcgatgcgaaagcaccgtcgtttcgtcacgaagcgtacgaggcctataaagctggccgcgcaccgaccccggaagactttccgcgtcagttagcgctcgtcaaacgcctcgtggatttgctgggattagttcgcttggaagctcctggctacgaggcggacgacgtgctcggtacactggccaagaaagcagaacgtgaaggcatggaggtctgcattcttaccggtgatcgcgatttcttccagctgctgtctgagaaagtgagcgttttgctgcccgatggcacgttagtaaccccgaaagatgtccaagagaaatatggagttccgccagaacgttgggtggactttcgcgcactgactggtgatcgttcagacaacatcccgggcgttgccgggattggtgaaaagacggcgctgcgcctgctggcagaatggggctcggtggaaaatctgctcaagaaccttgatcgtgtgaaacctgatagcttacgccgcaagatcgaagcccacctggaagacttgcgtctgagtctggatcttgcgcgtattcgcaccgatctgccgttggaagtagactttaaagctctgcgtcgtcgcacacccgatttagaggggttacgcgcgttcctcgaagaactggagtttggctccctgctgcatgaattcggtttgttgggcggagagaaaccgcgtgaagaagcaccatggccgccgcccgaaggtgcctttgtcggctttcttctgtcacgcaaagagccaatgtgggcggaactgttagctcttgcagccgccgcggaagggcgtgttcaccgcgcgacctctcctgtcgaggccctcgctgacctcaaagaagcacgtggtttcttggcgaaagatttagccgtgcttgcattacgcgaaggcgttgcgctcgatccgacggacgacccgcttttggtggcttatttgctcgatggggcgaataccaacccggaaggcgtagcccgtcgttacggcggcgagtttactgaagatgcggcagaacgcgcgttgcttagcgaacgcctcttccagacgttatttccacgtctttcggagaaattactctggctctatcaggaagtcgaacgtccattgagtcgcgtgcttgcccatatggaggctcgcggtgtgcgcttagatgttccgttgttagaagcactcagcttcgagttggagaaagaactggaacgtcttgaaggcgaagtctttcgtttagcggggcatcccttcaatctcaactctcgcgaccaattggagaaagtgctctttgatgaattaggtttaacccctgtcacgcgtacagagaagaccggcaaacgttccacttcggcagccgccttggaagcacttcgtggtgctcacccgatcgtcgagttgattttgcagtaccgcgagctcagcaaactcaaatcaacctatcttgataggttacctcgtcttgttcatccacgtacgggtcgtttacacacccgcttcaatcaaacggcgacagccaccgggcgcttgtcgtcgagtgacccgaacctccagaatattccagtgcgcacgccgctgggccaacgcattcgtaaagcgtttgttgcggaagaaggttggttattacttgcggccgattactcccagatcgaacttcgtgtattggcgcatctctctggcgacgagaatcttaaacgcgtgtttcgcgaaggcaaggatattcacactgaaaccgcagcctggatgttcgggcttgacccagccttagtggaccccaagatgcgtcgtgccgccaagaccgtcaactttggcgtactctatggtatgtcagcacatcgtcttagtcaggaattgggcattgactacaaagaagctgaagcgtttatcgagcgctatttccaatcctttccgaaagttcgcgcgtggattgaacgtaccctcgaagaaggtcgcactcgcggctatgtggaaacgttattcgggcgtcgtcgctacgttccagatcttgcatctcgtgtccgctcagtgcgcgaagctgctgagcgtatggcctggaatatgcctgttcagggaacagcggcggacctcatgaagatcgccatggtgaaattgtttccgcgcttgaaacccttaggagcccaccttcttttacaggtgcatgatgaattggtcttggaagtacccgaggatcgcgcagaagaagccaaagcactcgtgaaagaggttatggaaaacgcgtatccgttagatgttccgttggaggtcgaagtgggtgtaggccgtgattggcttgaagcgaaacaagactaatga

SEQ ID NO: 486 - protein, 844 aa, synthetic construct; identical to SEQ ID NO: 404
  REGION 1..844: note = DNA Polymerase Variant

SEQ ID NO: 487 - DNA, 2538 bp, synthetic construct
  misc_feature 1..2538: note = DNA Polymerase Variant
  source 1..2538: mol_type = other DNA
atgcaccatcatcatcatcatggcggtagcggcatgttaccgctgtttgatttggaagaaccaccaaaacgcgtgctgcttgttgacggccatcatctggcgtatcgtaccttctacgcactgagccttacgacctcacgtggtgagcctgtccagatggtgtatgggtttgctcgctccctgctgaaagccctgaaggaagatggtcaagccgtagtagtggttttcgatgcgaaagcaccgtcgtttcgtcacgaagcgtacgaggcctataaagctggccgcgcaccgaccccggaagactttccgcgtcagttagcgctcgtcaaacgcctcgtggatttgctgggattagttcgcttggaagctcctggctacgaggcggacgacgtgctcggtacactggccaagaaagcagaacgtgaaggcatggaggtctgcattcttaccggtgatcgcgatttcttccagctgctgtctgagaaagtgagcgttttgctgcccgatggcacgttagtaaccccgaaagatgtgcaagagaaatatggagttccgccagaacgttgggtggactttcgcgcactgactggtgatcgttcagacaacatcccgggcgttgccgggattggtgaaaagacggcgctgcgcctgctggcagaatggggctcggtggaaaatctgctcaagaaccttgatcgtgtgaaacctgatagcttacgccgcaagatcgaagcccacctggaagacttgcgtctgagtctggatcttgtccgtattcgcaccgatctgccgttggaagtagactttaaagctctgcgtcgtcgcacacccgatttagaggggttacgcgcgttcctcgaagaactggagtttggctccctgctgcatgaattcggtttgttgggcggagagaaaccgcgtgaagaagcaccatggccgccgcccgaaggtgcctttgtcggctttcttctgtcacgcaaagagccaatgtgggcggaactgttagctcttgcagccgccgcggaagggcgtgttcaccgcgcgacctctcctgtcgaggccctcgctgacctcaaagaagcacgtggtttcttggcgaaagatttagccgtgcttgcattacgcgaaggcgttgcgctcgatccgacggacgacccgcttttggtggcttatttgctcgatcctgcgaataccaacccggaaggcgtagcccgtcgttacggcggcgagtttactgaagatgcggcagaacgcgcgttgcttagcgaacgcctcttccagacgttatttccacgtctttcggagaaattactctggctctatcaggaagtcgaacgtccattgagtcgcgtgcttgcccatatggaggctcgcggtgtgcgcttagatgttccgttgttagaagcactcagcttcgagttggagaaagaactggaacgtcttgaaggcgaagtctttcgtttagcggggcatcccttcaatctcaactctcgcgaccaattggagaaagtgctctttgatgaattaggtttaacccctgtcacgcgtacagagaagaccggcaaacgttccacttcggcaggtgccttggaagcacttcgtggtgctcacccgatcgtcgagttgattttgcagtaccgcgagctcagcaaactcaaatcaacctatcttgataggttacctcgtcttgttcatccacgtacgggtcgtttacacacccgcttcaatcaaacggcgacagccaccgggcgcttgtcgtcgagtgacccgaacctccagaatattccagtgcgcacgccgctgggccaacgcattcgtaaagcgtttgttgcggaagaaggttggttattacttgcggccgattactcccagatcgaacttcgtgtattggcgcatctctctggcgacgagaatcttaaacgcgtgtttcgcgaaggcaaggatattcacactgaaaccgcagcctggatgttcgggcttgacccagccttagtggaccccaagatgcgtcgtgccgccaagaccgtcaactttggcgtactctatggtatgtcagcacatcgtcttagtcaggaattgggcattgactacaaagaagctgaagcgtttatcgagcgctatttccaatcctttccgaaagttcgcgcgtggattgaacgtaccctcgaagaaggtcgcactcgcggctatgtggaaacgttattcgggcgtcgtcgctacgttccagatcttgcatctcgtgtccgctcagtgcgcgaagctgctgagcgtatggcctggaatatgcctgttcagggaacagcggcggacctcatgaagatcgccatggtgaaattgtttccgcgcttgaaacccttaggagcccaccttcttttacaggtgcatgatgaattggtcttggaagtacccgaggatcgcgcagaagaagccaaagcactcgtgaaagaggttatggaaaacgcgtatccgttagatgttccgttggaggtcgaagtgggtgtaggccgtgattggcttgaagcgaaacaagactaatga

SEQ ID NO: 488 - protein, 844 aa, synthetic construct
  REGION 1..844: note = DNA Polymerase Variant
MHHHHHHGGSGMLPLFDLEEPPKRVLLVDGHHLAYRTFYALSLTTSRGEPVQMVYGFARSLLKALKEDGQAVVVVFDAKAPSFRHEAYEAYKAGRAPTPEDFPRQLALVKRLVDLLGLVRLEAPGYEADDVLGTLAKKAEREGMEVCILTGDRDFFQLLSEKVSVLLPDGTLVTPKDVQEKYGVPPERWVDFRALTGDRSDNIPGVAGIGEKTALRLLAEWGSVENLLKNLDRVKPDSLRRKIEAHLEDLRLSLDLVRIRTDLPLEVDFKALRRRTPDLEGLRAFLEELEFGSLLHEFGLLGGEKPREEAPWPPPEGAFVGFLLSRKEPMWAELLALAAAAEGRVHRATSPVEALADLKEARGFLAKDLAVLALREGVALDPTDDPLLVAYLLDPANTNPEGVARRYGGEFTEDAAERALLSERLFQTLFPRLSEKLLWLYQEVERPLSRVLAHMEARGVRLDVPLLEALSFELEKELERLEGEVFRLAGHPFNLNSRDQLEKVLFDELGLTPVTRTEKTGKRSTSAGALEALRGAHPIVELILQYRELSKLKSTYLDRLPRLVHPRTGRLHTRFNQTATATGRLSSSDPNLQNIPVRTPLGQRIRKAFVAEEGWLLLAADYSQIELRVLAHLSGDENLKRVFREGKDIHTETAAWMFGLDPALVDPKMRRAAKTVNFGVLYGMSAHRLSQELGIDYKEAEAFIERYFQSFPKVRAWIERTLEEGRTRGYVETLFGRRRYVPDLASRVRSVREAAERMAWNMPVQGTAADLMKIAMVKLFPRLKPLGAHLLLQVHDELVLEVPEDRAEEAKALVKEVMENAYPLDVPLEVEVGVGRDWLEAKQD

SEQ ID NO: 489 - DNA, 2538 bp, synthetic construct
  misc_feature 1..2538: note = DNA Polymerase Variant
  source 1..2538: mol_type = other DNA
atgcaccatcatcatcatcatggcggtagcggcatgttaccgctgtttgatttggaagaaccaccaaaacgcgtgctgcttgttgacggccatcatctggcgtatcgtaccttctacgcactgagccttacgacctcacgtggtgagcctgtccagatggtgtatgggtttgctcgctccctgctgaaagccctgaaggaagatggtcaagccgtagtagtggttttcgatgcgaaagcaccgtcgtttcgtcacgaagcgtacgaggcctataaagctggccgcgcaccgaccccggaagactttccgcgtcagttagcgctcgtcaaacgcctcgtggatttgctgggattagttcgcttggaagctcctggctacgaggcggacgacgtgctcggtacactggccaagaaagcagaacgtgaaggcatggaggtctgcattcttaccggtgatcgcgatttcttccagctgctgtctgagaaagtgagcgttttgctgcccgatggcacgttagtaaccccgaaagatgtgcaagagaaatatggagttccgccagaacgttgggtggactttcgcgcactgactggtgatcgttcagacaacatcccgggcgttgccgggattggtgaaaagacggcgctgcgcctgctggcagaatggggctcggtggaaaatctgctcaagaaccttgatcgtgtgaaacctgatagcttacgccgcaagatcgaagcccacctggaagacttgcgtctgagtctggatcttgtccgtattcgcaccgatctgccgttggaagtagactttaaagctctgcgtcgtcgcacacccgatttagaggggttacgcgcgttcctcgaagaactggagtttggctccctgctgcatgaattcggtttgttgggcggagagaaaccgcgtgaagaagcaccatggccgccgcccgaaggtgcctttgtcggctttcttctgtcacgcaaagagccaatgtgggcggaactgttagctcttgcagccgccgcggaagggcgtgttcaccgcgcgacctctcctgtcgaggccctcgctgacctcaaagaagcacgtggtttcttggcgaaagatttagccgtgcttgcattacgcgaaggcgttgcgctcgatccgacggacgacccgcttttggtggcttatttgctcgatcctgcgaataccaacccggaaggcgtagcccgtcgttacggcggcgagtttactgaagatgcggcagaacgcgcgttgcttagcgaacgcctcttccagacgttatttccacgtctttcggagaaattactctggctctatcaggaagtcgaacgtccattgagtcgcgtgcttgcccatatggaggctcgcggtgtgcgcttagatgttccgttgttagaagcactcagcttcgagttggagaaagaactggaacgtcttgaaggcgaagtctttcgtttagcggggcatcccttcaatctcaactctcgcgaccaattggagaaagtgctctttgatgaattaggtttaacccctgtcacgcgtacagagaagaccggcaaacgttccacttcggcaggtgccttggaagcacttcgtggtgctcacccgatcgtcgagttgattttgcagtaccgcgagctcagcaaactcaaaaatacctatctggataggttacctcgtcttgttcatccacgtacgggtcgtttacacacccgcttcaatcaaacggcgacagccaccgggcgcttgtcgtcgagtgacccgaacctccagaatattccagtgcgcacgccgctgggccaacgcattcgtaaagcgtttgttgcggaagaaggttggttattacttgcggccgattactcccagatcgaacttcgtgtattggcgcatctctctggcgacgagaatcttaaacgcgtgtttcgcgaaggcaaggatattcacactgaaaccgcagcctggatgttcgggctggacccagccttagtggaccccaagatgcgtcgtgccgccaagaccgtcaactttggcgtactctatggtatgtcagcacatcgtcttagtcaggaattgggcattgactacaaagaagctgaagcgtttatcgagcgctatttccaatcctttccgaaagttcgcgcgtggattgaacgtaccctcgaagaaggtcgcactcgcggctatgtggaaacgttattcgggcgtcgtcgctacgttccagatcttgcatctcgtgtccgctcagtgcgcgaagctgctgagcgtatggcctggaatatgcctgttcagggaacagcggcggacctcatgaagatcgccatggtgaaattgtttccgcgcttgaaacccttaggagcccaccttcttttacaggtgcatgatgaattggtcttggaagtacccgaggatcgcgcagaagaagccaaagcactcgtgaaagaggttatggaaaacgcgtatccgttagatgttccgttggaggtcgaagtgggtgtaggccgtgattggcttgaagcgaaacaagactaatga

SEQ ID NO: 490 - protein, 844 aa, synthetic construct
  REGION 1..844: note = DNA Polymerase Variant
MHHHHHHGGSGMLPLFDLEEPPKRVLLVDGHHLAYRTFYALSLTTSRGEPVQMVYGFARSLLKALKEDGQAVVVVFDAKAPSFRHEAYEAYKAGRAPTPEDFPRQLALVKRLVDLLGLVRLEAPGYEADDVLGTLAKKAEREGMEVCILTGDRDFFQLLSEKVSVLLPDGTLVTPKDVQEKYGVPPERWVDFRALTGDRSDNIPGVAGIGEKTALRLLAEWGSVENLLKNLDRVKPDSLRRKIEAHLEDLRLSLDLVRIRTDLPLEVDFKALRRRTPDLEGLRAFLEELEFGSLLHEFGLLGGEKPREEAPWPPPEGAFVGFLLSRKEPMWAELLALAAAAEGRVHRATSPVEALADLKEARGFLAKDLAVLALREGVALDPTDDPLLVAYLLDPANTNPEGVARRYGGEFTEDAAERALLSERLFQTLFPRLSEKLLWLYQEVERPLSRVLAHMEARGVRLDVPLLEALSFELEKELERLEGEVFRLAGHPFNLNSRDQLEKVLFDELGLTPVTRTEKTGKRSTSAGALEALRGAHPIVELILQYRELSKLKNTYLDRLPRLVHPRTGRLHTRFNQTATATGRLSSSDPNLQNIPVRTPLGQRIRKAFVAEEGWLLLAADYSQIELRVLAHLSGDENLKRVFREGKDIHTETAAWMFGLDPALVDPKMRRAAKTVNFGVLYGMSAHRLSQELGIDYKEAEAFIERYFQSFPKVRAWIERTLEEGRTRGYVETLFGRRRYVPDLASRVRSVREAAERMAWNMPVQGTAADLMKIAMVKLFPRLKPLGAHLLLQVHDELVLEVPEDRAEEAKALVKEVMENAYPLDVPLEVEVGVGRDWLEAKQD

SEQ ID NO: 491 - DNA, 2538 bp, synthetic construct
  misc_feature 1..2538: note = DNA Polymerase Variant
  source 1..2538: mol_type = other DNA
atgcaccatcatcatcatcatggcggtagcggcatgttaccgctgtttgatttggaagaaccaccaaaacgcgtgctgcttgttgacggccatcatctggcgtatcgtaccttctacgcactgagccttacgacctcacgtggtgagcctgtccagatggtgtatgggtttgctcgctccctgctgaaagccctgaaggaagatggtcaagccgtagtagtggttttcgatgcgaaagcaccgtcgtttcgtcacgaagcgtacgaggcctataaagctggccgcgcaccgaccccggaagactttccgcgtcagttagcgctcgtcaaacgcctcgtggatttgctgggattagttcgcttggaagctcctggctacgaggcggacgacgtgctcggtacactggccaagaaagcagaacgtgaaggcatggaggtctgcattcttaccggtgatcgcgatttcttccagctgctgtctgagaaagtgagcgttttgctgcccgatggcacgttagtaaccccgaaagatgtccaagagaaatatggagttccgccagaacgttgggtggactttcgcgcactgactggtgatcgttcagacaacatcccgggcgttgccgggattggtgaaaagacggcgctgcgcctgctggcagaatggggctcggtggaaaatctgctcaagaaccttgatcgtgtgaaacctgatagcttacgccgcaagatcgaagcccacctggaagacttgcgtctgagtctggatcttgcgcgtattcgcaccgatctgccgttggaagtagactttaaagctctgcgtcgtcgcacacccgatttagaggggttacgcgcgttcctcgaagaactggagtttggctccctgctgcatgaattcggtttgttgggcggagagaaaccgcgtgaagaagcaccatggccgccgcccgaaggtgcctttgtcggctttcttctgtcacgcaaagagccaatgtgggcggaactgttagctcttgcagccgccgcggaagggcgtgttcaccgcgcgacctctcctgtcgaggccctcgctgacctcaaagaagcacgtggtttcttggcgaaagatttagccgtgcttgcattacgcgaaggcgttgcgctcgatccgacggacgacccgcttttggtggcttatttgctcgatcctgcgaataccaacccggaaggcgtagcccgtcgttacggcggcgagtttactgaagatgcggcagaacgcgcgttgcttagcgaacgcctcttccagacgttatttccacgtctttcggagaaattactctggctctatcaggaagtcgaacgtccattgagtcgcgtgcttgcccatatggaggctcgcggtgtgcgcttagatgttccgttgttagaagcactcagcttcgagttggagaaagaactggaacgtcttgaaggcgaagtctttcgtttagcggggcatcccttcaatctcaactctcgcgaccaattggagaaagtgctctttgatgaattaggtttaacccctgtcacgcgtacagagaagaccggcaaacgttccacttcggcagccgccttggaagcacttcgtggtgctcacccgatcgtcgagttgattttgcagtaccgcgagctcagcaaactcaaatcaacctatcttgataggttacctcgtcttgttcatccacgtacgggtcgtttacacacccgcttcaatcaaacggcgacagccaccgggcgcttgtcgtcgagtgacccgaacctccagaatattccagtgcgcacgccgctgggccaacgcattcgtaaagcgtttgttgcggaagaaggttggttattacttgcggccgattactcccagatcgaacttcgtgtattggcgcatctctctggcgacgagaatcttaaacgcgtgtttcgcgaaggcaaggatattcacactgaaaccgcagcctggatgttcgggcttgacccagccttagtggaccccaagatgcgtcgtgccgccaagaccgtcaactttggcgtactctatggtatgtcagcacatcgtcttagtcaggaattgggcattgactacaaagaagctgaagcgtttatcgagcgctatttccaatcctttccgaaagttcgcgcgtggattgaacgtaccctcgaagaaggtcgcactcgcggctatgtggaaacgttattcgggcgtcgtcgctacgttccagatcttgcatctcgtgtccgctcagtgcgcgaagctgctgagcgtatggcctggaatatgcctgttcagggaacaagtgcggacctcatgaagatcgccatggtgaaattgtttccgcgcttgaaacccttaggagcccaccttcttttacaggtgcatgatgaattggtcttggaagtacccgaggatcgcgcagaagaagccaaagcactcgtgaaagaggttatggaaaacgcgtatccgttagatgttccgttggaggtcgaagtgggtgtaggccgtgattggcttgaagcgaaacaagactaatga

SEQ ID NO: 492 - protein, 844 aa, synthetic construct
  REGION 1..844: note = DNA Polymerase Variant
MHHHHHHGGSGMLPLFDLEEPPKRVLLVDGHHLAYRTFYALSLTTSRGEPVQMVYGFARSLLKALKEDGQAVVVVFDAKAPSFRHEAYEAYKAGRAPTPEDFPRQLALVKRLVDLLGLVRLEAPGYEADDVLGTLAKKAEREGMEVCILTGDRDFFQLLSEKVSVLLPDGTLVTPKDVQEKYGVPPERWVDFRALTGDRSDNIPGVAGIGEKTALRLLAEWGSVENLLKNLDRVKPDSLRRKIEAHLEDLRLSLDLARIRTDLPLEVDFKALRRRTPDLEGLRAFLEELEFGSLLHEFGLLGGEKPREEAPWPPPEGAFVGFLLSRKEPMWAELLALAAAAEGRVHRATSPVEALADLKEARGFLAKDLAVLALREGVALDPTDDPLLVAYLLDPANTNPEGVARRYGGEFTEDAAERALLSERLFQTLFPRLSEKLLWLYQEVERPLSRVLAHMEARGVRLDVPLLEALSFELEKELERLEGEVFRLAGHPFNLNSRDQLEKVLFDELGLTPVTRTEKTGKRSTSAAALEALRGAHPIVELILQYRELSKLKSTYLDRLPRLVHPRTGRLHTRFNQTATATGRLSSSDPNLQNIPVRTPLGQRIRKAFVAEEGWLLLAADYSQIELRVLAHLSGDENLKRVFREGKDIHTETAAWMFGLDPALVDPKMRRAAKTVNFGVLYGMSAHRLSQELGIDYKEAEAFIERYFQSFPKVRAWIERTLEEGRTRGYVETLFGRRRYVPDLASRVRSVREAAERMAWNMPVQGTSADLMKIAMVKLFPRLKPLGAHLLLQVHDELVLEVPEDRAEEAKALVKEVMENAYPLDVPLEVEVGVGRDWLEAKQD

SEQ ID NO: 493 - DNA, 2538 bp, synthetic construct
  misc_feature 1..2538: note = DNA Polymerase Variant
  source 1..2538: mol_type = other DNA
atgcaccatcatcatcatcatggcggtagcggcatgttaccgctgtttgatttggaagaaccaccaaaacgcgtgctgcttgttgacggccatcatctggcgtatcgtaccttctacgcactgagccttacgacctcacgtggtgagcctgtccagatggtgtatgggtttgctcgctccctgctgaaagccctgaaggaagatggtcaagccgtagtagtggttttcgatgcgaaagcaccgtcgtttcgtcacgaagcgtacgaggcctataaagctggccgcgcaccgaccccggaagactttccgcgtcagttagcgctcgtcaaacgcctcgtggatttgctgggattagttcgcttggaagctcctggctacgaggcggacgacgtgctcggtacactggccaagaaagcagaacgtgaaggcatggaggtctgcattcttaccggtgatcgcgatttcttccagctgctgtctgagaaagtgagcgttttgctgcccgatggcacgttagtaaccccgaaagatgtgcaagagaaatatggagttccgccagaacgttgggtggactttcgcgcactgactggtgatcgttcagacaacatcccgggcgttgccgggattggtgaaaagacggcgctgcgcctgctggcagaatggggctcggtggaaaatctgctcaagaaccttgatcgtgtgaaacctgatagcttacgccgcaagatcgaagcccacctggaagacttgcgtctgagtctggatcttgtccgtattcgcaccgatctgccgttggaagtagactttaaagctctgcgtcgtcgcacacccgatttagaggggttacgcgcgttcctcgaagaactggagtttggctccctgctgcatgaattcggtttgttgggcggagagaaaccgcgtgaagaagcaccatggccgccgcccgaaggtgcctttgtcggctttcttctgtcacgcaaagagccaatgtgggcggaactgttagctcttgcagccgccgcggaagggcgtgttcaccgcgcgacctctcctgtcgaggccctcgctgacctcaaagaagcacgtggtttcttggcgaaagatttagccgtgcttgcattacgcgaaggtgttgcgctcgatccgacggacgacccgcttttggtggcttatttgctcgatcctgcgaataccaacccggaaggcgtagcccgtcgttacggcggcgagtttactgaagatgcggcagaacgcgcgttgcttagcgaacgcctcttccagacgttatttccacgtctttcggagaaattactctggctctatcaggaagtcgaacgtccattgagtcgcgtgcttgcccatatggaggctcgcggtgtgcgcttagatgttccgttgttagaagcactcagcttcgagttggagaaagaactggaacgtcttgaaggcgaagtctttcgtttagcggggcatcccttcaatctcaactctcgcgaccaattggagaaagtgctctttgatgaattaggtttaacccctgtcacgcgtacagagaagaccggcaaacgttccacttcggcagccgccttggaagcacttcgtggtgctcacccgatcgtcgagttgattttgcagtaccgcgagctcagcaaactcaaatcaacctatcttgataggttacctcgtcttgttcatccacgtacgggtcgtttacacacccgcttcaatcaaacggcgacagccaccgggcgcttgtcgtcgagtgacccgaacctccagaatattccagtgcgcacgccgctgggccaacgcattcgtaaagcgtttgttgcggaagaaggttggttattacttgcggccgattactcccagatcgaacttcgtgtattggcgcatctctctggcgacgagaatcttaaacgcgtgtttcgcgaaggcaaggatattcacactgaaaccgcagcctggatgttcgggcttgacccagccttagtggaccccaagatgcgtcgtgccgccaagaccgtcaactttggcgtactctatggtatgtcagcacatcgtcttagtcaggaattgggcattgactacaaagaagctgaagcgtttatcgagcgctatttccaatcctttccgaaagttcgcgcgtggattgaacgtaccctcgaagaaggtcgcactcgcggctatgtggaaacgttattcgggcgtcgtcgctacgttccagatcttgcatctcgtgtccgctcagtgcgcgaagctgctgagcgtatggcctggaatatgcctgttcagggaacagcggcggacctcatgaagatcgccatggtgaaattgtttccgcgcttgaaacccttaggagcccaccttcttttacaggtgcatgatgaattggtcttggaagtacccgaggatcgcgcagaagaagccaaagcactcgtgaaagaggttatggaaaacgcgtatccgttagatgttccgttggaggtcgaagtgggtgtaggccgtgattggcttgaagcgaaacaagactaatga

SEQ ID NO: 494 - protein, 844 aa, synthetic construct; identical to SEQ ID NO: 340
  REGION 1..844: note = DNA Polymerase Variant

SEQ ID NO: 495 - DNA, 2538 bp, synthetic construct
  misc_feature 1..2538: note = DNA Polymerase Variant
  source 1..2538: mol_type = other DNA
atgcaccatcatcatcatcatggcggtagcggcatgttaccgctgtttgatttggaagaaccaccaaaacgcgtgctgcttgttgacggccatcatctggcgtatcgtaccttctacgcactgagccttacgacctcacgtggtgagcctgtccagatggtgtatgggtttgctcgctccctgctgaaagccctgaaggaagatggtcaagccgtagtagtggttttcgatgcgaaagcaccgtcgtttcgtcacgaagcgtacgaggcctataaagctggccgcgcaccgaccccggaagactttccgcgtcagttagcgctcgtcaaacgcctcgtggatttgctgggattagttcgcttggaagctcctggctacgaggcggacgacgtgctcggtacactggccaagaaagcagaacgtgaaggcatggaggtctgcattcttaccggtgatcgcgatttcttccagctgctgtctgagaaagtgagcgttttgctgcccgatggcacgttagtaaccccgaaagatgtgcaagagaaatatggagttccgccagaacgttgggtggactttcgcgcactgactggtgatcgttcagacaacatcccgggcgttgccgggattggtgaaaagacggcgctgcgcctgctggcagaatggggctcggtggaaaatctgctcaagaaccttgatcgtgtgaaacctgatagcttacgccgcaagatcgaagcccacctggaagacttgcgtctgagtctggatcttgtccgtattcgcaccgatctgccgttggaagtagactttaaagctctgcgtcgtcgcacacccgatttagaggggttacgcgcgttcctcgaagaactggagtttggctccctgctgcatgaattcggtttgttgggcggagagaaaccgcgtgaagaagcaccatggccgccgcccgaaggtgcctttgtcggctttcttctgtcacgcaaagagccaatgtgggcggaactgttagctcttgcagccgccgcggaagggcgtgttcaccgcgcgacctctcctgtcgaggccctcgctgacctcaaagaagcacgtggtttcttggcgaaagatttagccgtgcttgcattacgcgaaggtgttgcgctcgatccgacggacgacccgcttttggtggcttatttgctcgatcctgcgaataccaacccggaaggcgtagcccgtcgttacggcggcgagtttactgaagatgcggcagaacgcgcgttgcttagcgaacgcctcttccagacgttatttccacgtctttcggagaaattactctggctctatcaggaagtcgaacgtccattgagtcgcgtgcttgcccatatggaggctcgcggtgtgcgcttagatgttccgttgttagaagcactcagcttcgagttggagaaagaactggaacgtcttgaaggcgaagtctttcgtttagcggggcatcccttcaatctcaactctcgcgaccaattggagaaagtgctctttgatgaattaggtttaacccctgtcacgcgtacagagaagaccggcaaacgttccacttcggcagccgccttggaagcacttcgtggtgctcacccgatcgtcgagttgattttgcagtaccgcgagctcagcaaactcaaatcaacctatcttgataggttacctcgtcttgttcatccacgtacgggtcgtttacacacccgcttcaatcaaacggcgacagccaccgggcgcttgtcgtcgagtgacccgaacctccagaatattccagtgcgcacgccgctgggccaacgcattcgtaaagcgtttgttgcggaagaaggttggttattacttgcggccgattactcccagatcgaacttcgtgtattggcgcatctctctggcgacgagaatcttaaacgcgtgtttcgcgaaggcaaggatattcacactgaaaccgcagcctggatgttcgggctggacccagccttagtggaccccaagatgcgtcgtgccgccaagaccgtcaactttggcgtactctatggtatgtcagcacatcgtcttagtcaggaattgggcattgactacaaagaagctgaagcgtttatcgagcgctatttccaatcctttccgaaagttcgcgcgtggattgaacgtaccctcgaagaaggtcgcactcgcggctatgtggaaacgttattcgggcgtcgtcgctacgttccagatcttgcatctcgtgtccgctcagtgcgcgaagctgctgagcgtatggcctggaatatgcctgttcagggaacagcggcggacctcatgaagatcgccatggtgaaattgtttccgcgcttgaaacccttaggagcccaccttcttttacaggtgcatgatgaattggtcttggaagtacccgaggatcgcgcagaagaagccaaagcactcgtgaaagaggttatggaaaacgcgtatccgttagatgttccgttggaggtcgaagtgggtgtaggccgtgattggcttgaagcgaaacaagactaatga

SEQ ID NO: 496 - protein, 844 aa, synthetic construct; identical to SEQ ID NO: 340
  REGION 1..844: note = DNA Polymerase Variant

SEQ ID NO: 497 - DNA, 2538 bp, synthetic construct
  misc_feature 1..2538: note = DNA Polymerase Variant
  source 1..2538: mol_type = other DNA
atgcaccatcatcatcatcatggcggtagcggcatgttaccgctgtttgatttggaagaaccaccaaaacgcgtgctgcttgttgacggccatcatctggcgtatcgtaccttctacgcactgagccttacgacctcacgtggtgagcctgtccagatggtgtatgggtttgctcgctccctgctgaaagccctgaaggaagatggtcaagccgtagtagtggttttcgatgcgaaagcaccgtcgtttcgtcacgaagcgtacgaggcctataaagctggccgcgcaccgaccccggaagactttccgcgtcagttagcgctcgtcaaacgcctcgtggatttgctgggattagttcgcttggaagctcctggctacgaggcggacgacgtgctcggtacactggccaagaaagcagaacgtgaaggcatggaggtctgcattcttaccggtgatcgcgatttcttccagctgctgtctgagaaagtgagcgttttgctgcccgatggcacgttagtaaccccgaaagatgtccaagagaaatatggagttccgccagaacgttgggtggactttcgcgcactgactggtgatcgttcagacaacatcccgggcgttgccgggattggtgaaaagacggcgctgcgcctgctggcagaatggggctcggtggaaaatctgctcaagaaccttgatcgtgtgaaacctgatagcttacgccgcaagatcgaagcccacctggaagacttgcgtctgagtctggatcttgcgcgtattcgcaccgatctgccgttggaagtagactttaaagctctgcgtcgtcgcacacccgatttagaggggttacgcgcgttcctcgaagaactggagtttggctccctgctgcatgaattcggtttgttgggcggagagaaaccgcgtgaagaagcaccatggccgccgcccgaaggtgcctttgtcggctttcttctgtcacgcaaagagccaatgtgggcggaactgttagctcttgcagccgccgcggaagggcgtgttcaccgcgcgacctctcctgtcgaggccctcgctgacctcaaagaagcacgtggtttcttggcgaaagatttagccgtgcttgcattacgcgaaggcgttgcgctcgatccgacggacgacccgcttttggtggcttatttgctcgatcctcctaataccaacccggaaggcgtagcccgtcgttacggcggcgagtttactgaagatgcggcagaacgcgcgttgcttagcgaacgcctcttccagacgttatttccacgtctttcggagaaattactctggctctatcaggaagtcgaacgtccattgagtcgcgtgcttgcccatatggaggctcgcggtgtgcgcttagatgttccgttgttagaagcactcagcttcgagttggagaaagaactggaacgtcttgaaggcgaagtctttcgtttagcggggcatcccttcaatctcaactctcgcgaccaattggagaaagtgctctttgatgaattaggtttaacccctgtcacgcgtacagagaagaccggcaaacgttccacttcggcagccgccttggaagcacttcgtggtgctcacccgatcgtcgagttgattttgcagtaccgcgagctcagcaaactcaaatcaacctatcttgataggttacctcgtcttgttcatccacgtacgggtcgtttacacacccgcttcaatcaaacggcgacagccaccgggcgcttgtcgtcgagtgacccgaacctccagaatattccagtgcgcacgccgctgggccaacgcattcgtaaagcgtttgttgcggaagaaggttggttattacttgcggccgattactcccagatcgaacttcgtgtattggcgcatctctctggcgacgagaatcttaaacgcgtgtttcgcgaaggcaaggatattcacactgaaaccgcagcctggatgttcgggcttgacccagccttagtggaccccaagatgcgtcgtgccgccaagaccgtcaactttggcgtactctatggtatgtcagcacatcgtcttagtcaggaattgggcattgactacaaagaagctgaagcgtttatcgagcgctatttccaatcctttccgaaagttcgcgcgtggattgaacgtaccctcgaagaaggtcgcactcgcggctatgtggaaacgttattcgggcgtcgtcgctacgttccagatcttgcatctcgtgtccgctcagtgcgcgaagctgctgagcgtatggcctggaatatgcctgttcagggaacagcggcggacctcatgaagatcgccatggtgaaattgtttccgcgcttgaaacccttaggagcccaccttcttttacaggtgcatgatgaattggtcttggaagtacccgaggatcgcgcagaagaagccaaagcactcgtgaaagaggttatggaaaacgcgtatccgttagatgttccgttggaggtcgaagtgggtgtaggccgtgattggcttgaagcgaaacaagactaatga

SEQ ID NO: 498 - protein, 844 aa, synthetic construct
  REGION 1..844: note = DNA Polymerase Variant
MHHHHHHGGSGMLPLFDLEEPPKRVLLVDGHHLAYRTFYALSLTTSRGEPVQMVYGFARSLLKALKEDGQAVVVVFDAKAPSFRHEAYEAYKAGRAPTPEDFPRQLALVKRLVDLLGLVRLEAPGYEADDVLGTLAKKAEREGMEVCILTGDRDFFQLLSEKVSVLLPDGTLVTPKDVQEKYGVPPERWVDFRALTGDRSDNIPGVAGIGEKTALRLLAEWGSVENLLKNLDRVKPDSLRRKIEAHLEDLRLSLDLARIRTDLPLEVDFKALRRRTPDLEGLRAFLEELEFGSLLHEFGLLGGEKPREEAPWPPPEGAFVGFLLSRKEPMWAELLALAAAAEGRVHRATSPVEALADLKEARGFLAKDLAVLALREGVALDPTDDPLLVAYLLDPPNTNPEGVARRYGGEFTEDAAERALLSERLFQTLFPRLSEKLLWLYQEVERPLSRVLAHMEARGVRLDVPLLEALSFELEKELERLEGEVFRLAGHPFNLNSRDQLEKVLFDELGLTPVTRTEKTGKRSTSAAALEALRGAHPIVELILQYRELSKLKSTYLDRLPRLVHPRTGRLHTRFNQTATATGRLSSSDPNLQNIPVRTPLGQRIRKAFVAEEGWLLLAADYSQIELRVLAHLSGDENLKRVFREGKDIHTETAAWMFGLDPALVDPKMRRAAKTVNFGVLYGMSAHRLSQELGIDYKEAEAFIERYFQSFPKVRAWIERTLEEGRTRGYVETLFGRRRYVPDLASRVRSVREAAERMAWNMPVQGTAADLMKIAMVKLFPRLKPLGAHLLLQVHDELVLEVPEDRAEEAKALVKEVMENAYPLDVPLEVEVGVGRDWLEAKQD

SEQ ID NO: 499 - DNA, 2538 bp, synthetic construct
  misc_feature 1..2538: note = DNA Polymerase Variant
  source 1..2538: mol_type = other DNA
atgcaccatcatcatcatcatggcggtagcggcatgttaccgctgtttgatttggaagaaccaccaaaacgcgtgctgcttgttgacggccatcatctggcgtatcgtaccttctacgcactgagccttacgacctcacgtggtgagcctgtccagatggtgtatgggtttgctcgctccctgctgaaagccctgaaggaagatggtcaagccgtagtagtggttttcgatgcgaaagcaccgtcgtttcgtcacgaagcgtacgaggcctataaagctggccgcgcaccgaccccggaagactttccgcgtcagttagcgctcgtcaaacgcctcgtggatttgctgggattagttcgcttggaagctcctggctacgaggcggacgacgtgctcggtacactggccaagaaagcagaacgtgaaggcatggaggtctgcattcttaccggtgatcgcgatttcttccagctgctgtctgagaaagtgagcgttttgctgcccgatggcacgttagtaaccccgaaagatgtccaagagaaatatggagttccgccagaacgttgggtggactttcgcgcactgactggtgatcgttcagacaacatcccgggcgttgccgggattggtgaaaagacggcgctgcgcctgctggcagaatggggctcggtggaaaatctgctcaagaaccttgatcgtgtgaaacctgatagcttacgccgcaagatcgaagcccacctggaagacttgcgtctgagtctggatcttgcgcgtattcgcaccgatctgccgttggaagtagactttaaagctctgcgtcgtcgcacacccgatttagaggggttacgcgcgttcctcgaagaactggagtttggctccctgctgcatgaattcggtttgttgggcggagagaaaccgcgtgaagaagcaccatggccgccgcccgaaggtgcctttgtcggctttcttctgtcacgcaaagagccaatgtgggcggaactgttagctcttgcagccgccgcggaagggcgtgttcaccgcgcgacctctcctgtcgaggccctcgctgacctcaaagaagcacgtggtttcttggcgaaagatttagccgtgcttgcattacgcgaaggcgttgcgctcgatccgacggacgacccgcttttggtggcttatttgctcgatcctgcgaataccaacccggaaggcgtagcccgtcgttacggcggcgagtttactgaagatgcggcagaacgcgcgttgcttagcgaacgcctcttccagacgttatttccacgtctttcggagaaattactctggctctatcaggaagtcgaacgtccattgagtcgcgtgcttgcccatatggaggctcgcggtgtgcgcttagatgttccgttgttagaagcactcagcttcgagttggagaaagaactggaacgtcttgaaggcgaagtctttcgtttagcggggcatcccttcaatctcaactctcgcgaccaattggagaaagtgctctttgatgaattaggtttaacccctgtcacgcgtacagagaagaccggcaaacgttccacttcggcagccgccttggaagcacttcgtggtgctcacccgatcgtcgagttgattttgcagtaccgcgagctcagcaaactcaaatcaacctatcttgataggttacctcgtcttgttcatccacgtacgggtcgtttacacacccgcttcaatcaaacggcgacagccaccgggcgcttgtcgtcgagtgacccgaacctccagaatattccagtgcgcacgccgctgggccaacgcattcgtaaagcgtttgttgcggaagaaggttggttattacttgcggccgattactcccagatcgaacttcgtgtattggcgcatctctctggcgacgagaatcttaaacgcgtgtttcgcgaaggcaaggatattcacactgaaaccgcagcctggatgttcgggcttgacccagccttagtggaccccaagatgcgtcgtgccgccaagaccgtcaactttggcgtactctatggtatgtcagcacatcgtcttagtcaggaattgggcattgactacaaagaagctgaagcgtttatcgagcgctatttccaatcctttccgaaagttcgcgcgtggattgaacgtaccctcgaagaaggtcgcactcgcggctatgtggaaacgttattcgggcgtcgtcgctacgttccagatcttgcatctcgtgtccgctcagtgcgcgaagctgctgagcgtatggcctggaatatgcctgttcagggaacagcggcggagctcatgaagatcgccatggtgaaattgtttccgcgcttgaaacccttaggagcccaccttcttttacaggtgcatgatgaattggtcttggaagtacccgaggatcgcgcagaagaagccaaagcactcgtgaaagaggttatggaaaacgcgtatccgttagatgttccgttggaggtcgaagtgggtgtaggccgtgattggcttgaagcgaaacaagactaatga

SEQ ID NO: 500 - protein, 844 aa, synthetic construct
  REGION 1..844: note = DNA Polymerase Variant
MHHHHHHGGSGMLPLFDLEEPPKRVLLVDGHHLAYRTFYALSLTTSRGEPVQMVYGFARSLLKALKEDGQAVVVVFDAKAPSFRHEAYEAYKAGRAPTPEDFPRQLALVKRLVDLLGLVRLEAPGYEADDVLGTLAKKAEREGMEVCILTGDRDFFQLLSEKVSVLLPDGTLVTPKDVQEKYGVPPERWVDFRALTGDRSDNIPGVAGIGEKTALRLLAEWGSVENLLKNLDRVKPDSLRRKIEAHLEDLRLSLDLARIRTDLPLEVDFKALRRRTPDLEGLRAFLEELEFGSLLHEFGLLGGEKPREEAPWPPPEGAFVGFLLSRKEPMWAELLALAAAAEGRVHRATSPVEALADLKEARGFLAKDLAVLALREGVALDPTDDPLLVAYLLDPANTNPEGVARRYGGEFTEDAAERALLSERLFQTLFPRLSEKLLWLYQEVERPLSRVLAHMEARGVRLDVPLLEALSFELEKELERLEGEVFRLAGHPFNLNSRDQLEKVLFDELGLTPVTRTEKTGKRSTSAAALEALRGAHPIVELILQYRELSKLKSTYLDRLPRLVHPRTGRLHTRFNQTATATGRLSSSDPNLQNIPVRTPLGQRIRKAFVAEEGWLLLAADYSQIELRVLAHLSGDENLKRVFREGKDIHTETAAWMFGLDPALVDPKMRRAAKTVNFGVLYGMSAHRLSQELGIDYKEAEAFIERYFQSFPKVRAWIERTLEEGRTRGYVETLFGRRRYVPDLASRVRSVREAAERMAWNMPVQGTAAELMKIAMVKLFPRLKPLGAHLLLQVHDELVLEVPEDRAEEAKALVKEVMENAYPLDVPLEVEVGVGRDWLEAKQD

SEQ ID NO: 501 - DNA, 2538 bp, synthetic construct
  misc_feature 1..2538: note = DNA Polymerase Variant
  source 1..2538: mol_type = other DNA
atgcaccatcatcatcatcatggcggtagcggcatgttaccgctgtttgatttggaagaaccaccaaaacgcgtgctgcttgttgacggccatcatctggcgtatcgtaccttctacgcactgagccttacgacctcacgtggtgagcctgtccagatggtgtatgggtttgctcgctccctgctgaaagccctgaaggaagatggtcaagccgtagtagtggttttcgatgcgaaagcaccgtcgtttcgtcacgaagcgtacgaggcctataaagctggccgcgcaccgaccccggaagactttccgcgtcagttagcgctcgtcaaacgcctcgtggatttgctgggattagttcgcttggaagctcctggctacgaggcggacgacgtgctcggtacactggccaagaaagcagaacgtgaaggcatggaggtctgcattcttaccggtgatcgcgatttcttccagctgctgtctgagaaagtgagcgttttgctgcccgatggcacgttagtaaccccgaaagatgtccaagagaaatatggagttccgccagaacgttgggtggactttcgcgcactgactggtgatcgttcagacaacatcccgggcgttgccgggattggtgaaaagacggcgctgcgcctgctggcagaatggggctcggtggaaaatctgctcaagaaccttgatcgtgtgaaacctgatagcttacgccgcaagatcgaagcccacctggaagacttgcgtctgagtctggatcttgtccgtattcgcaccgatctgccgttggaagtagactttaaagctctgcgtcgtcgcacacccgatttagaggggttacgcgcgttcctcgaagaactggagtttggctccctgctgcatgaattcggtttgttgggcggagagaaaccgcgtgaagaagcaccatggccgccgcccgaaggtgcctttgtcggctttcttctgtcacgcaaagagccaatgtgggcggaactgttagctcttgcagccgccgcggaagggcgtgttcaccgcgcgacctctcctgtcgaggccctcgctgacctcaaagaagcacgtggtttcttggcgaaagatttagccgtgcttgcattacgcgaatgtgttgcgctcgatccgacggacgacccgcttttggtggcttatttgctcgatcctgcgaataccaacccggaaggcgtagcccgtcgttacggcggcgagtttactgaagatgcggcagaacgcgcgttgcttagcgaacgcctcttccagacgttatttccacgtctttcggagaaattactctggctctatcaggaagtcgaacgtccattgagtcgcgtgcttgcccatatggaggctcgcggtgtgcgcttagatgttccgttgttagaagcactcagcttcgagttggagaaagaactggaacgtcttgaagacgaagtctttcgtttagcggggcatcccttcaatctcaactctcgcgaccaattggagaaagtgctctttgatgaattaggtttaacccctgtcacgcgtacagagaagaccggcaaacgttccacttcggcagccgccttggaagcacttcgtggtgctcacccgatcgtcaacttgattttgcagtaccgcgagctcagcaaactcaaatcaacctatcttgataggttacctcgtcttgttcatccacgtacgggtcgtttacacacccgcttcaatcaaacggcgacagccaccgggcgcttgtcgtcgagtgacccgaacctccagaatattccagtgcgcacgccgctgggccaacgcattcgtaaagcgtttgttgcggaagaaggttggttattacttgcggccgattactcccagatcgaacttcgtgtattggcgcatctctctggcgacgagaatcttaaacgcgtgtttcgcgaaggcaaggatattcacactgaaaccgcagcctggatgttcgggctggacccagccttagtggaccccaagatgcgtcgtgccgccaagaccgtcaactttggcgtactctatggtatgtcagcacatcgtcttagtcaggaattgggcattgactacaaagaagctgaagcgtttatcgagcgctatttccaatcctttccgaaagttcgcgcgtggattgaacgtaccctcgaagaaggtcgcactcgcggctatgtggaaacgttattcgggcgtcgtcgctacgttccagatcttgcatctcgtgtccgctcagtgcgcgaagctgctgagcgtatggcctggaatatgcctgttcagggaacagcggcggacctcatgaagatcgccatggtgaaattgtttccgcgcttgaaacccttaggagcccaccttcttttacaggtgcatgatgaattggtcttggaagtacccgaggatcgcgcagaagaagccaaagcactcgtgaaagaggttatggaaaacgcgtatccgttagatgttccgttggaggtcgaagtgggtgtaggccgtgattggcttgaagcgaaacaagactaatga

SEQ ID NO: 502 - protein, 844 aa, synthetic construct
  REGION 1..844: note = DNA Polymerase Variant
MHHHHHHGGSGMLPLFDLEEPPKRVLLVDGHHLAYRTFYALSLTTSRGEPVQMVYGFARSLLKALKEDGQAVVVVFDAKAPSFRHEAYEAYKAGRAPTPEDFPRQLALVKRLVDLLGLVRLEAPGYEADDVLGTLAKKAEREGMEVCILTGDRDFFQLLSEKVSVLLPDGTLVTPKDVQEKYGVPPERWVDFRALTGDRSDNIPGVAGIGEKTALRLLAEWGSVENLLKNLDRVKPDSLRRKIEAHLEDLRLSLDLVRIRTDLPLEVDFKALRRRTPDLEGLRAFLEELEFGSLLHEFGLLGGEKPREEAPWPPPEGAFVGFLLSRKEPMWAELLALAAAAEGRVHRATSPVEALADLKEARGFLAKDLAVLALRECVALDPTDDPLLVAYLLDPANTNPEGVARRYGGEFTEDAAERALLSERLFQTLFPRLSEKLLWLYQEVERPLSRVLAHMEARGVRLDVPLLEALSFELEKELERLEDEVFRLAGHPFNLNSRDQLEKVLFDELGLTPVTRTEKTGKRSTSAAALEALRGAHPIVNLILQYRELSKLKSTYLDRLPRLVHPRTGRLHTRFNQTATATGRLSSSDPNLQNIPVRTPLGQRIRKAFVAEEGWLLLAADYSQIELRVLAHLSGDENLKRVFREGKDIHTETAAWMFGLDPALVDPKMRRAAKTVNFGVLYGMSAHRLSQELGIDYKEAEAFIERYFQSFPKVRAWIERTLEEGRTRGYVETLFGRRRYVPDLASRVRSVREAAERMAWNMPVQGTAADLMKIAMVKLFPRLKPLGAHLLLQVHDELVLEVPEDRAEEAKALVKEVMENAYPLDVPLEVEVGVGRDWLEAKQD

SEQ ID NO: 503 - DNA, 2538 bp, synthetic construct
  misc_feature 1..2538: note = DNA Polymerase Variant
  source 1..2538: mol_type = other DNA
atgcaccatcatcatcatcatggcggtagcggcatgttaccgctgtttgatttggaagaaccaccaaaacgcgtgctgcttgttgacggccatcatctggcgtatcgtaccttctacgcactgagccttacgacctcacgtggtgagcctgtccagatggtgtatgggtttgctcgctccctgctgaaagccctgaaggaagatggtcaagccgtagtagtggttttcgatgcgaaagcaccgtcgtttcgtcacgaagcgtacgaggcctataaagctggccgcgcaccgaccccggaagactttccgcgtcagttagcgctcgtcaaacgcctcgtggatttgctgggattagttcgcttggaagctcctggctacgaggcggacgacgtgctcggtacactggccaagaaagcagaacgtgaaggcatggaggtctgcattcttaccggtgatcgcgatttcttccagctgctgtctgagaaagtgagcgttttgctgcccgatggcacgttagtaaccccgaaagatgtccaagagaaatatggagttccgccagaacgttgggtggactttcgcgcactgactggtgatcgttcagacaacatcccgggcgttgccgggattggtgaaaagacggcgctgcgcctgctggcagaatggggctcggtggaaaatctgctcaagaaccttgatcgtgtgaaacctgatagcttacgccgcaagatcgaagcccacctggaagacttgcgtctgagtctggatcttgcgcgtattcgcaccgatctgccgttggaagtagactttaaagctctgcgtcgtcgcacacccgatttagaggggttacgcgcgttcctcgaagaactggagtttggctccctgctgcatgaattcggtttgttgggcggagagaaaccgcgtgaagaagcaccatggccgccgcccgaaggtgcctttgtcggctttcttctgtcacgcaaagagccaatgtgggcggaactgttagctcttgcagccgccgcggaagggcgtgttcaccgcgcgacctctcctgtcgaggccctcgctgacctcaaagaagcacgtggtttcttggcgaaagatttagccgtgcttgcattacgcgaaggcgttgcgctcgatccgacggacgacccgcttttggtggcttatttgctcgatcctgcgaataccaacccggaaggcgtagcccgtcgttacggcggcgagtttactgaagatgcggcagaacgcgcgttgcttagcgaacgcctcttccagacgttatttccacgtctttcggagaaattactctggctctatcaggaagtcgaacgtccattgagtcgcgtgcttgcccatatggaggctcgcggtgtgcgcttagatgttccgttgttagaagcactcagcttcgagttggagaaagaactggaacgtcttgaaggcgaagtctttcgtttagcggggcatcccttcaatctcaactctcgcgaccaattggagaaagtgctctttgatgaattaggtttaacccctgtcacgcgtacagagaagaccggcaaacgttccacttcggcagccgccttggaagcacttcgtggtgctcacccgatcgtcgagaggattttgcagtaccgcgagctcagcaaactcaaatcaacctatcttgataggttacctcgtcttgttcatccacgtacgggtcgtttacacacccgcttcaatcaaacggcgacagccaccgggcgcttgtcgtcgagtgacccgaacctccagaatattccagtgcgcacgccgctgggccaacgcattcgtaaagcgtttgttgcggaagaaggttggttattacttgcggccgattactcccagatcgaacttcgtgtattggcgcatctctctggcgacgagaatcttaaacgcgtgtttcgcgaaggcaaggatattcacactgaaaccgcagcctggatgttcgggcttgacccagccttagtggaccccaagatgcgtcgtgccgccaagaccgtcaactttggcgtactctatggtatgtcagcacatcgtcttagtcaggaattgggcattgactacaaagaagctgaagcgtttatcgagcgctatttccaatcctttccgaaagttcgcgcgtggattgaacgtaccctcgaagaaggtcgcactcgcggctatgtggaaacgttattcgggcgtcgtcgctacgttccagatcttgcatctcgtgtccgctcagtgcgcgaagctgctgagcgtatggcctggaatatgcctgttcagggaacagcggcggacctcatgaagatcgccatggtgaaattgtttccgcgcttgaaacccttaggagcccaccttcttttacaggtgcatgatgaattggtcttggaagtacccgaggatcgcgcagaagaagccaaagcactcgtgaaagaggttatggaaaacgcgtatccgttagatgttccgttggaggtcgaagtgggtgtaggccgtgattggcttgaagcgaaacaagactaatga

SEQ ID NO: 504 - protein, 844 aa, synthetic construct
  REGION 1..844: note = DNA Polymerase Variant
MHHHHHHGGSGMLPLFDLEEPPKRVLLVDGHHLAYRTFYALSLTTSRGEPVQMVYGFARSLLKALKEDGQAVVVVFDAKAPSFRHEAYEAYKAGRAPTPEDFPRQLALVKRLVDLLGLVRLEAPGYEADDVLGTLAKKAEREGMEVCILTGDRDFFQLLSEKVSVLLPDGTLVTPKDVQEKYGVPPERWVDFRALTGDRSDNIPGVAGIGEKTALRLLAEWGSVENLLKNLDRVKPDSLRRKIEAHLEDLRLSLDLARIRTDLPLEVDFKALRRRTPDLEGLRAFLEELEFGSLLHEFGLLGGEKPREEAPWPPPEGAFVGFLLSRKEPMWAELLALAAAAEGRVHRATSPVEALADLKEARGFLAKDLAVLALREGVALDPTDDPLLVAYLLDPANTNPEGVARRYGGEFTEDAAERALLSERLFQTLFPRLSEKLLWLYQEVERPLSRVLAHMEARGVRLDVPLLEALSFELEKELERLEGEVFRLAGHPFNLNSRDQLEKVLFDELGLTPVTRTEKTGKRSTSAAALEALRGAHPIVERILQYRELSKLKSTYLDRLPRLVHPRTGRLHTRFNQTATATGRLSSSDPNLQNIPVRTPLGQRIRKAFVAEEGWLLLAADYSQIELRVLAHLSGDENLKRVFREGKDIHTETAAWMFGLDPALVDPKMRRAAKTVNFGVLYGMSAHRLSQELGIDYKEAEAFIERYFQSFPKVRAWIERTLEEGRTRGYVETLFGRRRYVPDLASRVRSVREAAERMAWNMPVQGTAADLMKIAMVKLFPRLKPLGAHLLLQVHDELVLEVPEDRAEEAKALVKEVMENAYPLDVPLEVEVGVGRDWLEAKQD

SEQ ID NO: 505 - DNA, 2538 bp, synthetic construct
  misc_feature 1..2538: note = DNA Polymerase Variant
  source 1..2538: mol_type = other DNA
atgcaccatcatcatcatcatggcggtagcggcatgttaccgctgtttgatttggaagaaccaccaaaacgcgtgctgcttgttgacggccatcatctggcgtatcgtaccttctacgcactgagccttacgacctcacgtggtgagcctgtccagatggtgtatgggtttgctcgctccctgctgaaagccctgaaggaagatggtcaagccgtagtagtggttttcgatgcgaaagcaccgtcgtttcgtcacgaagcgtacgaggcctataaagctggccgcgcaccgaccccggaagactttccgcgtcagttagcgctcgtcaaacgcctcgtggatttgctgggattagttcgcttggaagctcctggctacgaggcggacgacgtgctcggtacactggccaagaaagcagaacgtgaaggcatggaggtctgcattcttaccggtgatcgcgatttcttccagctgctgtctgagaaagtgagcgttttgctgcccgatggcacgttagtaaccccgaaagatgtgcaagagaaatatggagttccgccagaacgttgggtggactttcgcgcactgactggtgatcgttcagacaacatcccgggcgttgccgggattggtgaaaagacggcgctgcgcctgctggcagaatggggctcggtggaaaatctgctcaagaaccttgatcgtgtgaaacctgatagcttacgccgcaagatcgaagcccacctggaagacttgcgtctgagtctggatcttgtccgtattcgcaccgatctgccgttggaagtagactttaaagctctgcgtcgtcgcacacccgatttagaggggttacgcgcgttcctcgaagaactggagtttggctccctgctgcatgaattcggtttgttgggcggagagaaaccgcgtgaagaagcaccatggccgccgcccgaaggtgcctttgtcggctttcttctgtcacgcaaagagccaatgtgggcggaactgttagctcttgcagccgccgcggaagggcgtgttcaccgcgcgacctctcctgtcgaggccctcgctgacctcaaagaagcacgtggtttcttggcgaaagatttagccgtgcttgcattacgcgaaggtgttgcgctcgatccgacggacgacccgcttttggtggcttatttgctcgatcctgcgaataccaacccggaatacatcgcccgtcgttacggcggcgagtttactgaagatgcggcagaacgcgcgttgcttagcgaacgcctcttccagacgttatttccacgtctttcggagaaattactctggctctatcaggaagtcgaacgtccattgagtcgcgtgcttgcccatatggaggctcgcggtgtgcgcttagatgttccgttgttagaagcactcagcttcgagttggagaaagaactggaacgtcttgaaggcgaagtctttcgtttagcggggcatcccttcaatctcaactctcgcgaccaattggagaaagtgctctttgatgaattaggtttaacccctgtcacgcgtacagagaagaccggcaaacgttccacttcggcagccgccttggaagcacttcgtggtgctcacccgatcgtcgagttgattttgcagtaccgcgagctcagcaaactcaaatcaacctatcttgataggttacctcgtcttgttcatccacgtacgggtcgtttacacacccgcttcaatcaaacggcgacagccaccgggcgcttgtcgtcgagtgacccgaacctccagaatattccagtgcgcacgccgctgggccaacgcattcgtaaagcgtttgttgcggaagaaggttggttattacttgcggccgattactcccagatcgaacttcgtgtattggcgcatctctctggcgacgagaatcttaaacgcgtgtttcgcgaaggcaaggatattcacactgaaaccgcagcctggatgttcgggcttgacccagccttagtggaccccaagatgcgtcgtgccgccaagaccgtcaactttggcgtactctatggtatgtcagcacatcgtcttagtcaggaattgggcattgactacaaagaagctgaagcgtttatcgagcgctatttccaatcctttccgaaagttcgcgcgtggattgaacgtaccctcgaagaaggtcgcactcgcggctatgtggaaacgttattcgggcgtcgtcgctacgttccagatcttgcatctcgtgtccgctcagtgcgcgaagctgctgagcgtatggcctggaatatgcctgttcagggaacagcggcggacctcatgaagatcgccatggtgaaattgtttccgcgcttgaaacccttaggagcccaccttcttttacaggtgcatgatgaattggtcttggaagtacccgaggatcgcgcagaagaagccaaagcactcgtgaaagaggttatggaaaacgcgtatccgttagatgttccgttggaggtcgaagtgggtgtaggccgtgattggcttgaagcgaaacaagactaatga

SEQ ID NO: 506 - protein, 844 aa, synthetic construct
  REGION 1..844: note = DNA Polymerase Variant
MHHHHHHGGSGMLPLFDLEEPPKRVLLVDGHHLAYRTFYALSLTTSRGEPVQMVYGFARSLLKALKEDGQAVVVVFDAKAPSFRHEAYEAYKAGRAPTPEDFPRQLALVKRLVDLLGLVRLEAPGYEADDVLGTLAKKAEREGMEVCILTGDRDFFQLLSEKVSVLLPDGTLVTPKDVQEKYGVPPERWVDFRALTGDRSDNIPGVAGIGEKTALRLLAEWGSVENLLKNLDRVKPDSLRRKIEAHLEDLRLSLDLVRIRTDLPLEVDFKALRRRTPDLEGLRAFLEELEFGSLLHEFGLLGGEKPREEAPWPPPEGAFVGFLLSRKEPMWAELLALAAAAEGRVHRATSPVEALADLKEARGFLAKDLAVLALREGVALDPTDDPLLVAYLLDPANTNPEYIARRYGGEFTEDAAERALLSERLFQTLFPRLSEKLLWLYQEVERPLSRVLAHMEARGVRLDVPLLEALSFELEKELERLEGEVFRLAGHPFNLNSRDQLEKVLFDELGLTPVTRTEKTGKRSTSAAALEALRGAHPIVELILQYRELSKLKSTYLDRLPRLVHPRTGRLHTRFNQTATATGRLSSSDPNLQNIPVRTPLGQRIRKAFVAEEGWLLLAADYSQIELRVLAHLSGDENLKRVFREGKDIHTETAAWMFGLDPALVDPKMRRAAKTVNFGVLYGMSAHRLSQELGIDYKEAEAFIERYFQSFPKVRAWIERTLEEGRTRGYVETLFGRRRYVPDLASRVRSVREAAERMAWNMPVQGTAADLMKIAMVKLFPRLKPLGAHLLLQVHDELVLEVPEDRAEEAKALVKEVMENAYPLDVPLEVEVGVGRDWLEAKQD

SEQ ID NO: 507 - DNA, 2538 bp, synthetic construct
  misc_feature 1..2538: note = DNA Polymerase Variant
  source 1..2538: mol_type = other DNA
atgcaccatcatcatcatcatggcggtagcggcatgttaccgctgtttgatttggaagaaccaccaaaacgcgtgctgcttgttgacggccatcatctggcgtatcgtaccttctacgcactgagccttacgacctcacgtggtgagcctgtccagatggtgtatgggtttgctcgctccctgctgaaagccctgaaggaagatggtcaagccgtagtagtggttttcgatgcgaaagcaccgtcgtttcgtcacgaagcgtacgaggcctataaagctggccgcgcaccgaccccggaagactttccgcgtcagttagcgctcgtcaaacgcctcgtggatttgctgggattagttcgcttggaagctcctggctacgaggcggacgacgtgctcggtacactggccaagaaagcagaacgtgaaggcatggaggtctgcattcttaccggtgatcgcgatttcttccagctgctgtctgagaaagtgagcgttttgctgcccgatggcacgttagtaaccccgaaagatgtgcaagagaaatatggagttccgccagaacgttgggtggactttcgcgcactgactggtgatcgttcagacaacatcccgggcgttgccgggattggtgaaaagacggcgctgcgcctgctggcagaatggggctcggtggaaaatctgctcaagaaccttgatcgtgtgaaacctgatagcttacgccgcaagatcgaagcccacctggaagacttgcgtctgagtctggatcttgtccgtattcgcaccgatctgccgttggaagtagactttaaagctctgcgtcgtcgcacacccgatttagaggggttacgcgcgttcctcgaagaactggagtttggctccctgctgcatgaattcggtttgttgggcggagagaaaccgcgtgaagaagcaccatggccgccgcccgaaggtgcctttgtcggctttcttctgtcacgcaaagagccaatgtgggcggaactgttagctcttgcagccgccgcggaagggcgtgttcaccgcgcgacctctcctgtcgaggccctcgctgacctcaaagaagcacgtggtttcttggcgaaagatttagccgtgcttgcattacgcgaaggtgttgcgctcgatccgacggacgacccgcttttggtggcttatttgctcgatcctgcgaataccaacccggaaggtatcgcccgtcgttacggcggcgagtttactgaagatgcggcagaacgcgcgttgcttagcgaacgcctcttccagacgttatttccacgtctttcggagaaattactctggctctatcaggaagtcgaacgtccattgagtcgcgtgcttgcccatatggaggctcgcggtgtgcgcttagatgttccgttgttagaagcactcagcttcgagttggagaaagaactggaacgtcttgaaggcgaagtctttcgtttagcggggcatcccttcaatctcaactctcgcgaccaattggagaaagtgctctttgatgaattaggtttaacccctgtcacgcgtacagagaagaccggcaaacgttccacttcggcagccgccttggaagcacttcgtggtgctcacccgatcgtcaacttgattttgcagtaccgcgagctcagcaaactcaaaagtacctatctggataggttacctcgtcttgttcatccacgtacgggtcgtttacacacccgcttcaatcaaacggcgacagccaccgggcgcttgtcgtcgagtgacccgaacctccagaatattccagtgcgcacgccgctgggccaacgcattcgtaaagcgtttgttgcggaagaaggttggttattacttgcggccgattactcccagatcgaacttcgtgtattggcgcatctctctggcgacgagaatcttaaacgcgtgtttcgcgaaggcaaggatattcacactgaaaccgcagcctggatgttcgggctggacccagccttagtggaccccaagatgcgtcgtgccgccaagaccgtcaactttggcgtactctatggtatgtcagcacatcgtcttagtcaggaattgggcattgactacaaagaagctgaagcgtttatcgagcgctatttccaatcctttccgaaagttcgcgcgtggattgaacgtaccctcgaagaaggtcgcactcgcggctatgtggaaacgttattcgggcgtcgtcgctacgttccagatcttgcatctcgtgtccgctcagtgcgcgaagctgctgagcgtatggcctggaatatgcctgttcagggaacagcggcggacctcatgaagatcgccatggtgaaattgtttccgcgcttgaaacccttaggagcccaccttcttttacaggtgcatgatgaattggtcttggaagtacccgaggatcgcgcagaagaagccaaagcactcgtgaaagaggttatggaaaacgcgtatccgttagatgttccgttggaggtcgaagtgggtgtaggccgtgattggcttgaagcgaaacaagactaatga

SEQ ID NO: 508 - protein, 844 aa, synthetic construct
  REGION 1..844: note = DNA Polymerase Variant
MHHHHHHGGSGMLPLFDLEEPPKRVLLVDGHHLAYRTFYALSLTTSRGEPVQMVYGFARSLLKALKEDGQAVVVVFDAKAPSFRHEAYEAYKAGRAPTPEDFPRQLALVKRLVDLLGLVRLEAPGYEADDVLGTLAKKAEREGMEVCILTGDRDFFQLLSEKVSVLLPDGTLVTPKDVQEKYGVPPERWVDFRALTGDRSDNIPGVAGIGEKTALRLLAEWGSVENLLKNLDRVKPDSLRRKIEAHLEDLRLSLDLVRIRTDLPLEVDFKALRRRTPDLEGLRAFLEELEFGSLLHEFGLLGGEKPREEAPWPPPEGAFVGFLLSRKEPMWAELLALAAAAEGRVHRATSPVEALADLKEARGFLAKDLAVLALREGVALDPTDDPLLVAYLLDPANTNPEGIARRYGGEFTEDAAERALLSERLFQTLFPRLSEKLLWLYQEVERPLSRVLAHMEARGVRLDVPLLEALSFELEKELERLEGEVFRLAGHPFNLNSRDQLEKVLFDELGLTPVTRTEKTGKRSTSAAALEALRGAHPIVNLILQYRELSKLKSTYLDRLPRLVHPRTGRLHTRFNQTATATGRLSSSDPNLQNIPVRTPLGQRIRKAFVAEEGWLLLAADYSQIELRVLAHLSGDENLKRVFREGKDIHTETAAWMFGLDPALVDPKMRRAAKTVNFGVLYGMSAHRLSQELGIDYKEAEAFIERYFQSFPKVRAWIERTLEEGRTRGYVETLFGRRRYVPDLASRVRSVREAAERMAWNMPVQGTAADLMKIAMVKLFPRLKPLGAHLLLQVHDELVLEVPEDRAEEAKALVKEVMENAYPLDVPLEVEVGVGRDWLEAKQD

SEQ ID NO: 509 - DNA, 2538 bp, synthetic construct
  misc_feature 1..2538: note = DNA Polymerase Variant
  source 1..2538: mol_type = other DNA
atgcaccatcatcatcatcatggcggtagcggcatgttaccgctgtttgatttggaagaaccaccaaaacgcgtgctgcttgttgacggccatcatctggcgtatcgtaccttctacgcactgagccttacgacctcacgtggtgagcctgtccagatggtgtatgggtttgctcgctccctgctgaaagccctgaaggaagatggtcaagccgtagtagtggttttcgatgcgaaagcaccgtcgtttcgtcacgaagcgtacgaggcctataaagctggccgcgcaccgaccccggaagactttccgcgtcagttagcgctcgtcaaacgcctcgtggatttgctgggattagttcgcttggaagctcctggctacgaggcggacgacgtgctcggtacactggccaagaaagcagaacgtgaaggcatggaggtctgcattcttaccggtgatcgcgatttcttccagctgctgtctgagaaagtgagcgttttgctgcccgatggcacgttagtaaccccgaaagatgtccaagagaaatatggagttccgccagaacgttgggtggactttcgcgcactgactggtgatcgttcagacaacatcccgggcgttgccgggattggtgaaaagacggcgctgcgcctgctggcagaatggggctcggtggaaaatctgctcaagaaccttgatcgtgtgaaacctgatagcttacgccgcaagatcgaagcccacctggaagacttgcgtctgagtctggatcttgcgcgtattcgcaccgatctgccgttggaagtagactttaaagctctgcgtcgtcgcacacccgatttagaggggttacgcgcgttcctcgaagaactggagtttggctccctgctgcatgaattcggtttgttgggcggagagaaaccgcgtgaagaagcaccatggccgccgcccgaaggtgcctttgtcggctttcttctgtcacgcaaagagccaatgtgggcggaactgttagctcttgcagccgccgcggaagggcgtgttcaccgcgcgacctctcctgtcgaggccctcgctgacctcaaagaagcacgtggtttcttggcgaaagatttagccgtgcttgcattacgcgaaggcgttgcgctcgatccgacggacgacccgcttttggtggcttatttgctcgatcctgcgaataccaacccggaaggcgtagcccgtcgttacggcggcgagtttactgaagatgcggcagaacgcgcgttgcttagcgaacgcctcttccagacgttatttccacgtctttcggagaaattactctggctctatcaggaagtcgaacgtccattgagtcgcgtgcttgcccatatggaggctcgcggtgtgcgcttagatgttccgttgttagaagcactcagcttcgagggggagaaagaactggaacgtcttgaaggcgaagtctttcgtttagcggggcatcccttcaatctcaactctcgcgaccaattggagaaagtgctctttgatgaattaggtttaacccctgtcacgcgtacagagaagaccggcaaacgttccacttcggcagccgccttggaagcacttcgtggtgctcacccgatcgtcgagttgattttgcagtaccgcgagctcagcaaactcaaatcaacctatcttgataggttacctcgtcttgttcatccacgtacgggtcgtttacacacccgcttcaatcaaacggcgacagccaccgggcgcttgtcgtcgagtgacccgaacctccagaatattccagtgcgcacgccgctgggccaacgcattcgtaaagcgtttgttgcggaagaaggttggttattacttgcggccgattactcccagatcgaacttcgtgtattggcgcatctctctggcgacgagaatcttaaacgcgtgtttcgcgaaggcaaggatattcacactgaaaccgcagcctggatgttcgggcttgacccagccttagtggaccccaagatgcgtcgtgccgccaagaccgtcaactttggcgtactctatggtatgtcagcacatcgtcttagtcaggaattgggcattgactacaaagaagctgaagcgtttatcgagcgctatttccaatcctttccgaaagttcgcgcgtggattgaacgtaccctcgaagaaggtcgcactcgcggctatgtggaaacgttattcgggcgtcgtcgctacgttccagatcttgcatctcgtgtccgctcagtgcgcgaagctgctgagcgtatggcctggaatatgcctgttcagggaacagcggcggacctcatgaagatcgccatggtgaaattgtttccgcgcttgaaacccttaggagcccaccttcttttacaggtgcatgatgaattggtcttggaagtacccgaggatcgcgcagaagaagccaaagcactcgtgaaagaggttatggaaaacgcgtatccgttagatgttccgttggaggtcgaagtgggtgtaggccgtgattggcttgaagcgaaacaagactaatga

SEQ ID NO: 510 - protein, 844 aa, synthetic construct
  REGION 1..844: note = DNA Polymerase Variant
MHHHHHHGGSGMLPLFDLEEPPKRVLLVDGHHLAYRTFYALSLTTSRGEPVQMVYGFARSLLKALKEDGQAVVVVFDAKAPSFRHEAYEAYKAGRAPTPEDFPRQLALVKRLVDLLGLVRLEAPGYEADDVLGTLAKKAEREGMEVCILTGDRDFFQLLSEKVSVLLPDGTLVTPKDVQEKYGVPPERWVDFRALTGDRSDNIPGVAGIGEKTALRLLAEWGSVENLLKNLDRVKPDSLRRKIEAHLEDLRLSLDLARIRTDLPLEVDFKALRRRTPDLEGLRAFLEELEFGSLLHEFGLLGGEKPREEAPWPPPEGAFVGFLLSRKEPMWAELLALAAAAEGRVHRATSPVEALADLKEARGFLAKDLAVLALREGVALDPTDDPLLVAYLLDPANTNPEGVARRYGGEFTEDAAERALLSERLFQTLFPRLSEKLLWLYQEVERPLSRVLAHMEARGVRLDVPLLEALSFEGEKELERLEGEVFRLAGHPFNLNSRDQLEKVLFDELGLTPVTRTEKTGKRSTSAAALEALRGAHPIVELILQYRELSKLKSTYLDRLPRLVHPRTGRLHTRFNQTATATGRLSSSDPNLQNIPVRTPLGQRIRKAFVAEEGWLLLAADYSQIELRVLAHLSGDENLKRVFREGKDIHTETAAWMFGLDPALVDPKMRRAAKTVNFGVLYGMSAHRLSQELGIDYKEAEAFIERYFQSFPKVRAWIERTLEEGRTRGYVETLFGRRRYVPDLASRVRSVREAAERMAWNMPVQGTAADLMKIAMVKLFPRLKPLGAHLLLQVHDELVLEVPEDRAEEAKALVKEVMENAYPLDVPLEVEVGVGRDWLEAKQD

SEQ ID NO: 511 - DNA, 2538 bp, synthetic construct
  misc_feature 1..2538: note = DNA Polymerase Variant
  source 1..2538: mol_type = other DNA
atgcaccatcatcatcatcatggcggtagcggcatgttaccgctgtttgatttggaagaaccaccaaaacgcgtgctgcttgttgacggccatcatctggcgtatcgtaccttctacgcactgagccttacgacctcacgtggtgagcctgtccagatggtgtatgggtttgctcgctccctgctgaaagccctgaaggaagatggtcaagccgtagtagtggttttcgatgcgaaagcaccgtcgtttcgtcacgaagcgtacgaggcctataaagctggccgcgcaccgaccccggaagactttccgcgtcagttagcgctcgtcaaacgcctcgtggatttgctgggattagttcgcttggaagctcctggctacgaggcggacgacgtgctcggtacactggccaagaaagcagaacgtgaaggcatggaggtctgcattcttaccggtgatcgcgatttcttccagctgctgtctgagaaagtgagcgttttgctgcccgatggcacgttagtaaccccgaaagatgtccaagagaaatatggagttccgccagaacgttgggtggactttcgcgcactgactggtgatcgttcagacaacatcccgggcgttgccgggattggtgaaaagacggcgctgcgcctgctggcagaatggggctcggtggaaaatctgctcaagaaccttgatcgtgtgaaacctgatagcttacgccgcaagatcgaagcccacctggaagacttgcgtctgagtctggatcttgcgcgtattcgcaccgatctgccgttggaagtagactttaaagctctgcgtcgtcgcacacccgatttagaggggttacgcgcgttcctcgaagaactggagtttggctccctgctgcatgaattcggtttgttgggcggagagaaaccgcgtgaagaagcaccatggccgccgcccgaaggtgcctttgtcggctttcttctgtcacgcaaagagccaatgtgggcggaactgttagctcttgcagccgccgcggaagggcgtgttcaccgcgcgacctctcctgtcgaggccctcgctgacctcaaagaagcacgtggtttcttggcgaaagatttagccgtgcttgcattacgcgaaggcgttgcgctcgatccgacggacgacccgcttttggtggcttatttgctcgatcctgcgaataccaacccggaaggcgtagcccgtcgttacggcggcgagtttactgaagatgcggcagaacgcgcgttgcttagcgaacgcctcttccagacgttatttccacgtctttcggagaaattactctggctctatcaggaagtcgaacgtccattgagtcgcgtgcttgcccatatggaggctcgcggtgtgcgcttagatgttccgttgttagaagcactcagcttcgagttggagaaagaactggaacgtcttgaaggcgaagtctttcgtttagcggggcatcccttcaatctcaactctcgcgaccaattggagaaagtgctctttgatgaattaggtttaacccctgtcacgcgtacagagaagaccggcaaacgttccacttcggcagccgccttggaagcacttcgtggtgctcacccgatcgtcgagttgattttgcagtaccgcgagctcagcaaactcaaatcaacctatcttgataggttacctcgtcttgttcatccacgtacgggtcgtttacacacccgcttcaatcaaacggcgacagccaccgggcgcttgtcgtcgagtgacccgaacctccagaatattccagtgcgcacgccgctgggccaacacattcgtaaagcgtttgttgcggaagaaggttggttattacttgcggccgattactcccagatcgaacttcgtgtattggcgcatctctctggcgacgagaatcttaaacgcgtgtttcgcgaaggcaaggatattcacactgaaaccgcagcctggatgttcgggcttgacccagccttagtggaccccaagatgcgtcgtgccgccaagaccgtcaactttggcgtactctatggtatgtcagcacatcgtcttagtcaggaattgggcattgactacaaagaagctgaagcgtttatcgagcgctatttccaatcctttccgaaagttcgcgcgtggattgaacgtaccctcgaagaaggtcgcactcgcggctatgtggaaacgttattcgggcgtcgtcgctacgttccagatcttgcatctcgtgtccgctcagtgcgcgaagctgctgagcgtatggcctggaatatgcctgttcagggaacagcggcggacctcatgaagatcgccatggtgaaattgtttccgcgcttgaaacccttaggagcccaccttcttttacaggtgcatgatgaattggtcttggaagtacccgaggatcgcgcagaagaagccaaagcactcgtgaaagaggttatggaaaacgcgtatccgttagatgttccgttggaggtcgaagtgggtgtaggccgtgattggcttgaagcgaaacaagactaatga

SEQ ID NO: 512 - protein, 844 aa, synthetic construct
  REGION 1..844: note = DNA Polymerase Variant
MHHHHHHGGSGMLPLFDLEEPPKRVLLVDGHHLAYRTFYALSLTTSRGEPVQMVYGFARSLLKALKEDGQAVVVVFDAKAPSFRHEAYEAYKAGRAPTPEDFPRQLALVKRLVDLLGLVRLEAPGYEADDVLGTLAKKAEREGMEVCILTGDRDFFQLLSEKVSVLLPDGTLVTPKDVQEKYGVPPERWVDFRALTGDRSDNIPGVAGIGEKTALRLLAEWGSVENLLKNLDRVKPDSLRRKIEAHLEDLRLSLDLARIRTDLPLEVDFKALRRRTPDLEGLRAFLEELEFGSLLHEFGLLGGEKPREEAPWPPPEGAFVGFLLSRKEPMWAELLALAAAAEGRVHRATSPVEALADLKEARGFLAKDLAVLALREGVALDPTDDPLLVAYLLDPANTNPEGVARRYGGEFTEDAAERALLSERLFQTLFPRLSEKLLWLYQEVERPLSRVLAHMEARGVRLDVPLLEALSFELEKELERLEGEVFRLAGHPFNLNSRDQLEKVLFDELGLTPVTRTEKTGKRSTSAAALEALRGAHPIVELILQYRELSKLKSTYLDRLPRLVHPRTGRLHTRFNQTATATGRLSSSDPNLQNIPVRTPLGQHIRKAFVAEEGWLLLAADYSQIELRVLAHLSGDENLKRVFREGKDIHTETAAWMFGLDPALVDPKMRRAAKTVNFGVLYGMSAHRLSQELGIDYKEAEAFIERYFQSFPKVRAWIERTLEEGRTRGYVETLFGRRRYVPDLASRVRSVREAAERMAWNMPVQGTAADLMKIAMVKLFPRLKPLGAHLLLQVHDELVLEVPEDRAEEAKALVKEVMENAYPLDVPLEVEVGVGRDWLEAKQD

SEQ ID NO: 513 - DNA, 2538 bp, synthetic construct
  misc_feature 1..2538: note = DNA Polymerase Variant
  source 1..2538: mol_type = other DNA
atgcaccatcatcatcatcatggcggtagcggcatgttaccgctgtttgatttggaagaaccaccaaaacgcgtgctgcttgttgacggccatcatctggcgtatcgtaccttctacgcactgagccttacgacctcacgtggtgagcctgtccagatggtgtatgggtttgctcgctccctgctgaaagccctgaaggaagatggtcaagccgtagtagtggttttcgatgcgaaagcaccgtcgtttcgtcacgaagcgtacgaggcctataaagctggccgcgcaccgaccccggaagactttccgcgtcagttagcgctcgtcaaacgcctcgtggatttgctgggattagttcgcttggaagctcctggctacgaggcggacgacgtgctcggtacactggccaagaaagcagaacgtgaaggcatggaggtctgcattcttaccggtgatcgcgatttcttccagctgctgtctgagaaagtgagcgttttgctgcccgatggcacgttagtaaccccgaaagatgtgcaagagaaatatggagttccgccagaacgttgggtggactttcgcgcactgactggtgatcgttcagacaacatcccgggcgttgccgggattggtgaaaagacggcgctgcgcctgctggcagaatggggctcggtggaaaatctgctcaagaaccttgatcgtgtgaaacctgatagcttacgccgcaagatcgaagcccacctggaagacttgcgtctgagtctggatcttgcgcgtattcgcaccgatctgccgttggaagtagactttaaagctctgcgtcgtcgcacacccgatttagaggggttacgcgcgttcctcgaagaactggagtttggctccctgctgcatgaattcggtttgttgggcggagagaaaccgcgtgaagaagcaccatggccgccgcccgaaggtgcctttgtcggctttcttctgtcacgcaaagagccaatgtgggcggaactgttagctcttgcagccgccgcggaagggcgtgttcaccgcgcgacctctcctgtcgaggccctcgctgacctcaaagaagcacgtggtttcttggcgaaagatttagccgtgcttgcattacgcgaaggcgttgcgctcgatccgacggacgacccgcttttggtggcttatttgctcgatcctgcgaataccaacccggaatacgtcgcccgtcgttacggcggcgagtttactgaagatgcggcagaacgcgcgttgcttagcgaacgcctcttccagacgttatttccacgtctttcggagaaattactctggctctatcaggaagtcgaacgtccattgagtcgcgtgcttgcccatatggaggctcgcggtgtgcgcttagatgttccgttgttagaagcactcagcttcgagttggagaaagaactggaacgtcttgaaggcgaagtctttcgtttagcggggcatcccttcaatctcaactctcgcgaccaattggagaaagtgctctttgatgaattaggtttaacccctgtcacgcgtacagagaagaccggcaaacgttccacttcggcagccgccttggaagcacttcgtggtgctcacccgatcgtcgagttgattttgcagtaccgcgagctcagcaaactcaaatcaacctatcttgataggttacctcgtcttgttcatccacgtacgggtcgtttacacacccgcttcaatcaaacggcgacagccaccgggcgcttgtcgtcgagtgacccgaacctccagaatattccagtgcgcacgccgctgggccaacacattcgtaaagcgtttgttgcggaagaaggttggttattacttgcggccgattactcccagatcgaacttcgtgtattggcgcatctctctggcgacgagaatcttaaacgcgtgtttcgcgaaggcaaggatattcacactgaaaccgcagcctggatgttcgggcttgacccagccttagtggaccccaagatgcgtcgtgccgccaagaccgtcaactttggcgtactctatggtatgtcagcacatcgtcttagtcaggaattgggcattgactacaaagaagctgaagcgtttatcgagcgctatttccaatcctttccgaaagttcgcgcgtggattgaacgtaccctcgaagaaggtcgcactcgcggctatgtggaaacgttattcgggcgtcgtcgctacgttccagatcttgcatctcgtgtccgctcagtgcgcgaagctgctgagcgtatggcctggaatatgcctgttcagggaacagcggcggacctcatgaagatcgccatggtgaaattgtttccgcgcttgaaacccttaggagcccaccttcttttacaggtgcatgatgaattggtcttggaagtacccgaggatcgcgcagaagaagccaaagcactcgtgaaagaggttatggaaaacgcgtatccgttagatgttccgttggaggtcgaagtgggtgtaggccgtgattggcttgaagcgaaacaagactaatga

SEQ ID NO: 514 - protein, 844 aa, synthetic construct
  REGION 1..844: note = DNA Polymerase Variant
MHHHHHHGGSGMLPLFDLEEPPKRVLLVDGHHLAYRTFYALSLTTSRGEPVQMVYGFARSLLKALKEDGQAVVVVFDAKAPSFRHEAYEAYKAGRAPTPEDFPRQLALVKRLVDLLGLVRLEAPGYEADDVLGTLAKKAEREGMEVCILTGDRDFFQLLSEKVSVLLPDGTLVTPKDVQEKYGVPPERWVDFRALTGDRSDNIPGVAGIGEKTALRLLAEWGSVENLLKNLDRVKPDSLRRKIEAHLEDLRLSLDLARIRTDLPLEVDFKALRRRTPDLEGLRAFLEELEFGSLLHEFGLLGGEKPREEAPWPPPEGAFVGFLLSRKEPMWAELLALAAAAEGRVHRATSPVEALADLKEARGFLAKDLAVLALREGVALDPTDDPLLVAYLLDPANTNPEYVARRYGGEFTEDAAERALLSERLFQTLFPRLSEKLLWLYQEVERPLSRVLAHMEARGVRLDVPLLEALSFELEKELERLEGEVFRLAGHPFNLNSRDQLEKVLFDELGLTPVTRTEKTGKRSTSAAALEALRGAHPIVELILQYRELSKLKSTYLDRLPRLVHPRTGRLHTRFNQTATATGRLSSSDPNLQNIPVRTPLGQHIRKAFVAEEGWLLLAADYSQIELRVLAHLSGDENLKRVFREGKDIHTETAAWMFGLDPALVDPKMRRAAKTVNFGVLYGMSAHRLSQELGIDYKEAEAFIERYFQSFPKVRAWIERTLEEGRTRGYVETLFGRRRYVPDLASRVRSVREAAERMAWNMPVQGTAADLMKIAMVKLFPRLKPLGAHLLLQVHDELVLEVPEDRAEEAKALVKEVMENAYPLDVPLEVEVGVGRDWLEAKQD

SEQ ID NO: 515 - DNA, 2538 bp, synthetic construct
  misc_feature 1..2538: note = DNA Polymerase Variant
  source 1..2538: mol_type = other DNA
atgcaccatcatcatcatcatggcggtagcggcatgttaccgctgtttgatttggaagaaccaccaaaacgcgtgctgcttgttgacggccatcatctggcgtatcgtaccttctacgcactgagccttacgacctcacgtggtgagcctgtccagatggtgtatgggtttgctcgctccctgctgaaagccctgaaggaagatggtcaagccgtagtagtggttttcgatgcgaaagcaccgtcgtttcgtcacgaagcgtacgaggcctataaagctggccgcgcaccgaccccggaagactttccgcgtcagttagcgctcgtcaaacgcctcgtggatttgctgggattagttcgcttggaagctcctggctacgaggcggacgacgtgctcggtacactggccaagaaagcagaacgtgaaggcatggaggtctgcattcttaccggtgatcgcgatttcttccagctgctgtctgagaaagtgagcgttttgctgcccgatggcacgttagtaaccccgaaagatgtccaagagaaatatggagttccgccagaacgttgggtggactttcgcgcactgactggtgatcgttcagacaacatcccgggcgttgccgggattggtgaaaagacggcgctgcgcctgctggcagaatggggctcggtggaaaatctgctcaagaaccttgatcgtgtgaaacctgatagcttacgccgcaagatcgaagcccacctggaagacttgcgtctgagtctggatcttgcgcgtattcgcaccgatctgccgttggaagtagactttaaagctctgcgtcgtcgcacacccgatttagaggggttacgcgcgttcctcgaagaactggagtttggctccctgctgcatgaattcggtttgttgggcggagagaaaccgcgtgaagaagcaccatggccgccgcccgaaggtgcctttgtcggctttcttctgtcacgcaaagagccaatgtgggcggaactgttagctcttgcagccgccgcggaagggcgtgttcaccgcgcgacctctcctgtcgaggccctcgctgacctcaaagaagcacgtggtttcttggcgaaagatttagccgtgcttgcattacgcgaaggcgttgcgctcgatccgacggacgacccgcttttggtggcttatttgctcgatcctgcgaataccaacccggaaggcgtagcccgtcgttacggcggcgagtttactgaagatgcggcagaacgcgcgttgcttagcgaacgcctcttccagacgttatttccacgtctttcggagaaattactctggctctatcaggaagtcgaacgtccattgagtcgcgtgcttgcccatatggaggctcgcggtgtgcgcttagatgttccgttgttagaagcactcagcttcgagttggagaaagaactggaacgtcttgaaggcgaagtctttcgtttagcggggcatcccttcaatctcaactctcgcgaccaattggagaaagtgctctttgatgaattaggtttaacccctgtcacgcgtacagagaagaccggcaaacgttccacttcggcagccgccttggaagcacttcgtggtgctcacccgatcgtcgagttgattttgcagtaccgcgagctcagcaaactcaaatcaacctatcttgataggttacctcgtcttgttcatccacgtacgggtcgtttacacacccgcttcaatcaaacggcgacagccaccgggcgcttgtcgtcgagtgacccgaacctccagaatattccagtgcgcacgccgctgggccaacgcattcgtaaagcgtttgttgcggaagaaggttggttattacttgcggccgattactcccagatcgaacttcgtgtattggcgcatctctctggcgacgagaatcttaaacgcgtgtttcgcgaaggcaaggatattcacactgaaaccgcagcctggatgttcgggcttgacccagccttagtggaccccaagatgcgtcgtgccgccaagaccgtcaactttggcgtactctatggtatgtcagcacatcgtcttagttctgaattgggcattgactacaaagaagctgaagcgtttatcgagcgctatttccaatcctttccgaaagttcgcgcgtggattgaacgtaccctcgaagaaggtcgcactcgcggctatgtggaaacgttattcgggcgtcgtcgctacgttccagatcttgcatctcgtgtccgctcagtgcgcgaagctgctgagcgtatggcctggaatatgcctgttcagggaacagcggcggacctcatgaagatcgccatggtgaaattgtttccgcgcttgaaacccttaggagcccaccttcttttacaggtgcatgatgaattggtcttggaagtacccgaggatcgcgcagaagaagccaaagcactcgtgaaagaggttatggaaaacgcgtatccgttagatgttccgttggaggtcgaagtgggtgtaggccgtgattggcttgaagcgaaacaagactaatga

SEQ ID NO: 516 - protein, 844 aa, synthetic construct
  REGION 1..844: note = DNA Polymerase Variant
MHHHHHHGGSGMLPLFDLEEPPKRVLLVDGHHLAYRTFYALSLTTSRGEPVQMVYGFARSLLKALKEDGQAVVVVFDAKAPSFRHEAYEAYKAGRAPTPEDFPRQLALVKRLVDLLGLVRLEAPGYEADDVLGTLAKKAEREGMEVCILTGDRDFFQLLSEKVSVLLPDGTLVTPKDVQEKYGVPPERWVDFRALTGDRSDNIPGVAGIGEKTALRLLAEWGSVENLLKNLDRVKPDSLRRKIEAHLEDLRLSLDLARIRTDLPLEVDFKALRRRTPDLEGLRAFLEELEFGSLLHEFGLLGGEKPREEAPWPPPEGAFVGFLLSRKEPMWAELLALAAAAEGRVHRATSPVEALADLKEARGFLAKDLAVLALREGVALDPTDDPLLVAYLLDPANTNPEGVARRYGGEFTEDAAERALLSERLFQTLFPRLSEKLLWLYQEVERPLSRVLAHMEARGVRLDVPLLEALSFELEKELERLEGEVFRLAGHPFNLNSRDQLEKVLFDELGLTPVTRTEKTGKRSTSAAALEALRGAHPIVELILQYRELSKLKSTYLDRLPRLVHPRTGRLHTRFNQTATATGRLSSSDPNLQNIPVRTPLGQRIRKAFVAEEGWLLLAADYSQIELRVLAHLSGDENLKRVFREGKDIHTETAAWMFGLDPALVDPKMRRAAKTVNFGVLYGMSAHRLSSELGIDYKEAEAFIERYFQSFPKVRAWIERTLEEGRTRGYVETLFGRRRYVPDLASRVRSVREAAERMAWNMPVQGTAADLMKIAMVKLFPRLKPLGAHLLLQVHDELVLEVPEDRAEEAKALVKEVMENAYPLDVPLEVEVGVGRDWLEAKQD

SEQ ID NO: 517 - DNA, 2538 bp, synthetic construct
  misc_feature 1..2538: note = DNA Polymerase Variant
  source 1..2538: mol_type = other DNA
atgcaccatcatcatcatcatggcggtagcggcatgttaccgctgtttgatttggaagaaccaccaaaacgcgtgctgcttgttgacggccatcatctggcgtatcgtaccttctacgcactgagccttacgacctcacgtggtgagcctgtccagatggtgtatgggtttgctcgctccctgctgaaagccctgaaggaagatggtcaagccgtagtagtggttttcgatgcgaaagcaccgtcgtttcgtcacgaagcgtacgaggcctataaagctggccgcgcaccgaccccggaagactttccgcgtcagttagcgctcgtcaaacgcctcgtggatttgctgggattagttcgcttggaagctcctggctacgaggcggacgacgtgctcggtacactggccaagaaagcagaacgtgaaggcatggaggtctgcattcttaccggtgatcgcgatttcttccagctgctgtctgagaaagtgagcgttttgctgcccgatggcacgttagtaaccccgaaagatgtgcaagagaaatatggagttccgccagaacgttgggtggactttcgcgcactgactggtgatcgttcagacaacatcccgggcgttgccgggattggtgaaaagacggcgctgcgcctgctggcagaatggggctcggtggaaaatctgctcaagaaccttgatcgtgtgaaacctgatagcttacgccgcaagatcgaagcccacctggaagacttgcgtctgagtctggatcttgtccgtattcgcaccgatctgccgttggaagtagactttaaagctctgcgtcgtcgcacacccgatttagaggggttacgcgcgttcctcgaagaactggagtttggctccctgctgcatgaattcggtttgttgggcggagagaaaccgcgtgaagaagcaccatggccgccgcccggaggtgcctttgtcggctttcttctgtcacgcaaagagccaatgtgggcggaactgttagctcttgcagccgccgcggaagggcgtgttcaccgcgcgacctctcctgtcgaggccctcgctgacctcaaagaagcacgtggtttcttggcgaaagatttagccgtgcttgcattacgcgaaggcgttgcgctcgatccgacggacgacccgcttttggtggcttatttgctcgatcctgcgaataccaacccggaaggtgtcgcccgtcgttacggcggcgagtttactgaagatgcggcagaacgcgcgttgcttagcgaacgcctcttccagacgttatttccacgtctttcggagaaattactctggctctatcaggaagtcgaacgtccattgagtcgcgtgcttgcccatatggaggctcgcggtgtgcgcttagatgttccgttgttagaagcactcagcttcgagttggagaaagaactggaacgtcttgaaggcgaagtctttcgtttagcggggcatcccttcaatctcaactctcgcgaccaattggagaaagtgctctttgatgaattaggtttaacccctgtcacgcgtacagagaagaccggcaaacgttccacttcggcagctgccttggaagcacttcgtggtgctcacccgatcgtcgacttgattttgcagtatcgcgagctcagcaaactcaaatcaacctatcttgataggttacctcgtcttgttcatccacgtacgggtcgtttacacacccgctggaatcaaacggcgacagccaccgggcgcttgtcgtcgagtgacccgaacctccagaatattccagtgcgcacgccgctgggccaacacattcgtaaagcgtttgttgcggaagaaggttggttattacttgcggccgattactcccagatcgaacttcgtgtattggcgcatctctctggcgacgagaatcttaaacgcgtgtttcgcgaaggcaaggatattcacactgaaaccgcagcctggatgttcgggctggacccagccttagtggaccccaagatgcgtcgtgccgccaagaccgtcaactttggcgtactctatggtatgtcagcacatcgtcttagtcaggaattgggcattgactacaaagaagctgaagcgtttatcgagcgctatttccaatcctttccgaaagttcgcgcgtggattgaacgtaccctcgaagaaggtcgcactcgcggctatgtggaaacgttattcgggcgtcgtcgctacgttccagatcttgcatctcgtgtccgctcagtgcgcgaagctgctgagcgtatggcctggaatatgcctgttcagggaacagcggcggacctcatgaagatcgccatggtgaaattgtttccgcgcttgaaacccttaggagcccaccttcttttacaggtgcatgatgaattggtcttggaagtacccgaggatcgcgcagaagaagccaaagcactcgtgaaagaggttatggaaaacgcgtatccgttagatgttccgttggaggtcgaagtgggtgtaggccgtgattggcttgaagcgaaacaagactaatga

SEQ ID NO: 518 - protein, 844 aa, synthetic construct
  REGION 1..844: note = DNA Polymerase Variant
MHHHHHHGGSGMLPLFDLEEPPKRVLLVDGHHLAYRTFYALSLTTSRGEPVQMVYGFARSLLKALKEDGQAVVVVFDAKAPSFRHEAYEAYKAGRAPTPEDFPRQLALVKRLVDLLGLVRLEAPGYEADDVLGTLAKKAEREGMEVCILTGDRDFFQLLSEKVSVLLPDGTLVTPKDVQEKYGVPPERWVDFRALTGDRSDNIPGVAGIGEKTALRLLAEWGSVENLLKNLDRVKPDSLRRKIEAHLEDLRLSLDLVRIRTDLPLEVDFKALRRRTPDLEGLRAFLEELEFGSLLHEFGLLGGEKPREEAPWPPPGGAFVGFLLSRKEPMWAELLALAAAAEGRVHRATSPVEALADLKEARGFLAKDLAVLALREGVALDPTDDPLLVAYLLDPANTNPEGVARRYGGEFTEDAAERALLSERLFQTLFPRLSEKLLWLYQEVERPLSRVLAHMEARGVRLDVPLLEALSFELEKELERLEGEVFRLAGHPFNLNSRDQLEKVLFDELGLTPVTRTEKTGKRSTSAAALEALRGAHPIVDLILQYRELSKLKSTYLDRLPRLVHPRTGRLHTRWNQTATATGRLSSSDPNLQNIPVRTPLGQHIRKAFVAEEGWLLLAADYSQIELRVLAHLSGDENLKRVFREGKDIHTETAAWMFGLDPALVDPKMRRAAKTVNFGVLYGMSAHRLSQELGIDYKEAEAFIERYFQSFPKVRAWIERTLEEGRTRGYVETLFGRRRYVPDLASRVRSVREAAERMAWNMPVQGTAADLMKIAMVKLFPRLKPLGAHLLLQVHDELVLEVPEDRAEEAKALVKEVMENAYPLDVPLEVEVGVGRDWLEAKQD

SEQ ID NO: 519 - DNA, 2538 bp, synthetic construct
  misc_feature 1..2538: note = DNA Polymerase Variant
  source 1..2538: mol_type = other DNA
atgcaccatcatcatcatcatggcggtagcggcatgttaccgctgtttgatttggaagaaccaccaaaacgcgtgctgcttgttgacggccatcatctggcgtatcgtaccttctacgcactgagccttacgacctcacgtggtgagcctgtccagatggtgtatgggtttgctcgctccctgctgaaagccctgaaggaagatggtcaagccgtagtagtggttttcgatgcgaaagcaccgtcgtttcgtcacgaagcgtacgaggcctataaagctggccgcgcaccgaccccggaagactttccgcgtcagttagcgctcgtcaaacgcctcgtggatttgctgggattagttcgcttggaagctcctggctacgaggcggacgacgtgctcggtacactggccaagaaagcagaacgtgaaggcatggaggtctgcattcttaccggtgatcgcgatttcttccagctgctgtctgagaaagtgagcgttttgctgcccgatggcacgttagtaaccccgaaagatgtccaagagaaatatggagttccgccagaacgttgggtggactttcgcgcactgactggtgatcgttcagacaacatcccgggcgttgccgggattggtgaaaagacggcgctgcgcctgctggcagaatggggctcggtggaaaatctgctcaagaaccttgatcgtgtgaaacctgatagcttacgccgcaagatcgaagcccacctggaagacttgcgtctgagtctggatcttgcgcgtattcgcaccgatctgccgttggaagtagactttaaagctctgcgtcgtcgcacacccgatttagaggggttacgcgcgttcctcgaagaactggagtttggctccctgctgcatgaattcggtttgttgggcggagagaaaccgcgtgaagaagcaccatggccgccgcccgaaggtgcctttgtcggctttcttctgtcacgccttgagccaatgtgggcggaactgttagctcttgcagccgccgcggaagggcgtgttcaccgcgcgacctctcctgtcgaggccctcgctgacctcaaagaagcacgtggtttcttggcgaaagatttagccgtgcttgcattacgcgaaggcgttgcgctcgatccgacggacgacccgcttttggtggcttatttgctcgatcctgcgaataccaacccggaaggcgtagcccgtcgttacggcggcgagtttactgaagatgcggcagaacgcgcgttgcttagcgaacgcctcttccagacgttatttccacgtctttcggagaaattactctggctctatcaggaagtcgaacgtccattgagtcgcgtgcttgcccatatggaggctcgcggtgtgcgcttagatgttccgttgttagaagcactcagcttcgagttggagaaagaactggaacgtcttgaaggcgaagtctttcgtttagcggggcatcccttcaatctcaactctcgcgaccaattggagaaagtgctctttgatgaattaggtttaacccctgtcacgcgtacagagaagaccggcaaacgttccacttcggcagccgccttggaagcacttcgtggtgctcacccgatcgtcgagttgattttgcagtaccgcgagctcagcaaactcaaatcaacctatcttgataggttacctcgtcttgttcatccacgtacgggtcgtttacacacccgcttcaatcaaacggcgacagccaccgggcgcttgtcgtcgagtgacccgaacctccagaatattccagtgcgcacgccgctgggccaacgcattcgtaaagcgtttgttgcggaagaaggttggttattacttgcggccgattactcccagatcgaacttcgtgtattggcgcatctctctggcgacgagaatcttaaacgcgtgtttcgcgaaggcaaggatattcacactgaaaccgcagcctggatgttcgggcttgacccagccttagtggaccccaagatgcgtcgtgccgccaagaccgtcaactttggcgtactctatggtatgtcagcacatcgtcttagtcaggaattgggcattgactacaaagaagctgaagcgtttatcgagcgctatttccaatcctttccgaaagttcgcgcgtggattgaacgtaccctcgaagaaggtcgcactcgcggctatgtggaaacgttattcgggcgtcgtcgctacgttccagatcttgcatctcgtgtccgctcagtgcgcgaagctgctgagcgtatggcctggaatatgcctgttcagggaacagcggcggacctcatgaagatcgccatggtgaaattgtttccgcgcttgaaacccttaggagcccaccttcttttacaggtgcatgatgaattggtcttggaagtacccgaggatcgcgcagaagaagccaaagcactcgtgaaagaggttatggaaaacgcgtatccgttagatgttccgttggaggtcgaagtgggtgtaggccgtgattggcttgaagcgaaacaagactaatga

SEQ ID NO: 520 - protein, 844 aa, synthetic construct
  REGION 1..844: note = DNA Polymerase Variant
MHHHHHHGGSGMLPLFDLEEPPKRVLLVDGHHLAYRTFYALSLTTSRGEPVQMVYGFARSLLKALKEDGQAVVVVFDAKAPSFRHEAYEAYKAGRAPTPEDFPRQLALVKRLVDLLGLVRLEAPGYEADDVLGTLAKKAEREGMEVCILTGDRDFFQLLSEKVSVLLPDGTLVTPKDVQEKYGVPPERWVDFRALTGDRSDNIPGVAGIGEKTALRLLAEWGSVENLLKNLDRVKPDSLRRKIEAHLEDLRLSLDLARIRTDLPLEVDFKALRRRTPDLEGLRAFLEELEFGSLLHEFGLLGGEKPREEAPWPPPEGAFVGFLLSRLEPMWAELLALAAAAEGRVHRATSPVEALADLKEARGFLAKDLAVLALREGVALDPTDDPLLVAYLLDPANTNPEGVARRYGGEFTEDAAERALLSERLFQTLFPRLSEKLLWLYQEVERPLSRVLAHMEARGVRLDVPLLEALSFELEKELERLEGEVFRLAGHPFNLNSRDQLEKVLFDELGLTPVTRTEKTGKRSTSAAALEALRGAHPIVELILQYRELSKLKSTYLDRLPRLVHPRTGRLHTRFNQTATATGRLSSSDPNLQNIPVRTPLGQRIRKAFVAEEGWLLLAADYSQIELRVLAHLSGDENLKRVFREGKDIHTETAAWMFGLDPALVDPKMRRAAKTVNFGVLYGMSAHRLSQELGIDYKEAEAFIERYFQSFPKVRAWIERTLEEGRTRGYVETLFGRRRYVPDLASRVRSVREAAERMAWNMPVQGTAADLMKIAMVKLFPRLKPLGAHLLLQVHDELVLEVPEDRAEEAKALVKEVMENAYPLDVPLEVEVGVGRDWLEAKQD

SEQ ID NO: 521 - DNA, 2538 bp, synthetic construct
  misc_feature 1..2538: note = DNA Polymerase Variant
  source 1..2538: mol_type = other DNA
atgcaccatcatcatcatcatggcggtagcggcatgttaccgctgtttgatttggaagaaccaccaaaacgcgtgctgcttgttgacggccatcatctggcgtatcgtaccttctacgcactgagccttacgacctcacgtggtgagcctgtccagatggtgtatgggtttgctcgctccctgctgaaagccctgaaggaagatggtcaagccgtagtagtggttttcgatgcgaaagcaccgtcgtttcgtcacgaagcgtacgaggcctataaagctggccgcgcaccgaccccggaagactttccgcgtcagttagcgctcgtcaaacgcctcgtggatttgctgggattagttcgcttggaagctcctggctacgaggcggacgacgtgctcggtacactggccaagaaagcagaacgtgaaggcatggaggtctgcattcttaccggtgatcgcgatttcttccagctgctgtctgagaaagtgagcgttttgctgcccgatggcacgttagtaaccccgaaagatgtccaagagaaatatggagttccgccagaacgttgggtggactttcgcgcactgactggtgatcgttcagacaacatcccgggcgttgccgggattggtgaaaagacggcgctgcgcctgctggcagaatggggctcggtggaaaatctgctcaagaaccttgatcgtgtgaaacctgatagcttacgccgcaagatcgaagcccacctggaagacttgcgtctgagtctggatcttgcgcgtattcgcaccgatctgccgttggaagtagactttaaagctctgcgtcgtcgcacacccgatttagaggggttacgcgcgttcctcgaagaactggagtttggctccctgctgcatgaattcggtttgttgggcggagagaaaccgcgtgaagaagcaccatggccgccgcccgaaggtgcctttgtcggctttcttctgtcacgcaaagagccaatgtgggcggaactgttagctcttgcagccgccgcggaagggcgtgttcaccgcgcgacctctcctgtcgaggccctcgctgacctcaaagaagcacgtggtttcttggcgaaagatttagccgtgcttgcattacgcgaaggcgttgcgctcgatccgacggacgacccgcttttggtggcttatttgctcgatcctgcgaataccaacccggaaggcgtagcccgtcgttacggcggcgagtttactgaagatgcggcagaacgcgcgttgcttagcgaacgcctcttccagacgttatttccacgtctttcggagaaattactctggctctatcaggaagtcgaacgtccattgagtcgcgtgcttgcccatatggaggctcgcggtgtgcgcttagatgttccgttgttagaagcactcagcttcgagttggagaaagaactggaacgtcttgaaggcgaagtctttcgtttagcggggcatcccttcaatctcaactctcgcgaccaattggagaaagtgctctttgatgaattaggtttaacccctgtcacgcgtacagagaagaccggcaaacgttccacttcggcagccgccttggaagcacttcgtggtgctcacccgatcgtcgagttgattttgcagtaccgcgagctcagcaaactcaaatcaacctatcttgataggttacctcgtcttgttcatccacgtacgggtcgtttacacacccgcttcaatcaaacggcgacagccaccgggcgcttgtcgtcgagtgacccgaacctccagaatattccagtgcgcacgccgctgggccaacgcattcgtaaagcgtttgttgcggaagaaggttggttattacttgcggccgattactcccagatcgaacttcgtgtattggcgcatctctctggcgacgagaatcttaaacgcgtgtttcgcgaaggcaaggatattcacactgaaaccgcagcctggatgttcgggcttgacccagccttagtggaccccaagatgcgtcgtgccgccaagaccgtcaactttggcgtactctatggtatgtcagcacatcgtcttagtcaggaattgggcattgactacaaagaagctgaagcgtttgtggagcgctatttccaatcctttccgaaagttcgcgcgtggattgaacgtaccctcgaagaaggtcgcactcgcggctatgtggaaacgttattcgggcgtcgtcgctacgttccagatcttgcatctcgtgtccgctcagtgcgcgaagctgctgagcgtatggcctggaatatgcctgttcagggaacagcggcggacctcatgaagatcgccatggtgaaattgtttccgcgcttgaaacccttaggagcccaccttcttttacaggtgcatgatgaattggtcttggaagtacccgaggatcgcgcagaagaagccaaagcactcgtgaaagaggttatggaaaacgcgtatccgttagatgttccgttggaggtcgaagtgggtgtaggccgtgattggcttgaagcgaaacaagactaatga

SEQ ID NO: 522 - protein, 844 aa, synthetic construct
  REGION 1..844: note = DNA Polymerase Variant
MHHHHHHGGSGMLPLFDLEEPPKRVLLVDGHHLAYRTFYALSLTTSRGEPVQMVYGFARSLLKALKEDGQAVVVVFDAKAPSFRHEAYEAYKAGRAPTPEDFPRQLALVKRLVDLLGLVRLEAPGYEADDVLGTLAKKAEREGMEVCILTGDRDFFQLLSEKVSVLLPDGTLVTPKDVQEKYGVPPERWVDFRALTGDRSDNIPGVAGIGEKTALRLLAEWGSVENLLKNLDRVKPDSLRRKIEAHLEDLRLSLDLARIRTDLPLEVDFKALRRRTPDLEGLRAFLEELEFGSLLHEFGLLGGEKPREEAPWPPPEGAFVGFLLSRKEPMWAELLALAAAAEGRVHRATSPVEALADLKEARGFLAKDLAVLALREGVALDPTDDPLLVAYLLDPANTNPEGVARRYGGEFTEDAAERALLSERLFQTLFPRLSEKLLWLYQEVERPLSRVLAHMEARGVRLDVPLLEALSFELEKELERLEGEVFRLAGHPFNLNSRDQLEKVLFDELGLTPVTRTEKTGKRSTSAAALEALRGAHPIVELILQYRELSKLKSTYLDRLPRLVHPRTGRLHTRFNQTATATGRLSSSDPNLQNIPVRTPLGQRIRKAFVAEEGWLLLAADYSQIELRVLAHLSGDENLKRVFREGKDIHTETAAWMFGLDPALVDPKMRRAAKTVNFGVLYGMSAHRLSQELGIDYKEAEAFVERYFQSFPKVRAWIERTLEEGRTRGYVETLFGRRRYVPDLASRVRSVREAAERMAWNMPVQGTAADLMKIAMVKLFPRLKPLGAHLLLQVHDELVLEVPEDRAEEAKALVKEVMENAYPLDVPLEVEVGVGRDWLEAKQD

SEQ ID NO: 523 - DNA, 2538 bp, synthetic construct
  misc_feature 1..2538: note = DNA Polymerase Variant
  source 1..2538: mol_type = other DNA
atgcaccatcatcatcatcatggcggtagcggcatgttaccgctgtttgatttggaagaaccaccaaaacgcgtgctgcttgttgacggccatcatctggcgtatcgtaccttctacgcactgagccttacgacctcacgtggtgagcctgtccagatggtgtatgggtttgctcgctccctgctgaaagccctgaaggaagatggtcaagccgtagtagtggttttcgatgcgaaagcaccgtcgtttcgtcacgaagcgtacgaggcctataaagctggccgcgcaccgaccccggaagactttccgcgtcagttagcgctcgtcaaacgcctcgtggatttgctgggattagttcgcttggaagctcctggctacgaggcggacgacgtgctcggtacactggccaagaaagcagaacgtgaaggcatggaggtctgcattcttaccggtgatcgcgatttcttccagctgctgtctgagaaagtgagcgttttgctgcccgatggcacgttagtaaccccgaaagatgtgcaagagaaatatggagttccgccagaacgttgggtggactttcgcgcactgactggtgatcgttcagacaacatcccgggcgttgccgggattggtgaaaagacggcgctgcgcctgctggcagaatggggctcggtggaaaatctgctcaagaaccttgatcgtgtgaaacctgatagcttacgccgcaagatcgaagcccacctggaagacttgcgtctgagtctggatcttgcgcgtattcgcaccgatctgccgttggaagtagactttaaagctctgcgtcgtcgcacacccgatttagaggggttacgcgcgttcctcgaagaactggagtttggctccctgctgcatgaattcggtttgttgggcggagagaaaccgcgtgaagaagcaccatggccgccgcccgaaggtgcctttgtcggctttcttctgtcacgcaaagagccaatgtgggcggaactgttagctcttgcagccgccgcggaagggcgtgttcaccgcgcgacctctcctgtcgaggccctcgctgacctcaaagaagcacgtggtttcttggcgaaagatttagccgtgcttgcattacgcgaaggtgttgcgctcgatccgacggacgacccgcttttggtggcttatttgctcgatcctgcgaataccaacccggaaggtatcgcccgtcgttacggcggcgagtttactgaagatgcggcagaacgcgcgttgcttagcgaacgcctcttccagacgttatttccacgtctttcggagaaattactctggctctatcaggaagtcgaacgtccattgagtcgcgtgcttgcccatatggaggctcgcggtgtgcgcttagatgttccgttgttagaagcactcagcttcgagttggagaaagaactggaacgtcttgaaggcgaagtctttcgtttagcggggcatcccttcaatctcaactctcgcgaccaattggagaaagtgctctttgatgaattaggtttaacccctgtcacgcgtacagagaagaccggcaaacgttccacttcggcagccgccttggaagcacttcgtggtgctcacccgatcgtcaacttgattttgcagtaccgcgagctcagcaaactcaaatcaacctatcttgataggttacctcgtcttgttcatccacgtacgggtcgtttacacacccgcttcaatcaaacggcgacagccaccgggcgcttgtcgtcgagtgacccgaacctccagaatattccagtgcgcacgccgctgggccaacacattcgtaaagcgtttgttgcggaagaaggttggttattacttgcggccgattactcccagatcgaacttcgtgtattggcgcatctctctggcgacgagaatcttaaacgcgtgtttcgcgaaggcaaggatattcacactgaaaccgcagcctggatgttcggggtggacccagccttagtggaccccaagatgcgtcgtgccgccaagaccgtcaactttggcgtactctatggtatgtcagcacatcgtcttagtcaggaattgggcattgactacaaagaagctgaagcgtttatcgagcgctatttccaatcctttccgaaagttcgcgcgtggattgaacgtaccctcgaagaaggtcgcactcgcggctatgtggaaacgttattcgggcgtcgtcgctacgttccagatcttgcatctcgtgtccgctcagtgcgcgaagctgctgagcgtatggcctggaatatgcctgttcagggaacagcggcggacctcatgaagatcgccatggtgaaattgtttccgcgcttgaaacccttaggagcccaccttcttttacaggtgcatgatgaattggtcttggaagtacccgaggatcgcgcagaagaagccaaagcactcgtgaaagaggttatggaaaacgcgtatccgttagatgttccgttggaggtcgaagtgggtgtaggccgtgattggcttgaagcgaaacaagactaatga

SEQ ID NO: 524 - protein, 844 aa, synthetic construct
  REGION 1..844: note = DNA Polymerase Variant
MHHHHHHGGSGMLPLFDLEEPPKRVLLVDGHHLAYRTFYALSLTTSRGEPVQMVYGFARSLLKALKEDGQAVVVVFDAKAPSFRHEAYEAYKAGRAPTPEDFPRQLALVKRLVDLLGLVRLEAPGYEADDVLGTLAKKAEREGMEVCILTGDRDFFQLLSEKVSVLLPDGTLVTPKDVQEKYGVPPERWVDFRALTGDRSDNIPGVAGIGEKTALRLLAEWGSVENLLKNLDRVKPDSLRRKIEAHLEDLRLSLDLARIRTDLPLEVDFKALRRRTPDLEGLRAFLEELEFGSLLHEFGLLGGEKPREEAPWPPPEGAFVGFLLSRKEPMWAELLALAAAAEGRVHRATSPVEALADLKEARGFLAKDLAVLALREGVALDPTDDPLLVAYLLDPANTNPEGIARRYGGEFTEDAAERALLSERLFQTLFPRLSEKLLWLYQEVERPLSRVLAHMEARGVRLDVPLLEALSFELEKELERLEGEVFRLAGHPFNLNSRDQLEKVLFDELGLTPVTRTEKTGKRSTSAAALEALRGAHPIVNLILQYRELSKLKSTYLDRLPRLVHPRTGRLHTRFNQTATATGRLSSSDPNLQNIPVRTPLGQHIRKAFVAEEGWLLLAADYSQIELRVLAHLSGDENLKRVFREGKDIHTETAAWMFGVDPALVDPKMRRAAKTVNFGVLYGMSAHRLSQELGIDYKEAEAFIERYFQSFPKVRAWIERTLEEGRTRGYVETLFGRRRYVPDLASRVRSVREAAERMAWNMPVQGTAADLMKIAMVKLFPRLKPLGAHLLLQVHDELVLEVPEDRAEEAKALVKEVMENAYPLDVPLEVEVGVGRDWLEAKQD

SEQ ID NO: 525 - DNA, 2538 bp, synthetic construct
  misc_feature 1..2538: note = DNA Polymerase Variant
  source 1..2538: mol_type = other DNA
atgcaccatcatcatcatcatggcggtagcggcatgttaccgctgtttgatttggaagaaccaccaaaacgcgtgctgcttgttgacggccatcatctggcgtatcgtaccttctacgcactgagccttacgacctcacgtggtgagcctgtccagatggtgtatgggtttgctcgctccctgctgaaagccctgaaggaagatggtcaagccgtagtagtggttttcgatgcgaaagcaccgtcgtttcgtcacgaagcgtacgaggcctataaagctggccgcgcaccgaccccggaagactttccgcgtcagttagcgctcgtcaaacgcctcgtggatttgctgggattagttcgcttggaagctcctggctacgaggcggacgacgtgctcggtacactggccaagaaagcagaacgtgaaggcatggaggtctgcattcttaccggtgatcgcgatttcttccagctgctgtctgagaaagtgagcgttttgctgcccgatggcacgttagtaaccccgaaagatgtgcaagagaaatatggagttccgccagaacgttgggtggactttcgcgcactgactggtgatcgttcagacaacatcccgggcgttgccgggattggtgaaaagacggcgctgcgcctgctggcagaatggggctcggtggaaaatctgctcaagaaccttgatcgtgtgaaacctgatagcttacgccgcaagatcgaagcccacctggaagacttgcgtctgagtctggatcttgtccgtattcgcaccgatctgccgttggaagtagactttaaagctctgcgtcgtcgcacacccgatttagaggggttacgcgcgttcctcgaagaactggagtttggctccctgctgcatgaattcggtttgttgggcggagagaaaccgcgtgaagaagcaccatggccgccgcccgaaggtgcctttgtcggctttcttctgtcacgcaaagagccaatgtgggcggaactgttagctcttgcagccgccgcggaagggcgtgttcaccgcgcgacctctcctgtcgaggccctcgctgacctcaaagaagcacgtggtttcttggcgaaagatttagccgtgcttgcattacgcgaatgtgttgcgctcgatccgacggacgacccgcttttggtggcttatttgctcgatcctgcgaataccaacccggaaggtatcgcccgtcgttacggcggcgagtttactgaagatgcggcagaacgcgcgttgcttagcgaacgcctcttccagacgttatttccacgtctttcggagaaattactctggctctatcaggaagtcgaacgtccattgagtcgcgtgcttgcccatatggaggctcgcggtgtgcgcttagatgttccgttgttagaagcactcagcttcgagttggagaaagaactggaacgtcttgaagacgaagtctttcgtttagcggggcatcccttcaatctcaactctcgcgaccaattggagaaagtgctctttgatgaattaggtttaacccctgtcacgcgtacagagaagaccggcaaacgttccacttcggcagccgccttggaagcacttcgtggtgctcacccgatcgtcgacttgattttgcagtatcgcgagctcagcaaactcaaatcaacctatcttgataggttacctcgtcttgttcatccacgtacgggtcgtttacacacccgcttcaatcaaacggcgacagccaccgggcgcttgtcgtcgagtgacccgaacctccagaatattccagtgcgcacgccgactggccaacacattcgtaaagcgtttgttgcggaagaaggttggttattacttgcggccgattactcccagatcgaacttcgtgtattggcgcatctctctggcgacgagaatcttaaacgcgtgtttcgcgaaggcaaggatattcacactgaaaccgcagcctggatgttcgggcttgacccagccttagtggaccccaagatgcgtcgtgccgccaagaccgtcaactttggcgtactctatggtatgtcagcacatcgtcttagtcaggaattgggcattgactacaaagaagctgaagcgtttatcgagcgctatttccaatcctttccgaaagttcgcgcgtggattgaacgtaccctcgaagaaggtcgcactcgcggctatgtggaaacgttattcgggcgtcgtcgctacgttccagatcttgcatctcgtgtccgctcagtgcgcgaagctgctgagcgtatggcctggaatatgcctgttcagggaacagcggcggacctcatgaagatcgccatggtgaaattgtttccgcgcttgaaacccttaggagcccaccttcttttacaggtgcatgatgaattggtcttggaagtacccgaggatcgcgcagaagaagccaaagcactcgtgaaagaggttatggaaaacgcgtatccgttagatgttccgttggaggtcgaagtgggtgtaggccgtgattggcttgaagcgaaacaagactaatga

SEQ ID NO: 526 - protein, 844 aa, synthetic construct
  REGION 1..844: note = DNA Polymerase Variant
MHHHHHHGGSGMLPLFDLEEPPKRVLLVDGHHLAYRTFYALSLTTSRGEPVQMVYGFARSLLKALKEDGQAVVVVFDAKAPSFRHEAYEAYKAGRAPTPEDFPRQLALVKRLVDLLGLVRLEAPGYEADDVLGTLAKKAEREGMEVCILTGDRDFFQLLSEKVSVLLPDGTLVTPKDVQEKYGVPPERWVDFRALTGDRSDNIPGVAGIGEKTALRLLAEWGSVENLLKNLDRVKPDSLRRKIEAHLEDLRLSLDLVRIRTDLPLEVDFKALRRRTPDLEGLRAFLEELEFGSLLHEFGLLGGEKPREEAPWPPPEGAFVGFLLSRKEPMWAELLALAAAAEGRVHRATSPVEALADLKEARGFLAKDLAVLALRECVALDPTDDPLLVAYLLDPANTNPEGIARRYGGEFTEDAAERALLSERLFQTLFPRLSEKLLWLYQEVERPLSRVLAHMEARGVRLDVPLLEALSFELEKELERLEDEVFRLAGHPFNLNSRDQLEKVLFDELGLTPVTRTEKTGKRSTSAAALEALRGAHPIVDLILQYRELSKLKSTYLDRLPRLVHPRTGRLHTRFNQTATATGRLSSSDPNLQNIPVRTPTGQHIRKAFVAEEGWLLLAADYSQIELRVLAHLSGDENLKRVFREGKDIHTETAAWMFGLDPALVDPKMRRAAKTVNFGVLYGMSAHRLSQELGIDYKEAEAFIERYFQSFPKVRAWIERTLEEGRTRGYVETLFGRRRYVPDLASRVRSVREAAERMAWNMPVQGTAADLMKIAMVKLFPRLKPLGAHLLLQVHDELVLEVPEDRAEEAKALVKEVMENAYPLDVPLEVEVGVGRDWLEAKQD

SEQ ID NO: 527 - DNA, 2538 bp, synthetic construct
  misc_feature 1..2538: note = DNA Polymerase Variant
  source 1..2538: mol_type = other DNA
atgcaccatcatcatcatcatggcggtagcggcatgttaccgctgtttgatttggaagaaccaccaaaacgcgtgctgcttgttgacggccatcatctggcgtatcgtaccttctacgcactgagccttacgacctcacgtggtgagcctgtccagatggtgtatgggtttgctcgctccctgctgaaagccctgaaggaagatggtcaagccgtagtagtggttttcgatgcgaaagcaccgtcgtttcgtcacgaagcgtacgaggcctataaagctggccgcgcaccgaccccggaagactttccgcgtcagttagcgctcgtcaaacgcctcgtggatttgctgggattagttcgcttggaagctcctggctacgaggcggacgacgtgctcggtacactggccaagaaagcagaacgtgaaggcatggaggtctgcattcttaccggtgatcgcgatttcttccagctgctgtctgagaaagtgagcgttttgctgcccgatggcacgttagtaaccccgaaagatgtccaagagaaatatggagttccgccagaacgttgggtggactttcgcgcactgactggtgatcgttcagacaacatcccgggcgttgccgggattggtgaaaagacggcgctgcgcctgctggcagaatggggctcggtggaaaatctgctcaagaaccttgatcgtgtgaaacctgatagcttacgccgcaagatcgaagcccacctggaagacttgcgtctgagtctggatcttgcgcgtattcgcaccgatctgccgttggaagtagactttaaagctctgcgtcgtcgcacacccgatttagaggggttacgcgcgttcctcgaagaactggagtttggctccctgctgcatgaattcggtttgttgggcggagagaaaccgcgtgaagaagcaccatggccgccgcccgaaggtgcctttgtcggctttcttctgtcacgcaaagagccaatgtgggcggaactgttagctcttgcagccgccgcggaagggcgtgttcaccgcgcgacctctcctgtcgaggccctcgctgacctcaaagaagcacgtggtttcttggcgaaagatttagccgtgcttgcattacgcgaaggcgttgcgctcgatccgacggacgacccgcttttggtggcttatttgctcgatcctgcgaataccaacccggaaggcgtagcccgtcgttacggcggcgagtttactgaagatgcggcagaacgcgcgttgcttagcgaacgcctcttccagacgttatttccacgtctttcggagaaattactctggctctatcaggaagtcgaacgtccattgagtcgcgtgcttgcccatatggaggctcgcggtgtgcgcttagatgttccgttgttagaagcactcagcttcgagttggagaaagaactggaacgtcttgaaggcgaagtctttcgtttagcggggcatcccttcaatctcaactctcgcgaccaattggagaaagtgctctttgatgaattaggtttaacccctgtcacgcgtacagagaagaccggcaaacgttccacttcggcagccgccttggaagcacttcgtggtgctcacccgatcgtcgagttgattttgcagtaccgcgagctcagcaaactcaaatcaacctatcttgataggttacctcgtcttgttcatccacgtacgggtcgtttacacacccgcttcaatcaaacggcgacagccaccgggcgcttgtcgtcgagtgacccgaacctccagaatattccagtgcgcacgccgctgggccaacgcattcgtaaagcgtttgttgcggaagaaggttggttattacttgcggccgattactcccagatcgaacttcgtgtattggcgcatctctctggcgacgagaatcttaaacgcgtgtttcgcgaaggcaaggatattcacactgaaaccgcagcctggatgttcgggcttgacccagccttagtggaccccaagatgcgtcgtgccgccaagaccgtcaactttggcgtactctatggtatgtcagcacatcgtcttagtcaggaattgggcattgactacaaagaagctgaagcgtttatcgagcgctatttccaatcctttccgaaagttcgcgcgtggattgaacgtaccctcgaagaaggtcgcactcgcggctatgtggaaacgttattcgggcgtcgtcgcagtgttccagatcttgcatctcgtgtccgctcagtgcgcgaagctgctgagcgtatggcctggaatatgcctgttcagggaacagcggcggacctcatgaagatcgccatggtgaaattgtttccgcgcttgaaacccttaggagcccaccttcttttacaggtgcatgatgaattggtcttggaagtacccgaggatcgcgcagaagaagccaaagcactcgtgaaagaggttatggaaaacgcgtatccgttagatgttccgttggaggtcgaagtgggtgtaggccgtgattggcttgaagcgaaacaagactaatga

SEQ ID NO: 528 - protein, 844 aa, synthetic construct
  REGION 1..844: note = DNA Polymerase Variant
MHHHHHHGGSGMLPLFDLEEPPKRVLLVDGHHLAYRTFYALSLTTSRGEPVQMVYGFARSLLKALKEDGQAVVVVFDAKAPSFRHEAYEAYKAGRAPTPEDFPRQLALVKRLVDLLGLVRLEAPGYEADDVLGTLAKKAEREGMEVCILTGDRDFFQLLSEKVSVLLPDGTLVTPKDVQEKYGVPPERWVDFRALTGDRSDNIPGVAGIGEKTALRLLAEWGSVENLLKNLDRVKPDSLRRKIEAHLEDLRLSLDLARIRTDLPLEVDFKALRRRTPDLEGLRAFLEELEFGSLLHEFGLLGGEKPREEAPWPPPEGAFVGFLLSRKEPMWAELLALAAAAEGRVHRATSPVEALADLKEARGFLAKDLAVLALREGVALDPTDDPLLVAYLLDPANTNPEGVARRYGGEFTEDAAERALLSERLFQTLFPRLSEKLLWLYQEVERPLSRVLAHMEARGVRLDVPLLEALSFELEKELERLEGEVFRLAGHPFNLNSRDQLEKVLFDELGLTPVTRTEKTGKRSTSAAALEALRGAHPIVELILQYRELSKLKSTYLDRLPRLVHPRTGRLHTRFNQTATATGRLSSSDPNLQNIPVRTPLGQRIRKAFVAEEGWLLLAADYSQIELRVLAHLSGDENLKRVFREGKDIHTETAAWMFGLDPALVDPKMRRAAKTVNFGVLYGMSAHRLSQELGIDYKEAEAFIERYFQSFPKVRAWIERTLEEGRTRGYVETLFGRRRSVPDLASRVRSVREAAERMAWNMPVQGTAADLMKIAMVKLFPRLKPLGAHLLLQVHDELVLEVPEDRAEEAKALVKEVMENAYPLDVPLEVEVGVGRDWLEAKQD

SEQ ID NO: 529 - DNA, 2538 bp, synthetic construct
  misc_feature 1..2538: note = DNA Polymerase Variant
  source 1..2538: mol_type = other DNA
atgcaccatcatcatcatcatggcggtagcggcatgttaccgctgtttgatttggaagaaccaccaaaacgcgtgctgcttgttgacggccatcatctggcgtatcgtaccttctacgcactgagccttacgacctcacgtggtgagcctgtccagatggtgtatgggtttgctcgctccctgctgaaagccctgaaggaagatggtcaagccgtagtagtggttttcgatgcgaaagcaccgtcgtttcgtcacgaagcgtacgaggcctataaagctggccgcgcaccgaccccggaagactttccgcgtcagttagcgctcgtcaaacgcctcgtggatttgctgggattagttcgcttggaagctcctggctacgaggcggacgacgtgctcggtacactggccaagaaagcagaacgtgaaggcatggaggtctgcattcttaccggtgatcgcgatttcttccagctgctgtctgagaaagtgagcgttttgctgcccgatggcacgttagtaaccccgaaagatgtgcaagagaaatatggagttccgccagaacgttgggtggactttcgcgcactgactggtgatcgttcagacaacatcccgggcgttgccgggattggtgaaaagacggcgctgcgcctgctggcagaatggggctcggtggaaaatctgctcaagaaccttgatcgtgtgaaacctgatagcttacgccgcaagatcgaagcccacctggaagacttgcgtctgagtctggatcttgtccgtattcgcaccgatctgccgttggaagtagactttaaagctctgcgtcgtcgcacacccgatttagaggggttacgcgcgttcctcgaagaactggagtttggctccctgctgcatgaattcggtttgttgggcggagagaaaccgcgtgaagaagcaccatggccgccgcccgaaggtgcctttgtcggctttcttctgtcacgcaaagagccaatgtgggcggaactgttagctcttgcagccgccgcggaagggcgtgttcaccgcgcgacctctcctgtcgaggccctcgctgacctcaaagaagcacgtggtttcttggcgaaagatttagccgtgcttgcattacgcgaaggcgttgcgctcgatccgacggacgacccgcttttggtggcttatttgctcgatcctgcgaataccaacccggaaggcgtagcccgtcgttacggcggcgagtttactgaagatgcggcagaacgcgcgttgcttagcgaacgcctcttccagacgttatttccacgtctttcggagaaattactctggctctatcaggaagtcgaacgtccattgagtcgcgtgcttgcccatatggaggctcgcggtgtgcgcttagatgttccgttgttagaagcactcagcttcgagttggagaaagaactggaacgtcttgaaggcgaagtctttcgtttagcggggcatcccttcaatctcaactctcgcgaccaattggagaaagtgctctttgatgaattaggtttaacccctgtcacgcgtacagagaagaccggcaaacgttccacttcggcagctgccttggaagcacttcgtggtgctcacccgatcgtcgagttgattttgcagtatcgcgagctcagcaaactcaaatcaacctatcttgataggttacctcgtcttgttcatccacgtacgggtcgtttacacacccgcttcaatcaaacggcgacagccaccgggcgcttgtcgtcgagtgacccgaacctccagaatattccagtgcgcacgccgctgggccaacgcattcgtaaagcgtttgttgcggaagaaggttggttattacttgcggccgattactcccagatcgaacttcgtgtattggcgcatctctctggcgacgagaatcttaaacgcgtgtttcgcgaaggcaaggatattcacactgaaaccgcagcctggatgttcgggcttgacccagccttagtggaccccaagatgcgtcgtgccgccaagaccgtcaactttggcgtactctatggtatgtcagcacatcgtcttagtcaggaattgggcattgactacaaagaagctgaagcgtttatcgagcgctatttccaatcctttccgaaagttcgcgcgtggattgaacgtaccctcgaagaaggtcgcactcgcggctatgtggaaacgttattcgggcgtcgtcgctacgttccagatcttgcatctcgtgtccgctcagtgcgcgaagctgctgagcgtatggcctggaatatgcctgttcagggaacagcggcggacctcatgaagatcgccatggtgaaattgtttccgcgcttgaaacccttaggagcccaccttcttttacaggtgcatgatgaattggtcttggaagtacccgaggatcgcgcagaagaagccaaagcactcgtgaaagaggttatggaaaacgcgtatccgttagatgttccgttggaggtcgaagtgggtgtaggccgtgattggcttgaagcgaaacaagactaatga

SEQ ID NO: 530 - protein, 844 aa, synthetic construct; identical to SEQ ID NO: 340
  REGION 1..844: note = DNA Polymerase Variant

SEQ ID NO: 531 - DNA, 2538 bp, synthetic construct
  misc_feature 1..2538: note = DNA Polymerase Variant
  source 1..2538: mol_type = other DNA
atgcaccatcatcatcatcatggcggtagcggcatgttaccgctgtttgatttggaagaaccaccaaaacgcgtgctgcttgttgacggccatcatctggcgtatcgtaccttctacgcactgagccttacgacctcacgtggtgagcctgtccagatggtgtatgggtttgctcgctccctgctgaaagccctgaaggaagatggtcaagccgtagtagtggttttcgatgcgaaagcaccgtcgtttcgtcacgaagcgtacgaggcctataaagctggccgcgcaccgaccccggaagactttccgcgtcagttagcgctcgtcaaacgcctcgtggatttgctgggattagttcgcttggaagctcctggctacgaggcggacgacgtgctcggtacactggccaagaaagcagaacgtgaaggcatggaggtctgcattcttaccggtgatcgcgatttcttccagctgctgtctgagaaagtgagcgttttgctgcccgatggcacgttagtaaccccgaaagatgtgcaagagaaatatggagttccgccagaacgttgggtggactttcgcgcactgactggtgatcgttcagacaacatcccgggcgttgccgggattggtgaaaagacggcgctgcgcctgctggcagaatggggctcggtggaaaatctgctcaagaaccttgatcgtgtgaaacctgatagcttacgccgcaagatcgaagcccacctggaagacttgcgtctgagtctggatcttgcgcgtattcgcaccgatctgccgttggaagtagactttaaagctctgcgtcgtcgcacacccgatttagaggggttacgcgcgttcctcgaagaactggagtttggctccctgctgcatgaattcggtttgttgggcggagagaaaccgcgtgaagaagcaccatggccgccgcccgaaggtgcctttgtcggctttcttctgtcacgcaaagagccaatgtgggcggaactgttagctcttgcagccgccgcggaagggcgtgttcaccgcgcgacctctcctgtcgaggccctcgctgacctcaaagaagcacgtggtttcttggcgaaagatttagccgtgcttgcattacgcgaaggcgttgcgctcgatccgacggacgacccgcttttggtggcttatttgctcgatcctgcgaataccaacccggaacgtgtcgcccgtcgttacggcggcgagtttactgaagatgcggcagaacgcgcgttgcttagcgaacgcctcttccagacgttatttccacgtctttcggagaaattactctggctctatcaggaagtcgaacgtccattgagtcgcgtgcttgcccatatggaggctcgcggtgtgcgcttagatgttccgttgttagaagcactcagcttcgagttggagaaagaactggaacgtcttgaaggcgaagtctttcgtttagcggggcatcccttcaatctcaactctcgcgaccaattggagaaagtgctctttgatgaattaggtttaacccctgtcacgcgtacagagaagaccggcaaacgttccacttcggcaggtgccttggaagcacttcgtggtgctcacccgatcgtcggcttgattttgcagtaccgcgagctcagcaaactcaaatcaacctatcttgataggttacctcgtcttgttcatccacgtacgggtcgtttacacacccgcttcaatcaaacggcgacagccaccgggcgcttgtcgtcgagtgacccgaacctccagaatattccagtgcgcacgccgactggccaacgcattcgtaaagcgtttgttgcggaagaaggttggttattacttgcggccgattactcccagatcgaacttcgtgtattggcgcatctctctggcgacgagaatcttaaacgcgtgtttcgcgaaggcaaggatattcacactgaaaccgcagcctggatgttcgggcttgacccagccttagtggaccccaagatgcgtcgtgccgccaagaccgtcaactttggcgtactctatggtatgtcagcacatcgtcttagtcaggaattgggcattgactacaaagaagctgaagcgtttatcgagcgctatttccaatcctttccgaaagttcgcgcgtggattgaacgtaccctcgaagaaggtcgcactcgcggctatgtggaaacgttattcgggcgtcgtcgctacgttccagatcttgcatctcgtgtccgctcagtgcgcgaagctgctgagcgtatggcctggaatatgcctgttcagggaacagcggcggacctcatgaagatcgccatggtgaaattgtttccgcgcttgaaacccttaggagcccaccttcttttacaggtgcatgatgaattggtcttggaagtacccgaggatcgcgcagaagaagccaaagcactcgtgaaagaggttatggaaaacgcgtatccgttagatgttccgttggaggtcgaagtgggtgtaggccgtgattggcttgaagcgaaacaagactaatga

SEQ ID NO: 532 - protein, 844 aa, synthetic construct
  REGION 1..844: note = DNA Polymerase Variant
MHHHHHHGGSGMLPLFDLEEPPKRVLLVDGHHLAYRTFYALSLTTSRGEPVQMVYGFARSLLKALKEDGQAVVVVFDAKAPSFRHEAYEAYKAGRAPTPEDFPRQLALVKRLVDLLGLVRLEAPGYEADDVLGTLAKKAEREGMEVCILTGDRDFFQLLSEKVSVLLPDGTLVTPKDVQEKYGVPPERWVDFRALTGDRSDNIPGVAGIGEKTALRLLAEWGSVENLLKNLDRVKPDSLRRKIEAHLEDLRLSLDLARIRTDLPLEVDFKALRRRTPDLEGLRAFLEELEFGSLLHEFGLLGGEKPREEAPWPPPEGAFVGFLLSRKEPMWAELLALAAAAEGRVHRATSPVEALADLKEARGFLAKDLAVLALREGVALDPTDDPLLVAYLLDPANTNPERVARRYGGEFTEDAAERALLSERLFQTLFPRLSEKLLWLYQEVERPLSRVLAHMEARGVRLDVPLLEALSFELEKELERLEGEVFRLAGHPFNLNSRDQLEKVLFDELGLTPVTRTEKTGKRSTSAGALEALRGAHPIVGLILQYRELSKLKSTYLDRLPRLVHPRTGRLHTRFNQTATATGRLSSSDPNLQNIPVRTPTGQRIRKAFVAEEGWLLLAADYSQIELRVLAHLSGDENLKRVFREGKDIHTETAAWMFGLDPALVDPKMRRAAKTVNFGVLYGMSAHRLSQELGIDYKEAEAFIERYFQSFPKVRAWIERTLEEGRTRGYVETLFGRRRYVPDLASRVRSVREAAERMAWNMPVQGTAADLMKIAMVKLFPRLKPLGAHLLLQVHDELVLEVPEDRAEEAKALVKEVMENAYPLDVPLEVEVGVGRDWLEAKQD

SEQ ID NO: 533 - DNA, 2538 bp, synthetic construct; identical to SEQ ID NO: 341
  misc_feature 1..2538: note = DNA Polymerase Variant
  source 1..2538: mol_type = other DNA

SEQ ID NO: 534 - protein, 844 aa, synthetic construct; identical to SEQ ID NO: 342
  REGION 1..844: note = DNA Polymerase Variant

SEQ ID NO: 535 - DNA, 2538 bp, synthetic construct
  misc_feature 1..2538: note = DNA Polymerase Variant
  source 1..2538: mol_type = other DNA
atgcaccatcatcatcatcatggcggtagcggcatgttaccgctgtttgatttggaagaaccaccaaaacgcgtgctgcttgttgacggccatcatctggcgtatcgtaccttctacgcactgagccttacgacctcacgtggtgagcctgtccagatggtgtatgggtttgctcgctccctgctgaaagccctgaaggaagatggtcaagccgtagtagtggttttcgatgcggcggcaccgtcgtttcgtcacgaagcgtacgaggcctataaagctggccgcgcaccgaccccggaagactttccgcgtcagttagcgctcgtcaaacgcctcgtggatttgctgggattagttcgcttggaagctcctggctacgaggcggacgacgtgctcggtacactggccaagaaagcagaacgtgaaggcatggaggtctgcattcttaccggtgatcgcgatttcttccagctgctgtctgagaaagtgagcgttttgctgcccgatggcacgttagtaaccccgaaagatgtccaagagaaatatggagttccgccagaacgttgggtggactttcgcgcactgactggtgatcgttcagacaacatcccgggcgttgccgggattggtgaaaagacggcgctgcgcctgctggcagaatggggctcggtggaaaatctgctcaagaaccttgatcgtgtgaaacctgatagcttacgccgcaagatcgaagcccacctggaagacttgcgtctgagtctggatcttgcgcgtattcgcaccgatctgccgttggaagtagactttaaagctctgcgtcgtcgcacacccgatttagaggggttacgcgcgttcctcgaagaactggagtttggctccctgctgcatgaattcggtttgttgggcggagagaaaccgcgtgaagaagcaccatggccgccgcccgaaggtgcctttgtcggctttcttctgtcacgcaaagagccaatgtgggcggaactgttagctcttgcagccgccgcggaagggcgtgttcaccgcgcgacctctcctgtcgaggccctcgctgacctcaaagaagcacgtggtttcttggcgaaagatttagccgtgcttgcattacgcgaaggcgttgcgctcgatccgacggacgacccgcttttggtggcttatttgctcgatcctgcgaataccaacccggaacgtgtcgcccgtcgttacggcggcgagtttactgaagatgcggcagaacgcgcgttgcttagcgaacgcctcttccagacgttatttccacgtctttcggagaaattactctggctctatcaggaagtcgaacgtccattgagtcgcgtgcttgcccatatggaggctcgcggtgtgcgcttagatgttccgttgttagaagcactcagcttcgagttggagaaagaactggaacgtcttgaaggcgaagtctttcgtttagcggggcatcccttcaatctcaactctcgcgaccaattggagaaagtgctctttgatgaattaggtttaacccctgtcacgcgtacagagaagaccggcaaacgttccacttcggcagccgccttggaagcacttcgtggtgctcacccgatcgtcgagttgattttgcagtatcgcgagctcagcaaactcaaatcaacctatcttgataggttacctcgtcttgttcatccacgtacgggtcgtttacacacccgcttcaatcaaacggcgacagccaccgggcgcttgtcgtcgagtgacccgaacctccagaatattccagtgcgcacgccgctgggccaacacattcgtaaagcgtttgttgcggaagaaggttggttattacttgcggccgattactcccagatcgaacttcgtgtattggcgcatctctctggcgacgagaatcttaaacgcgtgtttcgcgaaggcaaggatattcacactgaaaccgcagcctggatgttcggggtggacccagccttagtggaccccaagatgcgtcgtgccgccaagaccgtcaactttggcgtactctatggtatgtcagcacatcgtcttagtcaggaattgggcattgactacaaagaagctgaagcgtttatcgagcgctatttccaatcctttccgaaagttcgcgcgtggattgaacgtaccctcgaagaaggtcgcactcgcggctatgtggaaacgttattcgggcgtcgtcgctacgttccagatcttgcatctcgtgtccgctcagtgcgcgaagctgctgagcgtatggcctggaatatgcctgttcagggaacagcggcggacctcatgaagatcgccatggtgaaattgtttccgcgcttgaaacccttaggagcccaccttcttttacaggtgcatgatgaattggtcttggaagtacccgaggatcgcgcagaagaagccaaagcactcgtgaaagaggttatggaaaacgcgtatccgttagatgttccgttggaggtcgaagtgggtgtaggccgtgattggcttgaagcgaaacaagactaatga

SEQ ID NO: 536 - protein, 844 aa, synthetic construct
  REGION 1..844: note = DNA Polymerase Variant
MHHHHHHGGSGMLPLFDLEEPPKRVLLVDGHHLAYRTFYALSLTTSRGEPVQMVYGFARSLLKALKEDGQAVVVVFDAAAPSFRHEAYEAYKAGRAPTPEDFPRQLALVKRLVDLLGLVRLEAPGYEADDVLGTLAKKAEREGMEVCILTGDRDFFQLLSEKVSVLLPDGTLVTPKDVQEKYGVPPERWVDFRALTGDRSDNIPGVAGIGEKTALRLLAEWGSVENLLKNLDRVKPDSLRRKIEAHLEDLRLSLDLARIRTDLPLEVDFKALRRRTPDLEGLRAFLEELEFGSLLHEFGLLGGEKPREEAPWPPPEGAFVGFLLSRKEPMWAELLALAAAAEGRVHRATSPVEALADLKEARGFLAKDLAVLALREGVALDPTDDPLLVAYLLDPANTNPERVARRYGGEFTEDAAERALLSERLFQTLFPRLSEKLLWLYQEVERPLSRVLAHMEARGVRLDVPLLEALSFELEKELERLEGEVFRLAGHPFNLNSRDQLEKVLFDELGLTPVTRTEKTGKRSTSAAALEALRGAHPIVELILQYRELSKLKSTYLDRLPRLVHPRTGRLHTRFNQTATATGRLSSSDPNLQNIPVRTPLGQHIRKAFVAEEGWLLLAADYSQIELRVLAHLSGDENLKRVFREGKDIHTETAAWMFGVDPALVDPKMRRAAKTVNFGVLYGMSAHRLSQELGIDYKEAEAFIERYFQSFPKVRAWIERTLEEGRTRGYVETLFGRRRYVPDLASRVRSVREAAERMAWNMPVQGTAADLMKIAMVKLFPRLKPLGAHLLLQVHDELVLEVPEDRAEEAKALVKEVMENAYPLDVPLEVEVGVGRDWLEAKQD

SEQ ID NO: 537 - DNA, 2538 bp, synthetic construct
  misc_feature 1..2538: note = DNA Polymerase Variant
  source 1..2538: mol_type = other DNA
atgcaccatcatcatcatcatggcggtagcggcatgttaccgctgtttgatttggaagaaccaccaaaacgcgtgctgcttgttgacggccatcatctggcgtatcgtaccttctacgcactgagccttacgacctcacgtggtgagcctgtccagatggtgtatgggtttgctcgctccctgctgaaagccctgaaggaagatggtcaagccgtagtagtggttttcgatgcgaaagcaccgtcgtttcgtcacgaagcgtacgaggcctataaagctggccgcgcaccgaccccggaagactttccgcgtcagttagcgctcgtcaaacgcctcgtggatttgctgggattagttcgcttggaagctcctggctacgaggcggacgacgtgctcggtacactggccaagaaagcagaacgtgaaggcatggaggtctgcattcttaccggtgatcgcgatttcttccagctgctgtctgagaaagtgagcgttttgctgcccgatggcacgttagtaaccccgaaagatgtccaagagaaatatggagttccgccagaacgttgggtggactttcgcgcactgactggtgatcgttcagacaacatcccgggcgttgccgggattggtgaaaagacggcgctgcgcctgctggcagaatggggctcggtggaaaatctgctcaagaaccttgatcgtgtgaaacctgatagcttacgccgcaagatcgaagcccacctggaagacttgcgtctgagtctggatcttgtacgtattcgcaccgatctgccgttggaagtagactttaaagctctgcgtcgtcgcacacccgatttagaggggttacgcgcgttcctcgaagaactggagtttggctccctgctgcatgaattcggtttgttgggcggagagaaaccgcgtgaagaagcaccatggccgccgcccgaaggtgcctttgtcggctttcttctgtcacgcaaagagccaatgtgggcggaactgttagctcttgcagccgccgcggaagggcgtgttcaccgcgcgacctctcctgtcgaggccctcgctgacctcaaagaagcacgtggtttcttggcgaaagatttagccgtgcttgcattacgcgaaggcgttgcgctcgatccgacggacgacccgcttttggtggcttatttgctcgatcctgcgaataccaacccggaacgtgtcgcccgtcgttacggcggcgagtttactgaagatgcggcagaacgcgcgttgcttagcgaacgcctcttccagacgttatttccacgtctttcggagaaattactctggctctatcaggaagtcgaacgtccattgagtcgcgtgcttgcccatatggaggctcgcggtgtgcgcttagatgttccgttgttagaagcactcagcttcgaggccgagaaagaactggaacgtcttgaaggcgaagtctttcgtttagcggggcatcccttcaatctcaactctcgcgaccaattggagaaagtgctctttgatgaattaggtttaacccctgtcacgcgtacagagaagaccggcaaacgttccacttcggcagccgccttggaagcacttcgtggtgctcacccgatcgtcgagttgattttgcagtatcgcgagctcagcaaactcaaatcaacctatcttgataggttacctcgtcttgttcatccacgtacgggtcgtttacacacccgcttcaatcaaacggcgacagccaccgggcgcttgtcgtcgagtgacccgaacctccagaatattccagtgcgcacgccgctgggccaacacattcgtaaagcgtttgttgcggaagaaggttggttattacttgcggccgattactcccagatcgaacttcgtgtattggcgcatctctctggcgacgagaatcttaaacgcgtgtttcgcgaaggcaaggatattcacactgaaaccgcagcctggatgttcggggtggacccagccttagtggaccccaagatgcgtcgtgccgccaagaccgtcaactttggcgtactctatggtatgtcagcacatcgtcttagtcaggaattgggcattgactacaaagaagctgaagcgtttatcgagcgctatttccaatcctttccgaaagttcgcgcgtggattgaacgtaccctcgaagaaggtcgcactcgcggctatgtggaaacgttattcgggcgtcgtcgctacgttccagatcttgcatctcgtgtccgctcagtgcgcgaagctgctgagcgtatggcctggaatatgcctgttcagggaacagcggcggacctcatgaagatcgccatggtgaaattgtttccgcgcttgaaacccttaggagcccaccttcttctgcaggtgcatgatgaattggtcttggaagtacccgaggatcgcgcagaagaagccaaagcactcgtgaaagaggttatggaaaacgcgtatccgttagatgttccgttggaggtcgaagtgggtgtaggccgtgattggcttgaagcgaaacaagactaatga

SEQ ID NO: 538 - protein, 844 aa, synthetic construct
  REGION 1..844: note = DNA Polymerase Variant
MHHHHHHGGSGMLPLFDLEEPPKRVLLVDGHHLAYRTFYALSLTTSRGEPVQMVYGFARSLLKALKEDGQAVVVVFDAKAPSFRHEAYEAYKAGRAPTPEDFPRQLALVKRLVDLLGLVRLEAPGYEADDVLGTLAKKAEREGMEVCILTGDRDFFQLLSEKVSVLLPDGTLVTPKDVQEKYGVPPERWVDFRALTGDRSDNIPGVAGIGEKTALRLLAEWGSVENLLKNLDRVKPDSLRRKIEAHLEDLRLSLDLVRIRTDLPLEVDFKALRRRTPDLEGLRAFLEELEFGSLLHEFGLLGGEKPREEAPWPPPEGAFVGFLLSRKEPMWAELLALAAAAEGRVHRATSPVEALADLKEARGFLAKDLAVLALREGVALDPTDDPLLVAYLLDPANTNPERVARRYGGEFTEDAAERALLSERLFQTLFPRLSEKLLWLYQEVERPLSRVLAHMEARGVRLDVPLLEALSFEAEKELERLEGEVFRLAGHPFNLNSRDQLEKVLFDELGLTPVTRTEKTGKRSTSAAALEALRGAHPIVELILQYRELSKLKSTYLDRLPRLVHPRTGRLHTRFNQTATATGRLSSSDPNLQNIPVRTPLGQHIRKAFVAEEGWLLLAADYSQIELRVLAHLSGDENLKRVFREGKDIHTETAAWMFGVDPALVDPKMRRAAKTVNFGVLYGMSAHRLSQELGIDYKEAEAFIERYFQSFPKVRAWIERTLEEGRTRGYVETLFGRRRYVPDLASRVRSVREAAERMAWNMPVQGTAADLMKIAMVKLFPRLKPLGAHLLLQVHDELVLEVPEDRAEEAKALVKEVMENAYPLDVPLEVEVGVGRDWLEAKQD

SEQ ID NO: 539 - DNA, 2538 bp, synthetic construct
  misc_feature 1..2538: note = DNA Polymerase Variant
  source 1..2538: mol_type = other DNA
atgcaccatcatcatcatcatggcggtagcggcatgttaccgctgtttgatttggaagaaccaccaaaacgcgtgctgcttgttgacggccatcatctggcgtatcgtaccttctacgcactgagccttacgacctcacgtggtgagcctgtccagatggtgtatgggtttgctcgctccctgctgaaagccctgaaggaagatggtcaagccgtagtagtggttttcgatgcgaaagcaccgtcgtttcgtcacgaagcgtacgaggcctataaagctggccgcgcaccgaccccggaagactttccgcgtcagttagcgctcgtcaaacgcctcgtggatttgctgggattagttcgcttggaagctcctggctacgaggcggacgacgtgctcggtacactggccaagaaagcagaacgtgaaggcatggaggtctgcattcttaccggtgatcgcgatttcttccagctgctgtctgagaaagtgagcgttttgctgcccgatggcacgttagtaaccccgaaagatgtccaagagaaatatggagttccgccagaacgttgggtggactttcgcgcactgactggtgatcgttcagacaacatcccgggcgttgccgggattggtgaaaagacggcgctgcgcctgctggcagaatggggctcggtggaaaatctgctcaagaaccttgatcgtgtgaaacctgatagcttacgccgcaagatcgaagcccacctggaagacttgcgtctgagtctggatcttgcacgtattcgcaccgatctgccgttggaagtagactttaaagctctgcgtcgtcgcacacccgatttagaggggttacgcgcgttcctcgaagaactggagtttggctccctgctgcatgaattcggtttgttgggcggagagaaaccgcgtgaagaagcaccatggccgccgcccgaaggtgcctttgtcggctttcttctgtcacgcaaagagccaatgtgggcggaactgttagctcttgcagccgccgcggaagggcgtgttcaccgcgcgacctctcctgtcgaggccctcgctgacctcaaagaagcacgtggtttcttggcgaaagatttagccgtgcttgcattacgcgaaggcgttgcgctcgatccgacggacgacccgcttttggtggcttatttgctcgatcctgcgaataccaacccggaacgtgtcgcccgtcgttacggcggcgagtttactgaagatgcggcagaacgcgcgttgcttagcgaacgcctcttccagacgttatttccacgtctttcggagaaattactctggctctatcaggaagtcgaacgtccattgagtcgcgtgcttgcccatatggaggctcgcggtgtgcgcttagatgttccgttgttagaagcactcagcttcgagttggagaaagaactggaacgtcttgagggcgaagtctttcgtttagcggggcatcccttcaatctcaactctcgcgaccaattggagaaagtgctctttgatgaattaggtttaacccctgtcacgcgtacagagaagaccggcaaacgttccacttcggcagccgccttggaagcacttcgtggtgctcacccgatcgtcgagttgattttgcagtatcgcgagctcagcaaactcaaatcaacctatcttgataggttacctcgtcttgttcatccacgtacgggtcgtttacacacccgcttcaatcaaacggcgacagccaccgggcgcttgtcgtcgagtgacccgaacctccagaatattccagtgcgcacgccgctgggccaacacattcgtaaagcgtttgttgcggaagaaggttggttattacttgcggccgattactcccagatcgaacttcgtgtattggcgcatctctctggcgacgagaatcttaaacgcgtgtttcgcgaaggcaaggatattcacactgaaaccgcagcctggatgttcggggtggacccagccttagtggaccccaagatgcgtcgtgccgccaagaccgtcctgtttggcgtactctatggtatgtcagcacatcgtcttagtcaggaattgggcattgactacaaagaagctgaagcgtttatcgagcgctatttccaatcctttccgaaagttcgcgcgtggattgaacgtaccctcgaagaaggtcgcactcgcggctatgtggaaacgttattcgggcgtcgtcgctacgttccagatcttgcatctcgtgtccgctcagtgcgcgaagctgctgagcgtatggcctggaatatgcctgttcagggaacagcggcggacctcatgaagatcgccatggtgaaattgtttccgcgcttgaaacccttaggagcccaccttcttctgcaggtgcatgatgaattggtcttggaagtacccgaggatcgcgcagaagaagccaaagcactcgtgaaagaggttatggaaaacgcgtatccgttagatgttccgttggaggtcgaagtgggtgtaggccgtgattggcttgaagcgaaacaagactaatga

SEQ ID NO: 540 - protein, 844 aa, synthetic construct
  REGION 1..844: note = DNA Polymerase Variant
MHHHHHHGGSGMLPLFDLEEPPKRVLLVDGHHLAYRTFYALSLTTSRGEPVQMVYGFARSLLKALKEDGQAVVVVFDAKAPSFRHEAYEAYKAGRAPTPEDFPRQLALVKRLVDLLGLVRLEAPGYEADDVLGTLAKKAEREGMEVCILTGDRDFFQLLSEKVSVLLPDGTLVTPKDVQEKYGVPPERWVDFRALTGDRSDNIPGVAGIGEKTALRLLAEWGSVENLLKNLDRVKPDSLRRKIEAHLEDLRLSLDLARIRTDLPLEVDFKALRRRTPDLEGLRAFLEELEFGSLLHEFGLLGGEKPREEAPWPPPEGAFVGFLLSRKEPMWAELLALAAAAEGRVHRATSPVEALADLKEARGFLAKDLAVLALREGVALDPTDDPLLVAYLLDPANTNPERVARRYGGEFTEDAAERALLSERLFQTLFPRLSEKLLWLYQEVERPLSRVLAHMEARGVRLDVPLLEALSFELEKELERLEGEVFRLAGHPFNLNSRDQLEKVLFDELGLTPVTRTEKTGKRSTSAAALEALRGAHPIVELILQYRELSKLKSTYLDRLPRLVHPRTGRLHTRFNQTATATGRLSSSDPNLQNIPVRTPLGQHIRKAFVAEEGWLLLAADYSQIELRVLAHLSGDENLKRVFREGKDIHTETAAWMFGVDPALVDPKMRRAAKTVLFGVLYGMSAHRLSQELGIDYKEAEAFIERYFQSFPKVRAWIERTLEEGRTRGYVETLFGRRRYVPDLASRVRSVREAAERMAWNMPVQGTAADLMKIAMVKLFPRLKPLGAHLLLQVHDELVLEVPEDRAEEAKALVKEVMENAYPLDVPLEVEVGVGRDWLEAKQD

SEQ ID NO: 541 - DNA, 2538 bp, synthetic construct
  misc_feature 1..2538: note = DNA Polymerase Variant
  source 1..2538: mol_type = other DNA
atgcaccatcatcatcatcatggcggtagcggcatgttaccgctgtttgatttggaagaaccaccaaaacgcgtgctgcttgttgacggccatcatctggcgtatcgtaccttctacgcactgagccttacgacctcacgtggtgagcctgtccagatggtgtatgggtttgctcgctccctgctgaaagccctgaaggaagatggtcaagccgtagtagtggttttcgatgcgaaagcaccgtcgtttcgtcacgaagcgtacgaggcctataaagctggccgcgcaccgaccccggaagactttccgcgtcagttagcgctcgtcaaacgcctcgtggatttgctgggattagttcgcttggaagctcctggctacgaggcggacgacgtgctcggtacactggccaagaaagcagaacgtgaaggcatggaggtctgcattcttaccggtgatcgcgatttcttccagctgctgtctgagaaagtgagcgttttgctgcccgatggcacgttagtaaccccgaaagatgtccaagagaaatatggagttccgccagaacgttgggtggactttcgcgcactgactggtgatcgttcagacaacatcccgggcgttgccgggattggtgaaaagacggcgctgcgcctgctggcagaatggggctcggtggaaaatctgctcaagaaccttgatcgtgtgaaacctgatagcttacgccgcaagatcgaagcccacctggaagacttgcgtctgagtctggatcttgcgcgtattcgcaccgatctgccgttggaagtagactttaaagctctgcgtcgtcgcacacccgatttagaggggttacgcgcgttcctcgaagaactggagtttggctccctgctgcatgaattcggtttgttgggcggagagaaaccgcgtgaagaagcaccatggccgccgcccgaaggtgcctttgtcggctttcttctgtcacgcaaagagccaatgtgggcggaactgttagctcttgcagccgccgcggaagggcgtgttcaccgcgcgacctctcctgtcgaggccctcgctgacctcaaagaagcacgtggtttcttggcgaaagatttagccgtgcttgcattacgcgaaggcgttgcgctcgatccgacggacgacccgcttttggtggcttatttgctcgatcctgcgaataccaacccggaacgtgtcgcccgtcgttacggcggcgagtttactgaagatgcggcagaacgcgcgttgcttagcgaacgcctcttccagacgttatttccacgtctttcggagaaattactctggctctatcaggaagtcgaacgtccattgagtcgcgtgcttgcccatatggaggctcgcggtgtgcgcttagatgttccgttgttagaagcactcagcttcgagttggagaaagaactggaacgtcttgaaggcgaagtctttcgtttagcggggcatcccttcaatctcaactctcgcgaccaattggagaaagtgctctttgatgaattaggtttaacccctgtcacgcgtacagagaagaccggcaaacgttccacttcggcagccgccttggaagcacttcgtggtgctcacccgatcgtcgagttgattttgcagtatcgcgagctcagcaaactcaaatcaacctatcttgataggttacctaagcttgttcatccacgtacgggtcgtttacacacccgcttcaatcaaacggcgacagccaccgggcgcttgtcgtcgagtgacccgaacctccagaatattccagtgcgcacgccgctgggccaacacattcgtaaagcgtttgttgcggaagaaggttggttattacttgcggccgattactcccagatcgaacttcgtgtattggcgcatctctctggcgacgagaatcttaaacgcgtgtttcgcgaaggcaaggatattcacactgaaaccgcagcctggatgttcggggtggacccagccttagtggaccccaagatgcgtcgtgccgccaagaccgtcaactttggcgtactctatggtatgtcagcacatcgtcttagtcaggaattgggcattgactacaaagaagctgaagcgtttatcgagcgctatttccaatcctttccgaaagttcgcgcgtggattgaacgtaccctcgaagaaggtcgcactcgcggctatgtggaaacgttattcgggcgtcgtcgctacgttccagatcttgcatctcgtgtccgctcagtgcgcgaagctgctgagcgtatggcctggaatatgcctgttcagggaacagcggcggacctcatgaagatcgccatggtgaaattgtttccgcgcttgaaacccttaggagcccaccttcttttacaggtgcatgatgaattggtcttggaagtacccgaggatcgcgcagaagaagccaaagcactcgtgaaagaggttatggaaaacgcgtatccgttagatgttccgttggaggtcgaagtgggtgtaggccgtgattggcttgaagcgaaacaagactaatga

SEQ ID NO: 542 - protein, 844 aa, synthetic construct
  REGION 1..844: note = DNA Polymerase Variant
MHHHHHHGGSGMLPLFDLEEPPKRVLLVDGHHLAYRTFYALSLTTSRGEPVQMVYGFARSLLKALKEDGQAVVVVFDAKAPSFRHEAYEAYKAGRAPTPEDFPRQLALVKRLVDLLGLVRLEAPGYEADDVLGTLAKKAEREGMEVCILTGDRDFFQLLSEKVSVLLPDGTLVTPKDVQEKYGVPPERWVDFRALTGDRSDNIPGVAGIGEKTALRLLAEWGSVENLLKNLDRVKPDSLRRKIEAHLEDLRLSLDLARIRTDLPLEVDFKALRRRTPDLEGLRAFLEELEFGSLLHEFGLLGGEKPREEAPWPPPEGAFVGFLLSRKEPMWAELLALAAAAEGRVHRATSPVEALADLKEARGFLAKDLAVLALREGVALDPTDDPLLVAYLLDPANTNPERVARRYGGEFTEDAAERALLSERLFQTLFPRLSEKLLWLYQEVERPLSRVLAHMEARGVRLDVPLLEALSFELEKELERLEGEVFRLAGHPFNLNSRDQLEKVLFDELGLTPVTRTEKTGKRSTSAAALEALRGAHPIVELILQYRELSKLKSTYLDRLPKLVHPRTGRLHTRFNQTATATGRLSSSDPNLQNIPVRTPLGQHIRKAFVAEEGWLLLAADYSQIELRVLAHLSGDENLKRVFREGKDIHTETAAWMFGVDPALVDPKMRRAAKTVNFGVLYGMSAHRLSQELGIDYKEAEAFIERYFQSFPKVRAWIERTLEEGRTRGYVETLFGRRRYVPDLASRVRSVREAAERMAWNMPVQGTAADLMKIAMVKLFPRLKPLGAHLLLQVHDELVLEVPEDRAEEAKALVKEVMENAYPLDVPLEVEVGVGRDWLEAKQD

SEQ ID NO: 543 - DNA, 2538 bp, synthetic construct
  misc_feature 1..2538: note = DNA Polymerase Variant
  source 1..2538: mol_type = other DNA
atgcaccatcatcatcatcatggcggtagcggcatgttaccgctgtttgatttggaagaaccaccaaaacgcgtgctgcttgttgacggccatcatctggcgtatcgtaccttctacgcactgagccttacgacctcacgtggtgagcctgtccagatggtgtatgggtttgctcgctccctgctgaaagccctgaaggaagatggtcaagccgtagtagtggttttcgatgcgaaagcaccgtcgtttcgtcacgaagcgtacgaggcctataaagctggccgcgcaccgaccccggaagactttccgcgtcagttagcgctcgtcaaacgcctcgtggatttgctgggattagttcgcttggaagctcctggctacgaggcggacgacgtgctcggtacactggccaagaaagcagaacgtgaaggcatggaggtctgcattcttaccggtgatcgcgatttcttccagctgctgtctgagaaagtgagcgttttgctgcccgatggcacgttagtaaccccgaaagatctgcaagagaaatatggagttccgccagaacgttgggtggactttcgcgcactgactggtgatcgttcagacaacatcccgggcgttgccgggattggtgaaaagacggcgctgcgcctgctggcagaatggggctcggtggaaaatctgctcaagaaccttgatcgtgtgaaacctgatagcttacgccgcaagatcgaagcccacctggaagacttgcgtctgagtctggatcttgcccgtattcgcaccgatctgccgttggaagtagactttaaagctctgcgtcgtcgcacacccgatttagaggggttacgcgcgttcctcgaagaactggagtttggctccctgctgcatgaattcggtttgttgggcggagagaaaccgcgtgaagaagcaccatggccgccgcccgagggtgcctttgtcggctttcttctgtcacgcaaagagccaatgtgggcggaactgttagctcttgcagccgccgcggaagggcgtgttcaccgcgcgacctctcctgtcgaggccctcgctgacctcaaagaagcacgtggtttcttggcgaaagatttagccgtgcttgcattacgcgaaggcgttgcgctcgatccgacggacgacccgcttttggtggcttatttgctcgatcatgcgaataccaacccggaacgtgtcgcccgtcgttacggcggcgagtttactgaagatgcggcagaacgcgcgttgcttagcgaacgcctcttccagacgttatttccacgtctttcggagaaattactctggctctatcaggaagtcgaacgtccattgagtcgcgtgcttgcccatatggaggctcgcggtgtgcgcttagatgttccgttgttagaagcactcagcttcgagttggagaaagaactggaacgtcttgagggcgaagtctttcgtttagcggggcatcccttcaatctcaactctcgcgaccaattggagaaagtgctctttgatgaattaggtttaacccctgtcacgcgtacagagaagaccggcaaacgttccacttcggcagccgccttggaagcacttcgtggtgctcacccgatcgtcgagttgattttgcagtatcgcgagctcagcaaactcaaatcaacctatcttgataggttacctcgtcttgttcatccacgtacgggtcgtttacacacccgcttcaatcaaacggcgacagccaccgggcgcttgtcgtcgagtgacccgaacctccagaatattccagtgcgcacgccgctgggccaacacattcgtaaagcgtttgttgcggaagaaggttggttattacttgcggccgattactcccagatcgaacttcgtgtattggcgcatctctctggcgacgagaatcttaaacgcgtgtttcgcgaaggcaaggatattcacactgaaaccgcagcctggatgttcggggtggacccagccttagtggaccccaagatgcgtcgtgccgccaagaccgtcaactttggcgtactctatggtatgtcagcacaccgtcttagtcaggaattgggcattgactacaaagaagctgaagcgtttatcgagcgctatttccaatcctttccgaaagttcgcgcgtggattgaacgtacgctcgaagaaggtcgcactcgcggctatgtggaaacgttattcgggcgtcgtcgctacgttccagatcttacgtctcgtgtccgctcagtgcgcgaagctgctgagcgtatggcctggaatatgcctgttcagggaacagcggcggacctcatgaagatcgccatggtgaaattgtttccgcgcttgaaacccttaggagcccaccttcttttacaggtgcatgatgaattggtcttggaagtacccgaggatcgcgcagaagaagccaaagcactcgtgaaagaggttatggaaaacgcgtatccgttagatgttccgttggaggtcgaagtgggtgtaggccgtgattggcttgaagcgaaacaagactaatga

SEQ ID NO: 544 - protein, 844 aa, synthetic construct
  REGION 1..844: note = DNA Polymerase Variant
MHHHHHHGGSGMLPLFDLEEPPKRVLLVDGHHLAYRTFYALSLTTSRGEPVQMVYGFARSLLKALKEDGQAVVVVFDAKAPSFRHEAYEAYKAGRAPTPEDFPRQLALVKRLVDLLGLVRLEAPGYEADDVLGTLAKKAEREGMEVCILTGDRDFFQLLSEKVSVLLPDGTLVTPKDLQEKYGVPPERWVDFRALTGDRSDNIPGVAGIGEKTALRLLAEWGSVENLLKNLDRVKPDSLRRKIEAHLEDLRLSLDLARIRTDLPLEVDFKALRRRTPDLEGLRAFLEELEFGSLLHEFGLLGGEKPREEAPWPPPEGAFVGFLLSRKEPMWAELLALAAAAEGRVHRATSPVEALADLKEARGFLAKDLAVLALREGVALDPTDDPLLVAYLLDHANTNPERVARRYGGEFTEDAAERALLSERLFQTLFPRLSEKLLWLYQEVERPLSRVLAHMEARGVRLDVPLLEALSFELEKELERLEGEVFRLAGHPFNLNSRDQLEKVLFDELGLTPVTRTEKTGKRSTSAAALEALRGAHPIVELILQYRELSKLKSTYLDRLPRLVHPRTGRLHTRFNQTATATGRLSSSDPNLQNIPVRTPLGQHIRKAFVAEEGWLLLAADYSQIELRVLAHLSGDENLKRVFREGKDIHTETAAWMFGVDPALVDPKMRRAAKTVNFGVLYGMSAHRLSQELGIDYKEAEAFIERYFQSFPKVRAWIERTLEEGRTRGYVETLFGRRRYVPDLTSRVRSVREAAERMAWNMPVQGTAADLMKIAMVKLFPRLKPLGAHLLLQVHDELVLEVPEDRAEEAKALVKEVMENAYPLDVPLEVEVGVGRDWLEAKQD

SEQ ID NO: 545 - DNA, 2538 bp, synthetic construct
  misc_feature 1..2538: note = DNA Polymerase Variant
  source 1..2538: mol_type = other DNA
atgcaccatcatcatcatcatggcggtagcggcatgttaccgctgtttgatttggaagaaccaccaaaacgcgtgctgcttgttgacggccatcatctggcgtatcgtaccttctacgcactgagccttacgacctcacgtggtgagcctgtccagatggtgtatgggtttgctcgctccctgctgaaagccctgaaggaagatggtcaagccgtagtagtggttttcgatgcgaaagcaccgtcgtttcgtcacgaagcgtacgaggcctataaagctggccgcgcaccgaccccggaagactttccgcgtcagttagcgctcgtcaaacgcctcgtggatttgctgggattagttcgcttggaagctcctggctacgaggcggacgacgtgctcggtacactggccaagaaagcagaacgtgaaggcatggaggtctgcattcttaccggtgatcgcgatttcttccagctgctgtctgagaaagtgagcgttttgctgcccgatggcacgttagtaaccccgaaagatgtgcaagagaaatatggagttccgccagaacgttgggtggactttcgcgcactgactggtgatcgttcagacaacatcccgggcgttgccgggattggtgaaaagacggcgctgcgcctgctggcagaatggggctcggtggaaaatctgctcaagaaccttgatcgtgtgaaacctgatagcttacgccgcaagatcgaagcccacctggaagacttgcgtctgagtctggatcttgcccgtattcgcaccgatctgccgttggaagtagactttaaagctctgcgtcgtcgcacacccgatttagaggggttacgcgcgttcctcgaagaactggagctgggctccctgctgcatgaattcggtttgttgggcggagagaaaccgcgtgaagaagcaccatggccgccgcccgaaggtgcctttgtcggctttcttctgtcacgcaaagagccaatgtgggcggaactgttagctcttgcagccgccgcggaagggcgtgttcaccgcgcgacctctcctgtcgaggccctcgctgacctcaaagaagcacgtggtttcttggcgaaagatttagccgtgcttgcattacgcgaaggcgttgcgctcgatccgacggacgacccgcttttggtggcttatttgctcgatcatgcgaataccaacccggaacgtgtcgcccgtcgttacggcggcgagtttactgaagatgcggcagaacgcgcgttgcttagcgaacgcctcttccagacgttatttccacgtctttcggagaaattactctggctctatcaggaagtcgaacgtccattgagtcgcgtgcttgcccatatggaggctcgcggtgtgcgcttagatgttccgttgttagaagcactcagcttcgagttggagaaagaactggaacgtcttgaaggcgaagtctttcgtttagcggggcatcccttcaatctcaactctcgcgaccaattggagaaagtgctctttgatgaattaggtttaacccctgtcacgcgtacagagaagaccggcaaacgttccacttcggcagccgccttggaagcacttcgtggtgctcacccgatcgtcgagttgattttgcagtatcgcgagctcagcaaactcaaatcaacctatcttgataggttacctcgtcttgttcatccacgtacgggtcgtttacacacccgcttcaatcaaacggcaacagccaccgggcgcttgtcgtcgagtgacccgaacctccagaatattccagtgcgcacgccgctgggccaacacattcgtaaagcgtttgttgcggaagaaggttggttattacttgcggccgattactcccagatcgaacttcgtgtattggcgcatctctctggcgacgagaatcttaaacgcgtgtttcgcgaaggcaaggatattcacactgaaaccgcagcctggatgttcggggtggacccagccttagtggaccccaagatgcgtcgtgccgccaagaccgtcaactttggcgtactctatggtatgtcagcagcacgtcttagtcaggaattgggcattgactacaaagaagctgaagcgtttatcgagcgctatttccaatcctttccgaaagttcgcgcgtggattgaacgtacgctcgaagaaggtcgcactcgcggctatgtggaaacgttattcgggcgtcgtcgctacgttccagatcttacgtctcgtgtccgctcagtgcgcgaagctgctgagcgtatggcctggaatatgcctgttcagggaacagcggcggacctcatgaagatcgccatggtgaaattgtttccgcgcttgaaacccttaggagcccaccttcttttacaggtgcatgatgaattggtcttggaagtacccgaggatcgcgcagaagaagccaaagcactcgtgaaagaggttatggaaaacgcgtatccgttagatgttccgttggaggtcgaagtgggtgtaggccgtgattggcttgaagcgaaacaagactaatga

SEQ ID NO: 546 - protein, 844 aa, synthetic construct
  REGION 1..844: note = DNA Polymerase Variant
MHHHHHHGGSGMLPLFDLEEPPKRVLLVDGHHLAYRTFYALSLTTSRGEPVQMVYGFARSLLKALKEDGQAVVVVFDAKAPSFRHEAYEAYKAGRAPTPEDFPRQLALVKRLVDLLGLVRLEAPGYEADDVLGTLAKKAEREGMEVCILTGDRDFFQLLSEKVSVLLPDGTLVTPKDVQEKYGVPPERWVDFRALTGDRSDNIPGVAGIGEKTALRLLAEWGSVENLLKNLDRVKPDSLRRKIEAHLEDLRLSLDLARIRTDLPLEVDFKALRRRTPDLEGLRAFLEELELGSLLHEFGLLGGEKPREEAPWPPPEGAFVGFLLSRKEPMWAELLALAAAAEGRVHRATSPVEALADLKEARGFLAKDLAVLALREGVALDPTDDPLLVAYLLDHANTNPERVARRYGGEFTEDAAERALLSERLFQTLFPRLSEKLLWLYQEVERPLSRVLAHMEARGVRLDVPLLEALSFELEKELERLEGEVFRLAGHPFNLNSRDQLEKVLFDELGLTPVTRTEKTGKRSTSAAALEALRGAHPIVELILQYRELSKLKSTYLDRLPRLVHPRTGRLHTRFNQTATATGRLSSSDPNLQNIPVRTPLGQHIRKAFVAEEGWLLLAADYSQIELRVLAHLSGDENLKRVFREGKDIHTETAAWMFGVDPALVDPKMRRAAKTVNFGVLYGMSAARLSQELGIDYKEAEAFIERYFQSFPKVRAWIERTLEEGRTRGYVETLFGRRRYVPDLTSRVRSVREAAERMAWNMPVQGTAADLMKIAMVKLFPRLKPLGAHLLLQVHDELVLEVPEDRAEEAKALVKEVMENAYPLDVPLEVEVGVGRDWLEAKQD

SEQ ID NO: 547 - DNA, 2538 bp, synthetic construct
  misc_feature 1..2538: note = DNA Polymerase Variant
  source 1..2538: mol_type = other DNA
atgcaccatcatcatcatcatggcggtagcggcatgttaccgctgtttgatttggaagaaccaccaaaacgcgtgctgcttgttgacggccatcatctggcgtatcgtaccttctacgcactgagccttacgacctcacgtggtgagcctgtccagatggtgtatgggtttgctcgctccctgctgaaagccctgaaggaagatggtcaagccgtagtagtggttttcgatgcgaaagcaccgtcgtttcgtcacgaagcgtacgaggcctataaagctggccgcgcaccgaccccggaagactttccgcgtcagttagcgctcgtcaaacgcctcgtggatttgctgggattagttcgcttggaagctcctggctacgaggcggacgacgtgctcggtacactggccaagaaagcagaacgtgaaggcatggaggtctgcattcttaccggtgatcgcgatttcttccagctgctgtctgagaaagtgagcgttttgctgcccgatggcacgttagtaaccccgaaagatgtccaagagaaatatggagttccgccagaacgttgggtggactttcgcgcactgactggtgatcgttcagacaacatcccgggcgttgccgggattggtgaaaagacggcgctgcgcctgctggcagaatggggctcggtggaaaatctgctcaagaaccttgatcgtgtgaaacctgatagcttacgccgcaagatcgaagcccacctggaagacttgcgtctgagtctggatcttgtacgtattcgcaccgatctgccgttggaagtagactttaaagctctgcgtcgtcgcacacccgatttagaggggttacgcgcgttcctcgaagaactggagtttggctccctgctgcatgaattcggtttgttgggcggagagaaaccgcgtgaagaagcaccatggccgccgcccgaaggtgcctttgtcggctttcttctgtcacgcaaagagccaatgtgggcggaactgttagctcttgcagccgccgcggaagggcgtgttcaccgcgcgacctctcctgtcgaggccctcgctgacctcaaagaagcacgtggtttcttggcgaaagatttagccgtgcttgcattacgcgaaggcgttgcgctcgatccgacggacgacccgcttttggtggcttatttgctcgatcatgcgaataccaacccggaacgtgtcgcccgtcgttacggcggcgagtttactgaagatgcggcagaacgcgcgttgcttagcgaacgcctcttccagacgttatttccacgtctttcggagaaattactctggctctatcaggaagtcgaacgtccactgagtcgcgtgcttgcccatatggaggctcgcggtgtgcgcttagatgttccgttgttagaagcactcagcttcgagttggagaaagaactggaacgtcttgaaggcgaagtctttcgtttagcggggcatcccttcaatctcaactctcgcgaccaattggagaaagtgctctttgatgaattaggtttaacccctgtcacgcgtacagagaagaccggcaaacgttccacttcggcagccgccttggaagcacttcgtggtgctcacccgatcgtcgagttgattttgcagtatcgcgagctcagcaaactcaaatcaacctatcttgataggttacctcgtcttgttcatccacgtacgggtcgtttacacacccgcttcaatcaaacggcgacagccaccgggcgcttgtcgtcgagtgacccgaacctccagaatattccagtgcgcacgccgctgggccaacacattcgtaaagcgtttgttgcggaagaaggttggttattacttgcggccgattactcccagatcgaacttcgtgtattggcgcatctctctggcgacgagaatcttaaacgcgtgtttcgcgaaggcaaggatattcacactgaaaccgcagcctggatgttcggggtggacccagccttagtggaccccaagatgcgtcgtgccgccaagaccgtcctgtttggcgtactctatggtatgtcagcacatcgtcttagtcaggaattgggcattgactacaaagaagctgaagcgtttatcgagcgctatttccaatcctttccgaaagttcgcgcgtggattgaacgtaccctcgaagaaggtcgcactcgcggctatgtggaaacgttattcgggcgtcgtcgctacgttccagatcttgcatctcgtgtccgctcagtgcgcgaagctgctgagcgtatggcctggaatatgcctgttcagggaacagcggcggacctcatgaagatcgccatggtgaaattgtttccgcgcttgaaacccttaggagcccaccttcttttacaggtgcatgatgaattggtcttggaagtacccgaggatcgcgcagaagaagccaaagcactcgtgaaagaggttatggaaaacgcgtatccgttagatgttccgttggaggtcgaagtgggtgtaggccgtgattggcttgaagcgaaacaagactaatga

SEQ ID NO: 548 - protein, 844 aa, synthetic construct
  REGION 1..844: note = DNA Polymerase Variant
MHHHHHHGGSGMLPLFDLEEPPKRVLLVDGHHLAYRTFYALSLTTSRGEPVQMVYGFARSLLKALKEDGQAVVVVFDAKAPSFRHEAYEAYKAGRAPTPEDFPRQLALVKRLVDLLGLVRLEAPGYEADDVLGTLAKKAEREGMEVCILTGDRDFFQLLSEKVSVLLPDGTLVTPKDVQEKYGVPPERWVDFRALTGDRSDNIPGVAGIGEKTALRLLAEWGSVENLLKNLDRVKPDSLRRKIEAHLEDLRLSLDLVRIRTDLPLEVDFKALRRRTPDLEGLRAFLEELEFGSLLHEFGLLGGEKPREEAPWPPPEGAFVGFLLSRKEPMWAELLALAAAAEGRVHRATSPVEALADLKEARGFLAKDLAVLALREGVALDPTDDPLLVAYLLDHANTNPERVARRYGGEFTEDAAERALLSERLFQTLFPRLSEKLLWLYQEVERPLSRVLAHMEARGVRLDVPLLEALSFELEKELERLEGEVFRLAGHPFNLNSRDQLEKVLFDELGLTPVTRTEKTGKRSTSAAALEALRGAHPIVELILQYRELSKLKSTYLDRLPRLVHPRTGRLHTRFNQTATATGRLSSSDPNLQNIPVRTPLGQHIRKAFVAEEGWLLLAADYSQIELRVLAHLSGDENLKRVFREGKDIHTETAAWMFGVDPALVDPKMRRAAKTVLFGVLYGMSAHRLSQELGIDYKEAEAFIERYFQSFPKVRAWIERTLEEGRTRGYVETLFGRRRYVPDLASRVRSVREAAERMAWNMPVQGTAADLMKIAMVKLFPRLKPLGAHLLLQVHDELVLEVPEDRAEEAKALVKEVMENAYPLDVPLEVEVGVGRDWLEAKQD

SEQ ID NO: 549 - DNA, 2538 bp, synthetic construct
  misc_feature 1..2538: note = DNA Polymerase Variant
  source 1..2538: mol_type = other DNA
atgcaccatcatcatcatcatggcggtagcggcatgttaccgctgtttgatttggaagaaccaccaaaacgcgtgctgcttgttgacggccatcatctggcgtatcgtaccttctacgcactgagccttacgacctcacgtggtgagcctgtccagatggtgtatgggtttgctcgctccctgctgaaagccctgaaggaagatggtcaagccgtagtagtggttttcgatgcgaaagcaccgtcgtttcgtcacgaagcgtacgaggcctataaagctggccgcgcaccgaccccggaagactttccgcgtcagttagcgctcgtcaaacgcctcgtggatttgctgggattagttcgcttggaagctcctggctacgaggcggacgacgtgctcggtacactggccaagaaagcagaacgtgaaggcatggaggtctgcattcttaccggtgatcgcgatttcttccagctgctgtctgagaaagtgagcgttttgctgcccgatggcacgttagtaaccccgaaagatgtccaagagaaatatggagttccgccagaacgttgggtggactttcgcgcactgactggtgatcgttcagacaacatcccgggcgttgccgggattggtgaaaagacggcgctgcgcctgctggcagaatggggctcggtggaaaatctgctcaagaaccttgatcgtgtgaaacctgatagcttacgccgcaagatcgaagcccacctggaagacttgcgtctgagtctggatcttgcgcgtattcgcaccgatctgccgttggaagtagactttaaagctctgcgtcgtcgcacacccgatttagaggggttacgcgcgttcctcgaagaactggagtttggctccctgctgcatgaattcggtttgttgggcactgagaaaccgcgtgaagaagcaccatggccgccgcccgaaggtgcctttgtcggctttcttctgtcacgcaaagagccaatgtgggcggaactgttagctcttgtagccgccgcggaagggcgtgttcaccgcgcgacctctcctgtcgaggccctcgctgacctcaaagaagcacgtggtttcttggcgaaagatttagccgtgcttgcattacgcgaaggcgttgcgctcgatccgacggacgacccgcttttggtggcttatttgctcgatcctgcgaataccaacccggaacgtgtcgcccgtcgttacggcggcgagtttactgaagatgcggcagaacgcgcgttgcttagcgaacgcctcttccagacgttatttccacgtctttcggagaaattactctggctctatcaggaagtcgaacgtccattgagtcgcgtgcttgcccatatggaggctcgcggtgtgcgcttagatgttccgttgttagaagcactcagcttcgagttggagaaagaactggaacgtcttgaaggcgaagtctttcgtttagcggggcatcccttcaatctcaactctcgcgaccaattggagaaagtgctctttgatgaattaggtttaacccctgtcacgcgtacagagaagaccggcaaacgttccacttcggcagccgccttggaagcacttcgtggtgctcacccgatcgtcgagttgattttgcagtatcgcgagctcagcaaactcaaatcaacctatcttgataggttacctcgtcttgttcatccacgtacgggtcgtttacacacccgcttcaatcaaacggcgacagccaccgggcgcttgtcgtcgagtgacccgaacctccagaatattccagtgcgcacgccgctgggccaacacattcgtaaagcgtttgttgcggaagaaggttggttattacttgcggccgattactcccagatcgaacttcgtgtattggcgcatctctctggcgacgagaatcttaaacgcgtgtttcgcgaaggcaaggatattcacactgaaaccgcagcctggatgttcggggtggacccagccttagtggaccccaagatgcgtcgtgccgccaagaccgtcaactttggcgtactctatggtatgtcagcacatcgtcttagtcaggaattgggcattgactacaaagaagctgaagcgtttatcgagcgctatttccaatcctttccgaaagttcgcgcgtggattgaacgtaccctcgaagaaggtcgcactcgcggctatgtggaaacgttattcgggcgtcgtcgctacgttccagatcttgcatctcgtgtccgctcagtgcgcgaagctgctgagcgtatggcctggaatatgcctgttcagggaacagcggcggacctcatgaagatcgccatggtgaaattgtttccgcgcttgaaacccttaggagcccaccttcttttacaggtgcatgatgaattggtcttggaagtacccgaggatcgcgcagaagaagccaaagcactcgtgaaagaggttatggaaaacgcgtatccgttagatgttccgttggaggtcgaagtgggtgtaggccgtgattggcttgaagcgaaacaagactaatga

SEQ ID NO: 550 - protein, 844 aa, synthetic construct
  REGION 1..844: note = DNA Polymerase Variant
MHHHHHHGGSGMLPLFDLEEPPKRVLLVDGHHLAYRTFYALSLTTSRGEPVQMVYGFARSLLKALKEDGQAVVVVFDAKAPSFRHEAYEAYKAGRAPTPEDFPRQLALVKRLVDLLGLVRLEAPGYEADDVLGTLAKKAEREGMEVCILTGDRDFFQLLSEKVSVLLPDGTLVTPKDVQEKYGVPPERWVDFRALTGDRSDNIPGVAGIGEKTALRLLAEWGSVENLLKNLDRVKPDSLRRKIEAHLEDLRLSLDLARIRTDLPLEVDFKALRRRTPDLEGLRAFLEELEFGSLLHEFGLLGTEKPREEAPWPPPEGAFVGFLLSRKEPMWAELLALVAAAEGRVHRATSPVEALADLKEARGFLAKDLAVLALREGVALDPTDDPLLVAYLLDPANTNPERVARRYGGEFTEDAAERALLSERLFQTLFPRLSEKLLWLYQEVERPLSRVLAHMEARGVRLDVPLLEALSFELEKELERLEGEVFRLAGHPFNLNSRDQLEKVLFDELGLTPVTRTEKTGKRSTSAAALEALRGAHPIVELILQYRELSKLKSTYLDRLPRLVHPRTGRLHTRFNQTATATGRLSSSDPNLQNIPVRTPLGQHIRKAFVAEEGWLLLAADYSQIELRVLAHLSGDENLKRVFREGKDIHTETAAWMFGVDPALVDPKMRRAAKTVNFGVLYGMSAHRLSQELGIDYKEAEAFIERYFQSFPKVRAWIERTLEEGRTRGYVETLFGRRRYVPDLASRVRSVREAAERMAWNMPVQGTAADLMKIAMVKLFPRLKPLGAHLLLQVHDELVLEVPEDRAEEAKALVKEVMENAYPLDVPLEVEVGVGRDWLEAKQD

SEQ ID NO: 551 - DNA, 2538 bp, synthetic construct
  misc_feature 1..2538: note = DNA Polymerase Variant
  source 1..2538: mol_type = other DNA
atgcaccatcatcatcatcatggcggtagcggcatgttaccgctgtttgatttggaagaaccaccaaaacgcgtgctgcttgttgacggccatcatctggcgtatcgtaccttctacgcactgagccttacgacctcacgtggtgagcctgtccagatggtgtatgggtttgctcgctccctgctgaaagccctgaaggaagatggtcaagccgtagtagtggttttcgatgcgaaagcaccgtcgtttcgtcacgaagcgtacgaggcctataaagctggccgcgcaccgaccccggaagactttccgcgtcagttagcgctcgtcaaacgcctcgtggatttgctgggattagttcgcttggaagctcctggctacgaggcggacgacgtgctcggtacactggccaagaaagcagaacgtgaaggcatggaggtctgcattcttaccggtgatcgcgatttcttccagctgctgtctgagaaagtgagcgttttgctgcccgatggcacgttagtaaccccgaaagatgtccaagagaaatatggagttccgccagaacgttgggtggactttcgcgcactgactggtgatcgttcagacaacatcccgggcgttgccgggattggtgaaaagacggcgctgcgcctgctggcagaatggggctcggtggaaaatctgctcaagaaccttgatcgtgtgaaacctgatagcttacgccgcaagatcgaagcccacctggaagacttgcgtctgagtctggatcttgcacgtattcgcaccgatctgccgttggaagtagactttaaagctctgcgtcgtcgcacacccgatttagaggggttacgcgcgttcctcgaagaactggagtttggctccctgctgcatgaattcggtttgttgggcggagagaaaccgcgtgaagaagcaccatggccgccgcccgaaggtgcctttgtcggctttcttctgtcacgcaaagagccaatgtgggcggaactgttagctcttgcagccgccgcggaagggcgtgttcaccgcgcgacctctcctgtcgaggccctcgctgacctcaaagaagcacgtggtttcttggcgaaagatttagccgtgcttgcattacgcgaaggcgttgcgctcgatccgacggacgacccgcttttggtggcttatttgctcgatcctgcgaataccaacccggaacgtgtcgcccgtcgttacggcggcgagtttactgaagatgcggcagaacgcgcgttgcttagcgaacgcctcttccagacgttatttccacgtctttcggagaaattactctggctctatcaggaagtcgaacgtccattgagtcgcgtgcttgcccatatggaggctcgcggtgtgcgcttagatgttccgttgttagaagcactcagcttcgaggccgcgaaagaactggaacgtcttgaaggcgaagtctttcgtttagcggggcatcccttcaatctcaactctcgcgaccaattggagaaagtgctctttgatgaattaggtttaacccctgtcacgcgtacagagaagaccggcaaacgttccacttcggcagccgccttggaagcacttcgtggtgctcacccgatcgtcgagttgattttgcagtatcgcgagctcagcaaactcaaatcaacctatcttgataggttacctcgtcttgttcatccacgtacgggtcgtttacacacccgcttcaatcaaacggcgacagccaccgggcgcttgtcgtcgagtgacccgaacctccagaatattccagtgcgcacgccgctgggccaacacattcgtaaagcgtttgttgcggaagaaggttggttattacttgcggccgattactcccagatcgaacttcgtgtattggcgcatctctctggcgacgagaatcttaaacgcgtgtttcgcgaaggcaaggatattcacactgaaaccgcagcctggatgttcggggtggacccagccttagtggaccccaagatgcgtcgtgccgccaagaccgtcaactttggcgtactctatggtatgtcagcacatcgtcttagtcaggaattgggcattgactacaaagaagctgaagcgtttatcgagcgctatttccaatcctttccgaaagttcgcgcgtggattgaacgtaccctcgaagaaggtcgcactcgcggctatgtggaaacgttattcgggcgtcgtcgctacgttccagatcttgcatctcgtgtccgctcagtgcgcgaagctgctgagcgtatggcctggaatatgcctgttcagggaacagcggcggacctcatgaagatcgccatggtgaaattgtttccgcgcttgaaacccttaggagcccaccttcttctgcaggtgcatgatgaattggtcttggaagtacccgaggatcgcgcagaagaagccaaagcactcgtgaaagaggttatggaaaacgcgtatccgttagatgttccgttggaggtcgaagtgggtgtaggccgtgattggcttgaagcgaaacaagactaatga

SEQ ID NO: 552 - protein, 844 aa, synthetic construct
  REGION 1..844: note = DNA Polymerase Variant
MHHHHHHGGSGMLPLFDLEEPPKRVLLVDGHHLAYRTFYALSLTTSRGEPVQMVYGFARSLLKALKEDGQAVVVVFDAKAPSFRHEAYEAYKAGRAPTPEDFPRQLALVKRLVDLLGLVRLEAPGYEADDVLGTLAKKAEREGMEVCILTGDRDFFQLLSEKVSVLLPDGTLVTPKDVQEKYGVPPERWVDFRALTGDRSDNIPGVAGIGEKTALRLLAEWGSVENLLKNLDRVKPDSLRRKIEAHLEDLRLSLDLARIRTDLPLEVDFKALRRRTPDLEGLRAFLEELEFGSLLHEFGLLGGEKPREEAPWPPPEGAFVGFLLSRKEPMWAELLALAAAAEGRVHRATSPVEALADLKEARGFLAKDLAVLALREGVALDPTDDPLLVAYLLDPANTNPERVARRYGGEFTEDAAERALLSERLFQTLFPRLSEKLLWLYQEVERPLSRVLAHMEARGVRLDVPLLEALSFEAAKELERLEGEVFRLAGHPFNLNSRDQLEKVLFDELGLTPVTRTEKTGKRSTSAAALEALRGAHPIVELILQYRELSKLKSTYLDRLPRLVHPRTGRLHTRFNQTATATGRLSSSDPNLQNIPVRTPLGQHIRKAFVAEEGWLLLAADYSQIELRVLAHLSGDENLKRVFREGKDIHTETAAWMFGVDPALVDPKMRRAAKTVNFGVLYGMSAHRLSQELGIDYKEAEAFIERYFQSFPKVRAWIERTLEEGRTRGYVETLFGRRRYVPDLASRVRSVREAAERMAWNMPVQGTAADLMKIAMVKLFPRLKPLGAHLLLQVHDELVLEVPEDRAEEAKALVKEVMENAYPLDVPLEVEVGVGRDWLEAKQD

SEQ ID NO: 553 - DNA, 2538 bp, synthetic construct
  misc_feature 1..2538: note = DNA Polymerase Variant
  source 1..2538: mol_type = other DNA
atgcaccatcatcatcatcatggcggtagcggcatgttaccgctgtttgatttggaagaaccaccaaaacgcgtgctgcttgttgacggccatcatctggcgtatcgtaccttctacgcactgagccttacgacctcacgtggtgagcctgtccagatggtgtatgggtttgctcgctccctgctgaaagccctgaaggaagatggtcaagccgtagtagtggttttcgatgcgagggcaccgtcgtttcgtcacgaagcgtacgaggcctataaagctggccgcgcaccgaccccggaagactttccgcgtcagttagcgctcgtcaaacgcctcgtggatttgctgggattagttcgcttggaagctcctggctacgaggcggacgacgtgctcggtacactggccaagaaagcagaacgtgaaggcatggaggtctgcattcttaccggtgatcgcgatttcttccagctgctgtctgagaaagtgagcgttttgctgcccgatggcacgttagtaaccccgaaagatgtccaagagaaatatggagttccgccagaacgttgggtggactttcgcgcactgactggtgatcgttcagacaacatcccgggcgttgccgggattggtgaaaagacggcgctgcgcctgctggcagaatggggctcggtggaaaatctgctcaagaaccttgatcgtgtgaaacctgatagcttacgccgcaagatcgaagcccacctggaagacttgcgtctgagtctggatcttgcgcgtattcgcaccgatctgccgttggaagtagactttaaagctctgcgtcgtcgcacacccgatttagaggggttacgcgcgttcctcgaagaactggagtttggctccctgctgcatgaattcggtttgttgggcggagagaaaccgcgtgaagaagcaccatggccgccgcccgaaggtgcctttgtcggctttcttctgtcacgcaaagagccaatgtgggcggaactgttagctcttgcagccgccgcggaagggcgtgttcaccgcgcgacctctcctgtcgaggccctcgctgacctcaaagaagcacgtggtttcttggcgaaagatttagccgtgcttgcattacgcgaaggcgttgcgctcgatccgacggacgacccgcttttggtggcttatttgctcgatcctgcgaataccaacccggaacgtgtcgcccgtcgttacggcggcgagtttactgaagatgcggcagaacgcgcgttgcttagcgaacgcctcttccagacgttatttccacgtctttcggagaaattactctggctctatcaggaagtcgaacgtccattgagtcgcgtgcttgcccatatggaggctcgcggtgtgcgcttagatgttccgttgttagaagcactcagcttcgagttggagaaagaactggaacgtcttgaaggcgaagtctttcgtttagcggggcatcccttcaatctcaactctcgcgaccaattggagaaagtgctctttgatgaattaggtttaacccctgtcacgcgtacagagaagaccggcaaacgttccacttcggcagccgccttggaagcacttcgtggtgctcacccgatcgtcgagttgattttgcagtatcgcgagctcagcaaactcaaatcaacctatcttgataggttacctcgtcttgttcatccacgtacgggtcgtttacacacccgcttcaatcaaacggcgacagccaccgggcgcttgtcgtcgagtgacccgaacctccagaatattccagtgcgcacgccgctgggccaacacattcgtaaagcgtttgttgcggaagaaggttggttattacttgcggccgattactcccagatcgaacttcgtgtattggcgcatctctctggcgacgagaatcttaaacgcgtgtttcgcgaaggcaaggatattcacactgaaaccgcagcctggatgttcggggtggacccagccttagtggaccccaagatgcgtcgtgccgccaagaccgtcaactttggcgtactctatggtatgtcagcacatcgtcttagtcaggaattgggcattgactacaaagaagctgaagcgtttatcgagcgctatttccaatcctttccgaaagttcgcgcgtggattgaacgtaccctcgaagaaggtcgcactcgcggctatgtggaaacgttattcgggcgtcgtcgctacgttccagatcttgcatctcgtgtccgctcagtgcgcgaagctgctgagcgtatggcctggaatatgcctgttcagggaacagcggcggacctcatgaagatcgccatggtgaaattgtttccgcgcttgaaacccttaggagcccaccttcttttacaggtgcatgatgaattggtcttggaagtacccgaggatcgcgcagaagaagccaaagcactcgtgaaagaggttatggaaaacgcgtatccgttagatgttccgttggaggtcgaagtgggtgtaggccgtgattggcttgaagcgaaacaagactaatga

SEQ ID NO: 554 - protein, 844 aa, synthetic construct
  REGION 1..844: note = DNA Polymerase Variant
MHHHHHHGGSGMLPLFDLEEPPKRVLLVDGHHLAYRTFYALSLTTSRGEPVQMVYGFARSLLKALKEDGQAVVVVFDARAPSFRHEAYEAYKAGRAPTPEDFPRQLALVKRLVDLLGLVRLEAPGYEADDVLGTLAKKAEREGMEVCILTGDRDFFQLLSEKVSVLLPDGTLVTPKDVQEKYGVPPERWVDFRALTGDRSDNIPGVAGIGEKTALRLLAEWGSVENLLKNLDRVKPDSLRRKIEAHLEDLRLSLDLARIRTDLPLEVDFKALRRRTPDLEGLRAFLEELEFGSLLHEFGLLGGEKPREEAPWPPPEGAFVGFLLSRKEPMWAELLALAAAAEGRVHRATSPVEALADLKEARGFLAKDLAVLALREGVALDPTDDPLLVAYLLDPANTNPERVARRYGGEFTEDAAERALLSERLFQTLFPRLSEKLLWLYQEVERPLSRVLAHMEARGVRLDVPLLEALSFELEKELERLEGEVFRLAGHPFNLNSRDQLEKVLFDELGLTPVTRTEKTGKRSTSAAALEALRGAHPIVELILQYRELSKLKSTYLDRLPRLVHPRTGRLHTRFNQTATATGRLSSSDPNLQNIPVRTPLGQHIRKAFVAEEGWLLLAADYSQIELRVLAHLSGDENLKRVFREGKDIHTETAAWMFGVDPALVDPKMRRAAKTVNFGVLYGMSAHRLSQELGIDYKEAEAFIERYFQSFPKVRAWIERTLEEGRTRGYVETLFGRRRYVPDLASRVRSVREAAERMAWNMPVQGTAADLMKIAMVKLFPRLKPLGAHLLLQVHDELVLEVPEDRAEEAKALVKEVMENAYPLDVPLEVEVGVGRDWLEAKQD

SEQ ID NO: 555 - DNA, 2538 bp, synthetic construct
  misc_feature 1..2538: note = DNA Polymerase Variant
  source 1..2538: mol_type = other DNA
atgcaccatcatcatcatcatggcggtagcggcatgttaccgctgtttgatttggaagaaccaccaaaacgcgtgctgcttgttgacggccatcatctggcgtatcgtaccttctacgcactgagccttacgacctcacgtggtgagcctgtccagatggtgtatgggtttgctcgctccctgctgaaagccctgaaggaagatggtcaagccgtagtagtggttttcgatgcgaaagcaccgtcgtttcgtcacgaagcgtacgaggcctataaagctggccgcgcaccgaccccggaagactttccgcgtcagttagcgctcgtcaaacgcctcgtggatttgctgggattagttcgcttggaagctcctggctacgaggcggacgacgtgctcggtacactggccaagaaagcagaacgtgaaggcatggaggtctgcattcttaccggtgatcgcgatttcttccagctgctgtctgagaaagtgagcgttttgctgcccgatggcacgttagtaaccccgaaagatgtccaagagaaatatggagttccgccagaacgttgggtggactttcgcgcactgactggtgatcgttcagacaacatcccgggcgttgccgggattggtgaaaagacggcgctgcgcctgctggcagaatggggctcggtggaaaatctgctcaagaaccttgatcgtgtgaaacctgatagcttacgccgcaagatcgaagcccacctggaagacttgcgtctgagtctggatcttgcgcgtattcgcaccgatctgccgttggaagtagactttaaagctctgcgtcgtcgcacacccgatttagaggggttacgcgcgttcctcgaagaactggagtttggctccctgctgcatgaattcggtttgttgggcggagagaaaccgcgtgaagaagcaccatggccgccgcccgaaggtgcctttgtcggctttcttctgtcacgcaaagagccaatgtgggcggaactgttagctcttgcagccgccgcggaagggcgtgttcaccgcgcgacctctcctgtcgaggccctcgctgacctcggggaagcacgtggtttcttggcgaaagatttagccgtgcttgcattacgcgaaggcgttgcgctcgatccgacggacgacccgcttttggtggcttatttgctcgatcctgcgaataccaacccggaacgtgtcgcccgtcgttacggcggcgagtttactgaagatgcggcagaacgcgcgttgcttagcgaacgcctcttccagacgttatttccacgtctttcggagaaattactctggctctatcaggaagtcgaacgtccattgagtcgcgtgcttgcccatatggaggctcgcggtgtgcgcttagatgttccgttgttagaagcactcagcttcgagttggagaaagaactggaacgtcttgaaggcgaagtctttcgtttagcggggcatcccttcaatctcaactctcgcgaccaattggagaaagtgctctttgatgaattaggtttaacccctgtcacgcgtacagagaagaccggcaaacgttccacttcggcagccgccttggaagcacttcgtggtgctcacccgatcgtcgagttgattttgcagtatcgcgagctcagcaaactcaaatcaacctatcttgataggttacctcgtcttgttcatccacgtacgggtcgtttacacacccgcttcaatcaaacggcgacagccaccgggcgcttgtcgtcgagtgacccgaacctccagaatattccagtgcgcacgccgctgggccaacacattcgtaaagcgtttgttgcggaagaaggttggttattacttgcggccgattactcccagatcgaacttcgtgtattggcgcatctctctggcgacgagaatcttaaacgcgtgtttcgcgaaggcaaggatattcacactgaaaccgcagcctggatgttcggggtggacccagccttagtggaccccaagatgcgtcgtgccgccaagaccgtcaactttggcgtactctatggtatgtcagcacatcgtcttagtcaggaattgggcattgactacaaagaagctgaagcgtttatcgagcgctatttccaatcctttccgaaagttcgcgcgtggattgaacgtaccctcgaagaaggtcgcactcgcggctatgtggaaacgttattcgggcgtcgtcgctacgttccagatcttgcatctcgtgtccgctcagtgcgcgaagctgctgagcgtatggcctggaatatgcctgttcagggaacagcggcggacctcatgaagatcgccatggtgaaattgtttccgcgcttgaaacccttaggagcccaccttcttttacaggtgcatgatgaattggtcttggaagtacccgaggatcgcgcagaagaagccaaagcactcgtgaaagaggttatggaaaacgcgtatccgttagatgttccgttggaggtcgaagtgggtgtaggccgtgattggcttgaagcgaaacaagactaatga

SEQ ID NO: 556 - protein, 844 aa, synthetic construct
  REGION 1..844: note = DNA Polymerase Variant
MHHHHHHGGSGMLPLFDLEEPPKRVLLVDGHHLAYRTFYALSLTTSRGEPVQMVYGFARSLLKALKEDGQAVVVVFDAKAPSFRHEAYEAYKAGRAPTPEDFPRQLALVKRLVDLLGLVRLEAPGYEADDVLGTLAKKAEREGMEVCILTGDRDFFQLLSEKVSVLLPDGTLVTPKDVQEKYGVPPERWVDFRALTGDRSDNIPGVAGIGEKTALRLLAEWGSVENLLKNLDRVKPDSLRRKIEAHLEDLRLSLDLARIRTDLPLEVDFKALRRRTPDLEGLRAFLEELEFGSLLHEFGLLGGEKPREEAPWPPPEGAFVGFLLSRKEPMWAELLALAAAAEGRVHRATSPVEALADLGEARGFLAKDLAVLALREGVALDPTDDPLLVAYLLDPANTNPERVARRYGGEFTEDAAERALLSERLFQTLFPRLSEKLLWLYQEVERPLSRVLAHMEARGVRLDVPLLEALSFELEKELERLEGEVFRLAGHPFNLNSRDQLEKVLFDELGLTPVTRTEKTGKRSTSAAALEALRGAHPIVELILQYRELSKLKSTYLDRLPRLVHPRTGRLHTRFNQTATATGRLSSSDPNLQNIPVRTPLGQHIRKAFVAEEGWLLLAADYSQIELRVLAHLSGDENLKRVFREGKDIHTETAAWMFGVDPALVDPKMRRAAKTVNFGVLYGMSAHRLSQELGIDYKEAEAFIERYFQSFPKVRAWIERTLEEGRTRGYVETLFGRRRYVPDLASRVRSVREAAERMAWNMPVQGTAADLMKIAMVKLFPRLKPLGAHLLLQVHDELVLEVPEDRAEEAKALVKEVMENAYPLDVPLEVEVGVGRDWLEAKQD

SEQ ID NO: 557 - DNA, 2538 bp, synthetic construct
  misc_feature 1..2538: note = DNA Polymerase Variant
  source 1..2538: mol_type = other DNA
atgcaccatcatcatcatcatggcggtagcggcatgttaccgctgtttgatttggaagaaccaccaaaacgcgtgctgcttgttgacggccatcatctggcgtatcgtaccttctacgcactgagccttacgacctcacgtggtgagcctgtccagatggtgtatgggtttgctcgctccctgctgaaagccctgaaggaagatggtcaagccgtagtagtggttttcgatgcgactgcaccgtcgtttcgtcacgaagcgtacgaggcctataaagctggccgcgcaccgaccccggaagactttccgcgtcagttagcgctcgtcaaacgcctcgtggatttgctgggattagttcgcttggaagctcctggctacgaggcggacgacgtgctcggtacactggccaagaaagcagaacgtgaaggcatggaggtctgcattcttaccggtgatcgcgatttcttccagctgctgtctgagaaagtgagcgttttgctgcccgatggcacgttagtaaccccgaaagatgtccaagagaaatatggagttccgccagaacgttgggtggactttcgcgcactgactggtgatcgttcagacaacatcccgggcgttgccgggattggtgaaaagacggcgctgcgcctgctggcagaatggggctcggtggaaaatctgctcaagaaccttgatcgtgtgaaacctgatagcttacgccgcaagatcgaagcccacctggaagacttgcgtctgagtctggatcttgcgcgtattcgcaccgatctgccgttggaagtagactttaaagctctgcgtcgtcgcacacccgatttagaggggttacgcgcgttcctcgaagaactggagtttggctccctgctgcatgaattcggtttgttgggcggagagaaaccgcgtgaagaagcaccatggccgccgcccgaaggtgcctttgtcggctttcttctgtcacgcaaagagccaatgtgggcggaactgttagctcttgcagccgccgcggaagggcgtgttcaccgcgcgacctctcctgtcgaggccctcgctgacctcaaagaagcacgtggtttcttggcgaaagatttagccgtgcttgcattacgcgaaggcgttgcgctcgatccgacggacgacccgcttttggtggcttatttgctcgatcctgcgaataccaacccggaacgtgtcgcccgtcgttacggcggcgagtttactgaagatgcggcagaacgcgcgttgcttagcgaacgcctcttccagacgttatttccacgtctttcggagaaattactctggctctatcaggaagtcgaacgtccattgagtcgcgtgcttgcccatatggaggctcgcggtgtgcgcttagatgttccgttgttagaagcactcagcttcgagttggagaaagaactggaacgtcttgaaggcgaagtctttcgtttagcggggcatcccttcaatctcaactctcgcgaccaattggagaaagtgctctttgatgaattaggtttaacccctgtcacgcgtacagagaagaccggcaaacgttccacttcggcagccgccttggaagcacttcgtggtgctcacccgatcgtcgagttgattttgcagtatcgcgagctcagcaaactcaaatcaacctatcttgataggttacctcgtcttgttcatccacgtacgggtcgtttacacacccgcttcaatcaaacggcgacagccaccgggcgcttgtcgtcgagtgacccgaacctccagaatattccagtgcgcacgccgctgggccaacacattcgtaaagcgtttgttgcggaagaaggttggttattacttgcggccgattactcccagatcgaacttcgtgtattggcgcatctctctggcgacgagaatcttaaacgcgtgtttcgcgaaggcaaggatattcacactgaaaccgcagcctggatgttcggggtggacccagccttagtggaccccaagatgcgtcgtgccgccaagaccgtcaactttggcgtactctatggtatgtcagcacatcgtcttagtcaggaattgggcattgactacaaagaagctgaagcgtttatcgagcgctatttccaatcctttccgaaagttcgcgcgtggattgaacgtaccctcgaagaaggtcgcactcgcggctatgtggaaacgttattcgggcgtcgtcgctacgttccagatcttgcatctcgtgtccgctcagtgcgcgaagctgctgagcgtatggcctggaatatgcctgttcagggaacagcggcggacctcatgaagatcgccatggtgaaattgtttccgcgcttgaaacccttaggagcccaccttcttttacaggtgcatgatgaattggtcttggaagtacccgaggatcgcgcagaagaagccaaagcactcgtgaaagaggttatggaaaacgcgtatccgttagatgttccgttggaggtcgaagtgggtgtaggccgtgattggcttgaagcgaaacaagactaatga

SEQ ID NO: 558 - protein, 844 aa, synthetic construct
  REGION 1..844: note = DNA Polymerase Variant
MHHHHHHGGSGMLPLFDLEEPPKRVLLVDGHHLAYRTFYALSLTTSRGEPVQMVYGFARSLLKALKEDGQAVVVVFDATAPSFRHEAYEAYKAGRAPTPEDFPRQLALVKRLVDLLGLVRLEAPGYEADDVLGTLAKKAEREGMEVCILTGDRDFFQLLSEKVSVLLPDGTLVTPKDVQEKYGVPPERWVDFRALTGDRSDNIPGVAGIGEKTALRLLAEWGSVENLLKNLDRVKPDSLRRKIEAHLEDLRLSLDLARIRTDLPLEVDFKALRRRTPDLEGLRAFLEELEFGSLLHEFGLLGGEKPREEAPWPPPEGAFVGFLLSRKEPMWAELLALAAAAEGRVHRATSPVEALADLKEARGFLAKDLAVLALREGVALDPTDDPLLVAYLLDPANTNPERVARRYGGEFTEDAAERALLSERLFQTLFPRLSEKLLWLYQEVERPLSRVLAHMEARGVRLDVPLLEALSFELEKELERLEGEVFRLAGHPFNLNSRDQLEKVLFDELGLTPVTRTEKTGKRSTSAAALEALRGAHPIVELILQYRELSKLKSTYLDRLPRLVHPRTGRLHTRFNQTATATGRLSSSDPNLQNIPVRTPLGQHIRKAFVAEEGWLLLAADYSQIELRVLAHLSGDENLKRVFREGKDIHTETAAWMFGVDPALVDPKMRRAAKTVNFGVLYGMSAHRLSQELGIDYKEAEAFIERYFQSFPKVRAWIERTLEEGRTRGYVETLFGRRRYVPDLASRVRSVREAAERMAWNMPVQGTAADLMKIAMVKLFPRLKPLGAHLLLQVHDELVLEVPEDRAEEAKALVKEVMENAYPLDVPLEVEVGVGRDWLEAKQD

SEQ ID NO: 559 - DNA, 2538 bp, synthetic construct
  misc_feature 1..2538: note = DNA Polymerase Variant
  source 1..2538: mol_type = other DNA
atgcaccatcatcatcatcatggcggtagcggcatgttaccgctgtttgatttggaagaaccaccaaaacgcgtgctgcttgttgacggccatcatctggcgtatcgtaccttctacgcactgagccttacgacctcacgtggtgagcctgtccagatggtgtatgggtttgctcgctccctgctgaaagccctgaaggaagatggtcaagccgtagtagtggttttcgatgcgaaagcaccgtcgtttcgtcacgaagcgtacgaggcctataaagctggccgcgcaccgaccccggaagactttccgcgtcagttagcgctcgtcaaacgcctcgtggatttgctgggattagttcgcttggaagctcctggctacgaggcggacgacgtgctcggtacactggccaagaaagcagaacgtgaaggcatggaggtctgcattcttaccggtgatcgcgatttcttccagctgctgtctgagaaagtgagcgttttgctgcccgatggcacgttagtaaccccgaaagatgtccaagagaaatatggagttccgccagaacgttgggtggactttcgcgcactgactggtgatcgttcagacaacatcccgggcgttgccgggattggtgaaaagacggcgctgcgcctgctggcagaatggggctcggtggaaaatctgctcaagaaccttgatcgtgtgaaacctgatagcttacgccgcaagatcgaagcccacctggaagacttgcgtctgagtctggatcttgcgcgtattcgcaccgatctgccgttggaagtagactttaaagctctgcgtcgtcgcacacccgatttagaggggttacgcgcgttcctcgaagaactggagtttggctccctgctgcatgaattcggtttgttgggcggagagaaaccgcgtgaagaagcaccatggccgccgcccgaaggtgcctttgtcggctttcttctgtcacgcaaagagccaatgtgggcggaactgttagctcttgcagccgccgcggaagggcgtgttcaccgcgcgacctctcctgtcgaggccctcgctgacctcaaagaagcacgtggtttcttggcgaaagatttagccgtgcttgcattacgcgaaggcgttgcgctcgatccgacggacgacccgcttttggtggcttatttgctcgatcctgcgaataccaacccggaacgtgtcgcccgtcgttacggcggcgagtttactgaagatgcggcagaacgcgcgttgcttagcgaacgcctcttccagacgttatttccacgtctttcggagaaattactctggctctatcaggaagtcgaacgtccattgagtcgcgtgcttgcccatatggaggctcgcggtgtgcgcttagatgttccgttgttagaagcactcagcttcgaggccagcaaagaactggaacgtcttgaaggcgaagtctttcgtttagcggggcatcccttcaatctcaactctcgcgaccaattggagaaagtgctctttgatgaattaggtttaacccctgtcacgcgtacagagaagaccggcaaacgttccacttcggcagccgccttggaagcacttcgtggtgctcacccgatcgtcgagttgattttgcagtatcgcgagctcagcaaactcaaatcaacctatcttgataggttacctcgtcttgttcatccacgtacgggtcgtttacacacccgcttcaatcaaacggcgacagccaccgggcgcttgtcgtcgagtgacccgaacctccagaatattccagtgcgcacgccgctgggccaacacattcgtaaagcgtttgttgcggaagaaggttggttattacttgcggccgattactcccagatcgaacttcgtgtattggcgcatctctctggcgacgagaatcttaaacgcgtgtttcgcgaaggcaaggatattcacactgaaaccgcagcctggatgttcggggtggacccagccttagtggaccccaagatgcgtcgtgccgccaagaccgtcctgtttggcgtactctatggtatgtcagcacatcgtcttagtcaggaattgggcattgactacaaagaagctgaagcgtttgtcgagcgctatttccaatcctttccgaaagttcgcgcgtggattgaacgtaccctcgaagaaggtcgcactcgcggctatgtggaaacgttattcgggcgtcgtcgctacgttccagatcttgcatctcgtgtccgctcagtgcgcgaagctgctgagcgtatggcctggaatatgcctgttcagggaacagcggcggacctcatgaagatcgccatggtgaaattgtttccgcgcttgaaacccttaggagcccaccttcttctgcaggtgcatgatgaattggtcttggaagtacccgaggatcgcgcagaagaagccaaagcactcgtgaaagaggttatggaaaacgcgtatccgttagatgttccgttggaggtcgaagtgggtgtaggccgtgattggcttgaagcgaaacaagactaatga

SEQ ID NO: 560 - protein, 844 aa, synthetic construct
  REGION 1..844: note = DNA Polymerase Variant
MHHHHHHGGSGMLPLFDLEEPPKRVLLVDGHHLAYRTFYALSLTTSRGEPVQMVYGFARSLLKALKEDGQAVVVVFDAKAPSFRHEAYEAYKAGRAPTPEDFPRQLALVKRLVDLLGLVRLEAPGYEADDVLGTLAKKAEREGMEVCILTGDRDFFQLLSEKVSVLLPDGTLVTPKDVQEKYGVPPERWVDFRALTGDRSDNIPGVAGIGEKTALRLLAEWGSVENLLKNLDRVKPDSLRRKIEAHLEDLRLSLDLARIRTDLPLEVDFKALRRRTPDLEGLRAFLEELEFGSLLHEFGLLGGEKPREEAPWPPPEGAFVGFLLSRKEPMWAELLALAAAAEGRVHRATSPVEALADLKEARGFLAKDLAVLALREGVALDPTDDPLLVAYLLDPANTNPERVARRYGGEFTEDAAERALLSERLFQTLFPRLSEKLLWLYQEVERPLSRVLAHMEARGVRLDVPLLEALSFEASKELERLEGEVFRLAGHPFNLNSRDQLEKVLFDELGLTPVTRTEKTGKRSTSAAALEALRGAHPIVELILQYRELSKLKSTYLDRLPRLVHPRTGRLHTRFNQTATATGRLSSSDPNLQNIPVRTPLGQHIRKAFVAEEGWLLLAADYSQIELRVLAHLSGDENLKRVFREGKDIHTETAAWMFGVDPALVDPKMRRAAKTVLFGVLYGMSAHRLSQELGIDYKEAEAFVERYFQSFPKVRAWIERTLEEGRTRGYVETLFGRRRYVPDLASRVRSVREAAERMAWNMPVQGTAADLMKIAMVKLFPRLKPLGAHLLLQVHDELVLEVPEDRAEEAKALVKEVMENAYPLDVPLEVEVGVGRDWLEAKQD

SEQ ID NO: 561 - DNA, 2538 bp, synthetic construct
  misc_feature 1..2538: note = DNA Polymerase Variant
  source 1..2538: mol_type = other DNA
atgcaccatcatcatcatcatggcggtagcggcatgttaccgctgtttgatttggaagaaccaccaaaacgcgtgctgcttgttgacggccatcatctggcgtatcgtaccttctacgcactgagccttacgacctcacgtggtgagcctgtccagatggtgtatgggtttgctcgctccctgctgaaagccctgaaggaagatggtcaagccgtagtagtggttttcgatgcgatggcaccgtcgtttcgtcacgaagcgtacgaggcctataaagctggccgcgcaccgaccccggaagactttccgcgtcagttagcgctcgtcaaacgcctcgtggatttgctgggattagttcgcttggaagctcctggctacgaggcggacgacgtgctcggtacactggccaagaaagcagaacgtgaaggcatggaggtctgcattcttaccggtgatcgcgatttcttccagctgctgtctgagaaagtgagcgttttgctgcccgatggcacgttagtaaccccgaaagatgtccaagagaaatatggagttccgccagaacgttgggtggactttcgcgcactgactggtgatcgttcagacaacatcccgggcgttgccgggattggtgaaaagacggcgctgcgcctgctggcagaatggggctcggtggaaaatctgctcaagaaccttgatcgtgtgaaacctgatagcttacgccgcaagatcgaagcccacctggaagacttgcgtctgagtctggatcttgcgcgtattcgcaccgatctgccgttggaagtagactttaaagctctgcgtcgtcgcacacccgatttagaggggttacgcgcgttcctcgaagaactggagtttggctccctgctgcatgaattcggtttgttgggcggagagaaaccgcgtgaagaagcaccatggccgccgcccgaaggtgcctttgtcggctttcttctgtcacgcaaagagccaatgtgggcggaactgttagctcttgcagccgccgcggaagggcgtgttcaccgcgcgacctctcctgtcgaggccctcgctgacctcaaagaagcacgtggtttcttggcgaaagatttagccgtgcttgcattacgcgaaggcgttgcgctcgatccgacggacgacccgcttttggtggcttatttgctcgatcctgcgaataccaacccggaacgtgtcgcccgtcgttacggcggcgagtttactgaagatgcggcagaacgcgcgttgcttagcgaacgcctcttccagacgttatttccacgtctttcggagaaattactctggctctatcaggaagtcgaacgtccattgagtcgcgtgcttgcccatatggaggctcgcggtgtgcgcttagatgttccgttgttagaagcactcagcttcgagttggagaaagaactggaacgtcttgaaggcgaagtctttcgtttagcggggcatcccttcaatctcaactctcgcgaccaattggagaaagtgctctttgatgaattaggtttaacccctgtcacgcgtacagagaagaccggcaaacgttccacttcggcagccgccttggaagcacttcgtggtgctcacccgatcgtcgagttgattttgcagtatcgcgagctcagcaaactcaaatcaacctatcttgataggttacctcgtcttgttcatccacgtacgggtcgtttacacacccgcttcaatcaaacggcgacagccaccgggcgcttgtcgtcgagtgacccgaacctccagaatattccagtgcgcacgccgctgggccaacacattcgtaaagcgtttgttgcggaagaaggttggttattacttgcggccgattactcccagatcgaacttcgtgtattggcgcatctctctggcgacgagaatcttaaacgcgtgtttcgcgaaggcaaggatattcacactgaaaccgcagcctggatgttcggggtggacccagccttagtggaccccaagatgcgtcgtgccgccaagaccgtcaactttggcgtactctatggtatgtcagcacatcgtcttagtcaggaattgggcattgactacaaagaagctgaagcgtttatcgagcgctatttccaatcctttccgaaagttcgcgcgtggattgaacgtaccctcgaagaaggtcgcactcgcggctatgtggaaacgttattcgggcgtcgtcgctacgttccagatcttgcatctcgtgtccgctcagtgcgcgaagctgctgagcgtatggcctggaatatgcctgttcagggaacagcggcggacctcatgaagatcgccatggtgaaattgtttccgcgcttgaaacccttaggagcccaccttcttttacaggtgcatgatgaattggtcttggaagtacccgaggatcgcgcagaagaagccaaagcactcgtgaaagaggttatggaaaacgcgtatccgttagatgttccgttggaggtcgaagtgggtgtaggccgtgattggcttgaagcgaaacaagactaatga

SEQ ID NO: 562 - protein, 844 aa, synthetic construct
  REGION 1..844: note = DNA Polymerase Variant
MHHHHHHGGSGMLPLFDLEEPPKRVLLVDGHHLAYRTFYALSLTTSRGEPVQMVYGFARSLLKALKEDGQAVVVVFDAMAPSFRHEAYEAYKAGRAPTPEDFPRQLALVKRLVDLLGLVRLEAPGYEADDVLGTLAKKAEREGMEVCILTGDRDFFQLLSEKVSVLLPDGTLVTPKDVQEKYGVPPERWVDFRALTGDRSDNIPGVAGIGEKTALRLLAEWGSVENLLKNLDRVKPDSLRRKIEAHLEDLRLSLDLARIRTDLPLEVDFKALRRRTPDLEGLRAFLEELEFGSLLHEFGLLGGEKPREEAPWPPPEGAFVGFLLSRKEPMWAELLALAAAAEGRVHRATSPVEALADLKEARGFLAKDLAVLALREGVALDPTDDPLLVAYLLDPANTNPERVARRYGGEFTEDAAERALLSERLFQTLFPRLSEKLLWLYQEVERPLSRVLAHMEARGVRLDVPLLEALSFELEKELERLEGEVFRLAGHPFNLNSRDQLEKVLFDELGLTPVTRTEKTGKRSTSAAALEALRGAHPIVELILQYRELSKLKSTYLDRLPRLVHPRTGRLHTRFNQTATATGRLSSSDPNLQNIPVRTPLGQHIRKAFVAEEGWLLLAADYSQIELRVLAHLSGDENLKRVFREGKDIHTETAAWMFGVDPALVDPKMRRAAKTVNFGVLYGMSAHRLSQELGIDYKEAEAFIERYFQSFPKVRAWIERTLEEGRTRGYVETLFGRRRYVPDLASRVRSVREAAERMAWNMPVQGTAADLMKIAMVKLFPRLKPLGAHLLLQVHDELVLEVPEDRAEEAKALVKEVMENAYPLDVPLEVEVGVGRDWLEAKQD

SEQ ID NO: 563 - DNA, 2538 bp, synthetic construct
  misc_feature 1..2538: note = DNA Polymerase Variant
  source 1..2538: mol_type = other DNA
atgcaccatcatcatcatcatggcggtagcggcatgttaccgctgtttgatttggaagaaccaccaaaacgcgtgctgcttgttgacggccatcatctggcgtatcgtaccttctacgcactgagccttacgacctcacgtggtgagcctgtccagatggtgtatgggtttgctcgctccctgctgaaagccctgaaggaagatggtcaagccgtagtagtggttttcgatgcgaaagcaccgtcgtttcgtcacgaagcgtacgaggcctataaagctggccgcgcaccgaccccggaagactttccgcgtcagttagcgctcgtcaaacgcctcgtggatttgctgggattagttcgcttggaagctcctggctacgaggcggacgacgtgctcggtacactggccaagaaagcagaacgtgaaggcatggaggtctgcattcttaccggtgatcgcgatttcttccagctgctgtctgagaaagtgagcgttttgctgcccgatggcacgttagtaaccccgaaagatgtgcaagagaaatatggagttccgccagaacgttgggtggactttcgcgcactgactggtgatcgttcagacaacatcccgggcgttgccgggattggtgaaaagacggcgctgcgcctgctggcagaatggggctcggtggaaaatctgctcaagaaccttgatcgtgtgaaacctgatagcttacgccgcaagatcgaagcccacctggaagacttgcgtctgagtctggatcttgcccgtattcgcaccgatctgccgttggaagtagactttaaagctctgcgtcgtcgcacacccgatttagaggggttacgcgcgttcctcgaagaactggagtttggctccctgctgcatgaattcggtttgttgggcggagagaaaccgcgtgaagaagcaccatggccgccgcccgagggtgcctttgtcggctttcttctgtcacgcaaagagccaatgtgggcggaactgttagctcttgcagccgccgcggaagggcgtgttcaccgcgcgacctctcctgtcgaggccctcgctgacctcaaagaagcacgtggtttcttggcgaaagatttagccgtgcttgcattacgcgaaggcgttgcgctcgatccgacggacgacccgcttttggtggcttatttgctcgatagcgcgaataccaacccggaacgtgtcgcccgtcgttacggcggcgagtttactgaagatgcggcagaacgcgcgttgcttagcgaacgcctcttccagacgttatttccacgtctttcggagaaattactctggctctatcaggaagtcgaacgtccattgagtcgcgtgcttgcccatatggaggctcgcggtgtgcgcttagatgttccgttgttagaagcactcagcttcgagttggagaaagaactggaacgtcttgaaggcgaagtctttcgtttagcggggcatcccttcaatctcaactctcgcgaccaattggagaaagtgctctttgatgaattaggtttaacccctgtcacgcgtacagagaagaccggcaaacgttccacttcggcagccgccttggaagcacttcgtggtgctcacccgatcgtcgagttgattttgcagtatcgcgagctcagcaaactcaaatcaacctatcttgataggttacctcgtcttgttcatccacgtacgggtcgtttacacacccgcttcaatcaaacggcaacagccaccgggcgcttgtcgtcgagtgacccgaacctccagaatattccagtgcgcacgccgctgggccaacacattcgtaaagcgtttgttgcggaagaaggttggttattacttgcggccgattactcccagatcgaacttcgtgtattggcgcatctctctggcgacgagaatcttaaacgcgtgtttcgcgaaggcaaggatattcacactgaaaccgcagcctggatgttcggggtggacccagccttagtggaccccaagatgcgtcgtgccgccaagaccgtcaactttggcgtactctatggtatgtcagcagcacgtcttagtcaggaattgggcattgactacaaagaagctgaagcgtttatcgagcgctatttccaatcctttccgaaagttcgcgcgtggattgaacgtacgctcgaagaaggtcgcactcgcggctatgtggaaacgttattcgggcgtcgtcgctacgttccagatcttgcatctcgtgtccgctcagtgcgcgaagctgctgagcgtatggcctggaatatgcctgttcagggaacagcggcggacctcatgaagatcgccatggtgaaattgtttccgcgcttgaaacccttaggagcccaccttcttttacaggtgcatgatgaattggtcttggaagtacccgaggatcgcgcagaagaagccaaagcactcgtgaaagaggttatggaaaacgcgtatccgttagatgttccgttggaggtcgaagtgggtgtaggccgtgattggcttgaagcgaaacaagactaatga

SEQ ID NO: 564 - protein, 844 aa, synthetic construct
  REGION 1..844: note = DNA Polymerase Variant
MHHHHHHGGSGMLPLFDLEEPPKRVLLVDGHHLAYRTFYALSLTTSRGEPVQMVYGFARSLLKALKEDGQAVVVVFDAKAPSFRHEAYEAYKAGRAPTPEDFPRQLALVKRLVDLLGLVRLEAPGYEADDVLGTLAKKAEREGMEVCILTGDRDFFQLLSEKVSVLLPDGTLVTPKDVQEKYGVPPERWVDFRALTGDRSDNIPGVAGIGEKTALRLLAEWGSVENLLKNLDRVKPDSLRRKIEAHLEDLRLSLDLARIRTDLPLEVDFKALRRRTPDLEGLRAFLEELEFGSLLHEFGLLGGEKPREEAPWPPPEGAFVGFLLSRKEPMWAELLALAAAAEGRVHRATSPVEALADLKEARGFLAKDLAVLALREGVALDPTDDPLLVAYLLDSANTNPERVARRYGGEFTEDAAERALLSERLFQTLFPRLSEKLLWLYQEVERPLSRVLAHMEARGVRLDVPLLEALSFELEKELERLEGEVFRLAGHPFNLNSRDQLEKVLFDELGLTPVTRTEKTGKRSTSAAALEALRGAHPIVELILQYRELSKLKSTYLDRLPRLVHPRTGRLHTRFNQTATATGRLSSSDPNLQNIPVRTPLGQHIRKAFVAEEGWLLLAADYSQIELRVLAHLSGDENLKRVFREGKDIHTETAAWMFGVDPALVDPKMRRAAKTVNFGVLYGMSAARLSQELGIDYKEAEAFIERYFQSFPKVRAWIERTLEEGRTRGYVETLFGRRRYVPDLASRVRSVREAAERMAWNMPVQGTAADLMKIAMVKLFPRLKPLGAHLLLQVHDELVLEVPEDRAEEAKALVKEVMENAYPLDVPLEVEVGVGRDWLEAKQD

SEQ ID NO: 565 - DNA, 2538 bp, synthetic construct
  misc_feature 1..2538: note = DNA Polymerase Variant
  source 1..2538: mol_type = other DNA
atgcaccatcatcatcatcatggcggtagcggcatgttaccgctgtttgatttggaagaaccaccaaaacgcgtgctgcttgttgacggccatcatctggcgtatcgtaccttctacgcactgagccttacgacctcacgtggtgagcctgtccagatggtgtatgggtttgctcgctccctgctgaaagccctgaaggaagatggtcaagccgtagtagtggttttcgatgcgaaagcaccgtcgtttcgtcacgaagcgtacgaggcctataaagctggccgcgcaccgaccccggaagactttccgcgtcagttagcgctcgtcaaacgcctcgtggatttgctgggattagttcgcttggaagctcctggctacgaggcggacgacgtgctcggtacactggccaagaaagcagaacgtgaaggcatggaggtctgcattcttaccggtgatcgcgatttcttccagctgctgtctgagaaagtgagcgttttgctgcccgatggcacgttagtaaccccgaaagatgtccaagagaaatatggagttccgccagaacgttgggtggactttcgcgcactgactggtgatcgttcagacaacatcccgggcgttgccgggattggtgaaaagacggcgctgcgcctgctggcagaatggggctcggtggaaaatctgctcaagaaccttgatcgtgtgaaacctgatagcttacgccgcaagatcgaagcccacctggaagacttgcgtctgagtctggatcttgcgcgtattcgcaccgatctgccgttggaagtagactttaaagctctgcgtcgtcgcacacccgatttagaggggttacgcgcgttcctcgaagaactggagtttggctccctgctgcatgaattcggtttgttgggcggagagaaaccgcgtgaagaagcaccatggccgccgcccgaaggtgcctttgtcggctttcttctgtcacgcaaagagccaatgtgggcggaactgttagctcttgcagccgccgcggaagggcgtgttcaccgcgcgacctctcctgtcgaggccctcgctgacctcaaagaagcacgtggtttcttggcgaaagatttagccgtgcttgcattacgcgaaggcgttgcgctcgatccgacggacgacccgcttttggtggcttatttgctcgatcctgcgaataccaacccggaacgtgtcgcccgtcgttacggcggcgagtttactgaagatgcggcagaacgcgcgttgcttagcgaacgcctcttccagacgttatttccacgtctttcggagaaattactctggctctatcaggaagtcgaacgtccattgagtcgcgtgcttgcccatatggaggctcgcggtgtgcgcttagatgttccgttgttagaagcactcagcttcgagttggagaaagaactggaacgtcttgaaggcgaagtctttcgtttagcggggcatcccttcaatctcaactctcgcgaccaattggagaaagtgctctttgatgaattaggtttaacccctgtcacgcgtacagagaagaccggcaaacgttccacttcggcagccgccttggaagcacttcgtggtgctcacccgatcgtcgagttgattttgcagtatcgcgagctcagcaaactcaaatcaacctatcttgataggttacctcgtcttgttcatccacgtacgggtcgtttacacacccgcttcaatcaaacggcgacagccaccgggcgcttgtcgtcgagtgacccgaacctccagaatattccagtgcgcacgccgctgggccaacacattcgtaaagcgtttgttgcggaagaaggttggttattacttgcggccgattactcccagatcgaacttcgtgtattggcgcatctctctggcgacgagaatcttaaacgcgtgtttcgcgaaggcaaggatattcacactgaaaccgcagcctggatgttcggggtggacccagccttagtggaccccaagatgcgttgggccgccaagaccgtcaactttggcgtactctatggtatgtcagcacatcgtcttagtcaggaattgggcattgactacaaagaagctgaagcgtttatcgagcgctatttccaatcctttccgaaagttcgcgcgtggattgaacgtaccctcgaagaaggtcgcactcgcggctatgtggaaacgttattcgggcgtcgtcgctacgttccagatcttgcatctcgtgtccgctcagtgcgcgaagctgctgagcgtatggcctggaatatgcctgttcagggaacagcggcggacctcatgaagatcgccatggtgaaattgtttccgcgcttgaaacccttaggagcccaccttcttttacaggtgcatgatgaattggtcttggaagtacccgaggatcgcgcagaagaagccaaagcactcgtgaaagaggttatggaaaacgcgtatccgttagatgttccgttggaggtcgaagtgggtgtaggccgtgattggcttgaagcgaaacaagactaatga

SEQ ID NO: 566 - protein, 844 aa, synthetic construct
  REGION 1..844: note = DNA Polymerase Variant
MHHHHHHGGSGMLPLFDLEEPPKRVLLVDGHHLAYRTFYALSLTTSRGEPVQMVYGFARSLLKALKEDGQAVVVVFDAKAPSFRHEAYEAYKAGRAPTPEDFPRQLALVKRLVDLLGLVRLEAPGYEADDVLGTLAKKAEREGMEVCILTGDRDFFQLLSEKVSVLLPDGTLVTPKDVQEKYGVPPERWVDFRALTGDRSDNIPGVAGIGEKTALRLLAEWGSVENLLKNLDRVKPDSLRRKIEAHLEDLRLSLDLARIRTDLPLEVDFKALRRRTPDLEGLRAFLEELEFGSLLHEFGLLGGEKPREEAPWPPPEGAFVGFLLSRKEPMWAELLALAAAAEGRVHRATSPVEALADLKEARGFLAKDLAVLALREGVALDPTDDPLLVAYLLDPANTNPERVARRYGGEFTEDAAERALLSERLFQTLFPRLSEKLLWLYQEVERPLSRVLAHMEARGVRLDVPLLEALSFELEKELERLEGEVFRLAGHPFNLNSRDQLEKVLFDELGLTPVTRTEKTGKRSTSAAALEALRGAHPIVELILQYRELSKLKSTYLDRLPRLVHPRTGRLHTRFNQTATATGRLSSSDPNLQNIPVRTPLGQHIRKAFVAEEGWLLLAADYSQIELRVLAHLSGDENLKRVFREGKDIHTETAAWMFGVDPALVDPKMRWAAKTVNFGVLYGMSAHRLSQELGIDYKEAEAFIERYFQSFPKVRAWIERTLEEGRTRGYVETLFGRRRYVPDLASRVRSVREAAERMAWNMPVQGTAADLMKIAMVKLFPRLKPLGAHLLLQVHDELVLEVPEDRAEEAKALVKEVMENAYPLDVPLEVEVGVGRDWLEAKQD

SEQ ID NO: 567 - DNA, 2538 bp, synthetic construct
  misc_feature 1..2538: note = DNA Polymerase Variant
  source 1..2538: mol_type = other DNA
atgcaccatcatcatcatcatggcggtagcggcatgttaccgctgtttgatttggaagaaccaccaaaacgcgtgctgcttgttgacggccatcatctggcgtatcgtaccttctacgcactgagccttacgacctcacgtggtgagcctgtccagatggtgtatgggtttgctcgctccctgctgaaagccctgaaggaagatggtcaagccgtagtagtggttttcgatgcgaaagcaccgtcgtttcgtcacgaagcgtacgaggcctataaagctggccgcgcaccgaccccggaagactttccgcgtcagttagcgctcgtcaaacgcctcgtggatttgctgggattagttcgcttggaagctcctggctacgaggcggacgacgtgctcggtacactggccaagaaagcagaacgtgaaggcatggaggtctgcattcttaccggtgatcgcgatttcttccagctgctgtctgagaaagtgagcgttttgctgcccgatggcacgttagtaaccccgaaagatgtccaagagaaatatggagttccgccagaacgttgggtggactttcgcgcactgactggtgatcgttcagacaacatcccgggcgttgccgggattggtgaaaagacggcgctgcgcctgctggcagaatggggctcggtggaaaatctgctcaagaaccttgataaggtgaaacctgatagcttacgccgcaagatcgaagcccacctggaagacttgcgtctgagtctggatcttgcgcgtattcgcaccgatctgccgttggaagtagactttaaagctctgcgtcgtcgcacacccgatttagaggggttacgcgcgttcctcgaagaactggagtttggctccctgctgcatgaattcggtttgttgggcggagagaaaccgcgtgaagaagcaccatggccgccgcccgaaggtgcctttgtcggctttcttctgtcacgcaaagagccaatgtgggcggaactgttagctcttgcagccgccgcggaagggcgtgttcaccgcgcgacctctcctgtcgaggccctcgctgacctcaaagaagcacgtggtttcttggcgaaagatttagccgtgcttgcattacgcgaaggcgttgcgctcgatccgacggacgacccgcttttggtggcttatttgctcgatcctgcgaataccaacccggaacgtgtcgcccgtcgttacggcggcgagtttactgaagatgcggcagaacgcgcgttgcttagcgaacgcctcttccagacgttatttccacgtctttcggagaaattactctggctctatcaggaagtcgaacgtccattgagtcgcgtgcttgcccatatggaggctcgcggtgtgcgcttagatgttccgttgttagaagcactcagcttcgagttggagaaagaactggaacgtcttgaaggcgaagtctttcgtttagcggggcatcccttcaatctcaactctcgcgaccaattggagaaagtgctctttgatgaattaggtttaacccctgtcacgcgtacagagaagaccggcaaacgttccacttcggcagccgccttggaagcacttcgtggtgctcacccgatcgtcgagttgattttgcagtatcgcgagctcagcaaactcaaatcaacctatcttgataggttacctcgtcttgttcatccacgtacgggtcgtttacacacccgcttcaatcaaacggcgacagccaccgggcgcttgtcgtcgagtgacccgaacctccagaatattccagtgcgcacgccgctgggccaacacattcgtaaagcgtttgttgcggaagaaggttggttattacttgcggccgattactcccagatcgaacttcgtgtattggcgcatctctctggcgacgagaatcttaaacgcgtgtttcgcgaaggcaaggatattcacactgaaaccgcagcctggatgttcggggtggacccagccttagtggaccccaagatgcgtcgtgccgccaagaccgtcaactttggcgtactctatggtatgtcagcacatcgtcttagtcaggaattgggcattgactacaaagaagctgaagcgtttatcgagcgctatttccaatcctttccgaaagttcgcgcgtggattgaacgtaccctcgaagaaggtcgcactcgcggctatgtggaaacgttattcgggcgtcgtcgctacgttccagatcttgcatctcgtgtccgctcagtgcgcgaagctgctgagcgtatggcctggaatatgcctgttcagggaacagcggcggacctcatgaagatcgccatggtgaaattgtttccgcgcttgaaacccttaggagcccaccttcttttacaggtgcatgatgaattggtcttggaagtacccgaggatcgcgcagaagaagccaaagcactcgtgaaagaggttatggaaaacgcgtatccgttagatgttccgttggaggtcgaagtgggtgtaggccgtgattggcttgaagcgaaacaagactaatga

SEQ ID NO: 568 - protein, 844 aa, synthetic construct
  REGION 1..844: note = DNA Polymerase Variant
MHHHHHHGGSGMLPLFDLEEPPKRVLLVDGHHLAYRTFYALSLTTSRGEPVQMVYGFARSLLKALKEDGQAVVVVFDAKAPSFRHEAYEAYKAGRAPTPEDFPRQLALVKRLVDLLGLVRLEAPGYEADDVLGTLAKKAEREGMEVCILTGDRDFFQLLSEKVSVLLPDGTLVTPKDVQEKYGVPPERWVDFRALTGDRSDNIPGVAGIGEKTALRLLAEWGSVENLLKNLDKVKPDSLRRKIEAHLEDLRLSLDLARIRTDLPLEVDFKALRRRTPDLEGLRAFLEELEFGSLLHEFGLLGGEKPREEAPWPPPEGAFVGFLLSRKEPMWAELLALAAAAEGRVHRATSPVEALADLKEARGFLAKDLAVLALREGVALDPTDDPLLVAYLLDPANTNPERVARRYGGEFTEDAAERALLSERLFQTLFPRLSEKLLWLYQEVERPLSRVLAHMEARGVRLDVPLLEALSFELEKELERLEGEVFRLAGHPFNLNSRDQLEKVLFDELGLTPVTRTEKTGKRSTSAAALEALRGAHPIVELILQYRELSKLKSTYLDRLPRLVHPRTGRLHTRFNQTATATGRLSSSDPNLQNIPVRTPLGQHIRKAFVAEEGWLLLAADYSQIELRVLAHLSGDENLKRVFREGKDIHTETAAWMFGVDPALVDPKMRRAAKTVNFGVLYGMSAHRLSQELGIDYKEAEAFIERYFQSFPKVRAWIERTLEEGRTRGYVETLFGRRRYVPDLASRVRSVREAAERMAWNMPVQGTAADLMKIAMVKLFPRLKPLGAHLLLQVHDELVLEVPEDRAEEAKALVKEVMENAYPLDVPLEVEVGVGRDWLEAKQD

SEQ ID NO: 569 - DNA, 2538 bp, synthetic construct
  misc_feature 1..2538: note = DNA Polymerase Variant
  source 1..2538: mol_type = other DNA
atgcaccatcatcatcatcatggcggtagcggcatgttaccgctgtttgatttggaagaaccaccaaaacgcgtgctgcttgttgacggccatcatctggcgtatcgtacattctacgcactgagccttacgacctcacgtggtgagcctgtccagatggtgtatgggtttgctcgctccctgctgaaagccctgaaggaagatggtcaagccgtagtagtggttttcgatgcgaaagcaccgtcgtttcgtcacgaagcgtacgaggcctataaagctggccgcgcaccgaccccggaagactttccgcgtcagttagcgctcgtcaaacgcctcgtggatttgctgggattagttcgcttggaagctcctggctacgaggcggacgacgtgctcggtacactggccaagaaagcagaacgtgaaggcatggaggtctgcattcttaccggtgatcgcgatttcttccagctgctgtctgagaaagtgagcgttttgctgcccgatggcacgttagtaaccccgaaagatgtccaagagaaatatggagttccgccagaacgttgggtggactttcgcgcactgactggtgatcgttcagacaacatcccgggcgttgccgggattggtgaaaagacggcgctgcgcctgctggcagaatggggctcggtggaaaatctgctcaagaaccttgatcgtgtgaaacctgatagcttacgccgcaagatcgaagcccacctggaagacttgcgtctgagtctggatcttgcgcgtattcgcaccgatctgccgttggaagtagactttaaagctctgcgtcgtcgcacacccgatttagaggggttacgcgcgttcctcgaagaactggagtttggctccctgctgcatgaattcggtttgttgggcggagagaaaccgcgtgaagaagcaccatggccgccgcccgaaggtgcctttgtcggctttcttctgtcacgcaaagagccaatgtgggcggaactgttagctcttgcagccgccgcggaagggcgtgttcaccgcgcgacctctcctgtcgaggccctcgctgacctcaaagaagcacgtggtttcttggcgaaagatttagccgtgcttgcattacgcgaaggcgttgcgctcgatccgacggacgacccgcttttggtggcttatttgctcgatcctgcgaataccaacccggaacgtgtcgcccgtcgttacggcggcgagtttactgaagatgcggcagaacgcgcgttgcttagcgaacgcctcttccagacgttatttccacgtctttcggagaaattactctggctctatcaggaagtcgaacgtccattgagtcgcgtgcttgcccatatggaggctcgcggtgtgcgcttagatgttccgttgttagaagcactcagcttcgagttggagaaagaactggaacgtcttgaaggcgaagtctttcgtttagcggggcatcccttcaatctcaactctcgcgaccaattggagaaagtgctctttgatgaattaggtttaacccctgtcacgcgtacagagaagaccggcaaacgttccacttcggcagccgccttggaagcacttcgtggtgctcacccgatcgtcgagttgattttgcagtatcgcgagctcagcaaactcaaatcaacctatcttgataggttacctcgtcttgttcatccacgtacgggtcgtttacacacccgcttcaatcaaacggcgacagccaccgggcgcttgtcgtcgagtgacccgaacctccagaatattccagtgcgcacgccgctgggccaacacattcgtaaagcgtttgttgcggaagaaggttggttattacttgcggccgattactcccagatcgaacttcgtgtattggcgcatctctctggcgacgagaatcttaaacgcgtgtttcgcgaaggcaaggatattcacactgaaaccgcagcctggatgttcggggtggacccagccttagtggaccccaagatgcgtcgtgccgccaagaccgtcaactttggcgtactctatggtatgtcagcacatcgtcttagtcaggaattgggcattgactacaaagtggctgaagcgtttatcgagcgctatttccaatcctttccgaaagttcgcgcgtggattgaacgtaccctcgaagaaggtcgcactcgcggctatgtggaaacgttattcgggcgtcgtcgctacgttccagatcttgcatctcgtgtccgctcagtgcgcgaagctgctgagcgtatggcctggaatatgcctgttcagggaacagcggcggacctcatgaagatcgccatggtgaaattgtttccgcgcttgaaacccttaggagcccaccttcttttacaggtgcatgatgaattggtcttggaagtacccgaggatcgcgcagaagaagccaaagcactcgtgaaagaggttatggaaaacgcgtatccgttagatgttccgttggaggtcgaagtgggtgtaggccgtgattggcttgaagcgaaacaagactaatga

SEQ ID NO: 570 - protein, 844 aa, synthetic construct
  REGION 1..844: note = DNA Polymerase Variant
MHHHHHHGGSGMLPLFDLEEPPKRVLLVDGHHLAYRTFYALSLTTSRGEPVQMVYGFARSLLKALKEDGQAVVVVFDAKAPSFRHEAYEAYKAGRAPTPEDFPRQLALVKRLVDLLGLVRLEAPGYEADDVLGTLAKKAEREGMEVCILTGDRDFFQLLSEKVSVLLPDGTLVTPKDVQEKYGVPPERWVDFRALTGDRSDNIPGVAGIGEKTALRLLAEWGSVENLLKNLDRVKPDSLRRKIEAHLEDLRLSLDLARIRTDLPLEVDFKALRRRTPDLEGLRAFLEELEFGSLLHEFGLLGGEKPREEAPWPPPEGAFVGFLLSRKEPMWAELLALAAAAEGRVHRATSPVEALADLKEARGFLAKDLAVLALREGVALDPTDDPLLVAYLLDPANTNPERVARRYGGEFTEDAAERALLSERLFQTLFPRLSEKLLWLYQEVERPLSRVLAHMEARGVRLDVPLLEALSFELEKELERLEGEVFRLAGHPFNLNSRDQLEKVLFDELGLTPVTRTEKTGKRSTSAAALEALRGAHPIVELILQYRELSKLKSTYLDRLPRLVHPRTGRLHTRFNQTATATGRLSSSDPNLQNIPVRTPLGQHIRKAFVAEEGWLLLAADYSQIELRVLAHLSGDENLKRVFREGKDIHTETAAWMFGVDPALVDPKMRRAAKTVNFGVLYGMSAHRLSQELGIDYKVAEAFIERYFQSFPKVRAWIERTLEEGRTRGYVETLFGRRRYVPDLASRVRSVREAAERMAWNMPVQGTAADLMKIAMVKLFPRLKPLGAHLLLQVHDELVLEVPEDRAEEAKALVKEVMENAYPLDVPLEVEVGVGRDWLEAKQD

SEQ ID NO: 571 - DNA, 2538 bp, synthetic construct
  misc_feature 1..2538: note = DNA Polymerase Variant
  source 1..2538: mol_type = other DNA
atgcaccatcatcatcatcatggcggtagcggcatgttaccgctgtttgatttggaagaaccaccaaaacgcgtgctgcttgttgacggccatcatctggcgtatcgtaccttctacgcactgagccttacgacctcacgtggtgagcctgtccagatggtgtatgggtttgctcgctccctgctgaaagccctgaaggaagatggtcaagccgtagtagtggttttcgatgcgaaagcaccgtcgtttcgtcacgaagcgtacgaggcctataaagctggccgcgcaccgaccccggaagactttccgcgtcagttagcgctcgtcaaacgcctcgtggatttgctgggattagttcgcttggaagctcctggctacgaggcggacgacgtgctcggtacactggccaagaaagcagaacgtgaaggcatggaggtctgcattcttaccggtgatcgcgatttcttccagctgctgtctgagaaagtgagcgttttgctgcccgatggcacgttagtaaccccgaaagatgtccaagagaaatatggagttccgccagaacgttgggtggactttcgcgcactgactggtgatcgttcagacaacatcccgggcgttgccgggattggtgaaaagacggcgctgcgcctgctggcagaatggggctcggtggaaaatctgctcaagaaccttgatcgtgtgaaacctgatagcttacgccgcaagatcgaagcccacctggaagacttgcgtctgagtctggatcttgcgcgtattcgcaccgatctgccgttggaagtagactttaaagctctgcgtcgtcgcacacccgatttagaggggttacgcgcgttcctcgaagaactggagtttggctccctgctgcatgaattcggtttgttgggcggagagaaaccgcgtgaagaagcaccatggccgccgcccgaaggtgcctttgtcggctttcttctgtcacgcaaagagccaatgtgggcggaactgttagctcttgcagccgccgcggaagggcgtgttcaccgcgcgacctctcctgtcgaggccctcgctgacctcaaagaagcacgtggtttcttggcgaaagatttagccgtgcttgcattacgcgaaggcgttgggctcgatccgacggacgacccgcttttggtggcttatttgctcgatcctgcgaataccaacccggaacgtgtcgcccgtcgttacggcggcgagtttactgaagatgcggcagaacgcgcgttgcttagcgaacgcctcttccagacgttatttccacgtctttcggagaaattactctggctctatcaggaagtcgaacgtccattgagtcgcgtgcttgcccatatggaggctcgcggtgtgcgcttagatgttccgttgttagaagcactcagcttcgagttggagaaagaactggaacgtcttgaaggcgaagtctttcgtttagcggggcatcccttcaatctcaactctcgcgaccaattggagaaagtgctctttgatgaattaggtttaacccctgtcacgcgtacagagaagaccggcaaacgttccacttcggcagccgccttggaagcacttcgtggtgctcacccgatcgtcgagttgattttgcagtatcgcgagctcagcaaactcaaatcaacctatcttgataggttacctcgtcttgttcatccacgtacgggtcgtttacacacccgcttcaatcaaacggcgacagccaccgggcgcttgtcgtcgagtgacccgaacctccagaatattccagtgcgcacgccgctgggccaacacattcgtaaagcgtttgttgcggaagaaggttggttattacttgcggccgattactcccagatcgaacttcgtgtattggcgcatctctctggcgacgagaatcttaaacgcgtgtttcgcgaaggcaaggatattcacactgaaaccgcagcctggatgttcggggtggacccagccttagtggaccccaagatgcgtcgtgccgccaagaccgtcaactttggcgtactctatggtatgtcagcacatcgtcttagtcaggaattgggcattgactacaaagaagctgaagcgtttatcgagcgctatttccaatcctttccgaaagttcgcgcgtggattgaacgtaccctcgaagaaggtcgcactcgcggctatgtggaaacgttattcgggcgtcgtcgctacgttccagatcttgcatctcgtgtccgctcagtgcgcgaagctgctgagcgtatggcctggaatatgcctgttcagggaacagcggcggacctcatgaagatcgccatggtgaaattgtttccgcgcttgaaacccttaggagcccaccttcttttacaggtgcatgatgaattggtcttggaagtacccgaggatcgcgcagaagaagccaaagcactcgtgaaagaggttatggaaaacgcgtatccgttagatgttccgttggaggtcgaagtgggtgtaggccgtgattggcttgaagcgaaacaagactaatga

SEQ ID NO: 572 - protein, 844 aa, synthetic construct
  REGION 1..844: note = DNA Polymerase Variant
MHHHHHHGGSGMLPLFDLEEPPKRVLLVDGHHLAYRTFYALSLTTSRGEPVQMVYGFARSLLKALKEDGQAVVVVFDAKAPSFRHEAYEAYKAGRAPTPEDFPRQLALVKRLVDLLGLVRLEAPGYEADDVLGTLAKKAEREGMEVCILTGDRDFFQLLSEKVSVLLPDGTLVTPKDVQEKYGVPPERWVDFRALTGDRSDNIPGVAGIGEKTALRLLAEWGSVENLLKNLDRVKPDSLRRKIEAHLEDLRLSLDLARIRTDLPLEVDFKALRRRTPDLEGLRAFLEELEFGSLLHEFGLLGGEKPREEAPWPPPEGAFVGFLLSRKEPMWAELLALAAAAEGRVHRATSPVEALADLKEARGFLAKDLAVLALREGVGLDPTDDPLLVAYLLDPANTNPERVARRYGGEFTEDAAERALLSERLFQTLFPRLSEKLLWLYQEVERPLSRVLAHMEARGVRLDVPLLEALSFELEKELERLEGEVFRLAGHPFNLNSRDQLEKVLFDELGLTPVTRTEKTGKRSTSAAALEALRGAHPIVELILQYRELSKLKSTYLDRLPRLVHPRTGRLHTRFNQTATATGRLSSSDPNLQNIPVRTPLGQHIRKAFVAEEGWLLLAADYSQIELRVLAHLSGDENLKRVFREGKDIHTETAAWMFGVDPALVDPKMRRAAKTVNFGVLYGMSAHRLSQELGIDYKEAEAFIERYFQSFPKVRAWIERTLEEGRTRGYVETLFGRRRYVPDLASRVRSVREAAERMAWNMPVQGTAADLMKIAMVKLFPRLKPLGAHLLLQVHDELVLEVPEDRAEEAKALVKEVMENAYPLDVPLEVEVGVGRDWLEAKQD

SEQ ID NO: 573 - DNA, 2538 bp, synthetic construct
  misc_feature 1..2538: note = DNA Polymerase Variant
  source 1..2538: mol_type = other DNA
atgcaccatcatcatcatcatggcggtagcggcatgttaccgctgtttgatttggaagaaccaccaaaacgcgtgctgcttgttgacggccatcatctggcgtatcgtaccttctacgcactgagccttacgacctcacgtggtgagcctgtccagatggtgtatgggtttgctcgctccctgctgaaagccctgaaggaagatggtcaagccgtagtagtggttttcgatgcgaaagcaccgtcgtttcgtcacgaagcgtacgaggcctataaagctggccgcgcaccgaccccggaagactttccgcgtcagttagcgctcgtcaaacgcctcgtggatttgctgggattagttcgcttggaagctcctggctacgaggcggacgacgtgctcggtacactggccaagaaagcagaacgtgaaggcatggaggtctgcattcttaccggtgatcgcgatttcttccagctgctgtctgagaaagtgagcgttttgctgcccgatggcacgttagtaaccccgaaagatgtccaagagaaatatggagttccgccagaacgttgggtggactttcgcgcactgactggtgatcgttcagacaacatcccgggcgttgccgggattggtgaaaagacggcgctgcgcctgctggcagaatggggctcggtggaaaatctgctcaagaaccttgatcgtgtgaaacctgatagcttacgccgcaagatcgaagcccacctggaagacttgcgtctgagtctggatcttgtacgtattcgcaccgatctgccgttggaagtagactttaaagctctgcgtcgtcgcacacccgatttagaggggttacgcgcgttcctcgaagaactggagtttggctccctgctgcatgaattcggtttgttgggcggagagaaaccgcgtgaagaagcaccatggccgccgcccgaaggtgcctttgtcggctttcttctgtcacgcaaagagccaatgtgggcggaactgttagctcttgcagccgccgcggaagggcgtgttcaccgcgcgacctctcctgtcgaggccctcgctgacctcaaagaagcacgtggtttcttggcgaaagatttagccgtgcttgcattacgcgaaggcgttgcgctcgatccgacggacgacccgcttttggtggcttatttgctcgatcctgcgaataccaacccggaacgtgtcgcccgtcgttacggcggcgagtttactgaagatgcggcagaacgcgcgttgcttagcgaacgcctcttccagacgttatttccacgtctttcggagaaattactctggctctatcaggaagtcgaacgtccattgagtcgcgtgcttgcccatatggaggctcgcggtgtgcgcttagatgttccgttgttagaagcactcagcttcgagttggagaaagaactggaacgtcttgagggcgaagtctttcgtttagcggggcatcccttcaatctcaactctcgcgaccaattggagaaagtgctctttgatgaattaggtttaacccctgtcacgcgtacagagaagaccggcaaacgttccacttcggcagccgccttggaagcacttcgtggtgctcacccgatcgtcgagttgattttgcagtatcgcgagctcagcaaactcaaatcaacctatcttgataggttacctcgtcttgttcatccacgtacgggtcgtttacacacccgcttcaatcaaacggcgacagccaccgggcgcttgtcgtcgagtgacccgaacctccagaatattccagtgcgcacgccgctgggccaacacattcgtaaagcgtttgttgcggaagaaggttggttattacttgcggccgattactcccagatcgaacttcgtgtattggcgcatctctctggcgacgagaatcttaaacgcgtgtttcgcgaaggcaaggatattcacactgaaaccgcagcctggatgttcggggtggacccagccttagtggaccccaagatgcgtcgtgccgccaagaccgtcaactttggcgtactctatggtatgtcagcacatcgtcttagtcaggaattgggcattgactacaaagaagctgaagcgtttatcgagcgctatttccaatcctttccgaaagttcgcgcgtggattgaacgtaccctcgaagaaggtcgcactcgcggctatgtggaaacgttattcgggcgtcgtcgctacgttccagatcttgcatctcgtgtccgctcagtgcgcgaagctgctgagcgtatggcctggaatatgcctgttcagggaacagcggcggacctcatgaagatcgccatggtgaaattgtttccgcgcttgaaacccttaggagcccaccttcttttccaggtgcatgatgaattggtcttggaagtacccgaggatcgcgcagaagaagccaaagcactcgtgaaagaggttatggaaaacgcgtatccgttagatgttccgttggaggtcgaagtgggtgtaggccgtgattggcttgaagcgaaacaagactaatga

SEQ ID NO: 574 - protein, 844 aa, synthetic construct
  REGION 1..844: note = DNA Polymerase Variant
MHHHHHHGGSGMLPLFDLEEPPKRVLLVDGHHLAYRTFYALSLTTSRGEPVQMVYGFARSLLKALKEDGQAVVVVFDAKAPSFRHEAYEAYKAGRAPTPEDFPRQLALVKRLVDLLGLVRLEAPGYEADDVLGTLAKKAEREGMEVCILTGDRDFFQLLSEKVSVLLPDGTLVTPKDVQEKYGVPPERWVDFRALTGDRSDNIPGVAGIGEKTALRLLAEWGSVENLLKNLDRVKPDSLRRKIEAHLEDLRLSLDLVRIRTDLPLEVDFKALRRRTPDLEGLRAFLEELEFGSLLHEFGLLGGEKPREEAPWPPPEGAFVGFLLSRKEPMWAELLALAAAAEGRVHRATSPVEALADLKEARGFLAKDLAVLALREGVALDPTDDPLLVAYLLDPANTNPERVARRYGGEFTEDAAERALLSERLFQTLFPRLSEKLLWLYQEVERPLSRVLAHMEARGVRLDVPLLEALSFELEKELERLEGEVFRLAGHPFNLNSRDQLEKVLFDELGLTPVTRTEKTGKRSTSAAALEALRGAHPIVELILQYRELSKLKSTYLDRLPRLVHPRTGRLHTRFNQTATATGRLSSSDPNLQNIPVRTPLGQHIRKAFVAEEGWLLLAADYSQIELRVLAHLSGDENLKRVFREGKDIHTETAAWMFGVDPALVDPKMRRAAKTVNFGVLYGMSAHRLSQELGIDYKEAEAFIERYFQSFPKVRAWIERTLEEGRTRGYVETLFGRRRYVPDLASRVRSVREAAERMAWNMPVQGTAADLMKIAMVKLFPRLKPLGAHLLFQVHDELVLEVPEDRAEEAKALVKEVMENAYPLDVPLEVEVGVGRDWLEAKQD

SEQ ID NO: 575 - DNA, 2538 bp, synthetic construct
  misc_feature 1..2538: note = DNA Polymerase Variant
  source 1..2538: mol_type = other DNA
atgcaccatcatcatcatcatggcggtagcggcatgttaccgctgtttgatttggaagaaccaccaaaacgcgtgctgcttgttgacggccatcatctggcgtatcgtaccttctacgcactgagccttacgacctcacgtggtgagcctgtccagatggtgtatgggtttgctcgctccctgctgaaagccctgaaggaagatggtcaagccgtagtagtggttttcgatgcgaaagcaccgtcgtttcgtcacgaagcgtacgaggcctataaagctggccgcgcaccgaccccggaagactttccgcgtcagttagcgctcgtcaaacgcctcgtggatttgctgggattagttcgcttggaagctcctggctacgaggcggacgacgtgctcggtacactggccaagaaagcagaacgtgaaggcatggaggtctgcattcttaccggtgatcgcgatttcttccagctgctgtctgagaaagtgagcgttttgctgcccgatggcacgttagtaaccccgaaagatgtgcaagagaaatatggagttccgccagaacgttgggtggactttcgcgcactgactggtgatcgttcagacaacatcccgggcgttgccgggattggtgaaaagacggcgctgcgcctgctggcagaatggggctcggtggaaaatctgctcaagaaccttgatcgtgtgaaacctgatagcttacgccgcaagatcgaagcccacctggaagacttgcgtctgagtctggatcttgtccgtattcgcaccgatctgccgttggaagtagactttaaagctctgcgtcgtcgcacacccgatttagaggggttacgcgcgttcctcgaagaactggagtttggctccctgctgcatgaattcggtttgttgggcggagagaaaccgcgtgaagaagcaccatggccgccgcccgagggtgcctttgtcggctttcttctgtcacgcaaagagccaatgtgggcggaactgttagctcttgcagccgccgcggaagggcgtgttcaccgcgcgacctctcctgtcgaggccctcgctgacctcaaagaagcacgtggtttcttggcgaaagatttagccgtgcttgcattacgcgaaggcgttgcgctcgatccgacggacgacccgcttttggtggcttatttgctcgatagcgcgaataccaacccggaacgtgtcgcccgtcgttacggcggcgagtttactgaagatgcggcagaacgcgcgttgcttagcgaacgcctcttccagacgttatttccacgtctttcggagaaattactctggctctatcaggaagtcgaacgtccattgagtcgcgtgcttgcccatatggaggctcgcggtgtgcgcttagatgttccgttgttagaagcactcagcttcgagttggagaaagaactggaacgtcttgaaggcgaagtctttcgtttagcggggcatcccttcaatctcaactctcgcgaccaattggagaaagtgctctttgatgaattaggtttaacccctgtcacgcgtacagagaagaccggcaaacgttccacttcggcagccgccttggaagcacttcgtggtgctcacccgatcgtcgagttgattttgcagtatcgcgagctcagcaaactcaaatcaacctatcttgataggttacctcgtcttgttcatccacgtacgggtcgtttacacacccgcttcaatcaaacggcaacagccaccgggcgcttgtcgtcgagtgacccgaacctccagaatattccagtgcgcacgccgctgggccaacacattcgtaaagcgtttgttgcggaagaaggttggttattacttgcggccgattactcccagatcgaacttcgtgtattggcgcatctctctggcgacgagaatcttaaacgcgtgtttcgcgaaggcaaggatattcacactgaaaccgcagcctggatgttcggggtggacccagccttagtggaccccaagatgcgtcgtgccgccaagaccgtcaactttggcgtactctatggtatgtcagcacatcgtcttagtcaggaattgggcattgactacaaagaagctgaagcgtttatcgagcgctatttccaatcctttccgaaagttcgcgcgtggattgaacgtacgctcgaagaaggtcgcactcgcggctatgtggaaacgttattcgggcgtcgtcgctacgttccagatcttgcatctcgtgtccgctcagtgcgcgaagctgctgagcgtatggcctggaatatgcctgttcagggaacagcggcggacctcatgaagatcgccatggtgaaattgtttccgcgcttgaaacccttaggagcccaccttcttttacaggtgcatgatgaattggtcttggaagtacccgaggatcgcgcagaagaagccaaagcactcgtgaaagaggttatggaaaacgcgtatccgttagatgttccgttggaggtcgaagtgggtgtaggccgtgattggcttgaagcgaaacaagactaatga

SEQ ID NO: 576 - protein, 844 aa, synthetic construct
  REGION 1..844: note = DNA Polymerase Variant
MHHHHHHGGSGMLPLFDLEEPPKRVLLVDGHHLAYRTFYALSLTTSRGEPVQMVYGFARSLLKALKEDGQAVVVVFDAKAPSFRHEAYEAYKAGRAPTPEDFPRQLALVKRLVDLLGLVRLEAPGYEADDVLGTLAKKAEREGMEVCILTGDRDFFQLLSEKVSVLLPDGTLVTPKDVQEKYGVPPERWVDFRALTGDRSDNIPGVAGIGEKTALRLLAEWGSVENLLKNLDRVKPDSLRRKIEAHLEDLRLSLDLVRIRTDLPLEVDFKALRRRTPDLEGLRAFLEELEFGSLLHEFGLLGGEKPREEAPWPPPEGAFVGFLLSRKEPMWAELLALAAAAEGRVHRATSPVEALADLKEARGFLAKDLAVLALREGVALDPTDDPLLVAYLLDSANTNPERVARRYGGEFTEDAAERALLSERLFQTLFPRLSEKLLWLYQEVERPLSRVLAHMEARGVRLDVPLLEALSFELEKELERLEGEVFRLAGHPFNLNSRDQLEKVLFDELGLTPVTRTEKTGKRSTSAAALEALRGAHPIVELILQYRELSKLKSTYLDRLPRLVHPRTGRLHTRFNQTATATGRLSSSDPNLQNIPVRTPLGQHIRKAFVAEEGWLLLAADYSQIELRVLAHLSGDENLKRVFREGKDIHTETAAWMFGVDPALVDPKMRRAAKTVNFGVLYGMSAHRLSQELGIDYKEAEAFIERYFQSFPKVRAWIERTLEEGRTRGYVETLFGRRRYVPDLASRVRSVREAAERMAWNMPVQGTAADLMKIAMVKLFPRLKPLGAHLLLQVHDELVLEVPEDRAEEAKALVKEVMENAYPLDVPLEVEVGVGRDWLEAKQD

SEQ ID NO: 577 - DNA, 2538 bp, synthetic construct
  misc_feature 1..2538: note = DNA Polymerase Variant
  source 1..2538: mol_type = other DNA
atgcaccatcatcatcatcatggcggtagcggcatgttaccgctgtttgatttggaagaagcgccaaaacgcgtgctgcttgttgacggccatcatctggcgtatcgtaccttctacgcactgagccttacgacctcacgtggtgagcctgtccagatggtgtatgggtttgctcgctccctgctgaaagccctgaaggaagatggtcaagccgtagtagtggttttcgatgcgaaagcaccgtcgtttcgtcacgaagcgtacgaggcctataaagctggccgcgcaccgaccccggaagactttccgcgtcagttagcgctcgtcaaacgcctcgtggatttgctgggattagttcgcttggaagctcctggctacgaggcggacgacgtgctcggtacactggccaagaaagcagaacgtgaaggcatggaggtctgcattcttaccggtgatcgcgatttcttccagctgctgtctgagaaagtgagcgttttgctgcccgatggcacgttagtaaccccgaaagatgtccaagagaaatatggagttccgccagaacgttgggtggactttcgcgcactgactggtgatcgttcagacaacatcccgggcgttgccgggattggtgaaaagacggcgctgcgcctgctggcagaatggggctcggtggaaaatctgctcaagaaccttgatcgtgtgaaacctgatagcttacgccgcaagatcgaagcccacctggaagacttgcgtctgagtctggatcttgcgcgtattcgcaccgatctgccgttggaagtagactttaaagctctgcgtcgtcgcacacccgatttagaggggttacgcgcgttcctcgaagaactggagtttggctccctgctgcatgaattcggtttgttgggcggagagaaaccgcgtgaagaagcaccatggccgccgcccgaaggtgcctttgtcggctttcttctgtcacgcaaagagccaatgtgggcggaactgttagctcttgcagccgccgcggaagggcgtgttcaccgcgcgacctctcctgtcgaggccctcgctgacctcaaagaagcacgtggtttcttggcgaaagatttagccgtgcttgcattacgcgaaggcgttgcgctcgatccgacggacgacccgcttttggtggcttatttgctcgatcctgcgaataccaacccggaacgtgtcgcccgtcgttacggcggcgagtttactgaagatgcggcagaacgcgcgttgcttagcgaacgcctcttccagacgttatttccacgtctttcggagaaattactctggctctatcaggaagtcgaacgtccattgagtcgcgtgcttgcccatatggaggctcgcggtgtgcgcttagatgttccgttgttagaagcactcagcttcgagttggagaaagaactggaacgtcttgaaggcgaagtctttcgtttagcggggcatcccttcaatctcaactctcgcgaccaattggagaaagtgctctttgatgaattaggtttaacccctgtcacgcgtacagagaagaccggcaaacgttccacttcggcagccgccttggaagcacttcgtggtgctcacccgatcgtcgagttgattttgcagtatcgcgagctcagcaaactcaaatcaacctatcttgataggttacctcgtcttgttcatccacgtacgggtcgtttacacacccgcttcaatcaaacggcgacagccaccgggcgcttgtcgtcgagtgacccgaacctccagaatattccagtgcgcacgccgctgggccaacacattcgtaaagcgtttgttgcggaagaaggttggttattacttgcggccgattactcccagatcgaacttcgtgtattggcgcatctctctggcgacgagaatcttaaacgcgtgtttcgcgaaggcaaggatattcacactgaaaccgcagcctggatgttcggggtggacccagccttagtggaccccaagatgcgtcgtgccgccaagaccgtcaactttggcgtactctatggtatgtcagcacatcgtcttagtcaggaattgggcattgactacaaagaagctgaagcgtttatcgagcgctatttccaatcctttccgaaagttcgcgcgtggattgaacgtaccctcgaagaaggtcgcactcgcggctatgtggaaacgttattcgggcgtcgtcgctacgttccagatcttgcatctcgtgtccgctcagtgcgcgaagctgctgagcgtatggcctggaatatgcctgttcagggaacagcggcggacctcatgaagatcgccatggtgaaattgtttccgcgcttgaaacccttaggagcccaccttcttttacaggtgcatgatgaattggtcttggaagtacccgaggatcgcgcagaagaagccaaagcactcgtgaaagaggttatggaaaacgcgtatccgttagatgttccgttggaggtcgaagtgggtgtaggccgtgattggcttgaagcgaaacaagactaatga

SEQ ID NO: 578 - protein, 844 aa, synthetic construct
  REGION 1..844: note = DNA Polymerase Variant
MHHHHHHGGSGMLPLFDLEEAPKRVLLVDGHHLAYRTFYALSLTTSRGEPVQMVYGFARSLLKALKEDGQAVVVVFDAKAPSFRHEAYEAYKAGRAPTPEDFPRQLALVKRLVDLLGLVRLEAPGYEADDVLGTLAKKAEREGMEVCILTGDRDFFQLLSEKVSVLLPDGTLVTPKDVQEKYGVPPERWVDFRALTGDRSDNIPGVAGIGEKTALRLLAEWGSVENLLKNLDRVKPDSLRRKIEAHLEDLRLSLDLARIRTDLPLEVDFKALRRRTPDLEGLRAFLEELEFGSLLHEFGLLGGEKPREEAPWPPPEGAFVGFLLSRKEPMWAELLALAAAAEGRVHRATSPVEALADLKEARGFLAKDLAVLALREGVALDPTDDPLLVAYLLDPANTNPERVARRYGGEFTEDAAERALLSERLFQTLFPRLSEKLLWLYQEVERPLSRVLAHMEARGVRLDVPLLEALSFELEKELERLEGEVFRLAGHPFNLNSRDQLEKVLFDELGLTPVTRTEKTGKRSTSAAALEALRGAHPIVELILQYRELSKLKSTYLDRLPRLVHPRTGRLHTRFNQTATATGRLSSSDPNLQNIPVRTPLGQHIRKAFVAEEGWLLLAADYSQIELRVLAHLSGDENLKRVFREGKDIHTETAAWMFGVDPALVDPKMRRAAKTVNFGVLYGMSAHRLSQELGIDYKEAEAFIERYFQSFPKVRAWIERTLEEGRTRGYVETLFGRRRYVPDLASRVRSVREAAERMAWNMPVQGTAADLMKIAMVKLFPRLKPLGAHLLLQVHDELVLEVPEDRAEEAKALVKEVMENAYPLDVPLEVEVGVGRDWLEAKQD

SEQ ID NO: 579 - DNA, 2538 bp, synthetic construct
  misc_feature 1..2538: note = DNA Polymerase Variant
  source 1..2538: mol_type = other DNA
atgcaccatcatcatcatcatggcggtagcggcatgttaccgctgtttgatttggaagaaccaccaaaacgcgtgctgcttgttgacggccatcatctggcgtatcgtaccttctacgcactgagccttacgacctcacgtggtgagcctgtccagatggtgtatgggtttgctcgctccctgctgaaagccctgaaggaagatggtcaagccgtagtagtggttttcgatgcgaaagcaccgtcgtttcgtcacgaagcgtacgaggcctataaagctggccgcgcaccgaccccggaagactttccgcgtcagttagcgctcgtcaaacgcctcgtggatttgctgggattagttcgcttggaagctcctggctacgaggcggacgacgtgctcggtacactggccaagaaagcagaacgtgaaggcatggaggtctgcattcttaccggtgatcgcgatttcttccagctgctgtctgagaaagtgagcgttttgctgcccgatggcacgttagtaaccccgaaagatgtccaagagaaatatggagttccgccagaacgttgggtggactttcgcgcactgactggtgatcgttcagacaacatcccgggcgttgccgggattggtgaaaagacggcgctgcgcctgctggcagaatggggctcggtggaaaatctgctcaagaaccttgatcgtgtgaaacctgatagcttacgccgcaagatcgaagcccacctggaagacttgcgtctgagtctggatcttgtacgtattcgcaccgatctgccgttggaagtagactttaaagctctgcgtcgtcgcacacccgatttagaggggttacgcgcgttcctcgaagaactggagtttggctccctgctgcatgaattcggtttgttgggcggagagaaaccgcgtgaagaagcaccatggccgccgcccgaaggtgcctttgtcggctttcttctgtcacgcaaagagccaatgtgggcggaactgttagctcttgcagccgccgcggaagggcgtgttcaccgcgcgacctctcctgtcgaggccctcgctgacctcaaagaagcacgtggtttcttggcgaaagatttagccgtgcttgcattacgcgaaggcgttgcgctcgatccgacggacgacccgcttttggtggcttatttgctcgatcctgcgaataccaacccggaacgtgtcgcccgtcgttacggcggcgagtttactgaagatgcggcagaacgcgcgttgcttagcgaacgcctcttccagacgttatttccacgtctttcggagaaattactctggctctatcaggaagtcgaacgtccatgtagtcgcgtgcttgcccatatggaggctcgcggtgtgcgcttagatgttccgttgttagaagcactcagcttcgaggccagcaaagaactggaacgtcttgaaggcgaagtctttcgtttagcggggcatcccttcaatctcaactctcgcgaccaattggagaaagtgctctttgatgaattaggtttaacccctgtcacgcgtacagagaagaccggcaaacgttccacttcggcagccgccttggaagcacttcgtggtgctcacccgatcgtcgagttgattttgcagtatcgcgagctcagcaaactcaaatcaacctatcttgataggttacctcgtcttgttcatccacgtacgggtcgtttacacacccgcttcaatcaaacggcgacagccaccgggcgcttgtcgtcgagtgacccgaacctccagaatattccagtgcgcacgccgctgggccaacacattcgtaaagcgtttgttgcggaagaaggttggttattacttgcggccgattactcccagatcgaacttcgtgtattggcgcatctctctggcgacgagaatcttaaacgcgtgtttcgcgaaggcaaggatattcacactgaaaccgcagcctggatgttcggggtggacccagccttagtggaccccaagatgcgtcgtgccgccaagaccgtcaactttggcgtactctatggtatgtcagcacatcgtcttagtcaggaattgggcattgactacaaagaagctgaagcgtttatcgagcgctatttccaatcctttccgaaagttcgcgcgtggattgaacgtaccctcgaagaaggtcgcactcgcggctatgtggaaacgttattcgggcgtcgtcgctacgttccagatcttgcatctcgtgtccgctcagtgcgcgaagctgctgagcgtatggcctggaatatgcctgttcagggaacagcggcggacctcatgaagatcgccatggtgaaattgtttccgcgcttgaaacccttaggagcccaccttcttctgcaggtgcatgatgaattggtcttggaagtacccgaggatcgcgcagaagaagccaaagcactcgtgaaagaggttatggaaaacgcgtatccgttagatgttccgttggaggtcgaagtgggtgtaggccgtgattggcttgaagcgaaacaagactaatga

SEQ ID NO: 580 - protein, 844 aa, synthetic construct
  REGION 1..844: note = DNA Polymerase Variant
MHHHHHHGGSGMLPLFDLEEPPKRVLLVDGHHLAYRTFYALSLTTSRGEPVQMVYGFARSLLKALKEDGQAVVVVFDAKAPSFRHEAYEAYKAGRAPTPEDFPRQLALVKRLVDLLGLVRLEAPGYEADDVLGTLAKKAEREGMEVCILTGDRDFFQLLSEKVSVLLPDGTLVTPKDVQEKYGVPPERWVDFRALTGDRSDNIPGVAGIGEKTALRLLAEWGSVENLLKNLDRVKPDSLRRKIEAHLEDLRLSLDLVRIRTDLPLEVDFKALRRRTPDLEGLRAFLEELEFGSLLHEFGLLGGEKPREEAPWPPPEGAFVGFLLSRKEPMWAELLALAAAAEGRVHRATSPVEALADLKEARGFLAKDLAVLALREGVALDPTDDPLLVAYLLDPANTNPERVARRYGGEFTEDAAERALLSERLFQTLFPRLSEKLLWLYQEVERPCSRVLAHMEARGVRLDVPLLEALSFEASKELERLEGEVFRLAGHPFNLNSRDQLEKVLFDELGLTPVTRTEKTGKRSTSAAALEALRGAHPIVELILQYRELSKLKSTYLDRLPRLVHPRTGRLHTRFNQTATATGRLSSSDPNLQNIPVRTPLGQHIRKAFVAEEGWLLLAADYSQIELRVLAHLSGDENLKRVFREGKDIHTETAAWMFGVDPALVDPKMRRAAKTVNFGVLYGMSAHRLSQELGIDYKEAEAFIERYFQSFPKVRAWIERTLEEGRTRGYVETLFGRRRYVPDLASRVRSVREAAERMAWNMPVQGTAADLMKIAMVKLFPRLKPLGAHLLLQVHDELVLEVPEDRAEEAKALVKEVMENAYPLDVPLEVEVGVGRDWLEAKQD

SEQ ID NO: 581 - DNA, 2538 bp, synthetic construct
  misc_feature 1..2538: note = DNA Polymerase Variant
  source 1..2538: mol_type = other DNA
atgcaccatcatcatcatcatggcggtagcggcatgttaccgctgtttgatttggaagaaccaccaaaacgcgtgctgcttgttgacggccatcatctggcgtatcgtaccttctacgcactgagccttacgacctcacgtggtgagcctgtccagatggtgtatgggtttgctcgctccctgctgaaagccctgaaggaagatggtcaagccgtagtagtggttttcgatgcgaaagcaccgtcgtttcgtcacgaagcgtacgaggcctataaagctggccgcgcaccgaccccggaagactttccgcgtcagttagcgctcgtcaaacgcctcgtggatttgctgggattagttcgcttggaagctcctggctacgaggcggacgacgtgctcggtacactggccaagaaagcagaacgtgaaggcatggaggtctgcattcttaccggtgatcgcgatttcttccagctgctgtctgagaaagtgagcgttttgctgcccgatggcacgttagtaaccccgaaagatgtccaagagaaatatggagttccgccagaacgttgggtggactttcgcgcactgactggtgatcgttcagacaacatcccgggcgttgccgggattggtgaaaagacggcgctgcgcctgctggcagaatggggctcggtggaaaatctgctcaagaaccttgatcgtgtgaaacctgatagcttacgccgcaagatcgaagcccacctggaagacttgcgtctgagtctggatcttgcgcgtattcgcaccgatctgccgttggaagtagactttaaagctctgcgtcgtcgcacacccgatttagaggggttacgcgcgttcctcgaagaactggagtttggctccctgctgcatgaattcggtttgttgggcggagagaaaccgcgtgaagaagcaccatggccgccgcccgaaggtgcctttgtcggctttcttctgtcacgcaaagagccaatgtgggcggaactgttagctcttgcagccgccgcggaagggcgtgttcaccgcgcgacctctcctgtcgaggccctcgctgacctcaaagaagcacgtggtttcttggcgaaagatttagccgtgcttgcattacgcgaaggcgttgcgctcgatccgacggacgacccgcttttggtggcttatttgctcgatcctgcgaataccaacccggaacgtgtcgcccgtcgttacggcggcgagtttactgaagatgcggcagaacgcgcgttgcttagcgaacgcctcttccagacgttatttccacgtctttcggagaaattactctggctctatcaggaagtcgaacgtccattgagtcgcgtgcttgcccatatggaggctcgcggtgtgcgcttagatgttccgttgttagaagcactcagcttcgagttggagaaagaactggaacgtcttgaaggcgaagtctttcgtttagcggggcatcccttcaatctcaactctcgcgaccaattggagaaagtgctctttgatgaattaggtttaacccctgtcacgcgtacagagaagaccggcaaacgttccacttcggcagccgccttggaagcacttcgtggtgctcacccgatcgtcgagttgattttgcagtatcgcgagctcagcaaactcaaatcaacctatcttgataggttacctcgtcttgttcatccacgtacgggtcgtttacacacccgcttcaatcaaacggcgacagccaccgggcgcttgtcgtcgagtgacccgaacctccagaatattccagtgcgcacgccgctgggccaacacattcgtaaagcgtttgttgcggaagaaggttggttattacttgcggccgattactcccagatcgaacttcgtgtattggcgcatctctctggcgacgagaatcttaaacgcgtgtttcgcgaaggcaaggatattcacactgaaaccgcagcctggatgttcggggtggacccagccttagtggaccccaagatgcgtcgtgccgccaagaccgtcaactttggcgtactctatggtatgtcagcacatcgtcttagtcaggaattgggcattgactacaaagaagctgaagcgtttatcgagcgctatttccaatcctttccgggggttcgcgcgtggattgaacgtaccctcgaagaaggtcgcactcgcggctatgtggaaacgttattcgggcgtcgtcgctacgttccagatcttgcatctcgtgtccgctcagtgcgcgaagctgctgagcgtatggcctggaatatgcctgttcagggaacagcggcggacctcatgaagatcgccatggtgaaattgtttccgcgcttgaaacccttaggagcccaccttcttttacaggtgcatgatgaattggtcttggaagtacccgaggatcgcgcagaagaagccaaagcactcgtgaaagaggttatggaaaacgcgtatccgttagatgttccgttggaggtcgaagtgggtgtaggccgtgattggcttgaagcgaaacaagactaatga

SEQ ID NO: 582 - protein, 844 aa, synthetic construct
  REGION 1..844: note = DNA Polymerase Variant
MHHHHHHGGSGMLPLFDLEEPPKRVLLVDGHHLAYRTFYALSLTTSRGEPVQMVYGFARSLLKALKEDGQAVVVVFDAKAPSFRHEAYEAYKAGRAPTPEDFPRQLALVKRLVDLLGLVRLEAPGYEADDVLGTLAKKAEREGMEVCILTGDRDFFQLLSEKVSVLLPDGTLVTPKDVQEKYGVPPERWVDFRALTGDRSDNIPGVAGIGEKTALRLLAEWGSVENLLKNLDRVKPDSLRRKIEAHLEDLRLSLDLARIRTDLPLEVDFKALRRRTPDLEGLRAFLEELEFGSLLHEFGLLGGEKPREEAPWPPPEGAFVGFLLSRKEPMWAELLALAAAAEGRVHRATSPVEALADLKEARGFLAKDLAVLALREGVALDPTDDPLLVAYLLDPANTNPERVARRYGGEFTEDAAERALLSERLFQTLFPRLSEKLLWLYQEVERPLSRVLAHMEARGVRLDVPLLEALSFELEKELERLEGEVFRLAGHPFNLNSRDQLEKVLFDELGLTPVTRTEKTGKRSTSAAALEALRGAHPIVELILQYRELSKLKSTYLDRLPRLVHPRTGRLHTRFNQTATATGRLSSSDPNLQNIPVRTPLGQHIRKAFVAEEGWLLLAADYSQIELRVLAHLSGDENLKRVFREGKDIHTETAAWMFGVDPALVDPKMRRAAKTVNFGVLYGMSAHRLSQELGIDYKEAEAFIERYFQSFPGVRAWIERTLEEGRTRGYVETLFGRRRYVPDLASRVRSVREAAERMAWNMPVQGTAADLMKIAMVKLFPRLKPLGAHLLLQVHDELVLEVPEDRAEEAKALVKEVMENAYPLDVPLEVEVGVGRDWLEAKQD

SEQ ID NO: 583 - DNA, 2538 bp, synthetic construct
  misc_feature 1..2538: note = DNA Polymerase Variant
  source 1..2538: mol_type = other DNA
atgcaccatcatcatcatcatggcggtagcggcatgttaccgctgtttgatttggaagaaccaccaaaacgcgtgctgcttgttgacggccatcatctggcgtatcgtaccttctacgcactgagccttacgacctcacgtggtgagcctgtccagatggtgtatgggtttgctcgctccctgctgaaagccctgaaggaagatggtcaagccgtagtagtggttttcgatgcgaaagcaccgtcgtttcgtcacgaagcgtacgaggcctataaagctggccgcgcaccgaccccggaagactttccgcgtcagttagcgctcgtcaaacgcctcgtggatttgctgggattagttcgcttggaagctcctggctacgaggcggacgacgtgctcggtacactggccaagaaagcagaacgtgaaggcatggaggtctgcattcttaccggtgatcgcgatttcttccagctgctgtctgagaaagtgagcgttttgctgcccgatggcacgttagtaaccccgaaagatgtccaagagaaatatggagttccgccagaacgttgggtggactttcgcgcactgactggtgatcgttcagacaacatcccgggcgttgccgggattggtgaaaagacggcgctgcgcctgctggcagaatggggctcggtggaaaatctgctcaagaaccttgatcgtgtgaaacctgatagcttacgccgcaagatcgaagcccacctggaagacttgcgtctgagtctggatcttgcgcgtattcgcaccgatctgccgttggaagtagactttaaagctctgcgtcgtcgcacacccgatttagaggggttacgcgcgttcctcgaagaactggagtttggctccctgctgcatgaattcggtttgttgggcggagagaaaccgcgtgaagaagcaccatggccgccgcccgaaggtgcctttgtcggctttcttctgtcacgcaaagagccaatgtgggcggaactgttagctcttgcagccgccgcggaagggcgtgttcaccgcgcgacctctcctgtcgaggccctcgctgacctcaaagaagcacgtggtttcttggcgaaagatttagccgtgcttgcattacgcgaaggcgttgcgctcgatccgacggacgacccgcttttggtggcttatttgctcgatcctgcgaataccaacccggaacgtgtcgcccgtcgttacggcggcgagtttactgaagatgcggcagaacgcgcgttgcttagcgaacgcctcttccagacgttatttccacgtctttcggagaaattactctggctctatcaggaagtcgaacgtccattgagtcgcgtgcttgcccatatggaggctcgcggtgtgcgcttagatgttccgttgttagaagcactcagcttcgagttggagaaagaactggaacgtcttgaaggcgaagtctttcgtttagcggggcatcccttcaatctcaactctcgcgaccaattggagaaagtgctctttgatgaattaggtttaacccctgtcacgcgtacagagaagaccggcaaacgttccacttcggcagccgccttggaagcacttcgtggtgctcacccgatcgtcgagttgattttgcagtatcgcgagctcagcaaactcaaatcaacctatcttgataggttacctcgtcttgttcatccacgtacgggtcgtttacacacccgcttcaatcaaacggcgacagccaccgggcgcttgtcgtcgagtgacccgaacctccagaatattccagtgcgcacgccgctgggccaacacattcgtaaagcgtttgttgcggaagaaggttggttattacttgcggccgattactcccagatcgaacttcgtgtattggcgcatctctctggcgacgagaatcttaaagctgtgtttcgcgaaggcaaggatattcacactgaaaccgcagcctggatgttcggggtggacccagccttagtggaccccaagatgcgtcgtgccgccaagaccgtcaactttggcgtactctatggtatgtcagcacatcgtcttagtcaggaattgggcattgactacaaagaagctgaagcgtttatcgagcgctatttccaatcctttccgaaagttcgcgcgtggattgaacgtaccctcgaagaaggtcgcactcgcggctatgtggaaacgttattcgggcgtcgtcgctacgttccagatcttgcatctcgtgtccgctcagtgcgcgaagctgctgagcgtatggcctggaatatgcctgttcagggaacagcggcggacctcatgaagatcgccatggtgaaattgtttccgcgcttgaaacccttaggagcccaccttcttttacaggtgcatgatgaattggtcttggaagtacccgaggatcgcgcagaagaagccaaagcactcgtgaaagaggttatggaaaacgcgtatccgttagatgttccgttggaggtcgaagtgggtgtaggccgtgattggcttgaagcgaaacaagactaatga

SEQ ID NO: 584 - protein, 844 aa, synthetic construct
  REGION 1..844: note = DNA Polymerase Variant
MHHHHHHGGSGMLPLFDLEEPPKRVLLVDGHHLAYRTFYALSLTTSRGEPVQMVYGFARSLLKALKEDGQAVVVVFDAKAPSFRHEAYEAYKAGRAPTPEDFPRQLALVKRLVDLLGLVRLEAPGYEADDVLGTLAKKAEREGMEVCILTGDRDFFQLLSEKVSVLLPDGTLVTPKDVQEKYGVPPERWVDFRALTGDRSDNIPGVAGIGEKTALRLLAEWGSVENLLKNLDRVKPDSLRRKIEAHLEDLRLSLDLARIRTDLPLEVDFKALRRRTPDLEGLRAFLEELEFGSLLHEFGLLGGEKPREEAPWPPPEGAFVGFLLSRKEPMWAELLALAAAAEGRVHRATSPVEALADLKEARGFLAKDLAVLALREGVALDPTDDPLLVAYLLDPANTNPERVARRYGGEFTEDAAERALLSERLFQTLFPRLSEKLLWLYQEVERPLSRVLAHMEARGVRLDVPLLEALSFELEKELERLEGEVFRLAGHPFNLNSRDQLEKVLFDELGLTPVTRTEKTGKRSTSAAALEALRGAHPIVELILQYRELSKLKSTYLDRLPRLVHPRTGRLHTRFNQTATATGRLSSSDPNLQNIPVRTPLGQHIRKAFVAEEGWLLLAADYSQIELRVLAHLSGDENLKAVFREGKDIHTETAAWMFGVDPALVDPKMRRAAKTVNFGVLYGMSAHRLSQELGIDYKEAEAFIERYFQSFPKVRAWIERTLEEGRTRGYVETLFGRRRYVPDLASRVRSVREAAERMAWNMPVQGTAADLMKIAMVKLFPRLKPLGAHLLLQVHDELVLEVPEDRAEEAKALVKEVMENAYPLDVPLEVEVGVGRDWLEAKQD

SEQ ID NO: 585 - DNA, 2538 bp, synthetic construct
  misc_feature 1..2538: note = DNA Polymerase Variant
  source 1..2538: mol_type = other DNA
atgcaccatcatcatcatcatggcggtagcggcatgttaccgctgtttgatttggaagaaccaccaaaacgcgtgctgcttgttgacggccatcatctggcgtatcgtaccttctacgcactgagccttacgacctcacgtggtgagcctgtccagatggtgtatgggtttgctcgctccctgctgaaagccctgaaggaagatggtcaagccgtagtagtggttttcgatgcgaaagcaccgtcgtttcgtcacgaagcgtacgaggcctataaagctggccgcgcaccgaccccggaagactttccgcgtcagttagcgctcgtcaaacgcctcgtggatttgctgggattagttcgcttggaagctcctggctacgaggcggacgacgtgctcggtacactggccaagaaagcagaacgtgaaggcatggaggtctgcattcttaccggtgatcgcgatttcttccagctgctgtctgagaaagtgagcgttttgctgcccgatggcacgttagtaaccccgaaagatgtccaagagaaatatggagttccgccagaacgttgggtggactttcgcgcactgactggtgatcgttcagacaacatcccgggcgttgccgggattggtgaaaagacggcgctgcgcctgctggcagaatggggctcggtggaaaatctgctcaagaaccttgatcgtgtgaaacctgatagcttacgccgcaagatcgaagcccacctggaagacttgcgtctgagtctggatcttgcgcgtattcgcaccgatctgccgttggaagtagactttaaagctctgcgtcgtcgcacacccgatttagaggggttacgcgcgttcctcgaagaactggagtttggctccctgctgcatgaattcggtttgttgggcggagagaaaccgcgtgaagaagcaccatggccgccgcccgaaggtgcctttgtcggctttcttctgtcacgcaaagagccaatgtgggcggaactgttagctcttgcagccgccgcggaagggcgtgttcaccgcgcgacctctcctgtcgaggccctcgctgacctcaaagaagcacgtggtttcttggcgaaagatttagccgtgcttgcattacgcgaaggcgttgcgctcgatccgacggacgacccgcttttggtggcttatttgctcgatcctgcgaataccaacccggaacgtgtcgcccgtcgttacggcggcgagtttactgaagatgcggcagaacgcgcgttgcttagcgaacgcctcttccagacgttatttccacgtctttcggagaaattactctggctctatggggaagtcgaacgtccattgagtcgcgtgcttgcccatatggaggctcgcggtgtgcgcttagatgttccgttgttagaagcactcagcttcgagttggagaaagaactggaacgtcttgaaggcgaagtctttcgtttagcggggcatcccttcaatctcaactctcgcgaccaattggagaaagtgctctttgatgaattaggtttaacccctgtcacgcgtacagagaagaccggcaaacgttccacttcggcagccgccttggaagcacttcgtggtgctcacccgatcgtcgagttgattttgcagtatcgcgagctcagcaaactcaaatcaacctatcttgataggttacctcgtcttgttcatccacgtacgggtcgtttacacacccgcttcaatcaaacggcgacagccaccgggcgcttgtcgtcgagtgacccgaacctccagaatattccagtgcgcacgccgctgggccaacacattcgtaaagcgtttgttgcggaagaaggttggttattacttgcggccgattactcccagatcgaacttcgtgtattggcgcatctctctggcgacgagaatcttaaacgcgtgtttcgcgaaggcaaggatattcacactgaaaccgcagcctggatgttcggggtggacccagccttagtggaccccaagatgcgtcgtgccgccaagaccgtcaactttggcgtactctatggtatgtcagcacatcgtcttagtcaggaattgggcattgactacaaagaagctgaagcgtttatcgagcgctatttccaatcctttccgaaagttcgcgcgtggattgaacgtaccctcgaagaaggtcgcactcgcggctatgtggaaacgttattcgggcgtcgtcgctacgttccagatcttgcatctcgtgtccgctcagtgcgcgaagctgctgagcgtatggcctggaatatgcctgttcagggaacagcggcggacctcatgaagatcgccatggtgaaattgtttccgcgcttgaaacccttaggagcccaccttcttttacaggtgcatgatgaattggtcttggaagtacccgaggatcgcgcagaagaagccaaagcactcgtgaaagaggttatggaaaacgcgtatccgttagatgttccgttggaggtcgaagtgggtgtaggccgtgattggcttgaagcgaaacaagactaatga

SEQ ID NO: 586 - protein, 844 aa, synthetic construct
  REGION 1..844: note = DNA Polymerase Variant
MHHHHHHGGSGMLPLFDLEEPPKRVLLVDGHHLAYRTFYALSLTTSRGEPVQMVYGFARSLLKALKEDGQAVVVVFDAKAPSFRHEAYEAYKAGRAPTPEDFPRQLALVKRLVDLLGLVRLEAPGYEADDVLGTLAKKAEREGMEVCILTGDRDFFQLLSEKVSVLLPDGTLVTPKDVQEKYGVPPERWVDFRALTGDRSDNIPGVAGIGEKTALRLLAEWGSVENLLKNLDRVKPDSLRRKIEAHLEDLRLSLDLARIRTDLPLEVDFKALRRRTPDLEGLRAFLEELEFGSLLHEFGLLGGEKPREEAPWPPPEGAFVGFLLSRKEPMWAELLALAAAAEGRVHRATSPVEALADLKEARGFLAKDLAVLALREGVALDPTDDPLLVAYLLDPANTNPERVARRYGGEFTEDAAERALLSERLFQTLFPRLSEKLLWLYGEVERPLSRVLAHMEARGVRLDVPLLEALSFELEKELERLEGEVFRLAGHPFNLNSRDQLEKVLFDELGLTPVTRTEKTGKRSTSAAALEALRGAHPIVELILQYRELSKLKSTYLDRLPRLVHPRTGRLHTRFNQTATATGRLSSSDPNLQNIPVRTPLGQHIRKAFVAEEGWLLLAADYSQIELRVLAHLSGDENLKRVFREGKDIHTETAAWMFGVDPALVDPKMRRAAKTVNFGVLYGMSAHRLSQELGIDYKEAEAFIERYFQSFPKVRAWIERTLEEGRTRGYVETLFGRRRYVPDLASRVRSVREAAERMAWNMPVQGTAADLMKIAMVKLFPRLKPLGAHLLLQVHDELVLEVPEDRAEEAKALVKEVMENAYPLDVPLEVEVGVGRDWLEAKQD

SEQ ID NO: 587 - DNA, 2538 bp, synthetic construct
  misc_feature 1..2538: note = DNA Polymerase Variant
  source 1..2538: mol_type = other DNA
atgcaccatcatcatcatcatggcggtagcggcatgttaccgctgtttgatttggaagaaccaccaaaacgcgtgctgcttgttgacggccatcatctggcgtatcgtaccttctacgcactgagccttacgacctcacgtggtgagcctgtccagatggtgtatgggtttgctcgctccctgctgaaagccctgaaggaagatggtcaagccgtagtagtggttttcgatgcgaaagcaccgtcgtttcgtcacgaagcgtacgaggcctataaagctggccgcgcaccgaccccggaagactttccgcgtcagttagcgctcgtcaaacgcctcgtggatttgctgggattagttcgcttggaagctcctggctacgaggcggacgacgtgctcggtacactggccaagaaagcagaacgtgaaggcatggaggtctgcattcttaccggtgatcgcgatttcttccagctgctgtctgagaaagtgagcgttttgctgcccgatggcacgttagtaaccccgaaagatgtccaagagaaatatggagttccgccagaacgttgggtggactttcgcgcactgactggtgatcgttcagacaacatcccgggcgttgccgggattggtgaaaagacggcgctgcgcctgctggcagaatggggctcggtggaaaatctgctcaagaaccttgatcgtgtgaaacctgatagcttacgccgcaagatcgaagcccacctggaagacttgcgtctgagtctggatcttgcgcgtattcgcaccgatctgccgttggaagtagactttaaagctctgcgtcgtcgcacacccgatttagaggggttacgcgcgttcctcgaagaactggagtttggctccctgctgcatgaattcggtttgttgggcggagagaaaccgcgtgaagaagcaccatggccgccgcccgaaggtgcctttgtcggctttcttctgtcacgcaaagagccaatgtgggcggaactgttagctcttgcagccgccgcggaagggcgtgttcaccgcgcgacctctcctgtcgaggccctcgctgacctcaaagaagcacgtggtttcttggcgaaagatttagccgtgcttgcattacgcgaaggcgttgcgctcgatccgacggacgacccgcttttggtggcttatttgctcgatcctgcgaataccaacccggaacgtgtcgcccgtcgttacggcggcgagtttactgaagatgcggcagaacgcgcgttgcttagcgaacgcctcttccagacgttatttccacgtctttcggagaaattactctggctctatcaggaagtcgaacgtccattgagtcgcgtgcttgcccatatggaggctcgcggtgtgcgcttagatgttccgttgttagaagcactcagcttcgagttggagaaagaactggaacgtcttgaaggcgaagtctttcgtttagcggggcatcccttcaatctcaactctcgcgaccaattggagaaagtgctctttgatgaattaggtttaacccctgtcacgcgtacagagaagaccggcaaacgttccacttcggcagccgccttggaagcacttcgtggtgctcacccgatcgtcgagttgattttgcagtatcgcgagctcagcaaactcaaatcaacctatcttgataggttacctcgtcttgttcatccacgtacgggtcgtttacacacccgcttcaatcaaacggcgacagccaccgggcgcttgtcgtcgagtgacccgaacctccagaatattccagtgcgcacgccgctgggccaacacattcgtaaagcgtttgttgcggaagaaggttggttattacttgcggccgattactcccagatcgaacttcgtgtattggcgcatctctctggcgacgagaatcttaaacgcgtgtttcgcgaaggcaaggatattcacactgaaaccgcagcctcgatgttcggggtggacccagccttagtggaccccaagatgcgtcgtgccgccaagaccgtcaactttggcgtactctatggtatgtcagcacatcgtcttagtcaggaattgggcattgactacaaagaagctgaagcgtttatcgagcgctatttccaatcctttccgaaagttcgcgcgtggattgaacgtaccctcgaagaaggtcgcactcgcggctatgtggaaacgttattcgggcgtcgtcgctacgttccagatcttgcatctcgtgtccgctcagtgcgcgaagctgctgagcgtatggcctggaatatgcctgttcagggaacagcggcggacctcatgaagatcgccatggtgaaattgtttccgcgcttgaaacccttaggagcccaccttcttttacaggtgcatgatgaattggtcttggaagtacccgaggatcgcgcagaagaagccaaagcactcgtgaaagaggttatggaaaacgcgtatccgttagatgttccgttggaggtcgaagtgggtgtaggccgtgattggcttgaagcgaaacaagactaatga

SEQ ID NO: 588 - protein, 844 aa, synthetic construct
  REGION 1..844: note = DNA Polymerase Variant
MHHHHHHGGSGMLPLFDLEEPPKRVLLVDGHHLAYRTFYALSLTTSRGEPVQMVYGFARSLLKALKEDGQAVVVVFDAKAPSFRHEAYEAYKAGRAPTPEDFPRQLALVKRLVDLLGLVRLEAPGYEADDVLGTLAKKAEREGMEVCILTGDRDFFQLLSEKVSVLLPDGTLVTPKDVQEKYGVPPERWVDFRALTGDRSDNIPGVAGIGEKTALRLLAEWGSVENLLKNLDRVKPDSLRRKIEAHLEDLRLSLDLARIRTDLPLEVDFKALRRRTPDLEGLRAFLEELEFGSLLHEFGLLGGEKPREEAPWPPPEGAFVGFLLSRKEPMWAELLALAAAAEGRVHRATSPVEALADLKEARGFLAKDLAVLALREGVALDPTDDPLLVAYLLDPANTNPERVARRYGGEFTEDAAERALLSERLFQTLFPRLSEKLLWLYQEVERPLSRVLAHMEARGVRLDVPLLEALSFELEKELERLEGEVFRLAGHPFNLNSRDQLEKVLFDELGLTPVTRTEKTGKRSTSAAALEALRGAHPIVELILQYRELSKLKSTYLDRLPRLVHPRTGRLHTRFNQTATATGRLSSSDPNLQNIPVRTPLGQHIRKAFVAEEGWLLLAADYSQIELRVLAHLSGDENLKRVFREGKDIHTETAASMFGVDPALVDPKMRRAAKTVNFGVLYGMSAHRLSQELGIDYKEAEAFIERYFQSFPKVRAWIERTLEEGRTRGYVETLFGRRRYVPDLASRVRSVREAAERMAWNMPVQGTAADLMKIAMVKLFPRLKPLGAHLLLQVHDELVLEVPEDRAEEAKALVKEVMENAYPLDVPLEVEVGVGRDWLEAKQD

SEQ ID NO: 589 - DNA, 2538 bp, synthetic construct
  misc_feature 1..2538: note = DNA Polymerase Variant
  source 1..2538: mol_type = other DNA
atgcaccatcatcatcatcatggcggtagcggcatgttaccgctgtttgatttggaagaaccaccaaaacgcgtgctgcttgttgacggccatcatctggcgtatcgtaccttctacgcactgagccttacgacctcacgtggtgagcctgtccagatggtgtatgggtttgctcgctccctgctgaaagccctgaaggaagatggtcaagccgtagtagtggttttcgatgcgaaagcaccgtcgtttcgtcacgaagcgtacgaggcctataaagctggccgcgcaccgaccccggaagactttccgcgtcagttagcgctcgtcaaacgcctcgtggatttgctgggattagttcgcttggaagctcctggctacgaggcggacgacgtgctcggtacactggccaagaaagcagaacgtgaaggcatggaggtctgcattcttaccggtgatcgcgatttcttccagctgctgtctgagaaagtgagcgttttgctgcccgatggcacgttagtaaccccgaaagatgtccaagagaaatatggagttccgccagaacgttgggtggactttcgcgcactgactggtgatcgttcagacaacatcccgggcgttgccgggattggtgaaaagacggcgctgcgcctgctggcagaatggggctcggtggaaaatctgctcaagaaccttgatcgtgtgaaacctgatagcttacgccgcaagatcgaagcccacctggaagacttgcgtctgagtctggatcttgcacgtattcgcaccgatctgccgttggaagtagactttaaagctctgcgtcgtcgcacacccgatttagaggggttacgcgcgttcctcgaagaactggagtttggctccctgctgcatgaattcggtttgttgggcggagagaaaccgcgtgaagaagcaccatggccgccgcccgaaggtgcctttgtcggctttcttctgtcacgcaaagagccaatgtgggcggaactgttagctcttgcagccgccgcggaagggcgtgttcaccgcgcgacctctcctgtcgaggccctcgctgacctcaaagaagcacgtggtttcttggcgaaagatttagccgtgcttgcattacgcgaaggcgttgcgctcgatccgacggacgacccgcttttggtggcttatttgctcgatcctgcgaataccaacccggaacgtgtcgcccgtcgttacggcggcgagtttactgaagatgcggcagaacgcgcgttgcttagcgaacgcctcttccagacgttatttccacgtctttcggagaaattactctggctctatcaggaagtcgaacgtccactgagtcgcgtgcttgcccatatggaggctcgcggtgtgcgcttagatgttccgttgttagaagcactcagcttcgagctgagcaaagaactggaacgtcttgaaggcgaagtctttcgtttagcggggcatcccttcaatctcaactctcgcgaccaattggagaaagtgctctttgatgaattaggtttaacccctgtcacgcgtacagagaagaccggcaaacgttccacttcggcagccgccttggaagcacttcgtggtgctcacccgatcgtcgagttgattttgcagtatcgcgagctcagcaaactcaaatcaacctatcttgataggttacctcgtcttgttcatccacgtacgggtcgtttacacacccgcttcaatcaaacggcgacagccaccgggcgcttgtcgtcgagtgacccgaacctccagaatattccagtgcgcacgccgctgggccaacacattcgtaaagcgtttgttgcggaagaaggttggttattacttgcggccgattactcccagatcgaacttcgtgtattggcgcatctctctggcgacgagaatcttaaacgcgtgtttcgcgaaggcaaggatattcacactgaaaccgcagcctggatgttcggggtggacccagccttagtggaccccaagatgcgtcgtgccgccaagaccgtcaactttggcgtactctatggtatgtcagcacatcgtcttagtcaggaattgggcattgactacaaagaagctgaagcgtttgtcgagcgctatttccaatcctttccgaaagttcgcgcgtggattgaacgtaccctcgaagaaggtcgcactcgcggctatgtggaaacgttattcgggcgtcgtcgctacgttccagatcttgcatctcgtgtccgctcagtgcgcgaagctgctgagcgtatggcctggaatatgcctgttcagggaacagcggcggacctcatgaagatcgccatggtgaaattgtttccgcgcttgaaacccttaggagcccaccttcttctgcaggtgcatgatgaattggtcttggaagtacccgaggatcgcgcagaagaagccaaagcactcgtgaaagaggttatggaaaacgcgtatccgttagatgttccgttggaggtcgaagtgggtgtaggccgtgattggcttgaagcgaaacaagactaatga

SEQ ID NO: 590 - protein, 844 aa, synthetic construct
  REGION 1..844: note = DNA Polymerase Variant
MHHHHHHGGSGMLPLFDLEEPPKRVLLVDGHHLAYRTFYALSLTTSRGEPVQMVYGFARSLLKALKEDGQAVVVVFDAKAPSFRHEAYEAYKAGRAPTPEDFPRQLALVKRLVDLLGLVRLEAPGYEADDVLGTLAKKAEREGMEVCILTGDRDFFQLLSEKVSVLLPDGTLVTPKDVQEKYGVPPERWVDFRALTGDRSDNIPGVAGIGEKTALRLLAEWGSVENLLKNLDRVKPDSLRRKIEAHLEDLRLSLDLARIRTDLPLEVDFKALRRRTPDLEGLRAFLEELEFGSLLHEFGLLGGEKPREEAPWPPPEGAFVGFLLSRKEPMWAELLALAAAAEGRVHRATSPVEALADLKEARGFLAKDLAVLALREGVALDPTDDPLLVAYLLDPANTNPERVARRYGGEFTEDAAERALLSERLFQTLFPRLSEKLLWLYQEVERPLSRVLAHMEARGVRLDVPLLEALSFELSKELERLEGEVFRLAGHPFNLNSRDQLEKVLFDELGLTPVTRTEKTGKRSTSAAALEALRGAHPIVELILQYRELSKLKSTYLDRLPRLVHPRTGRLHTRFNQTATATGRLSSSDPNLQNIPVRTPLGQHIRKAFVAEEGWLLLAADYSQIELRVLAHLSGDENLKRVFREGKDIHTETAAWMFGVDPALVDPKMRRAAKTVNFGVLYGMSAHRLSQELGIDYKEAEAFVERYFQSFPKVRAWIERTLEEGRTRGYVETLFGRRRYVPDLASRVRSVREAAERMAWNMPVQGTAADLMKIAMVKLFPRLKPLGAHLLLQVHDELVLEVPEDRAEEAKALVKEVMENAYPLDVPLEVEVGVGRDWLEAKQD

SEQ ID NO: 591 - DNA, 2538 bp, synthetic construct
  misc_feature 1..2538: note = DNA Polymerase Variant
  source 1..2538: mol_type = other DNA
atgcaccatcatcatcatcatggcggtagcggcatgttaccgctgtttgatttggaagaaccaccaaaacgcgtgctgcttgttgacggccatcatctggcgtatcgtaccttctacgcactgagccttacgacctcacgtggtgagcctgtccagatggtgtatgggtttgctcgctccctgctgaaagccctgaaggaagatggtcaagccgtagtagtggttttcgatgcgaaagcaccgtcgtttcgtcacgaagcgtacgaggcctataaagctggccgcgcaccgaccccggaagactttccgcgtcagttagcgctcgtcaaacgcctcgtggatttgctgggattagttcgcttggaagctcctggctacgaggcggacgacgtgctcggtacactggccaagaaagcagaacgtgaaggcatggaggtctgcattcttaccggtgatcgcgatttcttccagctgctgtctgagaaagtgagcgttttgctgcccgatggcacgttagtaaccccgaaagatgtccaagagaaatatggagttccgccagaacgttgggtggactttcgcgcactgactggtgatcgttcagacaacatcccgggcgttgccgggattggtgaaaagacggcgctgcgcctgctggcagaatggggctcggtggaaaatctgctcaagaaccttgatcgtgtgaaacctgatagcttacgccgcaagatcgaagcccacctggaagacttgcgtctgagtctggatcttgcgcgtattcgcaccgatctgccgttggaagtagactttaaagctctgcgtcgtcgcacacccgatttagaggggttacgcgcgttcctcgaagaactggagtttggctccctgctgcatgaattcggtttgttgggcggagagaaaccgcgtgaagaagcaccatggccgccgcccgaaggtgcctttgtcggctttcttctgtcacgcaaagagccaatgtgggcggaactgttagctcttgcagccgccgcggaagggcgtgttcaccgcgcgacctctcctgtcgaggccctcgctgacctcaaagaagcacgtggtttcttggcgaaagatttagccgtgcttgcattacgcgaaggcgttgcgctcgatccgacggacgacccgcttttggtggcttatttgctcgatcctgcgaataccaacccggaacgtgtcgcccgtcgttacggcggcgagtttactgaagatgcggcagaacgcgcgttgcttagcgaacgcctcttccagacgttatttccacgtctttcggagaaattactctggctctatcaggaagtcgaacgtccattgagtcgcgtgcttgcccatatggaggctcgcggtgtgcgcttagatgttccgttgttagaagcactcagcttcgagttggagaaagaactggaacgtcttgaaggcgaagtctttcgtttagcggggcatcccttcaatctcaactctcgcgaccaattggagaaagtgctctttgatgaattaggtttaacccctgtcacgcgtacagagaagaccggcaaacgttccacttcggcagccgccttggaagcacttcgtggtgctcacccgatcgtcgagttgattttgcagtatcgcgagctcagcaaactcaaatcaacctatcttgataggttacctcgtcttgttcatccacgtacgggtcgtttacacacccgcttcaatcaaacggcgacagccaccgggcgcttgtcgtcgagtgacccgaacctccagaatattccagtgcgcacgccgctgggccaacacattcgtaaagcgtttgttgcggaagaaggttggttattacttgcggccgattactcccagatcgaacttcgtgtattggcgcatctctctggcgacgagaatcttaaacgcgtgtttcgcgaaggcaaggatattcacactgaaaccgcagcctggatgttcggggtggacccagccttagtggaccccaagatgcgtcgtgccgccaagaccgtcaactttggcgtactctatggtatgtcagcacatcgtcttagtcaggaattgggcattgactacaaagaagctgaagcgtttatcgagcgctatttccaatcctttccgaaagttcgcgcgtggattgaacgtaccctcgaagaaggtcgcactcgcggctatgtggaaacgttattcgggcgtcgtcgctacgttaaggatcttgcatctcgtgtccgctcagtgcgcgaagctgctgagcgtatggcctggaatatgcctgttcagggaacagcggcggacctcatgaagatcgccatggtgaaattgtttccgcgcttgaaacccttaggagcccaccttcttttacaggtgcatgatgaattggtcttggaagtacccgaggatcgcgcagaagaagccaaagcactcgtgaaagaggttatggaaaacgcgtatccgttagatgttccgttggaggtcgaagtgggtgtaggccgtgattggcttgaagcgaaacaagactaatga

SEQ ID NO: 592 - protein, 844 aa, synthetic construct
  REGION 1..844: note = DNA Polymerase Variant
MHHHHHHGGSGMLPLFDLEEPPKRVLLVDGHHLAYRTFYALSLTTSRGEPVQMVYGFARSLLKALKEDGQAVVVVFDAKAPSFRHEAYEAYKAGRAPTPEDFPRQLALVKRLVDLLGLVRLEAPGYEADDVLGTLAKKAEREGMEVCILTGDRDFFQLLSEKVSVLLPDGTLVTPKDVQEKYGVPPERWVDFRALTGDRSDNIPGVAGIGEKTALRLLAEWGSVENLLKNLDRVKPDSLRRKIEAHLEDLRLSLDLARIRTDLPLEVDFKALRRRTPDLEGLRAFLEELEFGSLLHEFGLLGGEKPREEAPWPPPEGAFVGFLLSRKEPMWAELLALAAAAEGRVHRATSPVEALADLKEARGFLAKDLAVLALREGVALDPTDDPLLVAYLLDPANTNPERVARRYGGEFTEDAAERALLSERLFQTLFPRLSEKLLWLYQEVERPLSRVLAHMEARGVRLDVPLLEALSFELEKELERLEGEVFRLAGHPFNLNSRDQLEKVLFDELGLTPVTRTEKTGKRSTSAAALEALRGAHPIVELILQYRELSKLKSTYLDRLPRLVHPRTGRLHTRFNQTATATGRLSSSDPNLQNIPVRTPLGQHIRKAFVAEEGWLLLAADYSQIELRVLAHLSGDENLKRVFREGKDIHTETAAWMFGVDPALVDPKMRRAAKTVNFGVLYGMSAHRLSQELGIDYKEAEAFIERYFQSFPKVRAWIERTLEEGRTRGYVETLFGRRRYVKDLASRVRSVREAAERMAWNMPVQGTAADLMKIAMVKLFPRLKPLGAHLLLQVHDELVLEVPEDRAEEAKALVKEVMENAYPLDVPLEVEVGVGRDWLEAKQD

SEQ ID NO: 593 - DNA, 2538 bp, synthetic construct
  misc_feature 1..2538: note = DNA Polymerase Variant
  source 1..2538: mol_type = other DNA
atgcaccatcatcatcatcatggcggtagcggcatgttaccgctgtttgatttggaagaaccaccaaaacgcgtgctgcttgttgacggccatcatctggcgtatcgtaccttctacgcactgagccttacgacctcacgtggtgagcctgtccagatggtgtatgggtttgctcgctccctgctgaaagccctgaaggaagatggtcaagccgtagtagtggttttcgatgcgaaagcaccgtcgtttcgtcacgaagcgtacgaggcctataaagctggccgcgcaccgaccccggaagactttccgcgtcagttagcgctcgtcaaacgcctcgtggatttgctgggattagttcgcttggaagctcctggctacgaggcggacgacgtgctcggtacactggccaagaaagcagaacgtgaaggcatggaggtctgcattcttaccggtgatcgcgatttcttccagctgctgtctgagaaagtgagcgttttgctgcccgatggcacgttagtaaccccgaaagatgtccaagagaaatatggagttccgccagaacgttgggtggactttcgcgcactgactggtgatcgttcagacaacatcccgggcgttgccgggattggtgaaaagacggcgctgcgcctgctggcagaatggggctcggtggaaaatctgctcaagaaccttgatcgtgtgaaacctgatagcttacgccgcaagatcgaagcccacctggaagacttgcgtctgagtctggatcttgcgcgtattcgcaccgatctgccgttggaagtagactttaaagctctgcgtcgtcgcacacccgatttagaggggttacgcgcgttcctcgaagaactggagtttggctccctgctgcatgaattcggtttgttgggcggagagaaaccgcgtgaagaagcaccatggccgccgcccgaaggtgcctttgtcggctttcttctgtcacgcaaagagccaatgtgggcggaactgttagctcttgcagccgccgcggaagggcgtgttcaccgcgcgacctctcctgtcgaggccctcgctgacctcaaagaagcacgtggtttcttggcgaaagatttagccgtgcttgcattacgcgaaggcgttgcgctcgatccgacggacgacccgcttttggtggcttatttgctcgatcctgcgaataccaacccggaacgtgtcgcccgtcgttacggcggcgagtttactgaagatgcggcagaacgcgcgttgcttagcgaacgcctcttccagacgttatttccacgtctttcggagaaattactctggctctatcaggaagtcgaacgtccattgagtcgcgtgcttgcccatatggaggctcgcggtgtgcgcttagatgttccgttgttagaagcactcagcttcgagttggagaaagaactggaacgtcttgaaggcgaagtctttcgtttagcggggcatcccttcaatctcaactctcgcgaccaattggagaaagtgctctttgatgaattaggtttaacccctgtcacgcgtacagagaagaccggcaaacgttccacttcggcagccgccttggaagcacttcgtggtgctcacccgatcgtcgagttgattttgcagtatcgcgagctcagcaaactcaaatcaacctatcttgataggttacctcgtcttgttcatccacgtacgggtcgtttacacacccgcttcaatcaaacggcgacagccaccgggcgcttgtcgtcgagtgacccgaacctccagaatattccagtgcgcacgccgctgggccaacacattcgtaaagcgtttgttgcggaagaaggttggttattacttgcggccgattactcccagatcgaacttcgtgtattggcgcatctctctggcgacgagaatcttaaacgcgtgtttcgcgaaggcaaggatattcacactgaaaccgcagcctggatgttcggggtggacccagccttagtggactggaagatgcgtcgtgccgccaagaccgtcaactttggcgtactctatggtatgtcagcacatcgtcttagtcaggaattgggcattgactacaaagaagctgaagcgtttatcgagcgctatttccaatcctttccgaaagttcgcgcgtggattgaacgtaccctcgaagaaggtcgcactcgcggctatgtggaaacgttattcgggcgtcgtcgctacgttccagatcttgcatctcgtgtccgctcagtgcgcgaagctgctgagcgtatggcctggaatatgcctgttcagggaacagcggcggacctcatgaagatcgccatggtgaaattgtttccgcgcttgaaacccttaggagcccaccttcttttacaggtgcatgatgaattggtcttggaagtacccgaggatcgcgcagaagaagccaaagcactcgtgaaagaggttatggaaaacgcgtatccgttagatgttccgttggaggtcgaagtgggtgtaggccgtgattggcttgaagcgaaacaagactaatga

SEQ ID NO: 594 - protein, 844 aa, synthetic construct
  REGION 1..844: note = DNA Polymerase Variant
MHHHHHHGGSGMLPLFDLEEPPKRVLLVDGHHLAYRTFYALSLTTSRGEPVQMVYGFARSLLKALKEDGQAVVVVFDAKAPSFRHEAYEAYKAGRAPTPEDFPRQLALVKRLVDLLGLVRLEAPGYEADDVLGTLAKKAEREGMEVCILTGDRDFFQLLSEKVSVLLPDGTLVTPKDVQEKYGVPPERWVDFRALTGDRSDNIPGVAGIGEKTALRLLAEWGSVENLLKNLDRVKPDSLRRKIEAHLEDLRLSLDLARIRTDLPLEVDFKALRRRTPDLEGLRAFLEELEFGSLLHEFGLLGGEKPREEAPWPPPEGAFVGFLLSRKEPMWAELLALAAAAEGRVHRATSPVEALADLKEARGFLAKDLAVLALREGVALDPTDDPLLVAYLLDPANTNPERVARRYGGEFTEDAAERALLSERLFQTLFPRLSEKLLWLYQEVERPLSRVLAHMEARGVRLDVPLLEALSFELEKELERLEGEVFRLAGHPFNLNSRDQLEKVLFDELGLTPVTRTEKTGKRSTSAAALEALRGAHPIVELILQYRELSKLKSTYLDRLPRLVHPRTGRLHTRFNQTATATGRLSSSDPNLQNIPVRTPLGQHIRKAFVAEEGWLLLAADYSQIELRVLAHLSGDENLKRVFREGKDIHTETAAWMFGVDPALVDWKMRRAAKTVNFGVLYGMSAHRLSQELGIDYKEAEAFIERYFQSFPKVRAWIERTLEEGRTRGYVETLFGRRRYVPDLASRVRSVREAAERMAWNMPVQGTAADLMKIAMVKLFPRLKPLGAHLLLQVHDELVLEVPEDRAEEAKALVKEVMENAYPLDVPLEVEVGVGRDWLEAKQD

SEQ ID NO: 595 - DNA, 2538 bp, synthetic construct
  misc_feature 1..2538: note = DNA Polymerase Variant
  source 1..2538: mol_type = other DNA
atgcaccatcatcatcatcatggcggtagcggcatgttaccgctgtttgatttggaagaaaatccaaaacgcgtgctgcttgttgacggccatcatctggcgtatcgtaccttctacgcactgagccttacgacctcacgtggtgagcctgtccagatggtgtatgggtttgctcgctccctgctgaaagccctgaaggaagatggtcaagccgtagtagtggttttcgatgcgaaagcaccgtcgtttcgtcacgaagcgtacgaggcctataaagctggccgcgcaccgaccccggaagactttccgcgtcagttagcgctcgtcaaacgcctcgtggatttgctgggattagttcgcttggaagctcctggctacgaggcggacgacgtgctcggtacactggccaagaaagcagaacgtgaaggcatggaggtctgcattcttaccggtgatcgcgatttcttccagctgctgtctgagaaagtgagcgttttgctgcccgatggcacgttagtaaccccgaaagatgtccaagagaaatatggagttccgccagaacgttgggtggactttcgcgcactgactggtgatcgttcagacaacatcccgggcgttgccgggattggtgaaaagacggcgctgcgcctgctggcagaatggggctcggtggaaaatctgctcaagaaccttgatcgtgtgaaacctgatagcttacgccgcaagatcgaagcccacctggaagacttgcgtctgagtctggatcttgcgcgtattcgcaccgatctgccgttggaagtagactttaaagctctgcgtcgtcgcacacccgatttagaggggttacgcgcgttcctcgaagaactggagtttggctccctgctgcatgaattcggtttgttgggcggagagaaaccgcgtgaagaagcaccatggccgccgcccgaaggtgcctttgtcggctttcttctgtcacgcaaagagccaatgtgggcggaactgttagctcttgcagccgccgcggaagggcgtgttcaccgcgcgacctctcctgtcgaggccctcgctgacctcaaagaagcacgtggtttcttggcgaaagatttagccgtgcttgcattacgcgaaggcgttgcgctcgatccgacggacgacccgcttttggtggcttatttgctcgatcctgcgaataccaacccggaacgtgtcgcccgtcgttacggcggcgagtttactgaagatgcggcagaacgcgcgttgcttagcgaacgcctcttccagacgttatttccacgtctttcggagaaattactctggctctatcaggaagtcgaacgtccattgagtcgcgtgcttgcccatatggaggctcgcggtgtgcgcttagatgttccgttgttagaagcactcagcttcgagttggagaaagaactggaacgtcttgaaggcgaagtctttcgtttagcggggcatcccttcaatctcaactctcgcgaccaattggagaaagtgctctttgatgaattaggtttaacccctgtcacgcgtacagagaagaccggcaaacgttccacttcggcagccgccttggaagcacttcgtggtgctcacccgatcgtcgagttgattttgcagtatcgcgagctcagcaaactcaaatcaacctatcttgataggttacctcgtcttgttcatccacgtacgggtcgtttacacacccgcttcaatcaaacggcgacagccaccgggcgcttgtcgtcgagtgacccgaacctccagaatattccagtgcgcacgccgctgggccaacacattcgtaaagcgtttgttgcggaagaaggttggttattacttgcggccgattactcccagatcgaacttcgtgtattggcgcatctctctggcgacgagaatcttaaacgcgtgtttcgcgaaggcaaggatattcacactgaaaccgcagcctggatgttcggggtggacccagccttagtggaccccaagatgcgtcgtgccgccaagaccgtcaactttggcgtactctatggtatgtcagcacatcgtcttagtcaggaattgggcattgactacaaagaagctgaagcgtttatcgagcgctatttccaatcctttccgaaagttcgcgcgtggattgaacgtaccctcgaagaaggtcgcactcgcggctatgtggaaacgttattcgggcgtcgtcgctacgttccagatcttgcatctcgtgtccgctcagtgcgcgaagctgctgagcgtatggcctggaatatgcctgttcagggaacagcggcggacctcatgaagatcgccatggtgaaattgtttccgcgcttgaaacccttaggagcccaccttcttttacaggtgcatgatgaattggtcttggaagtacccgaggatcgcgcagaagaagccaaagcactcgtgaaagaggttatggaaaacgcgtatccgttagatgttccgttggaggtcgaagtgggtgtaggccgtgattggcttgaagcgaaacaagactaatga

SEQ ID NO: 596 - protein, 844 aa, synthetic construct
  REGION 1..844: note = DNA Polymerase Variant
MHHHHHHGGSGMLPLFDLEENPKRVLLVDGHHLAYRTFYALSLTTSRGEPVQMVYGFARSLLKALKEDGQAVVVVFDAKAPSFRHEAYEAYKAGRAPTPEDFPRQLALVKRLVDLLGLVRLEAPGYEADDVLGTLAKKAEREGMEVCILTGDRDFFQLLSEKVSVLLPDGTLVTPKDVQEKYGVPPERWVDFRALTGDRSDNIPGVAGIGEKTALRLLAEWGSVENLLKNLDRVKPDSLRRKIEAHLEDLRLSLDLARIRTDLPLEVDFKALRRRTPDLEGLRAFLEELEFGSLLHEFGLLGGEKPREEAPWPPPEGAFVGFLLSRKEPMWAELLALAAAAEGRVHRATSPVEALADLKEARGFLAKDLAVLALREGVALDPTDDPLLVAYLLDPANTNPERVARRYGGEFTEDAAERALLSERLFQTLFPRLSEKLLWLYQEVERPLSRVLAHMEARGVRLDVPLLEALSFELEKELERLEGEVFRLAGHPFNLNSRDQLEKVLFDELGLTPVTRTEKTGKRSTSAAALEALRGAHPIVELILQYRELSKLKSTYLDRLPRLVHPRTGRLHTRFNQTATATGRLSSSDPNLQNIPVRTPLGQHIRKAFVAEEGWLLLAADYSQIELRVLAHLSGDENLKRVFREGKDIHTETAAWMFGVDPALVDPKMRRAAKTVNFGVLYGMSAHRLSQELGIDYKEAEAFIERYFQSFPKVRAWIERTLEEGRTRGYVETLFGRRRYVPDLASRVRSVREAAERMAWNMPVQGTAADLMKIAMVKLFPRLKPLGAHLLLQVHDELVLEVPEDRAEEAKALVKEVMENAYPLDVPLEVEVGVGRDWLEAKQD

SEQ ID NO: 597 - DNA, 2538 bp, synthetic construct
  misc_feature 1..2538: note = DNA Polymerase Variant
  source 1..2538: mol_type = other DNA
atgcaccatcatcatcatcatggcggtagcggcatgttaccgctgtttgatttggaagaaccaccaaaacgcgtgctgcttgttgacggccatcatctggcgtatcgtaccttctacgcactgagccttacgacctcacgtggtgagcctgtccagatggtgtatgggtttgctcgctccctgctgaaagccctgaaggaagatggtcaagccgtagtagtggttttcgatgcgaaagcaccgtcgtttcgtcacgaagcgtacgaggcctataaagctggccgcgcaccgaccccggaagactttccgcgtcagttagcgctcgtcaaacgcctcgtggatttgctgggattagttcgcttggaagctcctggctacgaggcggacgacgtgctcggtacactggccaagaaagcagaacgtgaaggcatggaggtctgcattcttaccggtgatcgcgatttcttccagctgctgtctgagaaagtgagcgttttgctgcccgatggcacgttagtaaccccgaaagatgtccaagagaaatatggagttccgccagaacgttgggtggactttcgcgcactgactggtgatcgttcagacaacatcccgggcgttgccgggattggtgaaaagacggcgctgcgcctgctggcagaatggggctcggtggaaaatctgctcaagaaccttgatcgtgtgaaacctgatagcttacgccgcaagatcgaagcccacctggaagacttgcgtctgagtctggatcttgtacgtattcgcaccgatctgccgttggaagtagactttaaagctctgcgtcgtcgcacacccgatttagaggggttacgcgcgttcctcgaagaactggagtttggctccctgctgcatgaattcggtttgttgggcggagagaaaccgcgtgaagaagcaccatggccgccgcccgaaggtgcctttgtcggctttcttctgtcacgcaaagagccaatgtgggcggaactgttagctcttgcagccgccgcggaagggcgtgttcaccgcgcgacctctcctgtcgaggccctcgctgacctcaaagaagcacgtggtttcttggcgaaagatttagccgtgcttgcattacgcgaaggcgttgcgctcgatccgacggacgacccgcttttggtggcttatttgctcgatcctgcgaataccaacccggaacgtgtcgcccgtcgttacggcggcgagtttactgaagatgcggcagaacgcgcgttgcttagcgaacgcctcttccagacgttatttccacgtctttcggagaaattactctggctctatcaggaagtcgaacgtccaattagtcgcgtgcttgcccatatggaggctcgcggtgtgcgcttagatgttccgttgttagaagcactcagcttcgagttggagaaagaactggaacgtcttgagggcgaagtctttcgtttagcggggcatcccttcaatctcaactctcgcgaccaattggagaaagtgctctttgatgaattaggtttaacccctgtcacgcgtacagagaagaccggcaaacgttccacttcggcagccgccttggaagcacttcgtggtgctcacccgatcgtcgagttgattttgcagtatcgcgagctcagcaaactcaaatcaacctatcttgataggttacctcgtcttgttcatccacgtacgggtcgtttacacacccgcttcaatcaaacggcgacagccaccgggcgcttgtcgtcgagtgacccgaacctccagaatattccagtgcgcacgccgctgggccaacacattcgtaaagcgtttgttgcggaagaaggttggttattacttgcggccgattactcccagatcgaacttcgtgtattggcgcatctctctggcgacgagaatcttaaacgcgtgtttcgcgaaggcaaggatattcacactgaaaccgcagcctggatgttcggggtggacccagccttagtggaccccaagatgcgtcgtgccgccaagaccgtcaactttggcgtactctatggtatgtcagcacatcgtcttagtcaggaattgggcattgactacaaagaagctgaagcgtttatcgagcgctatttccaatcctttccgaaagttcgcgcgtggattgaacgtaccctcgaagaaggtcgcactcgcggctatgtggaaacgttattcgggcgtcgtcgctacgttccagatcttgcatctcgtgtccgctcagtgcgcgaagctgctgagcgtatggcctggaatatgcctgttcagggaacagcggcggacctcatgaagatcgccatggtgaaattgtttccgcgcttgaaacccttaggagcccaccttcttctgcaggtgcatgatgaattggtcttggaagtacccgaggatcgcgcagaagaagccaaagcactcgtgaaagaggttatggaaaacgcgtatccgttagatgttccgttggaggtcgaagtgggtgtaggccgtgattggcttgaagcgaaacaagactaatga

SEQ ID NO: 598 - protein, 844 aa, synthetic construct
  REGION 1..844: note = DNA Polymerase Variant
MHHHHHHGGSGMLPLFDLEEPPKRVLLVDGHHLAYRTFYALSLTTSRGEPVQMVYGFARSLLKALKEDGQAVVVVFDAKAPSFRHEAYEAYKAGRAPTPEDFPRQLALVKRLVDLLGLVRLEAPGYEADDVLGTLAKKAEREGMEVCILTGDRDFFQLLSEKVSVLLPDGTLVTPKDVQEKYGVPPERWVDFRALTGDRSDNIPGVAGIGEKTALRLLAEWGSVENLLKNLDRVKPDSLRRKIEAHLEDLRLSLDLVRIRTDLPLEVDFKALRRRTPDLEGLRAFLEELEFGSLLHEFGLLGGEKPREEAPWPPPEGAFVGFLLSRKEPMWAELLALAAAAEGRVHRATSPVEALADLKEARGFLAKDLAVLALREGVALDPTDDPLLVAYLLDPANTNPERVARRYGGEFTEDAAERALLSERLFQTLFPRLSEKLLWLYQEVERPISRVLAHMEARGVRLDVPLLEALSFELEKELERLEGEVFRLAGHPFNLNSRDQLEKVLFDELGLTPVTRTEKTGKRSTSAAALEALRGAHPIVELILQYRELSKLKSTYLDRLPRLVHPRTGRLHTRFNQTATATGRLSSSDPNLQNIPVRTPLGQHIRKAFVAEEGWLLLAADYSQIELRVLAHLSGDENLKRVFREGKDIHTETAAWMFGVDPALVDPKMRRAAKTVNFGVLYGMSAHRLSQELGIDYKEAEAFIERYFQSFPKVRAWIERTLEEGRTRGYVETLFGRRRYVPDLASRVRSVREAAERMAWNMPVQGTAADLMKIAMVKLFPRLKPLGAHLLLQVHDELVLEVPEDRAEEAKALVKEVMENAYPLDVPLEVEVGVGRDWLEAKQD

SEQ ID NO: 599 - DNA, 2538 bp, synthetic construct
  misc_feature 1..2538: note = DNA Polymerase Variant
  source 1..2538: mol_type = other DNA
atgcaccatcatcatcatcatggcggtagcggcatgttaccgctgtttgatttggaagaaccaccaaaacgcgtgctgcttgttgacggccatcatctggcgtatcgtaccttctacgcactgagccttacgacctcacgtggtgagcctgtccagatggtgtatgggtttgctcgctccctgctgaaagccctgaaggaagatggtcaagccgtagtagtggttttcgatgcgaaagcaccgtcgtttcgtcacgaagcgtacgaggcctataaagctggccgcgcaccgaccccggaagactttccgcgtcagttagcgctcgtcaaacgcctcgtggatttgctgggattagttcgcttggaagctcctggctacgaggcggacgacgtgctcggtacactggccaagaaagcagaacgtgaaggcatggaggtctgcattcttaccggtgatcgcgatttcttccagctgctgtctgagaaagtgagcgttttgctgcccgatggcacgttagtaaccccgaaagatgtgcaagagaaatatggagttccgccagaacgttgggtggactttcgcgcactgactggtgatcgttcagacaacatcccgggcgttgccgggattggtgaaaagacggcgctgcgcctgctggcagaatggggctcggtggaaaatctgctcaagaaccttgatcgtgtgaaacctgatagcttacgccgcaagatcgaagcccacctggaagacttgcgtctgagtctggatcttgtccgtattcgcaccgatctgccgttggaagtagactttaaagctctgcgtcgtcgcacacccgatttagaggggttacgcgcgttcctcgaagaactggagtttggctccctgctgcatgaattcggtttgttgggcggagagaaaccgcgtgaagaagcaccatggccgccgcccgggggtgcctttgtcggctttcttctgtcacgcaaagagccaatgtgggcggaactgttagctcttgcagccgccgcggaagggcgtgttcaccgcgcgacctctcctgtcgaggccctcgctgacctcaaagaagcacgtggtttcttggcgaaagatttagccgtgcttgcattacgcgaaggcgttgcgctcgatccgacggacgacccgcttttggtggcttatttgctcgatcatgcgaataccaacccggaacgtgtcgcccgtcgttacggcggcgagtttactgaagatgcggcagaacgcgcgttgcttagcgaacgcctcttccagacgttatttccacgtctttcggagaaattactctggctctatcaggaagtcgaacgtccattgagtcgcgtgcttgcccatatggaggctcgcggtgtgcgcttagatgttccgttgttagaagcactcagcttcgagttggagaaagaactggaacgtctttcgggcgaagtctttcgtttagcggggcatcccttcaatctcaactctcgcgaccaattggagaaagtgctctttgatgaattaggtttaacccctgtcacgcgtacagagaagaccggcaaacgttccacttcggcagccgccttggaagcacttcgtggtgctcacccgatcgtcgagttgattttgcagtatcgcgagctcagcaaactcaaatcaacctatcttgataggttacctcgtcttgttcatccacgtacgggtcgtttacacacccgcttcaatcaaacggcaacagccaccgggcgcttgtcgtcgagtgacccgaacctccagaatattccagtgcgcacgccgctgggccaacacattcgtaaagcgtttgttgcggaagaaggttggttattacttgcggccgattactcccagatcgaacttcgtgtattggcgcatctctctggcgacgagaatcttaaacgcgtgtttcgcgaaggcaaggatattcacactgaaaccgcagcctggatgttcggggtggacccagccttagtggaccccaagatgcgtcgtgccgccaagaccgtcaactttggcgtactctatggtatgtcagcagcacgtcttagtcaggaattgggcattgactacaaagaagctgaagcgtttatcgagcgctatttccaatcctttccgaaagttcgcgcgtggattgaacgtacgctcgaagaaggtcgcactcgcggctatgtggaaacgttattcgggcgtcgtcgctacgttccagatcttacgtctcgtgtccgctcagtgcgcgaagctgctgagcgtatggcctggaatatgcctgttcagggaacagcggcggacctcatgaagatcgccatggtgaaattgtttccgcgcttgaaacccttaggagcccaccttcttttacaggtgcatgatgaattggtcttggaagtacccgaggatcgcgcagaagaagccaaagcactcgtgaaagaggttatggaaaacgcgtatccgttagatgttccgttggaggtcgaagtgggtgtaggccgtgattggcttgaagcgaaacaagactaatga

SEQ ID NO: 600 - protein, 844 aa, synthetic construct
  REGION 1..844: note = DNA Polymerase Variant
MHHHHHHGGSGMLPLFDLEEPPKRVLLVDGHHLAYRTFYALSLTTSRGEPVQMVYGFARSLLKALKEDGQAVVVVFDAKAPSFRHEAYEAYKAGRAPTPEDFPRQLALVKRLVDLLGLVRLEAPGYEADDVLGTLAKKAEREGMEVCILTGDRDFFQLLSEKVSVLLPDGTLVTPKDVQEKYGVPPERWVDFRALTGDRSDNIPGVAGIGEKTALRLLAEWGSVENLLKNLDRVKPDSLRRKIEAHLEDLRLSLDLVRIRTDLPLEVDFKALRRRTPDLEGLRAFLEELEFGSLLHEFGLLGGEKPREEAPWPPPGGAFVGFLLSRKEPMWAELLALAAAAEGRVHRATSPVEALADLKEARGFLAKDLAVLALREGVALDPTDDPLLVAYLLDHANTNPERVARRYGGEFTEDAAERALLSERLFQTLFPRLSEKLLWLYQEVERPLSRVLAHMEARGVRLDVPLLEALSFELEKELERLSGEVFRLAGHPFNLNSRDQLEKVLFDELGLTPVTRTEKTGKRSTSAAALEALRGAHPIVELILQYRELSKLKSTYLDRLPRLVHPRTGRLHTRFNQTATATGRLSSSDPNLQNIPVRTPLGQHIRKAFVAEEGWLLLAADYSQIELRVLAHLSGDENLKRVFREGKDIHTETAAWMFGVDPALVDPKMRRAAKTVNFGVLYGMSAARLSQELGIDYKEAEAFIERYFQSFPKVRAWIERTLEEGRTRGYVETLFGRRRYVPDLTSRVRSVREAAERMAWNMPVQGTAADLMKIAMVKLFPRLKPLGAHLLLQVHDELVLEVPEDRAEEAKALVKEVMENAYPLDVPLEVEVGVGRDWLEAKQD

SEQ ID NO: 601 - DNA, 2538 bp, synthetic construct
  misc_feature 1..2538: note = DNA Polymerase Variant
  source 1..2538: mol_type = other DNA
atgcaccatcatcatcatcatggcggtagcggcatgttaccgctgtttgatttggaagaaccaccaaaacgcgtgctgcttgttgacggccatcatctggcgtatcgtaccttctacgcactgagccttacgacctcacgtggtgagcctgtccagatggtgtatgggtttgctcgctccctgctgaaagccctgaaggaagatggtcaagccgtagtagtggttttcgatgcgaaagcaccgtcgtttcgtcacgaagcgtacgaggcctataaagctggccgcgcaccgaccccggaagactttccgcgtcagttagcgctcgtcaaacgcctcgtggatttgctgggattagttcgcttggaagctcctggctacgaggcggacgacgtgctcggtacactggccaagaaagcagaacgtgaaggcatggaggtctgcattcttaccggtgatcgcgatttcttccagctgctgtctgagaaagtgagcgttttgctgcccgatggcacgttagtaaccccgaaagatgtccaagagaaatatggagttccgccagaacgttgggtggactttcgcgcactgactggtgatcgttcagacaacatcccgggcgttgccgggattggtgaaaagacggcgctgcgcctgctggcagaatggggctcggtggaaaatctgctcaagaaccttgatcgtgtgaaacctgatagcttacgccgcaagatcgaagcccacctggaagacttgcgtctgagtctggatcttgcgcgtattcgcaccgatctgccgttggaagtagactttaaagctctgcgtcgtcgcacacccgatttagaggggttacgcgcgttcctcgaagaactggagtttggctccctgctgcatgaattcggtttgttgggcggagagaaaccgcgtgaagaagcaccatggccgccgcccgaaggtgcctttgtcggctttcttctgtcacgcaaagagccaatgtgggcggaactgttagctcttgcagccgccgcggaagggcgtgttcaccgcgcgacctctcctgtcgaggccctcgctgacctcaaagaagcacgtggtttcttggcgaaagatttagccgtgcttgcattacgcgaaggcgttgcgctcgatccgacggacgacccgcttttggtggcttatttgctcgatcctgcgaataccaacccggaacgtgtcgcccgtcgttacggcggcgagtttactgaagatgcggcagaacgcgcgttgcttagcgaacgcctcttccagacgttatttccacgtctttcggagaaattactctggctctatcaggaagtcgaacgtccattgagtcgcgtgcttgcccatatggaggctcgcggtgtgcgcttagatgttccgttgttagaagcactcagcttcgagttggagaaagaactggaacgtcttgaaggcgaagtctttcgtttagcggggcatcccttcaatctcaactctcgcgaccaattggagaaagtgctctttgatgaattaggtttaacccctgtcacgcgtacagagaagaccggcaaacgttccacttcggcagccgccttggaagcacttcgtggtgctcacccgatcgtcgagttgattttgcagtatcgcgagctcagcaaactcaaatcaacctatcttgataggttacctcgtcttgttcatccacgtacgggtcgtttacacacccgcttcaatcaaacggcgacagccaccgggcgcttgtcgtcgagtgacccgaacctccagaatattccagtgcgcacgccgctgggccaacacattcgtaaagcgtttgttgcggaagaaggttggttattacttgcggccgattactcccagatcgaacttcgtgtattggcgcatctctctggcgacgagaatcttaaacgcgtgtttcgcgaaggcaaggatattcacactgaaaccgcagcctggatgttcggggtggacccagccttagtggaccccaagatgcgtcgtgccgccaagaccgtcaactttggcgtactctatggtatgtcagcacatcgtcttagtcaggaattgggcattgactacaaagaagctgaagcgtttatcgagcgctatttccaatcctttccgaaagttcgcgcgtggattgaacgtaccctcgaagaaggtcgcactcgcggctatgtggaaacgttattcgggcgtcgtcgctacgttccagatcttgcatctcgtgtccgctcagtgcgcgaagctgctgagcgtatggcctggaatatgcctgttcagggaacagcggcggacctcatgaagatcgccatggtgaaattgtttccgcgcttgaaacccttaggagcccaccttcttttacaggtgcatgatgaattggtcttggaagtacccagggatcgcgcagaagaagccaaagcactcgtgaaagaggttatggaaaacgcgtatccgttagatgttccgttggaggtcgaagtgggtgtaggccgtgattggcttgaagcgaaacaagactaatga

SEQ ID NO: 602 - protein, 844 aa, synthetic construct
  REGION 1..844: note = DNA Polymerase Variant
MHHHHHHGGSGMLPLFDLEEPPKRVLLVDGHHLAYRTFYALSLTTSRGEPVQMVYGFARSLLKALKEDGQAVVVVFDAKAPSFRHEAYEAYKAGRAPTPEDFPRQLALVKRLVDLLGLVRLEAPGYEADDVLGTLAKKAEREGMEVCILTGDRDFFQLLSEKVSVLLPDGTLVTPKDVQEKYGVPPERWVDFRALTGDRSDNIPGVAGIGEKTALRLLAEWGSVENLLKNLDRVKPDSLRRKIEAHLEDLRLSLDLARIRTDLPLEVDFKALRRRTPDLEGLRAFLEELEFGSLLHEFGLLGGEKPREEAPWPPPEGAFVGFLLSRKEPMWAELLALAAAAEGRVHRATSPVEALADLKEARGFLAKDLAVLALREGVALDPTDDPLLVAYLLDPANTNPERVARRYGGEFTEDAAERALLSERLFQTLFPRLSEKLLWLYQEVERPLSRVLAHMEARGVRLDVPLLEALSFELEKELERLEGEVFRLAGHPFNLNSRDQLEKVLFDELGLTPVTRTEKTGKRSTSAAALEALRGAHPIVELILQYRELSKLKSTYLDRLPRLVHPRTGRLHTRFNQTATATGRLSSSDPNLQNIPVRTPLGQHIRKAFVAEEGWLLLAADYSQIELRVLAHLSGDENLKRVFREGKDIHTETAAWMFGVDPALVDPKMRRAAKTVNFGVLYGMSAHRLSQELGIDYKEAEAFIERYFQSFPKVRAWIERTLEEGRTRGYVETLFGRRRYVPDLASRVRSVREAAERMAWNMPVQGTAADLMKIAMVKLFPRLKPLGAHLLLQVHDELVLEVPRDRAEEAKALVKEVMENAYPLDVPLEVEVGVGRDWLEAKQD

SEQ ID NO: 603 - DNA, 2538 bp, synthetic construct
  misc_feature 1..2538: note = DNA Polymerase Variant
  source 1..2538: mol_type = other DNA
atgcaccatcatcatcatcatggcggtagcggcatgttaccgctgtttgatttggaagaaccaccaaaacgcgtgctgcttgttgacggccatcatctggcgtatcgtaccttctacgcactgagccttacgacctcacgtggtgagcctgtccagatggtgtatgggtttgctcgctccctgctgaaagccctgaaggaagatggtcaagccgtagtagtggttttcgatgcgaaagcaccgtcgtttcgtcacgaagcgtacgaggcctataaagctggccgcgcaccgaccccggaagactttccgcgtcagttagcgctcgtcaaacgcctcgtggatttgctgggattagttcgcttggaagctcctggctacgaggcggacgacgtgctcggtacactggccaagaaagcagaacgtgaaggcatggaggtctgcattcttaccggtgatcgcgatttcttccagctgctgtctgagaaagtgagcgttttgctgcccgatggcacgttagtaaccccgaaagatgtccaagagaaatatggagttccgccagaacgttgggtggactttcgcgcactgactggtgatcgttcagacaacatcccgggcgttgccgggattggtgaaaagacggcgctgcgcctgctggcagaatggggctcggtggaaaatctgctcaagaaccttgatcgtgtgaaacctgatagcttacgccgcaagatcgaagcccacctggaagacttgcgtctgagtctggatcttgcgcgtattcgcaccgatctgccgttggaagtagactttaaagctctgcgtcgtcgcacacccgatttagaggggttacgcgcgttcctcgaagaactggagtttggctccctgctgcatgaattcggtttgttgggcggagagaaaccgcgtgaagaagcaccatggccgccgcccgaaggtgcctttgtcggctttcttctgtcacgcaaagagccaatgtgggcggaactgttagctcttgcagccgccgcggaagggcgtgttcaccgcgcgacctctcctgtcgaggccctcgctgacctcaaagaagcacgtggtttcttggcgaaagatttagccgtgcttgcattacgcgaaggcgttgcgctcgatccgacggacgacccgcttttggtggcttatttgctcgatcctgcgaataccaacccggaacgtgtcgcccgtcgttacggcggcgagtttactgaagatgcggcagaacgcgcgttgcttagcgaacgcctcttccagacgttatttccacgtctttcggagaaattactctggctctatcaggaagtcgaacgtccattgagtcgcgtgcttgcccatatggaggctcgcggtgtgcgcttagatgttccgttgttagaagcactcagcttcgagttggagaaagaactggaacgtcttgaaggcgaagtctttcgtttagcggggcatcccttcaatctcaactctcgcgaccaattggagaaagtgctctttgatgaattaggtttaacccctgtcacgcgtacagagaagaccggcaaacgttccacttcggcagccgccttggaagcacttcgtggtgctcacccgatcgtcgagttgattttgcagtatcgcgagctcagcaaactcaaatcaacctatcttgataggttacctcgtcttgttcatccacgtacgggtcgtttacacacccgcttcaatcaaacggcgacagccaccgggcgcttgtcgtcgagtgacccgaacctccagaatattccagtgcgcacgccgctgggccaacacattcgtaaagcgtttgttgcggaagaaggttggttattacttgcggccgattactcccagatcgaacttcgtgtattggcgcatctctctggcgacgagaatcttaaacgcgtgtttcgcgaaggcaaggatattcacactgaaaccgcagcctggatgttcggggtggacccagccttagtggaccccaagatgcgtcgtgccgccaagaccgtcaactttggcgtactctatggtatgtcagcacatcgtcttagtcaggaattgggcattgactacaaagaagctgaagcgtttgtcgagcgctatttccaatcctttccgaaagttcgcgcgtggattgaacgtaccctcgaagaaggtcgcactcgcggctatgtggaaacgttattcgggcgtcgtcgctacgttccagatcttgcatctcgtgtccgctcagtgcgcgaagctgctgagcgtatggcctggaatatgcctgttcagggaacagcggcggacctcatgaagatcgccatggtgaaattgtttccgcgcttgaaacccttaggagcccaccttcttctgcaggtgcatgatgaattggtcttggaagtacccgaggatcgcgcagaagaagccaaagcactcgtgaaagaggttatggaaaacgcgtatccgttagatgttccgttggaggtcgaagtgggtgtaggccgtgattggcttgaagcgaaacaagactaatga

SEQ ID NO: 604 - protein, 844 aa, synthetic construct
  REGION 1..844: note = DNA Polymerase Variant
MHHHHHHGGSGMLPLFDLEEPPKRVLLVDGHHLAYRTFYALSLTTSRGEPVQMVYGFARSLLKALKEDGQAVVVVFDAKAPSFRHEAYEAYKAGRAPTPEDFPRQLALVKRLVDLLGLVRLEAPGYEADDVLGTLAKKAEREGMEVCILTGDRDFFQLLSEKVSVLLPDGTLVTPKDVQEKYGVPPERWVDFRALTGDRSDNIPGVAGIGEKTALRLLAEWGSVENLLKNLDRVKPDSLRRKIEAHLEDLRLSLDLARIRTDLPLEVDFKALRRRTPDLEGLRAFLEELEFGSLLHEFGLLGGEKPREEAPWPPPEGAFVGFLLSRKEPMWAELLALAAAAEGRVHRATSPVEALADLKEARGFLAKDLAVLALREGVALDPTDDPLLVAYLLDPANTNPERVARRYGGEFTEDAAERALLSERLFQTLFPRLSEKLLWLYQEVERPLSRVLAHMEARGVRLDVPLLEALSFELEKELERLEGEVFRLAGHPFNLNSRDQLEKVLFDELGLTPVTRTEKTGKRSTSAAALEALRGAHPIVELILQYRELSKLKSTYLDRLPRLVHPRTGRLHTRFNQTATATGRLSSSDPNLQNIPVRTPLGQHIRKAFVAEEGWLLLAADYSQIELRVLAHLSGDENLKRVFREGKDIHTETAAWMFGVDPALVDPKMRRAAKTVNFGVLYGMSAHRLSQELGIDYKEAEAFVERYFQSFPKVRAWIERTLEEGRTRGYVETLFGRRRYVPDLASRVRSVREAAERMAWNMPVQGTAADLMKIAMVKLFPRLKPLGAHLLLQVHDELVLEVPEDRAEEAKALVKEVMENAYPLDVPLEVEVGVGRDWLEAKQD

SEQ ID NO: 605 - DNA, 2538 bp, synthetic construct
  misc_feature 1..2538: note = DNA Polymerase Variant
  source 1..2538: mol_type = other DNA
atgcaccatcatcatcatcatggcggtagcggcatgttaccgctgtttgatttggaagaaccaccaaaacgcgtgctgcttgttgacggccatcatctggcgtatcgtaccttctacgcactgagccttacgacctcacgtggtgagcctgtccagatggtgtatgggtttgctcgctccctgctgaaagccctgaaggaagatggtcaagccgtagtagtggttttcgatgcgaaagcaccgtcgtttcgtcacgaagcgtacgaggcctataaagctggccgcgcaccgaccccggaagactttccgcgtcagttagcgctcgtcaaacgcctcgtggatttgctgggattagttcgcttggaagctcctggctacgaggcggacgacgtgctcggtacactggccaagaaagcagaacgtgaaggcatggaggtctgcattcttaccggtgatcgcgatttcttccagctgctgtctgagaaagtgagcgttttgctgcccgatggcacgttagtaaccccgaaagatctgcaagagaaatatggagttccgccagaacgttgggtggactttcgcgcactgactggtgatcgttcagacaacatcccgggcgttgccgggattggtgaaaagacggcgctgcgcctgctggcagaatggggctcggtggaaaatctgctcaagaaccttgatcgtgtgaaacctgatagcttacgccgcaagatcgaagcccacctggaagacttgcgtctgagtctggatcttgtccgtattcgcaccgatctgccgttggaagtagactttaaagctctgcgtcgtcgcacacccgatttagaggggttacgcgcgttcctcgaagaactggagtttggctccctgctgcatgaattcggtttgttgggcggagagaaaccgcgtgaagaagcaccatggccgccgcccgagggtgcctttgtcggctttcttctgtcacgcaaagagccaatgtgggcggaactgttagctcttgcagccgccgcggaagggcgtgttcaccgcgcgacctctcctgtcgaggccctcgctgacctcaaagaagcacgtggtttcttggcgaaagatttagccgtgcttgcattacgcgaaggcgttgcgctcgatccgacggacgacccgcttttggtggcttatttgctcgatagcgcgaataccaacccggaacgtgtcgcccgtcgttacggcggcgagtttactgaagatgcggcagaacgcgcgttgcttagcgaacgcctcttccagacgttatttccacgtctttcggagaaattactctggctctatcaggaagtcgaacgtccattgagtcgcgtgcttgcccatatggaggctcgcggtgtgcgcttagatgttccgttgttagaagcactcagcttcgagttggagaaagaactggaacgtctttcgggcgaagtctttcgtttagcggggcatcccttcaatctcaactctcgcgaccaattggagaaagtgctctttgatgaattaggtttaacccctgtcacgcgtacagagaagaccggcaaacgttccacttcggcagccgccttggaagcacttcgtggtgctcacccgatcgtcgagttgattttgcagtatcgcgagctcagcaaactcaaatcaacctatcttgataggttacctcgtcttgttcatccacgtacgggtcgtttacacacccgcttcaatcaaacgctgacagccaccgggcgcttgtcgtcgagtgacccgaacctccagaatattccagtgcgcacgccgctgggccaacacattcgtaaagcgtttgttgcggaagaaggttggttattacttgcggccgattactcccagatcgaacttcgtgtattggcgcatctctctggcgacgagaatcttaaacgcgtgtttcgcgaaggcaaggatattcacactgaaaccgcagcctggatgttcggggtggacccagccttagtggaccccaagatgcgtcgtgccgccaagaccgtcaactttggcgtactctatggtatgtcagcagcacgtcttagtcaggaattgggcattgactacaaagaagctgaagcgtttatcgagcgctatttccaatcctttccgaaagttcgcgcgtggattgaacgtacgctcgaagaaggtcgcactcgcggctatgtggaaacgttattcgggcgtcgtcgctacgttccagatcttacgtctcgtgtccgctcagtgcgcgaagctgctgagcgtatggcctggaatatgcctgttcagggaacagcggcggacctcatgaagatcgccatggtgaaattgtttccgcgcttgaaacccttaggagcccaccttcttttacaggtgcatgatgaattggtcttggaagtacccgaggatcgcgcagaagaagccaaagcactcgtgaaagaggttatggaaaacgcgtatccgttagatgttccgttggaggtcgaagtgggtgtaggccgtgattggcttgaagcgaaacaagactaatga

SEQ ID NO: 606 - protein, 844 aa, synthetic construct
  REGION 1..844: note = DNA Polymerase Variant
MHHHHHHGGSGMLPLFDLEEPPKRVLLVDGHHLAYRTFYALSLTTSRGEPVQMVYGFARSLLKALKEDGQAVVVVFDAKAPSFRHEAYEAYKAGRAPTPEDFPRQLALVKRLVDLLGLVRLEAPGYEADDVLGTLAKKAEREGMEVCILTGDRDFFQLLSEKVSVLLPDGTLVTPKDLQEKYGVPPERWVDFRALTGDRSDNIPGVAGIGEKTALRLLAEWGSVENLLKNLDRVKPDSLRRKIEAHLEDLRLSLDLVRIRTDLPLEVDFKALRRRTPDLEGLRAFLEELEFGSLLHEFGLLGGEKPREEAPWPPPEGAFVGFLLSRKEPMWAELLALAAAAEGRVHRATSPVEALADLKEARGFLAKDLAVLALREGVALDPTDDPLLVAYLLDSANTNPERVARRYGGEFTEDAAERALLSERLFQTLFPRLSEKLLWLYQEVERPLSRVLAHMEARGVRLDVPLLEALSFELEKELERLSGEVFRLAGHPFNLNSRDQLEKVLFDELGLTPVTRTEKTGKRSTSAAALEALRGAHPIVELILQYRELSKLKSTYLDRLPRLVHPRTGRLHTRFNQTLTATGRLSSSDPNLQNIPVRTPLGQHIRKAFVAEEGWLLLAADYSQIELRVLAHLSGDENLKRVFREGKDIHTETAAWMFGVDPALVDPKMRRAAKTVNFGVLYGMSAARLSQELGIDYKEAEAFIERYFQSFPKVRAWIERTLEEGRTRGYVETLFGRRRYVPDLTSRVRSVREAAERMAWNMPVQGTAADLMKIAMVKLFPRLKPLGAHLLLQVHDELVLEVPEDRAEEAKALVKEVMENAYPLDVPLEVEVGVGRDWLEAKQD

SEQ ID NO: 607 - DNA, 2538 bp, synthetic construct
  misc_feature 1..2538: note = DNA Polymerase Variant
  source 1..2538: mol_type = other DNA
atgcaccatcatcatcatcatggcggtagcggcatgttaccgctgtttgatttggaagaaccaccaaaacgcgtgctgcttgttgacggccatcatctggcgtatcgtaccttctacgcactgagccttacgacctcacgtggtgagcctgtccagatggtgtatgggtttgctcgctccctgctgaaagccctgaaggaagatggtcaagccgtagtagtggttttcgatgcgaaagcaccgtcgtttcgtcacgaagcgtacgaggcctataaagctggccgcgcaccgaccccggaagactttccgcgtcagttagcgctcgtcaaacgcctcgtggatttgctgggattagttcgcttggaagctcctggctacgaggcggacgacgtgctcggtacactggccaagaaagcagaacgtgaaggcatggaggtctgcattcttaccggtgatcgcgatttcttccagctgctgtctgagaaagtgagcgttttgctgcccgatggcacgttagtaaccccgaaagatgtccaagagaaatatggagttccgccagaacgttgggtggactttcgcgcactgactggtgatcgttcagacaacatcccgggcgttgccgggattggtgaaaagacggcgctgcgcctgctggcagaatggggctcggtggaaaatctgctcaagaaccttgatcgtgtgaaacctgatagcttacgccgcaagatcgaagcccacctggaagacttgcgtctgagtctggatcttgtccgtattcgcaccgatctgccgttggaagtagactttaaagctctgcgtcgtcgcacacccgatttagaggggttacgcgcgttcctcgaagaactggagtttggctccctgctgcatgaattcggtttgttgggcggagagaaaccgcgtgaagaagcaccatggccgccgcccgagggtgcctttgtcggctttcttctgtcacgcaaagagccaatgtgggcggaactgttagctcttgcagccgccgcggaagggcgtgttcaccgcgcgacctctcctgtcgaggccctcgctgacctcaaagaagcacgtggtttcttggcgaaagatttagccgtgcttgcattacgcgaaggcgttgcgctcgatccgacggacgacccgcttttggtggcttatttgctcgatcctgcgaataccaacccggaacgtgtcgcccgtcgttacggcggcgagtttactgaagatgcggcagaacgcgcgttgcttagcgaacgcctcttccagacgttatttccacgtctttcggagaaattactctggctctatcaggaagtcgaacgtccattgagtcgcgtgcttgcccatatggaggctcgcggtgtgcgcttagatgttccgttgttagaagcactcagcttcgagttggagaaagaactggaacgtcttgaaggcgaagtctttcgtttagcggggcatcccttcaatctcaactctcgcgaccaattggagaaagtgctctttgatgaattaggtttaacccctgtcacgcgtacagagaagaccggcaaacgttccacttcggcagccgccttggaagcacttcgtggtgctcacccgatcgtcgagttgattttgcagtatcgcgagctcagcaaactcaaatcaacctatcttgataggttacctcgtcttgttcatccacgtacgggtcgtttacacacccgcttcaatcaaacgctgacagccaccgggcgcttgtcgtcgagtgacccgaacctccagaatattccagtgcgcacgccgctgggccaacacattcgtaaagcgtttgttgcggaagaaggttggttattacttgcggccgattactcccagatcgaacttcgtgtattggcgcatctctctggcgacgagaatcttaaacgcgtgtttcgcgaaggcaaggatattcacactgaaaccgcagcctggatgttcggggtggacccagccttagtggaccccaagatgcgtcgtgccgccaagaccgtcaactttggcgtactctatggtatgtcagcacatcgtcttagtcaggaattgggcattgactacaaagaagctgaagcgtttatcgagcgctatttccaatcctttccgaaagttcgcgcgtggattgaacgtaccctcgaagaaggtcgcactcgcggctatgtggaaacgttattcgggcgtcgtcgctacgttccagatcttgcgtctcgtgtccgctcagtgcgcgaagctgctgagcgtatggcctggaatatgcctgttcagggaacagcggcggacctcatgaagatcgccatggtgaaattgtttccgcgcttgaaacccttaggagcccaccttcttttacaggtgcatgatgaattggtcttggaagtacccgaggatcgcgcagaagaagccaaagcactcgtgaaagaggttatggaaaacgcgtatccgttagatgttccgttggaggtcgaagtgggtgtaggccgtgattggcttgaagcgaaacaagactaatga

SEQ ID NO: 608 - protein, 844 aa, synthetic construct
  REGION 1..844: note = DNA Polymerase Variant
MHHHHHHGGSGMLPLFDLEEPPKRVLLVDGHHLAYRTFYALSLTTSRGEPVQMVYGFARSLLKALKEDGQAVVVVFDAKAPSFRHEAYEAYKAGRAPTPEDFPRQLALVKRLVDLLGLVRLEAPGYEADDVLGTLAKKAEREGMEVCILTGDRDFFQLLSEKVSVLLPDGTLVTPKDVQEKYGVPPERWVDFRALTGDRSDNIPGVAGIGEKTALRLLAEWGSVENLLKNLDRVKPDSLRRKIEAHLEDLRLSLDLVRIRTDLPLEVDFKALRRRTPDLEGLRAFLEELEFGSLLHEFGLLGGEKPREEAPWPPPEGAFVGFLLSRKEPMWAELLALAAAAEGRVHRATSPVEALADLKEARGFLAKDLAVLALREGVALDPTDDPLLVAYLLDPANTNPERVARRYGGEFTEDAAERALLSERLFQTLFPRLSEKLLWLYQEVERPLSRVLAHMEARGVRLDVPLLEALSFELEKELERLEGEVFRLAGHPFNLNSRDQLEKVLFDELGLTPVTRTEKTGKRSTSAAALEALRGAHPIVELILQYRELSKLKSTYLDRLPRLVHPRTGRLHTRFNQTLTATGRLSSSDPNLQNIPVRTPLGQHIRKAFVAEEGWLLLAADYSQIELRVLAHLSGDENLKRVFREGKDIHTETAAWMFGVDPALVDPKMRRAAKTVNFGVLYGMSAHRLSQELGIDYKEAEAFIERYFQSFPKVRAWIERTLEEGRTRGYVETLFGRRRYVPDLASRVRSVREAAERMAWNMPVQGTAADLMKIAMVKLFPRLKPLGAHLLLQVHDELVLEVPEDRAEEAKALVKEVMENAYPLDVPLEVEVGVGRDWLEAKQD

SEQ ID NO: 609 - DNA, 2538 bp, synthetic construct
  misc_feature 1..2538: note = DNA Polymerase Variant
  source 1..2538: mol_type = other DNA
atgcaccatcatcatcatcatggcggtagcggcatgttaccgctgtttgatttggaagaaccaccaaaacgcgtgctgcttgttgacggccatcatctggcgtatcgtaccttctacgcactgagccttacgacctcacgtggtgagcctgtccagatggtgtatgggtttgctcgctccctgctgaaagccctgaaggaagatggtcaagccgtagtagtggttttcgatgcgaaagcaccgtcgtttcgtcacgaagcgtacgaggcctataaagctggccgcgcaccgaccccggaagactttccgcgtcagttagcgctcgtcaaacgcctcgtggatttgctgggattagttcgcttggaagctcctggctacgaggcggacgacgtgctcggtacactggccaagaaagcagaacgtgaaggcatggaggtctgcattcttaccggtgatcgcgatttcttccagctgctgtctgagaaagtgagcgttttgctgcccgatggcacgttagtaaccccgaaagatgtgcaagagaaatatggagttccgccagaacgttgggtggactttcgcgcactgactggtgatcgttcagacaacatcccgggcgttgccgggattggtgaaaagacggcgctgcgcctgctggcagaatggggctcggtggaaaatctgctcaagaaccttgatcgtgtgaaacctgatagcttacgccgcaagatcgaagcccacctggaagacttgcgtctgagtctggatcttgtccgtattcgcaccgatctgccgttggaagtagactttaaagctctgcgtcgtcgcacacccgatttagaggggttacgcgcgttcctcgaagaactggagctgggctccctgctgcatgaattcggtttgttgggcggagagaaaccgcgtgaagaagcaccatggccgccgcccgagggtgcctttgtcggctttcttctgtcacgcaaagagccaatgtgggcggaactgttagctcttgcagccgccgcggaagggcgtgttcaccgcgcgacctctcctgtcgaggccctcgctgacctcaaagaagcacgtggtttcttggcgaaagatttagccgtgcttgcattacgcgaaggcgttgcgctcgatccgacggacgacccgcttttggtggcttatttgctcgatagcgcgaataccaacccggaacgtgtcgcccgtcgttacggcggcgagtttactgaagatgcggcagaacgcgcgttgcttagcgaacgcctcttccagacgttatttccacgtctttcggagaaattactctggctctatcaggaagtcgaacgtccattgagtcgcgtgcttgcccatatggaggctcgcggtgtgcgcttagatgttccgttgttagaagcactcagcttcgagttggtgaaagaactggaacgtcttgagggcgaagtctttcgtttagcggggcatcccttcaatctcaactctcgcgaccaattggagaaagtgctctttgatgaattaggtttaacccctgtcacgcgtacagagaagaccggcaaacgttccacttcggcagccgccttggaagcacttcgtggtgctcacccgatcgtcaacttgattttgcagtatcgcgagctcagcaaactcaaatcaacctatcttgataggttacctcgtcttgttcatccacgtacgggtcgtttacacacccgcttcaatcaaacggcaacagccaccgggcgcttgtcgtcgagtgacccgaacctccagaatattccagtgcgcacgccgctgggccaacacattcgtaaagcgtttgttgcggaagaaggttggttattacttgcggccgattactcccagatcgaacttcgtgtattggcgcatctctctggcgacgagaatcttaaacgcgtgtttcgcgaaggcaaggatattcacactgaaaccgcagcctggatgttcggggtggacccagccttagtggaccccaagatgcgtcgtgccgccaagaccgtcaactttggcgtactctatggtatgtcagcagcacgtcttagtcaggaattgggcattgactacaaagaagctgaagcgtttatcgagcgctatttccaatcctttccgaaagttcgcgcgtggattgaacgtacgctcgaagaaggtcgcactcgcggctatgtggaaacgttattcgggcgtcgtcgctacgttccagatcttgcgtctcgtgtccgctcagtgcgcgaagctgctgagcgtatggcctggaatatgcctgttcagggaacagcggcggacctcatgaagatcgccatggtgaaattgtttccgcgcttgaaacccttaggagcccaccttcttttacaggtgcatgatgaattggtcttggaagtacccgaggatcgcgcagaagaagccaaagcactcgtgaaagaggttatggaaaacgcgtatccgttagatgttccgttggaggtcgaagtgggtgtaggccgtgattggcttgaagcgaaacaagactaatga

SEQ ID NO: 610 - protein, 844 aa, synthetic construct
  REGION 1..844: note = DNA Polymerase Variant
MHHHHHHGGSGMLPLFDLEEPPKRVLLVDGHHLAYRTFYALSLTTSRGEPVQMVYGFARSLLKALKEDGQAVVVVFDAKAPSFRHEAYEAYKAGRAPTPEDFPRQLALVKRLVDLLGLVRLEAPGYEADDVLGTLAKKAEREGMEVCILTGDRDFFQLLSEKVSVLLPDGTLVTPKDVQEKYGVPPERWVDFRALTGDRSDNIPGVAGIGEKTALRLLAEWGSVENLLKNLDRVKPDSLRRKIEAHLEDLRLSLDLVRIRTDLPLEVDFKALRRRTPDLEGLRAFLEELELGSLLHEFGLLGGEKPREEAPWPPPEGAFVGFLLSRKEPMWAELLALAAAAEGRVHRATSPVEALADLKEARGFLAKDLAVLALREGVALDPTDDPLLVAYLLDSANTNPERVARRYGGEFTEDAAERALLSERLFQTLFPRLSEKLLWLYQEVERPLSRVLAHMEARGVRLDVPLLEALSFELVKELERLEGEVFRLAGHPFNLNSRDQLEKVLFDELGLTPVTRTEKTGKRSTSAAALEALRGAHPIVNLILQYRELSKLKSTYLDRLPRLVHPRTGRLHTRFNQTATATGRLSSSDPNLQNIPVRTPLGQHIRKAFVAEEGWLLLAADYSQIELRVLAHLSGDENLKRVFREGKDIHTETAAWMFGVDPALVDPKMRRAAKTVNFGVLYGMSAARLSQELGIDYKEAEAFIERYFQSFPKVRAWIERTLEEGRTRGYVETLFGRRRYVPDLASRVRSVREAAERMAWNMPVQGTAADLMKIAMVKLFPRLKPLGAHLLLQVHDELVLEVPEDRAEEAKALVKEVMENAYPLDVPLEVEVGVGRDWLEAKQD

SEQ ID NO: 611 - DNA, 2538 bp, synthetic construct
  misc_feature 1..2538: note = DNA Polymerase Variant
  source 1..2538: mol_type = other DNA
atgcaccatcatcatcatcatggcggtagcggcatgttaccgctgtttgatttggaagaaccaccaaaacgcgtgctgcttgttgacggccatcatctggcgtatcgtaccttctacgcactgagccttacgacctcacgtggtgagcctgtccagatggtgtatgggtttgctcgctccctgctgaaagccctgaaggaagatggtcaagccgtagtagtggttttcgatgcgaaagcaccgtcgtttcgtcacgaagcgtacgaggcctataaagctggccgcgcaccgaccccggaagactttccgcgtcagttagcgctcgtcaaacgcctcgtggatttgctgggattagttcgcttggaagctcctggctacgaggcggacgacgtgctcggtacactggccaagaaagcagaacgtgaaggcatggaggtctgcattcttaccggtgatcgcgatttcttccagctgctgtctgagaaagtgagcgttttgctgcccgatggcacgttagtaaccccgaaagatgtgcaagagaaatatggagttccgccagaacgttgggtggactttcgcgcactgactggtgatcgttcagacaacatcccgggcgttgccgggattggtgaaaagacggcgctgcgcctgctggcagaatggggctcggtggaaaatctgctcaagaaccttgatcgtgtgaaacctgatagcttacgccgcaagatcgaagcccacctggaagacttgcgtctgagtctggatcttgtccgtattcgcaccgatctgccgttggaagtagactttaaagctctgcgtcgtcgcacacccgatttagaggggttacgcgcgttcctcgaagaactggagtttggctccctgctgcatgaattcggtttgttgggcggagagaaaccgcgtgaagaagcaccatggccgccgcccgagggtgcctttgtcggctttcttctgtcacgcaaagagccaatgtgggcggaactgttagctcttgcagccgccgcggaagggcgtgttcaccgcgcgacctctcctgtcgaggccctcgctgacctcaaagaagcacgtggtttcttggcgaaagatttagccgtgcttgcattacgcgaaggcgttgcgctcgatccgacggacgacccgcttttggtggcttatttgctcgatcctgcgaataccaacccggaacgtgtcgcccgtcgttacggcggcgagtttactgaagatgcggcagaacgcgcgttgcttagcgaacgcctcttccagacgttatttccacgtctttcggagaaattactctggctctatcaggaagtcgaacgtccattgagtcgcgtgcttgcccatatggaggctcgcggtgtgcgcttagatgttccgttgttagaagcactcagcttcgagttggagaaagaactggaacgtcttgaaggcgaagtctttcgtttagcggggcatcccttcaatctcaactctcgcgaccaattggagaaagtgctctttgatgaattaggtttaacccctgtcacgcgtacagagaagaccggcaaacgttccacttcggcagccgccttggaagcacttcgtggtgctcacccgatcgtcgagttgattttgcagtatcgcgagctcagcaaactcaaatcaacctatcttgataggttacctcgtcttgttcatccacgtacgggtcgtttacacacccgcttcaatcaaacggcgacagccaccgggcgcttgtcgtcgagtgacccgaacctccagaatattccagtgcgcacgccgctgggccaacacattcgtaaagcgtttgttgcggaagaaggttggttattacttgcggccgattactcccagatcgaacttcgtgtattggcgcatctctctggcgacgagaatcttaaacgcgtgtttcgcgaaggcaaggatattcacactgaaaccgcagcctggatgttcggggtggacccagccttagtggaccccaagatgcgtcgtgccgccaagaccgtcaactttggcgtactctatggtatgtcagcacaccgtcttagtcaggaattgggcattgactacaaagaagctgaagcgtttatcgagcgctatttccaatcctttccgaaagttcgcgcgtggattgaacgtacgctcgaagaaggtcgcactcgcggctatgtggaaacgttattcgggcgtcgtcgctacgttccagatcttgcgtctcgtgtccgctcagtgcgcgaagctgctgagcgtatggcctggaatatgcctgttcagggaacatcggcggacctcatgaagatcgccatggtgaaattgtttccgcgcttgaaacccttaggagcccaccttcttttacaggtgcatgatgaattggtcttggaagtacccgaggatcgcgcagaagaagccaaagcactcgtgaaagaggttatggaaaacgcgtatccgttagatgttccgttggaggtcgaagtgggtgtaggccgtgattggcttgaagcgaaacaagactaatga

SEQ ID NO: 612 - protein, 844 aa, synthetic construct
  REGION 1..844: note = DNA Polymerase Variant
MHHHHHHGGSGMLPLFDLEEPPKRVLLVDGHHLAYRTFYALSLTTSRGEPVQMVYGFARSLLKALKEDGQAVVVVFDAKAPSFRHEAYEAYKAGRAPTPEDFPRQLALVKRLVDLLGLVRLEAPGYEADDVLGTLAKKAEREGMEVCILTGDRDFFQLLSEKVSVLLPDGTLVTPKDVQEKYGVPPERWVDFRALTGDRSDNIPGVAGIGEKTALRLLAEWGSVENLLKNLDRVKPDSLRRKIEAHLEDLRLSLDLVRIRTDLPLEVDFKALRRRTPDLEGLRAFLEELEFGSLLHEFGLLGGEKPREEAPWPPPEGAFVGFLLSRKEPMWAELLALAAAAEGRVHRATSPVEALADLKEARGFLAKDLAVLALREGVALDPTDDPLLVAYLLDPANTNPERVARRYGGEFTEDAAERALLSERLFQTLFPRLSEKLLWLYQEVERPLSRVLAHMEARGVRLDVPLLEALSFELEKELERLEGEVFRLAGHPFNLNSRDQLEKVLFDELGLTPVTRTEKTGKRSTSAAALEALRGAHPIVELILQYRELSKLKSTYLDRLPRLVHPRTGRLHTRFNQTATATGRLSSSDPNLQNIPVRTPLGQHIRKAFVAEEGWLLLAADYSQIELRVLAHLSGDENLKRVFREGKDIHTETAAWMFGVDPALVDPKMRRAAKTVNFGVLYGMSAHRLSQELGIDYKEAEAFIERYFQSFPKVRAWIERTLEEGRTRGYVETLFGRRRYVPDLASRVRSVREAAERMAWNMPVQGTSADLMKIAMVKLFPRLKPLGAHLLLQVHDELVLEVPEDRAEEAKALVKEVMENAYPLDVPLEVEVGVGRDWLEAKQD

SEQ ID NO: 613 - DNA, 2538 bp, synthetic construct
  misc_feature 1..2538: note = DNA Polymerase Variant
  source 1..2538: mol_type = other DNA
atgcaccatcatcatcatcatggcggtagcggcatgttaccgctgtttgatttggaagaaccaccaaaacgcgtgctgcttgttgacggccatcatctggcgtatcgtaccttctacgcactgagccttacgacctcacgtggtgagcctgtccagatggtgtatgggtttgctcgctccctgctgaaagccctgaaggaagatggtcaagccgtagtagtggttttcgatgcgaaagcaccgtcgtttcgtcacgaagcgtacgaggcctataaagctggccgcgcaccgaccccggaagactttccgcgtcagttagcgctcgtcaaacgcctcgtggatttgctgggattagttcgcttggaagctcctggctacgaggcggacgacgtgctcggtacactggccaagaaagcagaacgtgaaggcatggaggtctgcattcttaccggtgatcgcgatttcttccagctgctgtctgagaaagtgagcgttttgctgcccgatggcacgttagtaaccccgaaagatgtccaagagaaatatggagttccgccagaacgttgggtggactttcgcgcactgactggtgatcgttcagacaacatcccgggcgttgccgggattggtgaaaagacggcgctgcgcctgctggcagaatggggctcggtggaaaatctgctcaagaaccttgatcgtgtgaaacctgatagcttacgccgcaagatcgaagcccacctggaagacttgcgtctgagtctggatcttgcgcgtattcgcaccgatctgccgttggaagtagactttaaagctctgcgtcgtcgcacacccgatttagaggggttacgcgcgttcctcgaagaactggagtttggctccctgctgcatgaattcggtttgttgggcggagagaaaccgcgtgaagaagcaccatggccgccgcccgaaggtgcctttgtcggctttcttctgtcacgcaaagagccaatgtgggcggaactgttagctcttgcagccgccgcggaagggcgtgttcaccgcgcgacctctcctgtcgaggccctcgctgacctcaaagaagcacgtggtttcttggcgaaagatttagccgtgcttgcattacgcgaaggcgttgcgctcgatccgacggacgacccgcttttggtggcttatttgctcgatcctgcgaataccaacccggaacgtgtcgcccgtcgttacggcggcgagtttactgaagatgcggcagaacgcgcgttgcttagcgaacgcctcttccagacgttatttccacgtctttcggagaaattactctggctctatcaggaagtcgaacgtccattgagtcgcgtgcttgcccatatggaggctcgcggtgtgcgcttagatgttccgttgttagaagcactcagcttcgagttggagaaagaactggaacgtcttgaaggcgaagtctttcgtttagcggggcatcccttcaatctcaactctcgcgaccaattggagaaagtgctctttgatgaattaggtttaacccctgtcacgcgtacagagaagaccggcaaacgttccacttcggcagccgccttggaagcacttcgtggtgctcacccgatcgtcgagttgattttgcagtatcgcgagctcagcaaactcaaatcaacctatcttgataggttacctcgtcttgttcatccacgtacgggtcgtttacacacccgcttcaatcaaacggcgacagccaccgggcgcttgtcgtcgagtgacccgaacctccagaatattccagtgcgcacgccgctgggccaacacattcgtaaagcgtttgttgcggaagaaggttggttattacttgcggccgattactcccagatcgaacttcgtgtattggcgcatctctctggcgacgagaatcttaaacgcgtgtttcgcgaaggcaaggatattcacactgaaaccgcagcctggatgttcggggtggacccagccttagtggactctaagatgcgtcgtgccgccaagaccgtcaactttggcgtactctatggtatgtcagcacatcgtcttagtcaggaattgggcattgactacaaagaagctgaagcgtttatcgagcgctatttccaatcctttccgaaagttcgcgcgtggattgaacgtaccctcgaagaaggtcgcactcgcggctatgtggaaacgttattcgggcgtcgtcgctacgttccagatcttgcatctcgtgtccgctcagtgcgcgaagctgctgagcgtatggcctggaatatgcctgttcagggaacagcggcggacctcatgaagatcgccatggtgaaattgtttccgcgcttgaaacccttaggagcccaccttcttttacaggtgcatgatgaattggtcttggaagtacccgaggatcgcgcagaagaagccaaagcactcgtgaaagaggttatggaaaacgcgtatccgttagatgttccgttggaggtcgaagtgggtgtaggccgtgattggcttgaagcgaaacaagactaatga

SEQ ID NO: 614 - protein, 844 aa, synthetic construct
  REGION 1..844: note = DNA Polymerase Variant
MHHHHHHGGSGMLPLFDLEEPPKRVLLVDGHHLAYRTFYALSLTTSRGEPVQMVYGFARSLLKALKEDGQAVVVVFDAKAPSFRHEAYEAYKAGRAPTPEDFPRQLALVKRLVDLLGLVRLEAPGYEADDVLGTLAKKAEREGMEVCILTGDRDFFQLLSEKVSVLLPDGTLVTPKDVQEKYGVPPERWVDFRALTGDRSDNIPGVAGIGEKTALRLLAEWGSVENLLKNLDRVKPDSLRRKIEAHLEDLRLSLDLARIRTDLPLEVDFKALRRRTPDLEGLRAFLEELEFGSLLHEFGLLGGEKPREEAPWPPPEGAFVGFLLSRKEPMWAELLALAAAAEGRVHRATSPVEALADLKEARGFLAKDLAVLALREGVALDPTDDPLLVAYLLDPANTNPERVARRYGGEFTEDAAERALLSERLFQTLFPRLSEKLLWLYQEVERPLSRVLAHMEARGVRLDVPLLEALSFELEKELERLEGEVFRLAGHPFNLNSRDQLEKVLFDELGLTPVTRTEKTGKRSTSAAALEALRGAHPIVELILQYRELSKLKSTYLDRLPRLVHPRTGRLHTRFNQTATATGRLSSSDPNLQNIPVRTPLGQHIRKAFVAEEGWLLLAADYSQIELRVLAHLSGDENLKRVFREGKDIHTETAAWMFGVDPALVDSKMRRAAKTVNFGVLYGMSAHRLSQELGIDYKEAEAFIERYFQSFPKVRAWIERTLEEGRTRGYVETLFGRRRYVPDLASRVRSVREAAERMAWNMPVQGTAADLMKIAMVKLFPRLKPLGAHLLLQVHDELVLEVPEDRAEEAKALVKEVMENAYPLDVPLEVEVGVGRDWLEAKQD

SEQ ID NO: 615 - DNA, 2538 bp, synthetic construct
  misc_feature 1..2538: note = DNA Polymerase Variant
  source 1..2538: mol_type = other DNA
atgcaccatcatcatcatcatggcggtagcggcatgttaccgctgtttgatttggaagaaccaccaaaacgcgtgctgcttgttgacggccatcatctggcgtatcgtaccttctacgcactgagccttacgacctcacgtggtgagcctgtccagatggtgtatgggtttgctcgctccctgctgaaagccctgaaggaagatggtcaagccgtagtagtggttttcgatgcgaaagcaccgtcgtttcgtcacgaagcgtacgaggcctataaagctggccgcgcaccgaccccggaagactttccgcgtcagttagcgctcgtcaaacgcctcgtggatttgctgggattagttcgcttggaagctcctggctacgaggcggacgacgtgctcggtacactggccaagaaagcagaacgtgaaggcatggaggtctgcattcttaccggtgatcgcgatttcttccagctgctgtctgagaaagtgagcgttttgctgcccgatggcacgttagtaaccccgaaagatgtccaagagaaatatggagttccgccagaacgttgggtggactttcgcgcactgactggtgatcgttcagacaacatcccgggcgttgccgggattggtgaaaagacggcgctgcgcctgctggcagaatggggctcggtggaaaatctgctcaagaaccttgatcgtgtgaaacctgatagcttacgccgcaagatcgaagcccacctggaagacttgcgtctgagtctggatcttgcgcgtattcgcaccgatctgccgttggaagtagactttaaagctctgcgtcgtcgcacacccgatttagaggggttacgcgcgttcctcgaagaactggagtttggctccctgctgcatgaattcggtttgttgggcggagagaaaccgcgtgaagaagcaccatggccgccgcccgaaggtgcctttgtcggctttcttctgtcacgcaaagagccaatgtgggcggaactgttagctcttgcagccgccgcggaagggcgtgttcaccgcgcgacctctcctgtcgaggccctcgctgacctcaaagaagcacgtggtttcttggcgaaagatttagccgtgcttgcattacgcgaaggcgttgcgctcgatccgacggacgacccgcttttggtggcttatttgctcgatcctgcgaataccaacccggaacgtgtcgcccgtcgttacggcggcgagtttactgaagatgcggcagaacgcgcgttgcttagcgaacgcctcttccagacgttatttccacgtctttcggagaaattactctggctctatcaggaagtcgaacgtccattgagtcgcgtgcttgcccatatggaggctcgcggtgtgcgcttagatgttccgttgttagaagcactcagcttcgagttggagaaagaactggaacgtcttgaaggcgaagtctttcgtttagcggggcatcccttcaatctcaactctcgcgaccaattggagaaagtgctctttgatgaattaggtttaacccctgtcacgcgtacagagaagaccggcaaacgttccacttcggcagccgccttggaagcacttcgtggtgctcacccgatcgtcgagttgattttgcagtatcgcgagctcagcaaactcaaatcaacctatcttgataggttacctcgtcttgttcatccacgtacgggtcgtttacacacccgcttcaatcaaacggcgacagccaccgggcgcttgtcgtcgagtgacccgaacctccagaatattccagtgcgcacgccgctgggccaacacattcgtaaagcgtttgttgcggaagaaggttggttattacttgcggccgattactcccagatcgaacttcgtgtattggcgcatctctctggcgacgagaatcttaaacgcgtgtttcgcgaaggcaaggatattcacactgaaaccgcagcctggatgttcggggtggacccagccttagtggaccccaagatgcgtcgtgccgccaagaccgtcaactttggcgtactctatggtatgtcagcacatcgtcttagtcaggaattgggcattgactacaaagaagctgaagcgtttatcgagcgctatttccaatcctttccgaaagttcgcgcgtggattgaacgtaccctcgaagaaggtcgcactcgcggctatgtggaaacgttattcgggcgtcgtcgctacgttccagatcttgcatctcgtgtccgctcagtgcgcgaagctgctgagcgtatggcctggaatatgcctgttcagggaacagcggcggacctcatgaagatcgccatggtgaaattgtttccgcgcttgaaacccttaggagcccaccttcttttacaggtgcatgatgaattggtcttggaagtacccgaggatcgcgcagaagaagccaaaagtctcgtgaaagaggttatggaaaacgcgtatccgttagatgttccgttggaggtcgaagtgggtgtaggccgtgattggcttgaagcgaaacaagactaatga

SEQ ID NO: 616 - protein, 844 aa, synthetic construct
  REGION 1..844: note = DNA Polymerase Variant
MHHHHHHGGSGMLPLFDLEEPPKRVLLVDGHHLAYRTFYALSLTTSRGEPVQMVYGFARSLLKALKEDGQAVVVVFDAKAPSFRHEAYEAYKAGRAPTPEDFPRQLALVKRLVDLLGLVRLEAPGYEADDVLGTLAKKAEREGMEVCILTGDRDFFQLLSEKVSVLLPDGTLVTPKDVQEKYGVPPERWVDFRALTGDRSDNIPGVAGIGEKTALRLLAEWGSVENLLKNLDRVKPDSLRRKIEAHLEDLRLSLDLARIRTDLPLEVDFKALRRRTPDLEGLRAFLEELEFGSLLHEFGLLGGEKPREEAPWPPPEGAFVGFLLSRKEPMWAELLALAAAAEGRVHRATSPVEALADLKEARGFLAKDLAVLALREGVALDPTDDPLLVAYLLDPANTNPERVARRYGGEFTEDAAERALLSERLFQTLFPRLSEKLLWLYQEVERPLSRVLAHMEARGVRLDVPLLEALSFELEKELERLEGEVFRLAGHPFNLNSRDQLEKVLFDELGLTPVTRTEKTGKRSTSAAALEALRGAHPIVELILQYRELSKLKSTYLDRLPRLVHPRTGRLHTRFNQTATATGRLSSSDPNLQNIPVRTPLGQHIRKAFVAEEGWLLLAADYSQIELRVLAHLSGDENLKRVFREGKDIHTETAAWMFGVDPALVDPKMRRAAKTVNFGVLYGMSAHRLSQELGIDYKEAEAFIERYFQSFPKVRAWIERTLEEGRTRGYVETLFGRRRYVPDLASRVRSVREAAERMAWNMPVQGTAADLMKIAMVKLFPRLKPLGAHLLLQVHDELVLEVPEDRAEEAKSLVKEVMENAYPLDVPLEVEVGVGRDWLEAKQD

SEQ ID NO: 617 - DNA, 2538 bp, synthetic construct
  misc_feature 1..2538: note = DNA Polymerase Variant
  source 1..2538: mol_type = other DNA
atgcaccatcatcatcatcatggcggtagcggcatgttaccgctgtttgatttggaagaaccaccaaaacgcgtgctgcttgttgacggccatcatctggcgtatcgtaccttctacgcactgagccttacgacctcacgtggtgagcctgtccagatggtgtatgggtttgctcgctccctgctgaaagccctgaaggaagatggtcaagccgtagtagtggttttcgatgcgaaagcaccgtcgtttcgtcacgaagcgtacgaggcctataaagctggccgcgcaccgaccccggaagactttccgcgtcagttagcgctcgtcaaacgcctcgtggatttgctgggattagttcgcttggaagctcctggctacgaggcggacgacgtgctcggtacactggccaagaaagcagaacgtgaaggcatggaggtctgcattcttaccggtgatcgcgatttcttccagctgctgtctgagaaagtgagcgttttgctgcccgatggcacgttagtaaccccgaaagatgtccaagagaaatatggagttccgccagaacgttgggtggactttcgcgcactgactggtgatcgttcagacaacatcccgggcgttgccgggattggtgaaaagacggcgctgcgcctgctggcagaatggggctcggtggaaaatctgctcaagaaccttgatcgtgtgaaacctgatagcttacgccgcaagatcgaagcccacctggaagacttgcgtctgagtctggatcttgcacgtattcgcaccgatctgccgttggaagtagactttaaagctctgcgtcgtcgcacacccgatttagaggggttacgcgcgttcctcgaagaactggagtttggctccctgctgcatgaattcggtttgttgggcggagagaaaccgcgtgaagaagcaccatggccgccgcccgaaggtgcctttgtcggctttcttctgtcacgcaaagagccaatgtgggcggaactgttagctcttgcagccgccgcggaagggcgtgttcaccgcgcgacctctcctgtcgaggccctcgctgacctcaaagaagcacgtggtttcttggcgaaagatttagccgtgcttgcattacgcgaaggcgttgcgctcgatccgacggacgacccgcttttggtggcttatttgctcgatcctgcgaataccaacccggaacgtgtcgcccgtcgttacggcggcgagtttactgaagatgcggcagaacgcgcgttgcttagcgaacgcctcttccagacgttatttccacgtctttcggagaaattactctggctctatcaggaagtcgaacgtccattgagtcgcgtgcttgcccatatggaggctcgcggtgtgcgcttagatgttccgttgttagaagcactcagcttcgagctggcgaaagaactggaacgtcttgaaggcgaagtctttcgtttagcggggcatcccttcaatctcaactctcgcgaccaattggagaaagtgctctttgatgaattaggtttaacccctgtcacgcgtacagagaagaccggcaaacgttccacttcggcagccgccttggaagcacttcgtggtgctcacccgatcgtcgagttgattttgcagtatcgcgagctcagcaaactcaaatcaacctatcttgataggttacctcgtcttgttcatccacgtacgggtcgtttacacacccgcttcaatcaaacggcgacagccaccgggcgcttgtcgtcgagtgacccgaacctccagaatattccagtgcgcacgccgctgggccaacacattcgtaaagcgtttgttgcggaagaaggttggttattacttgcggccgattactcccagatcgaacttcgtgtattggcgcatctctctggcgacgagaatcttaaacgcgtgtttcgcgaaggcaaggatattcacactgaaaccgcagcctggatgttcggggtggacccagccttagtggaccccaagatgcgtcgtgccgccaagaccgtcaactttggcgtactctatggtatgtcagcacatcgtcttagtcaggaattgggcattgactacaaagaagctgaagcgtttatcgagcgctatttccaatcctttccgaaagttcgcgcgtggattgaacgtaccctcgaagaaggtcgcactcgcggctatgtggaaacgttattcgggcgtcgtcgctacgttccagatcttgcatctcgtgtccgctcagtgcgcgaagctgctgagcgtatggcctggaatatgcctgttcagggaacagcggcggacctcatgaagatcgccatggtgaaattgtttccgcgcttgaaacccttaggagcccaccttcttctgcaggtgcatgatgaattggtcttggaagtacccgaggatcgcgcagaagaagccaaagcactcgtgaaagaggttatggaaaacgcgtatccgttagatgttccgttggaggtcgaagtgggtgtaggccgtgattggcttgaagcgaaacaagactaatga

SEQ ID NO: 618 - protein, 844 aa, synthetic construct
  REGION 1..844: note = DNA Polymerase Variant
MHHHHHHGGSGMLPLFDLEEPPKRVLLVDGHHLAYRTFYALSLTTSRGEPVQMVYGFARSLLKALKEDGQAVVVVFDAKAPSFRHEAYEAYKAGRAPTPEDFPRQLALVKRLVDLLGLVRLEAPGYEADDVLGTLAKKAEREGMEVCILTGDRDFFQLLSEKVSVLLPDGTLVTPKDVQEKYGVPPERWVDFRALTGDRSDNIPGVAGIGEKTALRLLAEWGSVENLLKNLDRVKPDSLRRKIEAHLEDLRLSLDLARIRTDLPLEVDFKALRRRTPDLEGLRAFLEELEFGSLLHEFGLLGGEKPREEAPWPPPEGAFVGFLLSRKEPMWAELLALAAAAEGRVHRATSPVEALADLKEARGFLAKDLAVLALREGVALDPTDDPLLVAYLLDPANTNPERVARRYGGEFTEDAAERALLSERLFQTLFPRLSEKLLWLYQEVERPLSRVLAHMEARGVRLDVPLLEALSFELAKELERLEGEVFRLAGHPFNLNSRDQLEKVLFDELGLTPVTRTEKTGKRSTSAAALEALRGAHPIVELILQYRELSKLKSTYLDRLPRLVHPRTGRLHTRFNQTATATGRLSSSDPNLQNIPVRTPLGQHIRKAFVAEEGWLLLAADYSQIELRVLAHLSGDENLKRVFREGKDIHTETAAWMFGVDPALVDPKMRRAAKTVNFGVLYGMSAHRLSQELGIDYKEAEAFIERYFQSFPKVRAWIERTLEEGRTRGYVETLFGRRRYVPDLASRVRSVREAAERMAWNMPVQGTAADLMKIAMVKLFPRLKPLGAHLLLQVHDELVLEVPEDRAEEAKALVKEVMENAYPLDVPLEVEVGVGRDWLEAKQD

SEQ ID NO: 619 - DNA, 2538 bp, synthetic construct
  misc_feature 1..2538: note = DNA Polymerase Variant
  source 1..2538: mol_type = other DNA
atgcaccatcatcatcatcatggcggtagcggcatgttaccgctgtttgatttggaagaaccaccaaaacgcgtgctgcttgttgacggccatcatctggcgtatcgtaccttctacgcactgagccttacgacctcacgtggtgagcctgtccagatggtgtatgggtttgctcgctccctgctgaaagccctgaaggaagatggtcaagccgtagtagtggttttcgatgcgaaagcaccgtcgtttcgtcacgaagcgtacgaggcctataaagctggccgcgcaccgaccccggaagactttccgcgtcagttagcgctcgtcaaacgcctcgtggatttgctgggattagttcgcttggaagctcctggctacgaggcggacgacgtgctcggtacactggccaagaaagcagaacgtgaaggcatggaggtctgcattcttaccggtgatcgcgatttcttccagctgctgtctgagaaagtgagcgttttgctgcccgatggcacgttagtaaccccgaaagatgtccaagagaaatatggagttccgccagaacgttgggtggactttcgcgcactgactggtgatcgttcagacaacatcccgggcgttgccgggattggtgaaaagacggcgctgcgcctgctggcagaatggggctcggtggaaaatctgctcaagaaccttgatcgtgtgaaacctgatagcttacgccgcaagatcgaagcccacctggaagacttgcgtctgagtctggatcttgcgcgtattcgcaccgatctgccgttggaagtagactttaaagctctgcgtcgtcgcacacccgatttagaggggttacgcgcgttcctcgaagaactggagtttggctccctgctgcatgaattcggtttgttgggcggagagaaaccgcgtgaagaagcaccatggccgccgcccgaaggtgcctttgtcggctttcttctgtcacgcaaagagccaatgtgggcggaactgttagctcttgcagccgccgcggaagggcgtgttcaccgcgcgacctctcctgtcgaggccctcgctgacctcaaagaagcacgtggtttcttggcgaaagatttagccgtgcttgcattacgcgaaggcgttgcgctcgatccgacggacgacccgcttttggtggcttatttgctcgatcctgcgaataccaacccggaacgtgtcgcccgtcgttacggcggcgagtttactgaagatgcggcagaacgcgcgttgcttagcgaacgcctcttccagacgttatttccacgtctttcggagaaattactctggctctatcaggaagtcgaacgtccattgagtcgcgtgcttgcccatatggaggctcgcggtgtgcgcttagatgttccgttgttagaagcactcagcttcgagttggagaaagaactggaacgtcttgaaggcgaagtctttcgtttagcggggcatcccttcaatctcaactctcgcgaccaattggagaaagtgctctttgatgaattaggtttaacccctgtcacgcgtacagagaagaccggcaaacgttccacttcggcagccgccttggaagcacttcgtggtgctcacccgatcgtcgagttgattttgcagtatcgcgagctcagcaaactcaaatcaacctatcttgataggttacctcgtcttgttcatccacgtacgggtcgtttacacacccgcttcaatcaaacggcgacagccaccgggcgcttgtcgtcgagtgacccgaacctccagaatattccagtgcgcacgccgctgggccaacacattcgtaaagcgtttgttgcggaagaaggttggttattacttgcggccgattactcccagatcgaacttcgtgtattggcgcatctctctggcgacgagaatcttaaacgcgtgtttcgcgaaggcaaggatattcacactgaaaccgcagcctggatgttcggggtggactctgccttagtggaccccaagatgcgtcgtgccgccaagaccgtcaactttggcgtactctatggtatgtcagcacatcgtcttagtcaggaattgggcattgactacaaagaagctgaagcgtttatcgagcgctatttccaatcctttccgaaagttcgcgcgtggattgaacgtaccctcgaagaaggtcgcactcgcggctatgtggaaacgttattcgggcgtcgtcgctacgttccagatcttgcatctcgtgtccgctcagtgcgcgaagctgctgagcgtatggcctggaatatgcctgttcagggaacagcggcggacctcatgaagatcgccatggtgaaattgtttccgcgcttgaaacccttaggagcccaccttcttttacaggtgcatgatgaattggtcttggaagtacccgaggatcgcgcagaagaagccaaagcactcgtgaaagaggttatggaaaacgcgtatccgttagatgttccgttggaggtcgaagtgggtgtaggccgtgattggcttgaagcgaaacaagactaatga

SEQ ID NO: 620 - protein, 844 aa, synthetic construct
  REGION 1..844: note = DNA Polymerase Variant
MHHHHHHGGSGMLPLFDLEEPPKRVLLVDGHHLAYRTFYALSLTTSRGEPVQMVYGFARSLLKALKEDGQAVVVVFDAKAPSFRHEAYEAYKAGRAPTPEDFPRQLALVKRLVDLLGLVRLEAPGYEADDVLGTLAKKAEREGMEVCILTGDRDFFQLLSEKVSVLLPDGTLVTPKDVQEKYGVPPERWVDFRALTGDRSDNIPGVAGIGEKTALRLLAEWGSVENLLKNLDRVKPDSLRRKIEAHLEDLRLSLDLARIRTDLPLEVDFKALRRRTPDLEGLRAFLEELEFGSLLHEFGLLGGEKPREEAPWPPPEGAFVGFLLSRKEPMWAELLALAAAAEGRVHRATSPVEALADLKEARGFLAKDLAVLALREGVALDPTDDPLLVAYLLDPANTNPERVARRYGGEFTEDAAERALLSERLFQTLFPRLSEKLLWLYQEVERPLSRVLAHMEARGVRLDVPLLEALSFELEKELERLEGEVFRLAGHPFNLNSRDQLEKVLFDELGLTPVTRTEKTGKRSTSAAALEALRGAHPIVELILQYRELSKLKSTYLDRLPRLVHPRTGRLHTRFNQTATATGRLSSSDPNLQNIPVRTPLGQHIRKAFVAEEGWLLLAADYSQIELRVLAHLSGDENLKRVFREGKDIHTETAAWMFGVDSALVDPKMRRAAKTVNFGVLYGMSAHRLSQELGIDYKEAEAFIERYFQSFPKVRAWIERTLEEGRTRGYVETLFGRRRYVPDLASRVRSVREAAERMAWNMPVQGTAADLMKIAMVKLFPRLKPLGAHLLLQVHDELVLEVPEDRAEEAKALVKEVMENAYPLDVPLEVEVGVGRDWLEAKQD

SEQ ID NO: 621 - DNA, 2538 bp, synthetic construct
  misc_feature 1..2538: note = DNA Polymerase Variant
  source 1..2538: mol_type = other DNA
atgcaccatcatcatcatcatggcggtagcggcatgttaccgctgtttgatttggaagaaccaccaaaacgcgtgctgcttgttgacggccatcatctggcgtatcgtaccttctacgcactgagccttacgacctcacgtggtgagcctgtccagatggtgtatgggtttgctcgctccctgctgaaagccctgaaggaagatggtcaagccgtagtagtggttttcgatgcgaaagcaccgtcgtttcgtcacgaagcgtacgaggcctataaagctggccgcgcaccgaccccggaagactttccgcgtcagttagcgctcgtcaaacgcctcgtggatttgctgggattagttcgcttggaagctcctggctacgaggcggacgacgtgctcggtacactggccaagaaagcagaacgtgaaggcatggaggtctgcattcttaccggtgatcgcgatttcttccagctgctgtctgagaaagtgagcgttttgctgcccgatggcacgttagtaaccccgaaagatgtccaagagaaatatggagttccgccagaacgttgggtggactttcgcgcactgactggtgatcgttcagacaacatcccgggcgttgccgggattggtgaaaagacggcgctgcgcctgctggcagaatggggctcggtggaaaatctgctcaagaaccttgatcgtgtgaaacctgatagcttacgccgcaagatcgaagcccacctggaagacttgcgtctgagtctggatcttgcgcgtattcgcaccgatctgccgttggaagtagactttaaagctctgcgtcgtcgcacacccgatttagaggggttacgcgcgttcctcgaagaactggagtttggctccctgctgcatgaattcggtttgttgggcggagagaaaccgcgtgaagaagcaccatggccgccgcccgaaggtgcctttgtcggctttcttctgtcacgcaaagagccaatgtgggcggaactgttagctcttgcagccgccgcggaagggcgtgttcaccgcgcgacctctcctgtcgaggccctcgctgacctcaaagaagcacgtggtttcttggcgaaagatttagccgtgcttgcattacgcgaaggcgttgcgctcgatccgacggacgacccgcttttggtggcttatttgctcgatcctgcgaataccaacccggaacgtgtcgcccgtcgttacggcggcgagtttactgaagatgcggcagaacgcgcgttgcttagcgaacgcctcttccagacgttatttccacgtctttcggagaaattactctggctctatcaggaagtcgaacgtccattgagtcgcgtgcttgcccatatggaggctcgcggtgtgcgcttagatgttccgttgttagaagcactcagcttcgagttggagaaagaactggaacgtcttgaaggcgaagtctttcgtttagcggggcatcccttcaatctcaactctcgcgaccaattggagaaagtgctctttgatgaattaggtttaacccctgtcacgcgtacagagaagaccggcaaacgttccacttcggcagccgccttggaagcacttcgtggtgtgcacccgatcgtcgagttgattttgcagtatcgcgagctcagcaaactcaaatcaacctatcttgataggttacctcgtcttgttcatccacgtacgggtcgtttacacacccgcttcaatcaaacggcgacagccaccgggcgcttgtcgtcgagtgacccgaacctccagaatattccagtgcgcacgccgctgggccaacacattcgtaaagcgtttgttgcggaagaaggttggttattacttgcggccgattactcccagatcgaacttcgtgtattggcgcatctctctggcgacgagaatcttaaacgcgtgtttcgcgaaggcaaggatattcacactgaaaccgcagcctggatgttcggggtggacccagccttagtggaccccaagatgcgtcgtgccgccaagaccgtcaactttggcgtactctatggtatgtcagcacatcgtcttagtcaggaattgggcattgactacaaagaagctgaagcgtttatcgagcgctatttccaatcctttccgaaagttcgcgcgtggattgaacgtaccctcgaagaaggtcgcactcgcggctatgtggaaacgttattcgggcgtcgtcgctacgttccagatcttgcatctcgtgtccgctcagtgcgcgaagctgctgagcgtatggcctggaatatgcctgttcagggaacagcggcggacctcatgaagatcgccatggtgaaattgtttccgcgcttgaaacccttaggagcccaccttcttttacaggtgcatgatgaattggtcttggaagtacccgaggatcgcgcagaagaagccaaagcactcgtgaaagaggttatggaaaacgcgtatccgttagatgttccgttggaggtcgaagtgggtgtaggccgtgattggcttgaagcgaaacaagactaatga

SEQ ID NO: 622 - protein, 844 aa, synthetic construct
  REGION 1..844: note = DNA Polymerase Variant
MHHHHHHGGSGMLPLFDLEEPPKRVLLVDGHHLAYRTFYALSLTTSRGEPVQMVYGFARSLLKALKEDGQAVVVVFDAKAPSFRHEAYEAYKAGRAPTPEDFPRQLALVKRLVDLLGLVRLEAPGYEADDVLGTLAKKAEREGMEVCILTGDRDFFQLLSEKVSVLLPDGTLVTPKDVQEKYGVPPERWVDFRALTGDRSDNIPGVAGIGEKTALRLLAEWGSVENLLKNLDRVKPDSLRRKIEAHLEDLRLSLDLARIRTDLPLEVDFKALRRRTPDLEGLRAFLEELEFGSLLHEFGLLGGEKPREEAPWPPPEGAFVGFLLSRKEPMWAELLALAAAAEGRVHRATSPVEALADLKEARGFLAKDLAVLALREGVALDPTDDPLLVAYLLDPANTNPERVARRYGGEFTEDAAERALLSERLFQTLFPRLSEKLLWLYQEVERPLSRVLAHMEARGVRLDVPLLEALSFELEKELERLEGEVFRLAGHPFNLNSRDQLEKVLFDELGLTPVTRTEKTGKRSTSAAALEALRGVHPIVELILQYRELSKLKSTYLDRLPRLVHPRTGRLHTRFNQTATATGRLSSSDPNLQNIPVRTPLGQHIRKAFVAEEGWLLLAADYSQIELRVLAHLSGDENLKRVFREGKDIHTETAAWMFGVDPALVDPKMRRAAKTVNFGVLYGMSAHRLSQELGIDYKEAEAFIERYFQSFPKVRAWIERTLEEGRTRGYVETLFGRRRYVPDLASRVRSVREAAERMAWNMPVQGTAADLMKIAMVKLFPRLKPLGAHLLLQVHDELVLEVPEDRAEEAKALVKEVMENAYPLDVPLEVEVGVGRDWLEAKQD

SEQ ID NO: 623 - DNA, 2538 bp, synthetic construct
  misc_feature 1..2538: note = DNA Polymerase Variant
  source 1..2538: mol_type = other DNA
atgcaccatcatcatcatcatggcggtagcggcatgttaccgctgtttgatttggaagaaccaccaaaacgcgtgctgcttgttgacggccatcatctggcgtatcgtaccttctacgcactgagccttacgacctcacgtggtgagcctgtccagatggtgtatgggtttgctcgctccctgctgaaagccctgaaggaagatggtcaagccgtagtagtggttttcgatgcgaaagcaccgtcgtttcgtcacgaagcgtacgaggcctataaagctggccgcgcaccgaccccggaagactttccgcgtcagttagcgctcgtcaaacgcctcgtggatttgctgggattagttcgcttggaagctcctggctacgaggcggacgacgtgctcggtacactggccaagaaagcagaacgtgaaggcatggaggtctgcattcttaccggtgatcgcgatttcttccagctgctgtctgagaaagtgagcgttttgctgcccgatggcacgttagtaaccccgaaagatgtccaagagaaatatggagttccgccagaacgttgggtggactttcgcgcactgactggtgatcgttcagacaacatcccgggcgttgccgggattggtgaaaagacggcgctgcgcctgctggcagaatggggctcggtggaaaatctgctcaagaaccttgatcgtgtgaaacctgatagcttacgccgcaagatcgaagcccacctggaagacttgcgtctgagtctggatcttgcgcgtattcgcaccgatctgccgttggaagtagactttaaagctctgcgtcgtcgcacacccgatttagaggggttacgcgcgttcctcgaagaactggagtttggctccctgctgcatgaattcggtttgttgggcggagagaaaccgcgtgaagaagcaccatggccgccgcccgaaggtgcctttgtcggctttcttctgtcacgcaaagagccaatgtgggcggaactgttagctcttgcagccgccgcggaagggcgtgttcaccgcgcgacctctcctgtcgaggccctcgctgacctcaaagaagcacgtggtttcttggcgaaagatttagccgtgcttgcattacgcgaaggcgttgcgctcgatccgacggacgacccgcttttggtggcttatttgctcgatcctgcgaataccaacccggaacgtgtcgcccgtcgttacggcggcgagtttactgaagatgcggcagaacgcgcgttgcttagcgaacgcctcttccagacgttatttccacgtctttcggagaaattactctggctctatcaggaagtcgaacgtccattgagtcgcgtgcttgcccatatggaggctcgcggtgtgcgcttagatgttccgttgttagaagcactcagcttcgagttggagaaagaactggaacgtcttgaaggcgaagtctttcgtttagcggggcatcccttcaatctcaactctcgcgaccaattggagaaagtgctctttgatgaattaggtttaacccctgtcacgcgtacagagaagaccggcaaacgttccacttcggcagccgccttggaagcacttcgtggtgctcacccgatcgtcgagttgattttgcagtatcgcgagctcagcaaactcaaatcaacctatcttgataggttacctcgtcttgttcatccacgtacgggtcgtttacacacccgcttcaatcaaacggcgacagccaccgggcgcttgtcgtcgagtgacccgaacctccagaatattccagtgcgcacgccgctgggccaacacattcgtaaagcgtttgttgcggaagaaggttggttattacttgcggccgattactcccagatcgaacttcgtgtattggcgcatctctctggcgacgagaatcttaaacgcgtgtttcgcgaaggcaaggatattcacactgaaaccgcagcctggatgttcggggtggacccagccttagtggaccccaagatgcgtcgtgccgccaagaccgtcaactttggcgtactctatggtatgtcagcacatcgtcttagtcaggaattgggcattgactacaaagaagctgaagcgtttatcgagcgctatttccaatcctttccgaaagttcgcgcgtggattgaacgtaccctcgaagaaggtcgcactcgcggctatgtggaaacgttattcgggcgtcgtcgctacgttccagatcttgcatctcgtgggcgctcagtgcgcgaagctgctgagcgtatggcctggaatatgcctgttcagggaacagcggcggacctcatgaagatcgccatggtgaaattgtttccgcgcttgaaacccttaggagcccaccttcttttacaggtgcatgatgaattggtcttggaagtacccgaggatcgcgcagaagaagccaaagcactcgtgaaagaggttatggaaaacgcgtatccgttagatgttccgttggaggtcgaagtgggtgtaggccgtgattggcttgaagcgaaacaagactaatga

SEQ ID NO: 624 - protein, 844 aa, synthetic construct
  REGION 1..844: note = DNA Polymerase Variant
MHHHHHHGGSGMLPLFDLEEPPKRVLLVDGHHLAYRTFYALSLTTSRGEPVQMVYGFARSLLKALKEDGQAVVVVFDAKAPSFRHEAYEAYKAGRAPTPEDFPRQLALVKRLVDLLGLVRLEAPGYEADDVLGTLAKKAEREGMEVCILTGDRDFFQLLSEKVSVLLPDGTLVTPKDVQEKYGVPPERWVDFRALTGDRSDNIPGVAGIGEKTALRLLAEWGSVENLLKNLDRVKPDSLRRKIEAHLEDLRLSLDLARIRTDLPLEVDFKALRRRTPDLEGLRAFLEELEFGSLLHEFGLLGGEKPREEAPWPPPEGAFVGFLLSRKEPMWAELLALAAAAEGRVHRATSPVEALADLKEARGFLAKDLAVLALREGVALDPTDDPLLVAYLLDPANTNPERVARRYGGEFTEDAAERALLSERLFQTLFPRLSEKLLWLYQEVERPLSRVLAHMEARGVRLDVPLLEALSFELEKELERLEGEVFRLAGHPFNLNSRDQLEKVLFDELGLTPVTRTEKTGKRSTSAAALEALRGAHPIVELILQYRELSKLKSTYLDRLPRLVHPRTGRLHTRFNQTATATGRLSSSDPNLQNIPVRTPLGQHIRKAFVAEEGWLLLAADYSQIELRVLAHLSGDENLKRVFREGKDIHTETAAWMFGVDPALVDPKMRRAAKTVNFGVLYGMSAHRLSQELGIDYKEAEAFIERYFQSFPKVRAWIERTLEEGRTRGYVETLFGRRRYVPDLASRGRSVREAAERMAWNMPVQGTAADLMKIAMVKLFPRLKPLGAHLLLQVHDELVLEVPEDRAEEAKALVKEVMENAYPLDVPLEVEVGVGRDWLEAKQD

SEQ ID NO: 625 - DNA, 2538 bp, synthetic construct
  misc_feature 1..2538: note = DNA Polymerase Variant
  source 1..2538: mol_type = other DNA
atgcaccatcatcatcatcatggcggtagcggcatgttaccgctgtttgatttggaagaaccaccaaaacgcgtgctgcttgttgacggccatcatctggcgtatcgtaccttctacgcactgagccttacgacctcacgtggtgagcctgtccagatggtgtatgggtttgctcgctccctgctgaaagccctgaaggaagatggtcaagccgtagtagtggttttcgatgcgaaagcaccgtcgtttcgtcacgaagcgtacgaggcctataaagctggccgcgcaccgaccccggaagactttccgcgtcagttagcgctcgtcaaacgcctcgtggatttgctgggattagttcgcttggaagctcctggctacgaggcggacgacgtgctcggtacactggccaagaaagcagaacgtgaaggcatggaggtctgcattcttaccggtgatcgcgatttcttccagctgctgtctgagaaagtgagcgttttgctgcccgatggcacgttagtaaccccgaaagatgtccaagagaaatatggagttccgccagaacgttgggtggactttcgcgcactgactggtgatcgttcagacaacatcccgggcgttgccgggattggtgaaaagacggcgctgcgcctgctggcagaatggggctcggtggaaaatctgctcaagaaccttgatcgtgtgaaacctgatagcttacgccgcaagatcgaagcccacctggaagacttgcgtctgagtctggatcttgcgcgtattcgcaccgatctgccgttggaagtagactttaaagctctgcgtcgtcgcacacccgatttagaggggttacgcgcgttcctcgaagaactggagtttggctccctgctgcatgaattcggtttgttgggcggagagaaaccgcgtgaagaagcaccatggccgccgcccgaaggtgcctttgtcggctttcttctgtcacgcaaagagccaatgtgggcggaactgttagctcttgcagccgccgcggaagggcgtgttcaccgcgcgacctctcctgtcgaggccctcgctgacctcaaagaagcacgtggtttcttggcgaaagatttagccgtgcttgcattacgcgaaggcgttgcgctcgatccgacggacgacccgcttttggtggcttatttgctcgatcctgcgaataccaacccggaacgtgtcgcccgtcgttacggcggcgagtttactgaagatgcggcagaacgcgcgttgcttagcgaacgcctcttccagacgttatttccacgtctttcggagaaattactctggctctatcaggaagtcgaacgtccattgagtcgcgtgcttgcccatatggaggctcgcggtgtgcgcttagatgttccgttgttagaagcactcagcttcgagttggagaaagaactggaacgtcttgaaggcgaagtctttcgtttagcggggcatcccttcaatctcaactctcgcgaccaattggagaaagtgctctttgatgaattaggtttaacccctgtcacgcgtacagagaagaccggcaaacgttccacttcggcagccgccttggaagcacttcgtggtgctcacccgatcgtcgagttgattttgcagtatcgcgagctcagcaaactcaaatcaacctatcttgataggttacctcgtcttgttcatccacgtacgggtcgtttacacacccgcttcaatcaaacggcgacagccaccgggcgcttgtcgtcgagtgacccgaacctccagaatattccagtgcgcacgccgctgggccaacacattcgtaaagcgtttgttgcggaagaaggttggttattacttgcggccgattactcccagatcgaacttcgtgtattggcgcatctctctggcgacgagaatcttaaacgcgtgtttcgcgaaggcaaggatattcacactgaaaccgcagcctggatgttcggggtggacccagccttagtggaccccaagatgcgtcgtgccgccaagaccgtcaactttggcgtactctatggtatgtcagcacatcgtcttagtcaggaattgggcattgactacaaagaagctgaagcgtttatcgagcgctatttccaatcctttccgaaagttcgcgcgtggattgaacgtaccctcgaagaaggtcgcactcgcggctatgtggaaacgttattcgggcgtcgtcgctacgttccagatcttgcatctcgtgtccgctcagtgcgcgaagctgctgagcgtatggcctggaatatgcctgttcagggaacagcggcggacctcatgaagatcgccatggtgaaattgtttccgcgcttgaaacccttaggagcccaccttcttttacaggtgcatgatgaattggtcttggaagtacccgaggatcgcgcatgggaagccaaagcactcgtgaaagaggttatggaaaacgcgtatccgttagatgttccgttggaggtcgaagtgggtgtaggccgtgattggcttgaagcgaaacaagactaatga

SEQ ID NO: 626 - protein, 844 aa, synthetic construct
  REGION 1..844: note = DNA Polymerase Variant
MHHHHHHGGSGMLPLFDLEEPPKRVLLVDGHHLAYRTFYALSLTTSRGEPVQMVYGFARSLLKALKEDGQAVVVVFDAKAPSFRHEAYEAYKAGRAPTPEDFPRQLALVKRLVDLLGLVRLEAPGYEADDVLGTLAKKAEREGMEVCILTGDRDFFQLLSEKVSVLLPDGTLVTPKDVQEKYGVPPERWVDFRALTGDRSDNIPGVAGIGEKTALRLLAEWGSVENLLKNLDRVKPDSLRRKIEAHLEDLRLSLDLARIRTDLPLEVDFKALRRRTPDLEGLRAFLEELEFGSLLHEFGLLGGEKPREEAPWPPPEGAFVGFLLSRKEPMWAELLALAAAAEGRVHRATSPVEALADLKEARGFLAKDLAVLALREGVALDPTDDPLLVAYLLDPANTNPERVARRYGGEFTEDAAERALLSERLFQTLFPRLSEKLLWLYQEVERPLSRVLAHMEARGVRLDVPLLEALSFELEKELERLEGEVFRLAGHPFNLNSRDQLEKVLFDELGLTPVTRTEKTGKRSTSAAALEALRGAHPIVELILQYRELSKLKSTYLDRLPRLVHPRTGRLHTRFNQTATATGRLSSSDPNLQNIPVRTPLGQHIRKAFVAEEGWLLLAADYSQIELRVLAHLSGDENLKRVFREGKDIHTETAAWMFGVDPALVDPKMRRAAKTVNFGVLYGMSAHRLSQELGIDYKEAEAFIERYFQSFPKVRAWIERTLEEGRTRGYVETLFGRRRYVPDLASRVRSVREAAERMAWNMPVQGTAADLMKIAMVKLFPRLKPLGAHLLLQVHDELVLEVPEDRAWEAKALVKEVMENAYPLDVPLEVEVGVGRDWLEAKQD

SEQ ID NO: 627 - DNA, 2538 bp, synthetic construct
  misc_feature 1..2538: note = DNA Polymerase Variant
  source 1..2538: mol_type = other DNA
atgcaccatcatcatcatcatggcggtagcggcatgttaccgctgtttgatttggaagaaccaccaaaacgcgtgctgcttgttgacggccatcatctggcgtatcgtaccttctacgcactgagccttacgacctcacgtggtgagcctgtccagatggtgtatgggtttgctcgctccctgctgaaagccctgaaggaagatggtcaagccgtagtagtggttttcgatgcgaaagcaccgtcgtttcgtcacgaagcgtacgaggcctataaagctggccgcgcaccgaccccggaagactttccgcgtcagttagcgctcgtcaaacgcctcgtggatttgctgggattagttcgcttggaagctcctggctacgaggcggacgacgtgctcggtacactggccaagaaagcagaacgtgaaggcatggaggtctgcattcttaccggtgatcgcgatttcttccagctgctgtctgagaaagtgagcgttttgctgcccgatggcacgttagtaaccccgaaagatgtgcaagagaaatatggagttccgccagaacgttgggtggactttcgcgcactgactggtgatcgttcagacaacatcccgggcgttgccgggattggtgaaaagacggcgctgcgcctgctggcagaatggggctcggtggaaaatctgctcaagaaccttgatcgtgtgaaacctgatagcttacgccgcaagatcgaagcccacctggaagacttgcgtctgagtctggatcttgcccgtattcgcaccgatctgccgttggaagtagactttaaagctctgcgtcgtcgcacacccgatttagaggggttacgcgcgttcctcgaagaactggagctgggctccctgctgcatgaattcggtttgttgggcggagagaaaccgcgtgaagaagcaccatggccgccgcccggtggtgcctttgtcggctttcttctgtcacgcaaagagccaatgtgggcggaactgttagctcttgcagccgccgcggaagggcgtgttcaccgcgcgacctctcctgtcgaggccctcgctgacctcaaagaagcacgtggtttcttggcgaaagatttagccgtgcttgcattacgcgaaggcgttgcgctcgatccgacggacgacccgcttttggtggcttatttgctcgatcatgcgaataccaacccggaacgtgtcgcccgtcgttacggcggcgagtttactgaagatgcggcagaacgcgcgttgcttagcgaacgcctcttccagacgttatttccacgtctttcggagaaattactctggctctatcaggaagtcgaacgtccattgagtcgcgtgcttgcccatatggaggctcgcggtgtgcgcttagatgttccgttgttagaagcactcagcttcgagttggagaaagaactggaacgtcttgaaggcgaagtctttcgtttagcggggcatcccttcaatctcaactctcgcgaccaattggagaaagtgctctttgatgaattaggtttaacccctgtcacgcgtacagagaagaccggcaaacgttccacttcggcagccgccttggaagcacttcgtggtgctcacccgatcgtcgagttgattttgcagtatcgcgagctcagcaaactcaaatcaacctatcttgataggttacctcgtcttgttcatccacgtacgggtcgtttacacacccgcttcaatcaaacggcaacagccaccgggcgcttgtcgtcgagtgacccgaacctccagaatattccagtgcgcacgccgctgggccaacacattcgtaaagcgtttgttgcggaagaaggttggttattacttgcggccgattactcccagatcgaacttcgtgtattggcgcatctctctggcgacgagaatcttaaacgcgtgtttcgcgaaggcaaggatattcacactgaaaccgcagcctggatgttcggggtggacccagccttagtggaccccaagatgcgtcgtgccgccaagaccgtcaactttggcgtactctatggtatgtcagcagcacgtcttagtcaggaattgggcattgactacaaagaagctgaagcgtttatcgagcgctatttccaatcctttccgaaagttcgcgcgtggattgaacgtacgctcgaagaaggtcgcactcgcggctatgtggaaacgttattcgggcgtcgtcgctacgttccagatcttgcatctcgtgtccgctcagtgcgcgaagctgctgagcgtatggcctggaatatgcctgttcagggaacagcggcggacctcatgaagatcgccatggtgaaattgtttccgcgcttgaaacccttaggagcccaccttcttttacaggtgcatgatgaattggtcttggaagtacccgaggatcgcgcagaagaagccaaagcactcgtgaaagaggttatggaaaacgcgtatccgttagatgttccgttggaggtcgaagtgggtgtaggccgtgattggcttgaagcgaaacaagactaatga

SEQ ID NO: 628 - protein, 844 aa, synthetic construct
  REGION 1..844: note = DNA Polymerase Variant
MHHHHHHGGSGMLPLFDLEEPPKRVLLVDGHHLAYRTFYALSLTTSRGEPVQMVYGFARSLLKALKEDGQAVVVVFDAKAPSFRHEAYEAYKAGRAPTPEDFPRQLALVKRLVDLLGLVRLEAPGYEADDVLGTLAKKAEREGMEVCILTGDRDFFQLLSEKVSVLLPDGTLVTPKDVQEKYGVPPERWVDFRALTGDRSDNIPGVAGIGEKTALRLLAEWGSVENLLKNLDRVKPDSLRRKIEAHLEDLRLSLDLARIRTDLPLEVDFKALRRRTPDLEGLRAFLEELELGSLLHEFGLLGGEKPREEAPWPPPGGAFVGFLLSRKEPMWAELLALAAAAEGRVHRATSPVEALADLKEARGFLAKDLAVLALREGVALDPTDDPLLVAYLLDHANTNPERVARRYGGEFTEDAAERALLSERLFQTLFPRLSEKLLWLYQEVERPLSRVLAHMEARGVRLDVPLLEALSFELEKELERLEGEVFRLAGHPFNLNSRDQLEKVLFDELGLTPVTRTEKTGKRSTSAAALEALRGAHPIVELILQYRELSKLKSTYLDRLPRLVHPRTGRLHTRFNQTATATGRLSSSDPNLQNIPVRTPLGQHIRKAFVAEEGWLLLAADYSQIELRVLAHLSGDENLKRVFREGKDIHTETAAWMFGVDPALVDPKMRRAAKTVNFGVLYGMSAARLSQELGIDYKEAEAFIERYFQSFPKVRAWIERTLEEGRTRGYVETLFGRRRYVPDLASRVRSVREAAERMAWNMPVQGTAADLMKIAMVKLFPRLKPLGAHLLLQVHDELVLEVPEDRAEEAKALVKEVMENAYPLDVPLEVEVGVGRDWLEAKQD

SEQ ID NO: 629 - DNA, 2538 bp, synthetic construct
  misc_feature 1..2538: note = DNA Polymerase Variant
  source 1..2538: mol_type = other DNA
atgcaccatcatcatcatcatggcggtagcggcatgttaccgctgtttgatttggaagaaccaccaaaacgcgtgctgcttgttgacggccatcatctggcgtatcgtaccttctacgcactgagccttacgacctcacgtggtgagcctgtccagatggtgtatgggtttgctcgctccctgctgaaagccctgaaggaagatggtcaagccgtagtagtggttttcgatgcgaaagcaccgtcgtttcgtcacgaagcgtacgaggcctataaagctggccgcgcaccgaccccggaagactttccgcgtcagttagcgctcgtcaaacgcctcgtggatttgctgggattagttcgcttggaagctcctggctacgaggcggacgacgtgctcggtacactggccaagaaagcagaacgtgaaggcatggaggtctgcattcttaccggtgatcgcgatttcttccagctgctgtctgagaaagtgagcgttttgctgcccgatggcacgttagtaaccccgaaagatgtccaagagaaatatggagttccgccagaacgttgggtggactttcgcgcactgactggtgatcgttcagacaacatcccgggcgttgccgggattggtgaaaagacggcgctgcgcctgctggcagaatggggctcggtggaaaatctgctcaagaaccttgatcgtgtgaaacctgatagcttacgccgcaagatcgaagcccacctggaagacttgcgtctgagtctggatcttgcgcgtattcgcaccgatctgccgttggaagtagactttaaagctctgcgtcgtcgcacacccgatttagaggggttacgcgcgttcctcgaagaactggagtttggctccctgctgcatgaattcggtttgttgggcggagagaaaccgcgtgaagaagcaccatggccgccgcccgaaggtgcctttgtcggctttcttctgtcacgcaaagagccaatgtgggcggaactgttagctcttgcagccgccgcggaagggcgtgttcaccgcgcgacctctcctgtcgaggccctcgctgacctcaaagaagcacgtggtttcttggcgaaagatttagccgtgcttgcattacgcgaaggcgttgcgctcgatccgacggacgacccgcttttggtggcttatttgctcgatcctgcgaataccaacccggaacgtgtcgcccgtcgttacggcggcgagtttactgaagatgcggcagaacgcgcgttgcttagcgaacgcctcttccagacgttatttccacgtctttcggagaaattactctggctctatcaggaagtcgaacgtccattgagtcgcgtgcttgcccatatggaggctcgcggtgtgcgcttagatgttccgttgttagaagcactcagcttcgagttggagaaagaactggaacgtcttgaaggcgaagtctttcgtttagcggggcatcccttcaatctcaactctcgcgaccaattggagaaagtgctctttgatgaattaggtttaacccctgtcacgcgtacagagaagaccggcaaacgttccacttcggcagccgccttggaagcacttcgtggtgctcacccgatcgtcgagttgattttgcagtatcgcgagctcagcaaactcaaatcaacctatcttgataggttacctcgtcttgttcatccacgtacgggtcgtttacacacccgcttcaatcaaacggcgacagccaccgggcgcttgtcgtcgagtgacccgaacctccagaatattccagtgcgcacgccgctgggccaacacattcgtaaagcgtttgttgcggaacatggttggttattacttgcggccgattactcccagatcgaacttcgtgtattggcgcatctctctggcgacgagaatcttaaacgcgtgtttcgcgaaggcaaggatattcacactgaaaccgcagcctggatgttcggggtggacccagccttagtggaccccaagatgcgtcgtgccgccaagaccgtcaactttggcgtactctatggtatgtcagcacatcgtcttagtcaggaattgggcattgactacaaagaagctgaagcgtttatcgagcgctatttccaatcctttccgaaagttcgcgcgtggattgaacgtaccctcgaagaaggtcgcactcgcggctatgtggaaacgttattcgggcgtcgtcgctacgttccagatcttgcatctcgtgtccgctcagtgcgcgaagctgctgagcgtatggcctggaatatgcctgttcagggaacagcggcggacctcatgaagatcgccatggtgaaattgtttccgcgcttgaaacccttaggagcccaccttcttttacaggtgcatgatgaattggtcttggaagtacccgaggatcgcgcagaagaagccaaagcactcgtgaaagaggttatggaaaacgcgtatccgttagatgttccgttggaggtcgaagtgggtgtaggccgtgattggcttgaagcgaaacaagactaatga

SEQ ID NO: 630 - protein, 844 aa, synthetic construct
  REGION 1..844: note = DNA Polymerase Variant
MHHHHHHGGSGMLPLFDLEEPPKRVLLVDGHHLAYRTFYALSLTTSRGEPVQMVYGFARSLLKALKEDGQAVVVVFDAKAPSFRHEAYEAYKAGRAPTPEDFPRQLALVKRLVDLLGLVRLEAPGYEADDVLGTLAKKAEREGMEVCILTGDRDFFQLLSEKVSVLLPDGTLVTPKDVQEKYGVPPERWVDFRALTGDRSDNIPGVAGIGEKTALRLLAEWGSVENLLKNLDRVKPDSLRRKIEAHLEDLRLSLDLARIRTDLPLEVDFKALRRRTPDLEGLRAFLEELEFGSLLHEFGLLGGEKPREEAPWPPPEGAFVGFLLSRKEPMWAELLALAAAAEGRVHRATSPVEALADLKEARGFLAKDLAVLALREGVALDPTDDPLLVAYLLDPANTNPERVARRYGGEFTEDAAERALLSERLFQTLFPRLSEKLLWLYQEVERPLSRVLAHMEARGVRLDVPLLEALSFELEKELERLEGEVFRLAGHPFNLNSRDQLEKVLFDELGLTPVTRTEKTGKRSTSAAALEALRGAHPIVELILQYRELSKLKSTYLDRLPRLVHPRTGRLHTRFNQTATATGRLSSSDPNLQNIPVRTPLGQHIRKAFVAEHGWLLLAADYSQIELRVLAHLSGDENLKRVFREGKDIHTETAAWMFGVDPALVDPKMRRAAKTVNFGVLYGMSAHRLSQELGIDYKEAEAFIERYFQSFPKVRAWIERTLEEGRTRGYVETLFGRRRYVPDLASRVRSVREAAERMAWNMPVQGTAADLMKIAMVKLFPRLKPLGAHLLLQVHDELVLEVPEDRAEEAKALVKEVMENAYPLDVPLEVEVGVGRDWLEAKQD

SEQ ID NO: 631 - DNA, 2538 bp, synthetic construct
  misc_feature 1..2538: note = DNA Polymerase Variant
  source 1..2538: mol_type = other DNA
atgcaccatcatcatcatcatggcggtagcggcatgttaccgctgtttgatttggaagaaccaccaaaacgcgtgctgcttgttgacggccatcatctggcgtatcgtaccttctacgcactgagccttacgacctcacgtggtgagcctgtccagatggtgtatgggtttgctcgctccctgctgaaagccctgaaggaagatggtcaagccgtagtagtggttttcgatgcgaaagcaccgtcgtttcgtcacgaagcgtacgaggcctataaagctggccgcgcaccgaccccggaagactttccgcgtcagttagcgctcgtcaaacgcctcgtggatttgctgggattagttcgcttggaagctcctggctacgaggcggacgacgtgctcggtacactggccaagaaagcagaacgtgaaggcatggaggtctgcattcttaccggtgatcgcgatttcttccagctgctgtctgagaaagtgagcgttttgctgcccgatggcacgttagtaaccccgaaagatgtgcaagagaaatatggagttccgccagaacgttgggtggactttcgcgcactgactggtgatcgttcagacaacatcccgggcgttgccgggattggtgaaaagacggcgctgcgcctgctggcagaatggggctcggtggaaaatctgctcaagaaccttgatcgtgtgaaacctgatagcttacgccgcaagatcgaagcccacctggaagacttgcgtctgagtctggatcttgtccgtattcgcaccgatctgccgttggaagtagactttaaagctctgcgtcgtcgcacacccgatttagaggggttacgcgcgttcctcgaagaactggagctgggctccctgctgcatgaattcggtttgttgggcggagagaaaccgcgtgaagaagcaccatggccgccgcccgggggtgcctttgtcggctttcttctgtcacgcaaagagccaatgtgggcggaactgttagctcttgcagccgccgcggaagggcgtgttcaccgcgcgacctctcctgtcgaggccctcgctgacctcaaagaagcacgtggtttcttggcgaaagatttagccgtgcttgcattacgcgaaggcgttgcgctcgatccgacggacgacccgcttttggtggcttatttgctcgatcctgcgaataccaacccggaacgtgtcgcccgtcgttacggcggcgagtttactgaagatgcggcagaacgcgcgttgcttagcgaacgcctcttccagacgttatttccacgtctttcggagaaattactctggctctatcaggaagtcgaacgtccattgagtcgcgtgcttgcccatatggaggctcgcggtgtgcgcttagatgttccgttgttagaagcactcagcttcgagttggagaaagaactggaacgtcttgagggcgaagtctttcgtttagcggggcatcccttcaatctcaactctcgcgaccaattggagaaagtgctctttgatgaattaggtttaacccctgtcacgcgtacagagaagaccggcaaacgttccacttcggcagccgccttggaagcacttcgtggtgctcacccgatcgtcgagttgattttgcagtatcgcgagctcagcaaactcaaatcaacctatcttgataggttacctcgtcttgttcatccacgtacgggtcgtttacacacccgcttcaatcaaacggcgacagccaccgggcgcttgtcgtcgagtgacccgaacctccagaatattccagtgcgcacgccgctgggccaacacattcgtaaagcgtttgttgcggaagaaggttggttattacttgcggccgattactcccagatcgaacttcgtgtattggcgcatctctctggcgacgagaatcttaaacgcgtgtttcgcgaaggcaaggatattcacactgaaaccgcagcctggatgttcggggtggacccagccttagtggaccccaagatgcgtcgtgccgccaagaccgtcaactttggcgtactctatggtatgtcagcacatcgtcttagtcaggaattgggcattgactacaaagaagctgaagcgtttatcgagcgctatttccaatcctttccgaaagttcgcgcgtggattgaacgtacgctcgaagaaggtcgcactcgcggctatgtggaaacgttattcgggcgtcgtcgctacgttccagatcttgcgtctcgtgtccgctcagtgcgcgaagctgctgagcgtatggcctggaatatgcctgttcagggaacagcggcggacctcatgaagatcgccatggtgaaattgtttccgcgcttgaaacccttaggagcccaccttcttttacaggtgcatgatgaattggtcttggaagtacccgaggatcgcgcagaagaagccaaagcactcgtgaaagaggttatggaaaacgcgtatccgttagatgttccgttggaggtcgaagtgggtgtaggccgtgattggcttgaagcgaaacaagactaatga

SEQ ID NO: 632 - protein, 844 aa, synthetic construct
  REGION 1..844: note = DNA Polymerase Variant
MHHHHHHGGSGMLPLFDLEEPPKRVLLVDGHHLAYRTFYALSLTTSRGEPVQMVYGFARSLLKALKEDGQAVVVVFDAKAPSFRHEAYEAYKAGRAPTPEDFPRQLALVKRLVDLLGLVRLEAPGYEADDVLGTLAKKAEREGMEVCILTGDRDFFQLLSEKVSVLLPDGTLVTPKDVQEKYGVPPERWVDFRALTGDRSDNIPGVAGIGEKTALRLLAEWGSVENLLKNLDRVKPDSLRRKIEAHLEDLRLSLDLVRIRTDLPLEVDFKALRRRTPDLEGLRAFLEELELGSLLHEFGLLGGEKPREEAPWPPPGGAFVGFLLSRKEPMWAELLALAAAAEGRVHRATSPVEALADLKEARGFLAKDLAVLALREGVALDPTDDPLLVAYLLDPANTNPERVARRYGGEFTEDAAERALLSERLFQTLFPRLSEKLLWLYQEVERPLSRVLAHMEARGVRLDVPLLEALSFELEKELERLEGEVFRLAGHPFNLNSRDQLEKVLFDELGLTPVTRTEKTGKRSTSAAALEALRGAHPIVELILQYRELSKLKSTYLDRLPRLVHPRTGRLHTRFNQTATATGRLSSSDPNLQNIPVRTPLGQHIRKAFVAEEGWLLLAADYSQIELRVLAHLSGDENLKRVFREGKDIHTETAAWMFGVDPALVDPKMRRAAKTVNFGVLYGMSAHRLSQELGIDYKEAEAFIERYFQSFPKVRAWIERTLEEGRTRGYVETLFGRRRYVPDLASRVRSVREAAERMAWNMPVQGTAADLMKIAMVKLFPRLKPLGAHLLLQVHDELVLEVPEDRAEEAKALVKEVMENAYPLDVPLEVEVGVGRDWLEAKQD

SEQ ID NO: 633 - DNA, 2538 bp, synthetic construct
  misc_feature 1..2538: note = DNA Polymerase Variant
  source 1..2538: mol_type = other DNA
atgcaccatcatcatcatcatggcggtagcggcatgttaccgctgtttgatttggaagaaccaccaaaacgcgtgctgcttgttgacggccatcatctggcgtatcgtaccttctacgcactgagccttacgacctcacgtggtgagcctgtccagatggtgtatgggtttgctcgctccctgctgaaagccctgaaggaagatggtcaagccgtagtagtggttttcgatgcgaaagcaccgtcgtttcgtcacgaagcgtacgaggcctataaagctggccgcgcaccgaccccggaagactttccgcgtcagttagcgctcgtcaaacgcctcgtggatttgctgggattagttcgcttggaagctcctggctacgaggcggacgacgtgctcggtacactggccaagaaagcagaacgtgaaggcatggaggtctgcattcttaccggtgatcgcgatttcttccagctgctgtctgagaaagtgagcgttttgctgcccgatggcacgttagtaaccccgaaagatgtccaagagaaatatggagttccgccagaacgttgggtggactttcgcgcactgactggtgatcgttcagacaacatcccgggcgttgccgggattggtgaaaagacggcgctgcgcctgctggcagaatggggctcggtggaaaatctgctcaagaaccttgatcgtgtgaaacctgatagcttacgccgcaagatcgaagcccacctggaagacttgcgtctgagtctggatcttgtccgtattcgcaccgatctgccgttggaagtagactttaaagctctgcgtcgtcgcacacccgatttagaggggttacgcgcgttcctcgaagaactggagctgggctccctgctgcatgaattcggtttgttgggcggagagaaaccgcgtgaagaagcaccatggccgccgcccgagggtgcctttgtcggctttcttctgtcacgcaaagagccaatgtgggcggaactgttagctcttgcagccgccgcggaagggcgtgttcaccgcgcgacctctcctgtcgaggccctcgctgacctcaaagaagcacgtggtttcttggcgaaagatttagccgtgcttgcattacgcgaaggcgttgcgctcgatccgacggacgacccgcttttggtggcttatttgctcgatcctgcgaataccaacccggaacgtgtcgcccgtcgttacggcggcgagtttactgaagatgcggcagaacgcgcgttgcttagcgaacgcctcttccagacgttatttccacgtctttcggagaaattactctggctctatcaggaagtcgaacgtccattgagtcgcgtgcttgcccatatggaggctcgcggtgtgcgcttagatgttccgttgttagaagcactcagcttcgagttggagaaagaactggaacgtcttgaaggcgaagtctttcgtttagcggggcatcccttcaatctcaactctcgcgaccaattggagaaagtgctctttgatgaattaggtttaacccctgtcacgcgtacagagaagaccggcaaacgttccacttcggcagccgccttggaagcacttcgtggtgctcacccgatcgtcgagttgattttgcagtatcgcgagctcagcaaactcaaatcaacctatcttgataggttacctcgtcttgttcatccacgtacgggtcgtttacacacccgcttcaatcaaacgctgacagccaccgggcgcttgtcgtcgagtgacccgaacctccagaatattccagtgcgcacgccgctgggccaacacattcgtaaagcgtttgttgcggaagaaggttggttattacttgcggccgattactcccagatcgaacttcgtgtattggcgcatctctctggcgacgagaatcttaaacgcgtgtttcgcgaaggcaaggatattcacactgaaaccgcagcctggatgttcggggtggacccagccttagtggaccccaagatgcgtcgtgccgccaagaccgtcaactttggcgtactctatggtatgtcagcacatcgtcttagtcaggaattgggcattgactacaaagaagctgaagcgtttatcgagcgctatttccaatcctttccgaaagttcgcgcgtggattgaacgtacgctcgaagaaggtcgcactcgcggctatgtggaaacgttattcgggcgtcgtcgctacgttccagatcttgcatctcgtgtccgctcagtgcgcgaagctgctgagcgtatggcctggaatatgcctgttcagggaacagcggcggacctcatgaagatcgccatggtgaaattgtttccgcgcttgaaacccttaggagcccaccttcttttacaggtgcatgatgaattggtcttggaagtacccgaggatcgcgcagaagaagccaaagcactcgtgaaagaggttatggaaaacgcgtatccgttagatgttccgttggaggtcgaagtgggtgtaggccgtgattggcttgaagcgaaacaagactaatga

SEQ ID NO: 634 - protein, 844 aa, synthetic construct
  REGION 1..844: note = DNA Polymerase Variant
MHHHHHHGGSGMLPLFDLEEPPKRVLLVDGHHLAYRTFYALSLTTSRGEPVQMVYGFARSLLKALKEDGQAVVVVFDAKAPSFRHEAYEAYKAGRAPTPEDFPRQLALVKRLVDLLGLVRLEAPGYEADDVLGTLAKKAEREGMEVCILTGDRDFFQLLSEKVSVLLPDGTLVTPKDVQEKYGVPPERWVDFRALTGDRSDNIPGVAGIGEKTALRLLAEWGSVENLLKNLDRVKPDSLRRKIEAHLEDLRLSLDLVRIRTDLPLEVDFKALRRRTPDLEGLRAFLEELELGSLLHEFGLLGGEKPREEAPWPPPEGAFVGFLLSRKEPMWAELLALAAAAEGRVHRATSPVEALADLKEARGFLAKDLAVLALREGVALDPTDDPLLVAYLLDPANTNPERVARRYGGEFTEDAAERALLSERLFQTLFPRLSEKLLWLYQEVERPLSRVLAHMEARGVRLDVPLLEALSFELEKELERLEGEVFRLAGHPFNLNSRDQLEKVLFDELGLTPVTRTEKTGKRSTSAAALEALRGAHPIVELILQYRELSKLKSTYLDRLPRLVHPRTGRLHTRFNQTLTATGRLSSSDPNLQNIPVRTPLGQHIRKAFVAEEGWLLLAADYSQIELRVLAHLSGDENLKRVFREGKDIHTETAAWMFGVDPALVDPKMRRAAKTVNFGVLYGMSAHRLSQELGIDYKEAEAFIERYFQSFPKVRAWIERTLEEGRTRGYVETLFGRRRYVPDLASRVRSVREAAERMAWNMPVQGTAADLMKIAMVKLFPRLKPLGAHLLLQVHDELVLEVPEDRAEEAKALVKEVMENAYPLDVPLEVEVGVGRDWLEAKQD

SEQ ID NO: 635 - DNA, 2538 bp, synthetic construct
  misc_feature 1..2538: note = DNA Polymerase Variant
  source 1..2538: mol_type = other DNA
atgcaccatcatcatcatcatggcggtagcggcatgttaccgctgtttgatttggaagaaccaccaaaacgcgtgctgcttgttgacggccatcatctggcgtatcgtaccttctacgcactgagccttacgacctcacgtggtgagcctgtccagatggtgtatgggtttgctcgctccctgctgaaagccctgaaggaagatggtcaagccgtagtagtggttttcgatgcgaaagcaccgtcgtttcgtcacgaagcgtacgaggcctataaagctggccgcgcaccgaccccggaagactttccgcgtcagttagcgctcgtcaaacgcctcgtggatttgctgggattagttcgcttggaagctcctggctacgaggcggacgacgtgctcggtacactggccaagaaagcagaacgtgaaggcatggaggtctgcattcttaccggtgatcgcgatttcttccagctgctgtctgagaaagtgagcgttttgctgcccgatggcacgttagtaaccccgaaagatgtgcaagagaaatatggagttccgccagaacgttgggtggactttcgcgcactgactggtgatcgttcagacaacatcccgggcgttgccgggattggtgaaaagacggcgctgcgcctgctggcagaatggggctcggtggaaaatctgctcaagaaccttgatcgtgtgaaacctgatagcttacgccgcaagatcgaagcccacctggaagacttgcgtctgagtctggatcttgtccgtattcgcaccgatctgccgttggaagtagactttaaagctctgcgtcgtcgcacacccgatttagaggggttacgcgcgttcctcgaagaactggagtttggctccctgctgcatgaattcggtttgttgggcggagagaaaccgcgtgaagaagcaccatggccgccgcccgggggtgcctttgtcggctttcttctgtcacgcaaagagccaatgtgggcggaactgttagctcttgcagccgccgcggaagggcgtgttcaccgcgcgacctctcctgtcgaggccctcgctgacctcaaagaagcacgtggtttcttggcgaaagatttagccgtgcttgcattacgcgaaggcgttgcgctcgatccgacggacgacccgcttttggtggcttatttgctcgatcctgcgaataccaacccggaacgtgtcgcccgtcgttacggcggcgagtttactgaagatgcggcagaacgcgcgttgcttagcgaacgcctcttccagacgttatttccacgtctttcggagaaattactctggctctatcaggaagtcgaacgtccattgagtcgcgtgcttgcccatatggaggctcgcggtgtgcgcttagatgttccgttgttagaagcactcagcttcgagttggagaaagaactggaacgtcttgaaggcgaagtctttcgtttagcggggcatcccttcaatctcaactctcgcgaccaattggagaaagtgctctttgatgaattaggtttaacccctgtcacgcgtacagagaagaccggcaaacgttccacttcggcagccgccttggaagcacttcgtggtgctcacccgatcgtcaacttgattttgcagtatcgcgagctcagcaaactcaaatcaacctatcttgataggttacctcgtcttgttcatccacgtacgggtcgtttacacacccgcttcaatcaaacggcaacagccaccgggcgcttgtcgtcgagtgacccgaacctccagaatattccagtgcgcacgccgctgggccaacacattcgtaaagcgtttgttgcggaagaaggttggttattacttgcggccgattactcccagatcgaacttcgtgtattggcgcatctctctggcgacgagaatcttaaacgcgtgtttcgcgaaggcaaggatattcacactgaaaccgcagcctggatgttcggggtggacccagccttagtggaccccaagatgcgtcgtgccgccaagaccgtcaactttggcgtactctatggtatgtcagcacatcgtcttagtcaggaattgggcattgactacaaagaagctgaagcgtttatcgagcgctatttccaatcctttccgaaagttcgcgcgtggattgaacgtaccctcgaagaaggtcgcactcgcggctatgtggaaacgttattcgggcgtcgtcgctacgttccagatcttacgtctcgtgtccgctcagtgcgcgaagctgctgagcgtatggcctggaatatgcctgttcagggaacagcggcggacctcatgaagatcgccatggtgaaattgtttccgcgcttgaaacccttaggagcccaccttcttttacaggtgcatgatgaattggtcttggaagtacccgaggatcgcgcagaagaagccaaagcactcgtgaaagaggttatggaaaacgcgtatccgttagatgttccgttggaggtcgaagtgggtgtaggccgtgattggcttgaagcgaaacaagactaatga

SEQ ID NO: 636 - protein, 844 aa, synthetic construct
  REGION 1..844: note = DNA Polymerase Variant
MHHHHHHGGSGMLPLFDLEEPPKRVLLVDGHHLAYRTFYALSLTTSRGEPVQMVYGFARSLLKALKEDGQAVVVVFDAKAPSFRHEAYEAYKAGRAPTPEDFPRQLALVKRLVDLLGLVRLEAPGYEADDVLGTLAKKAEREGMEVCILTGDRDFFQLLSEKVSVLLPDGTLVTPKDVQEKYGVPPERWVDFRALTGDRSDNIPGVAGIGEKTALRLLAEWGSVENLLKNLDRVKPDSLRRKIEAHLEDLRLSLDLVRIRTDLPLEVDFKALRRRTPDLEGLRAFLEELEFGSLLHEFGLLGGEKPREEAPWPPPGGAFVGFLLSRKEPMWAELLALAAAAEGRVHRATSPVEALADLKEARGFLAKDLAVLALREGVALDPTDDPLLVAYLLDPANTNPERVARRYGGEFTEDAAERALLSERLFQTLFPRLSEKLLWLYQEVERPLSRVLAHMEARGVRLDVPLLEALSFELEKELERLEGEVFRLAGHPFNLNSRDQLEKVLFDELGLTPVTRTEKTGKRSTSAAALEALRGAHPIVNLILQYRELSKLKSTYLDRLPRLVHPRTGRLHTRFNQTATATGRLSSSDPNLQNIPVRTPLGQHIRKAFVAEEGWLLLAADYSQIELRVLAHLSGDENLKRVFREGKDIHTETAAWMFGVDPALVDPKMRRAAKTVNFGVLYGMSAHRLSQELGIDYKEAEAFIERYFQSFPKVRAWIERTLEEGRTRGYVETLFGRRRYVPDLTSRVRSVREAAERMAWNMPVQGTAADLMKIAMVKLFPRLKPLGAHLLLQVHDELVLEVPEDRAEEAKALVKEVMENAYPLDVPLEVEVGVGRDWLEAKQD

SEQ ID NO: 637 - DNA, 2538 bp, synthetic construct
  misc_feature 1..2538: note = DNA Polymerase Variant
  source 1..2538: mol_type = other DNA
atgcaccatcatcatcatcatggcggtagcggcatgttaccgctgtttgatttggaagaaccaccaaaacgcgtgctgcttgttgacggccatcatctggcgtatcgtaccttctacgcactgagccttacgacctcacgtggtgagcctgtccagatggtgtatgggtttgctcgctccctgctgaaagccctgaaggaagatggtcaagccgtagtagtggttttcgatgcgaaagcaccgtcgtttcgtcacgaagcgtacgaggcctataaagctggccgcgcaccgaccccggaagactttccgcgtcagttagcgctcgtcaaacgcctcgtggatttgctgggattagttcgcttggaagctcctggctacgaggcggacgacgtgctcggtacactggccaagaaagcagaacgtgaaggcatggaggtctgcattcttaccggtgatcgcgatttcttccagctgctgtctgagaaagtgagcgttttgctgcccgatggcacgttagtaaccccgaaagatgtgcaagagaaatatggagttccgccagaacgttgggtggactttcgcgcactgactggtgatcgttcagacaacatcccgggcgttgccgggattggtgaaaagacggcgctgcgcctgctggcagaatggggctcggtggaaaatctgctcaagaaccttgatcgtgtgaaacctgatagcttacgccgcaagatcgaagcccacctggaagacttgcgtctgagtctggatcttgcccgtattcgcaccgatctgccgttggaagtagactttaaagctctgcgtcgtcgcacacccgatttagaggggttacgcgcgttcctcgaagaactggagtttggctccctgctgcatgaattcggtttgttgggcggagagaaaccgcgtgaagaagcaccatggccgccgcccgagggtgcctttgtcggctttcttctgtcacgcaaagagccaatgtgggcggaactgttagctcttgcagccgccgcggaagggcgtgttcaccgcgcgacctctcatgtcgaggccctcgctgacctcaaagaagcacgtggtttcttggcgaaagatttagccgtgcttgcattacgcgaaggcgttgcgctcgatccgacggacgacccgcttttggtggcttatttgctcgatcctgcgaataccaacccggaacgtgtcgcccgtcgttacggcggcgagtttactgaagatgcggcagaacgcgcgttgcttagcgaacgcctcttccagacgttatttccacgtctttcggagaaattactctggctctatcaggaagtcgaacgtccattgagtcgcgtgcttgcccatatggaggctcgcggtgtgcgcttagatgttccgttgttagaagcactcagcttcgagttggagaaagaactggaacgtcttgaaggcgaagtctttcgtttagcggggcatcccttcaatctcaactctcgcgaccaattggagaaagtgctctttgatgaattaggtttaacccctgtcacgcgtacagagaagaccggcaaacgttccacttcggcagccgccttggaagcacttcgtggtgctcacccgatcgtcgagttgattttgcagtatcgcgagctcagcaaactcaaatcaacctatcttgataggttacctcgtcttgttcatccacgtacgggtcgtttacacacccgcttcaatcaaacggcaacagccaccgggcgcttgtcgtcgagtgacccgaacctccagaatattccagtgcgcacgccgctgggccaacacattcgtaaagcgtttgttgcggaagaaggttggttattacttgcggccgattactcccagatcgaacttcgtgtattggcgcatctctctggcgacgagaatcttaaacgcgtgtttcgcgaaggcaaggatattcacactgaaaccgcagcctggatgttcggggtggacccagccttagtggaccccaagatgcgtcgtgccgccaagaccgtcaactttggcgtactctatggtatgtcagcacaccgtcttagtcaggaattgggcattgactacaaagaagctgaagcgtttatcgagcgctatttccaatcctttccgaaagttcgcgcgtggattgaacgtaccctcgaagaaggtcgcactcgcggctatgtggaaacgttattcgggcgtcgtcgctacgttccagatcttgcatctcgtgtccgctcagtgcgcgaagctgctgagcgtatggcctggaatatgcctgttcagggaacagcggcggacctcatgaagatcgccatggtgaaattgtttccgcgcttgaaacccttaggagcccaccttcttttacaggtgcatgatgaattggtcttggaagtacccgaggatcgcgcagaagaagccaaagcactcgtgaaagaggttatggaaaacgcgtatccgttagatgttccgttggaggtcgaagtgggtgtaggccgtgattggcttgaagcgaaacaagactaatga

SEQ ID NO: 638 - protein, 844 aa, synthetic construct
  REGION 1..844: note = DNA Polymerase Variant
MHHHHHHGGSGMLPLFDLEEPPKRVLLVDGHHLAYRTFYALSLTTSRGEPVQMVYGFARSLLKALKEDGQAVVVVFDAKAPSFRHEAYEAYKAGRAPTPEDFPRQLALVKRLVDLLGLVRLEAPGYEADDVLGTLAKKAEREGMEVCILTGDRDFFQLLSEKVSVLLPDGTLVTPKDVQEKYGVPPERWVDFRALTGDRSDNIPGVAGIGEKTALRLLAEWGSVENLLKNLDRVKPDSLRRKIEAHLEDLRLSLDLARIRTDLPLEVDFKALRRRTPDLEGLRAFLEELEFGSLLHEFGLLGGEKPREEAPWPPPEGAFVGFLLSRKEPMWAELLALAAAAEGRVHRATSHVEALADLKEARGFLAKDLAVLALREGVALDPTDDPLLVAYLLDPANTNPERVARRYGGEFTEDAAERALLSERLFQTLFPRLSEKLLWLYQEVERPLSRVLAHMEARGVRLDVPLLEALSFELEKELERLEGEVFRLAGHPFNLNSRDQLEKVLFDELGLTPVTRTEKTGKRSTSAAALEALRGAHPIVELILQYRELSKLKSTYLDRLPRLVHPRTGRLHTRFNQTATATGRLSSSDPNLQNIPVRTPLGQHIRKAFVAEEGWLLLAADYSQIELRVLAHLSGDENLKRVFREGKDIHTETAAWMFGVDPALVDPKMRRAAKTVNFGVLYGMSAHRLSQELGIDYKEAEAFIERYFQSFPKVRAWIERTLEEGRTRGYVETLFGRRRYVPDLASRVRSVREAAERMAWNMPVQGTAADLMKIAMVKLFPRLKPLGAHLLLQVHDELVLEVPEDRAEEAKALVKEVMENAYPLDVPLEVEVGVGRDWLEAKQD

SEQ ID NO: 639 - DNA, 2538 bp, synthetic construct
  misc_feature 1..2538: note = DNA Polymerase Variant
  source 1..2538: mol_type = other DNA
atgcaccatcatcatcatcatggcggtagcggcatgttaccgctgtttgatttggaagaaccaccaaaacgcgtgctgcttgttgacggccatcatctggcgtatcgtaccttctacgcactgagccttacgacctcacgtggtgagcctgtccagatggtgtatgggtttgctcgctccctgctgaaagccctgaaggaagatggtcaagccgtagtagtggttttcgatgcgaaagcaccgtcgtttcgtcacgaagcgtacgaggcctataaagctggccgcgcaccgaccccggaagactttccgcgtcagttagcgctcgtcaaacgcctcgtggatttgctgggattagttcgcttggaagctcctggctacgaggcggacgacgtgctcggtacactggccaagaaagcagaacgtgaaggcatggaggtctgcattcttaccggtgatcgcgatttcttccagctgctgtctgagaaagtgagcgttttgctgcccgatggcacgttagtaaccccgaaagatgtgcaagagaaatatggagttccgccagaacgttgggtggactttcgcgcactgactggtgatcgttcagacaacatcccgggcgttgccgggattggtgaaaagacggcgctgcgcctgctggcagaatggggctcggtggaaaatctgctcaagaaccttgatcgtgtgaaacctgatagcttacgccgcaagatcgaagcccacctggaagacttgcgtctgagtctggatcttgtccgtattcgcaccgatctgccgttggaagtagactttaaagctctgcgtcgtcgcacacccgatttagaggggttacgcgcgttcctcgaagaactggagtttggctccctgctgcatgaattcggtttgttgggcggagagaaaccgcgtgaagaagcaccatggccgccgcccgggggtgcctttgtcggctttcttctgtcacgcaaagagccaatgtgggcggaactgttagctcttgcagccgccgcggaagggcgtgttcaccgcgcgacctctcctgtcgaggccctcgctgacctcaaagaagcacgtggtttcttggcgaaagatttagccgtgcttgcattacgcgaaggcgttgcgctcgatccgacggacgacccgcttttggtggcttatttgctcgatggcgcgaataccaacccggaacgtgtcgcccgtcgttacggcggcgagtttactgaagatgcggcagaacgcgcgttgcttagcgaacgcctcttccagacgttatttccacgtctttcggagaaattactctggctctatcaggaagtcgaacgtccattgagtcgcgtgcttgcccatatggaggctcgcggtgtgcgcttagatgttccgttgttagaagcactcagcttcgagttggagaaagaactggaacgtcttgagggcgaagtctttcgtttagcggggcatcccttcaatctcaactctcgcgaccaattggagaaagtgctctttgatgaattaggtttaacccctgtcacgcgtacagagaagaccggcaaacgttccacttcggcagccgccttggaagcacttcgtggtgctcacccgatcgtcgagttgattttgcagtatcgcgagctcagcaaactcaaatcaacctatcttgataggttacctcgtcttgttcatccacgtacgggtcgtttacacacccgcttcaatcaaacggcaacagccaccgggcgcttgtcgtcgagtgacccgaacctccagaatattccagtgcgcacgccgctgggccaacacattcgtaaagcgtttgttgcggaagaaggttggttattacttgcggccgattactcccagatcgaacttcgtgtattggcgcatctctctggcgacgagaatcttaaacgcgtgtttcgcgaaggcaaggatattcacactgaaaccgcagcctggatgttcggggtggacccagccttagtggaccccaagatgcgtcgtgccgccaagaccgtcaactttggcgtactctatggtatgtcagcacaccgtcttagtcaggaattgggcattgactacaaagaagctgaagcgtttatcgagcgctatttccaatcctttccgaaagttcgcgcgtggattgaacgtaccctcgaagaaggtcgcactcgcggctatgtggaaacgttattcgggcgtcgtcgctacgttccagatcttacgtctcgtgtccgctcagtgcgcgaagctgctgagcgtatggcctggaatatgcctgttcagggaacagcggcggacctcatgaagatcgccatggtgaaattgtttccgcgcttgaaacccttaggagcccaccttcttttacaggtgcatgatgaattggtcttggaagtacccgaggatcgcgcagaagaagccaaagcactcgtgaaagaggttatggaaaacgcgtatccgttagatgttccgttggaggtcgaagtgggtgtaggccgtgattggcttgaagcgaaacaagactaatga

SEQ ID NO: 640 - protein, 844 aa, synthetic construct
  REGION 1..844: note = DNA Polymerase Variant
MHHHHHHGGSGMLPLFDLEEPPKRVLLVDGHHLAYRTFYALSLTTSRGEPVQMVYGFARSLLKALKEDGQAVVVVFDAKAPSFRHEAYEAYKAGRAPTPEDFPRQLALVKRLVDLLGLVRLEAPGYEADDVLGTLAKKAEREGMEVCILTGDRDFFQLLSEKVSVLLPDGTLVTPKDVQEKYGVPPERWVDFRALTGDRSDNIPGVAGIGEKTALRLLAEWGSVENLLKNLDRVKPDSLRRKIEAHLEDLRLSLDLVRIRTDLPLEVDFKALRRRTPDLEGLRAFLEELEFGSLLHEFGLLGGEKPREEAPWPPPGGAFVGFLLSRKEPMWAELLALAAAAEGRVHRATSPVEALADLKEARGFLAKDLAVLALREGVALDPTDDPLLVAYLLDGANTNPERVARRYGGEFTEDAAERALLSERLFQTLFPRLSEKLLWLYQEVERPLSRVLAHMEARGVRLDVPLLEALSFELEKELERLEGEVFRLAGHPFNLNSRDQLEKVLFDELGLTPVTRTEKTGKRSTSAAALEALRGAHPIVELILQYRELSKLKSTYLDRLPRLVHPRTGRLHTRFNQTATATGRLSSSDPNLQNIPVRTPLGQHIRKAFVAEEGWLLLAADYSQIELRVLAHLSGDENLKRVFREGKDIHTETAAWMFGVDPALVDPKMRRAAKTVNFGVLYGMSAHRLSQELGIDYKEAEAFIERYFQSFPKVRAWIERTLEEGRTRGYVETLFGRRRYVPDLTSRVRSVREAAERMAWNMPVQGTAADLMKIAMVKLFPRLKPLGAHLLLQVHDELVLEVPEDRAEEAKALVKEVMENAYPLDVPLEVEVGVGRDWLEAKQD

SEQ ID NO: 641 - DNA, 2538 bp, synthetic construct
  misc_feature 1..2538: note = DNA Polymerase Variant
  source 1..2538: mol_type = other DNA
atgcaccatcatcatcatcatggcggtagcggcatgttaccgctgtttgatttggaagaaccaccaaaacgcgtgctgcttgttgacggccatcatctggcgtatcgtaccttctacgcactgagccttacgacctcacgtggtgagcctgtccagatggtgtatgggtttgctcgctccctgctgaaagccctgaaggaagatggtcaagccgtagtagtggttttcgatgcgaaagcaccgtcgtttcgtcacgaagcgtacgaggcctataaagctggccgcgcaccgaccccggaagactttccgcgtcagttagcgctcgtcaaacgcctcgtggatttgctgggattagttcgcttggaagctcctggctacgaggcggacgacgtgctcggtacactggccaagaaagcagaacgtgaaggcatggaggtctgcattcttaccggtgatcgcgatttcttccagctgctgtctgagaaagtgagcgttttgctgcccgatggcacgttagtaaccccgaaagatgtccaagagaaatatggagttacgccagaacgttgggtggactttcgcgcactgactggtgatcgttcagacaacatcccgggcgttgccgggattggtgaaaagacggcgctgcgcctgctggcagaatggggctcggtggaaaatctgctcaagaaccttgatcgtgtgaaacctgatagcttacgccgcaagatcgaagcccacctggaagacttgcgtctgagtctggatcttgcgcgtattcgcaccgatctgccgttggaagtagactttaaagctctgcgtcgtcgcacacccgatttagaggggttacgcgcgttcctcgaagaactggagtttggctccctgctgcatgaattcggtttgttgggcggagagaaaccgcgtgaagaagcaccatggccgccgcccgaaggtgcctttgtcggctttcttctgtcacgcaaagagccaatgtgggcggaactgttagctcttgcagccgccgcggaagggcgtgttcaccgcgcgacctctcctgtcgaggccctcgctgacctcaaagaagcacgtggtttcttggcgaaagatttagccgtgcttgcattacgcgaaggcgttgcgctcgatccgacggacgacccgcttttggtggcttatttgctcgatcctgcgaataccaacccggaacgtgtcgcccgtcgttacggcggcgagtttactgaagatgcggcagaacgcgcgttgcttagcgaacgcctcttccagacgttatttccacgtctttcggagaaattactctggctctatcaggaagtcgaacgtccattgagtcgcgtgcttgcccatatggaggctcgcggtgtgcgcttagatgttccgttgttagaagcactcagcttcgagttggagaaagaactggaacgtcttgaaggcgaagtctttcgtttagcggggcatcccttcaatctcaactctcgcgaccaattggagaaagtgctctttgatgaattaggtttaacccctgtcacgcgtacagagaagaccggcaaacgttccacttcggcagccgccttggaagcacttcgtggtgctcacccgatcgtcgagttgattttgcagtatcgcgagctcagcaaactcaaatcaacctatcttgataggttacctcgtcttgttcatccacgtacgggtcgtttacacacccgcttcaatcaaacggcgacagccaccgggcgcttgtcgtcgagtgacccgaacctccagaatattccagtgcgcacgccgctgggccaacacattcgtaaagcgtttgttgcggaagaaggttggttattacttgcggccgattactcccagatcgaacttcgtgtattggcgcatctctctggcgacgagaatcttaaacgcgtgtttcgcgaaggcaaggatattcacactgaaaccgcagcctggatgttcggggtggacccagccttagtggaccccaagatgcgtcgtgccgccaagaccgtcaactttggcgtactctatggtatgtcagcacatcgtcttagtcaggaattgggcattgactacaaagaagctgaagcgtttatcgagcgctatttccaatcctttccgaaagttcgcgcgtggattgaacgtaccctcgaagaaggtcgcactcgcggctatgtggaaacgttattcgggcgtcgtcgctacgttccagatcttgcatctcgtgtccgctcagtgcgcgaagctgctgagcgtatggcctggaatatgcctgttcagggaacagcggcggacctcatgaagatcgccatggtgaaattgtttccgcgcttgaaacccttaggagcccaccttcttttacaggtgcatgatgaattggtcttggaagtacccgaggatcgcgcagaagaagccaaagcactcgtgaaagaggttatggaaaacgcgtatccgttagatgttccgttggaggtcgaagtgggtgtaggccgtgattggcttgaagcgaaacaagactaatga

SEQ ID NO: 642 - protein, 844 aa, synthetic construct
  REGION 1..844: note = DNA Polymerase Variant
MHHHHHHGGSGMLPLFDLEEPPKRVLLVDGHHLAYRTFYALSLTTSRGEPVQMVYGFARSLLKALKEDGQAVVVVFDAKAPSFRHEAYEAYKAGRAPTPEDFPRQLALVKRLVDLLGLVRLEAPGYEADDVLGTLAKKAEREGMEVCILTGDRDFFQLLSEKVSVLLPDGTLVTPKDVQEKYGVTPERWVDFRALTGDRSDNIPGVAGIGEKTALRLLAEWGSVENLLKNLDRVKPDSLRRKIEAHLEDLRLSLDLARIRTDLPLEVDFKALRRRTPDLEGLRAFLEELEFGSLLHEFGLLGGEKPREEAPWPPPEGAFVGFLLSRKEPMWAELLALAAAAEGRVHRATSPVEALADLKEARGFLAKDLAVLALREGVALDPTDDPLLVAYLLDPANTNPERVARRYGGEFTEDAAERALLSERLFQTLFPRLSEKLLWLYQEVERPLSRVLAHMEARGVRLDVPLLEALSFELEKELERLEGEVFRLAGHPFNLNSRDQLEKVLFDELGLTPVTRTEKTGKRSTSAAALEALRGAHPIVELILQYRELSKLKSTYLDRLPRLVHPRTGRLHTRFNQTATATGRLSSSDPNLQNIPVRTPLGQHIRKAFVAEEGWLLLAADYSQIELRVLAHLSGDENLKRVFREGKDIHTETAAWMFGVDPALVDPKMRRAAKTVNFGVLYGMSAHRLSQELGIDYKEAEAFIERYFQSFPKVRAWIERTLEEGRTRGYVETLFGRRRYVPDLASRVRSVREAAERMAWNMPVQGTAADLMKIAMVKLFPRLKPLGAHLLLQVHDELVLEVPEDRAEEAKALVKEVMENAYPLDVPLEVEVGVGRDWLEAKQD

SEQ ID NO: 643 - DNA, 2538 bp, synthetic construct
  misc_feature 1..2538: note = DNA Polymerase Variant
  source 1..2538: mol_type = other DNA
atgcaccatcatcatcatcatggcggtagcggcatgttaccgctgtttgatttggaagaaccaccaaaacgcgtgctgcttgttgacggccatcatctggcgtatcgtaccttctacgcactgagccttacgacctcacgtggtgagcctgtccagatggtgtatgggtttgctcgctccctgctgaaagccctgaaggaagatggtcaagccgtagtagtggttttcgatgcgaaagcaccgtcgtttcgtcacgaagcgtacgaggcctataaagctggccgcgcaccgaccccggaagactttccgcgtcagttagcgctcgtcaaacgcctcgtggatttgctgggattagttcgcttggaagctcctggctacgaggcggacgacgtgctcggtacactggccaagaaagcagaacgtgaaggcatggaggtctgcattcttaccggtgatcgcgatttcttccagctgctgtctgagaaagtgagcgttttgctgcccgatggcacgttagtaaccccgaaagatgtgcaagagaaatatggagttccgccagaacgttgggtggactttcgcgcactgactggtgatcgttcagacaacatcccgggcgttgccgggattggtgaaaagacggcgctgcgcctgctggcagaatggggctcggtggaaaatctgctcaagaaccttgatcgtgtgaaacctgatagcttacgccgcaagatcgaagcccacctggaagacttgcgtctgagtctggatcttgtccgtattcgcaccgatctgccgttggaagtagactttaaagctctgcgtcgtcgcacacccgatttagaggggttacgcgcgttcctcgaagaactggagtttggctccctgctgcatgaattcggtttgttgggcggagagaaaccgcgtgaagaagcaccatggccgccgcccgggggtgcctttgtcggctttcttctgtcacgcaaagagccaatgtgggcggaactgttagctcttgcagccgccgcggaagggcgtgttcaccgcgcgacctctcctgtcgaggccctcgctgacctcaaagaagcacgtggtttcttggcgaaagatttagccgtgcttgcattacgcgaaggcgttgcgctcgatccgacggacgacccgcttttggtggcttatttgctcgatcctgcgaataccaacccggaacgtgtcgcccgtcgttacggcggcgagtttactgaagatgcggcagaacgcgcgttgcttagcgaacgcctcttccagacgttatttccacgtctttcggagaaattactctggctctatcaggaagtcgaacgtccattgagtcgcgtgcttgcccatatggaggctcgcggtgtgcgcttagatgttccgttgttagaagcactcagcttcgagttggagaaagaactggaacgtcttgaaggcgaagtctttcgtttagcggggcatcccttcaatctcaactctcgcgaccaattggagaaagtgctctttgatgaattaggtttaacccctgtcacgcgtacagagaagaccggcaaacgttccacttcggcagccgccttggaagcacttcgtggtgctcacccgatcgtcgagttgattttgcagtatcgcgagctcagcaaactcaaatcaacctatcttgataggttacctcgtcttgttcatccacgtacgggtcgtttacacacccgcttcaatcaaacggcgacagccaccgggcgcttgtcgtcgagtgacccgaacctccagaatattccagtgcgcacgccgctgggccaacacattcgtaaagcgtttgttgcggaagaaggttggttattacttgcggccgattactcccagatcgaacttcgtgtattggcgcatctctctggcgacgagaatcttaaacgcgtgtttcgcgaaggcaaggatattcacactgaaaccgcagcctggatgttcggggtggacccagccttagtggaccccaagatgcgtcgtgccgccaagaccgtcaactttggcgtactctatggtatgtcagcagcacgtcttagtcaggaattgggcattgactacaaagaagctgaagcgtttatcgagcgctatttccaatcctttccgaaagttcgcgcgtggattgaacgtacgctcgaagaaggtcgcactcgcggctatgtggaaacgttattcgggcgtcgtcgctacgttccagatcttgcatctcgtgtccgctcagtgcgcgaagctgctgagcgtatggcctggaatatgcctgttcagggaacagcggcggacctcatgaagatcgccatggtgaaattgtttccgcgcttgaaacccttaggagcccaccttcttttacaggtgcatgatgaattggtcttggaagtacccgaggatcgcgcagaagaagccaaagcactcgtgaaagaggttatggaaaacgcgtatccgttagatgttccgttggaggtcgaagtgggtgtaggccgtgattggcttgaagcgaaacaagactaatga

SEQ ID NO: 644 - protein, 844 aa, synthetic construct
  REGION 1..844: note = DNA Polymerase Variant
MHHHHHHGGSGMLPLFDLEEPPKRVLLVDGHHLAYRTFYALSLTTSRGEPVQMVYGFARSLLKALKEDGQAVVVVFDAKAPSFRHEAYEAYKAGRAPTPEDFPRQLALVKRLVDLLGLVRLEAPGYEADDVLGTLAKKAEREGMEVCILTGDRDFFQLLSEKVSVLLPDGTLVTPKDVQEKYGVPPERWVDFRALTGDRSDNIPGVAGIGEKTALRLLAEWGSVENLLKNLDRVKPDSLRRKIEAHLEDLRLSLDLVRIRTDLPLEVDFKALRRRTPDLEGLRAFLEELEFGSLLHEFGLLGGEKPREEAPWPPPGGAFVGFLLSRKEPMWAELLALAAAAEGRVHRATSPVEALADLKEARGFLAKDLAVLALREGVALDPTDDPLLVAYLLDPANTNPERVARRYGGEFTEDAAERALLSERLFQTLFPRLSEKLLWLYQEVERPLSRVLAHMEARGVRLDVPLLEALSFELEKELERLEGEVFRLAGHPFNLNSRDQLEKVLFDELGLTPVTRTEKTGKRSTSAAALEALRGAHPIVELILQYRELSKLKSTYLDRLPRLVHPRTGRLHTRFNQTATATGRLSSSDPNLQNIPVRTPLGQHIRKAFVAEEGWLLLAADYSQIELRVLAHLSGDENLKRVFREGKDIHTETAAWMFGVDPALVDPKMRRAAKTVNFGVLYGMSAARLSQELGIDYKEAEAFIERYFQSFPKVRAWIERTLEEGRTRGYVETLFGRRRYVPDLASRVRSVREAAERMAWNMPVQGTAADLMKIAMVKLFPRLKPLGAHLLLQVHDELVLEVPEDRAEEAKALVKEVMENAYPLDVPLEVEVGVGRDWLEAKQD

SEQ ID NO: 645 - DNA, 2538 bp, synthetic construct
  misc_feature 1..2538: note = DNA Polymerase Variant
  source 1..2538: mol_type = other DNA
atgcaccatcatcatcatcatggcggtagcggcatgttaccgctgtttgatttggaagaaccaccaaaacgcgtgctgcttgttgacggccatcatctggcgtatcgtaccttctacgcactgagccttacgacctcacgtggtgagcctgtccagatggtgtatgggtttgcccgctccctgctgaaagccctgaaggaagatggtcaagccgtagtagtggttttcgatgcgaaagcaccgtcgtttcgtcacgaagcgtacgaggcctataaagctggccgcgcaccgaccccggaagactttccgcgtcagttagcgctcgtcaaacgcctcgtggatttgctgggattagttcgcttggaagctcctggctacgaggcggacgacgtgctcggtacactggccaagaaagcagaacgtgaaggcatggaggtctgcattcttaccggtgatcgcgatttcttccagctgctgtctgagaaagtgagcgttttgctgcccgatggcacgttagtaaccccgaaagatgtccaagagaaatatggagttccgccagaacgttgggtggactttcgcgcactgactggtgatcgttcagacaacatcccgggcgttgccgggattggtgaaaagacggcgctgcgcctgctggcagaatggggctcggtggaaaatctgctcaagaaccttgatcgtgtgaaacctgatagcttacgccgcaagatcgaagcccacctggaagacttgcgtctgagtctggatcttgcgcgtattcgcaccgatctgccgttggaagtagactttaaagctctgcgtcgtcgcacacccgatttagaggggttacgcgcgttcctcgaagaactggagtttggctccctgctgcatgaattcggtttgttgggcggagagaaaccgcgtgaagaagcaccatggccgccgcccgaaggtgcctttgtcggctttcttctgtcacgcaaagagccaatgtgggcggaactgttagctcttgcagccgccgcggaagggcgtgttcaccgcgcgacctctcctgtcgaggccctcgctgacctcaaagaagcacgtggtttcttggcgaaagatttagccgtgcttgcattacgcgaaggcgttgcgctcgatccgacggacgacccgcttttggtggcttatttgctcgatcctgcgaataccaacccggaacgtgtcgcccgtcgttacggcggcgagtttactgaagatgcggcagaacgcgcgttgcttagcgaacgcctcttccagacgttatttccacgtctttcggagaaattactctggctctatcaggaagtcgaacgtccattgagtcgcgtgcttgcccatatggaggctcgcggtgtgcgcttagatgttccgttgttagaagcactcagcttcgagttggagaaagaactggaacgtcttgaaggcgaagtctttcgtttagcggggcatcccttcaatctcaactctcgcgaccaattggagaaagtgctctttgatgaattaggtttaacccctgtcacgcgtacagagaagaccggcaaacgttccacttcggcagccgccttggaagcacttcgtggtgctcacccgatcgtcgagttgattttgcagtatcgcgagctcagcaaactcaaatcaacctatcttgataggttacctcgtcttgttcatccacgtacgggtcgtttacacacccgcttcaatcaaacggcgacagccaccgggcgcttgtcgtcgagtgacccgaacctccagaatattccagtgcgcacgccgctgggccaacacattcgtaaagcgtttgttgcggaagaaggttggttattacttgcggccgattactcccagatcgaacttcgtgtattggcgcatctctctggcgacgagaatcttaaacgcgtgtttcgcgaaggcaaggatattcacactgaaaccgcagcctggatgttcggggtggacccagccttagtggaccccaagatgcgtcgtgccgccaagaccgtcaactttggcgtactctatggtatgtcagcacatcgtcttagtcaggaattgggcattgactacaaagaagctgaagcgtttatcgagcgctatttccaatcctttccgaaagttcgcgcgtggattgaacgtaccctcgaagaaggtcgcactcgcggctatgtggaaacgttattcgggcgtcgtcgctacgttccagatcttgcatctcgtgtccgctcagtgcgcgaagctgctgagcgtatggcctggaatatgcctgttcagggaacagcggcggacctcatgaagatcgccatggtgaaattgtttccgcgcttgaaacccttaggagcccaccttcttttacaggtgcatgatgaattggtcttggaagtacccgaggatcgcgcatatgaagccaaagcactcgtgaaagaggttatggaaaacgcgtatccgttagatgttccgttggaggtcgaagtgggtgtaggccgtgattggcttgaagcgaaacaagactaatga

SEQ ID NO: 646 - protein, 844 aa, synthetic construct
  REGION 1..844: note = DNA Polymerase Variant
MHHHHHHGGSGMLPLFDLEEPPKRVLLVDGHHLAYRTFYALSLTTSRGEPVQMVYGFARSLLKALKEDGQAVVVVFDAKAPSFRHEAYEAYKAGRAPTPEDFPRQLALVKRLVDLLGLVRLEAPGYEADDVLGTLAKKAEREGMEVCILTGDRDFFQLLSEKVSVLLPDGTLVTPKDVQEKYGVPPERWVDFRALTGDRSDNIPGVAGIGEKTALRLLAEWGSVENLLKNLDRVKPDSLRRKIEAHLEDLRLSLDLARIRTDLPLEVDFKALRRRTPDLEGLRAFLEELEFGSLLHEFGLLGGEKPREEAPWPPPEGAFVGFLLSRKEPMWAELLALAAAAEGRVHRATSPVEALADLKEARGFLAKDLAVLALREGVALDPTDDPLLVAYLLDPANTNPERVARRYGGEFTEDAAERALLSERLFQTLFPRLSEKLLWLYQEVERPLSRVLAHMEARGVRLDVPLLEALSFELEKELERLEGEVFRLAGHPFNLNSRDQLEKVLFDELGLTPVTRTEKTGKRSTSAAALEALRGAHPIVELILQYRELSKLKSTYLDRLPRLVHPRTGRLHTRFNQTATATGRLSSSDPNLQNIPVRTPLGQHIRKAFVAEEGWLLLAADYSQIELRVLAHLSGDENLKRVFREGKDIHTETAAWMFGVDPALVDPKMRRAAKTVNFGVLYGMSAHRLSQELGIDYKEAEAFIERYFQSFPKVRAWIERTLEEGRTRGYVETLFGRRRYVPDLASRVRSVREAAERMAWNMPVQGTAADLMKIAMVKLFPRLKPLGAHLLLQVHDELVLEVPEDRAYEAKALVKEVMENAYPLDVPLEVEVGVGRDWLEAKQD

SEQ ID NO: 647 - DNA, 2538 bp, synthetic construct
  misc_feature 1..2538: note = DNA Polymerase Variant
  source 1..2538: mol_type = other DNA
atgcaccatcatcatcatcatggcggtagcggcatgttaccgctgtttgatttggaagaaccaccaaaacgcgtgctgcttgttgacggccatcatctggcgtatcgtaccttctacgcactgagccttacgacctcacgtggtgagcctgtccagatggtgtatgggtttgctcgctccctgctgaaagccctgaaggaagatggtcaagccgtagtagtggttttcgatgcgaaagcaccgtcgtttcgtcacgaagcgtacgaggcctataaagctggccgcgcaccgaccccggaagactttccgcgtcagttagcgctcgtcaaacgcctcgtggatttgctgggattagttcgcttggaagctcctggctacgaggcggacgacgtgctcggtacactggccaagaaagcagaacgtgaaggcatggaggtctgcattcttaccggtgatcgcgatttcttccagctgctgtctgagaaagtgagcgttttgctgcccgatggcacgttagtaaccccgaaagatgtccaagagaaatatggagttccgccagaacgttgggtggactttcgcgcactgactggtgatcgttcagacaacatcccgggcgttgccgggattggtgaaaagacggcgctgcgcctgctggcagaatggggctcggtggaaaatctgctcaagaaccttgatcgtgtgaaacctgatagcttacgccgcaagatcgaagcccacctggaagacttgcgtctgagtctggatcttgcccgtattcgcaccgatctgccgttggaagtagactttaaagctctgcgtcgtcgcacacccgatttagaggggttacgcgcgttcctcgaagaactggagctgggctccctgctgcatgaattcggtttgttgggcggagagaaaccgcgtgaagaagcaccatggccgccgcccgggggtgcctttgtcggctttcttctgtcacgcaaagagccaatgtgggcggaactgttagctcttgcagccgccgcggaagggcgtgttcaccgcgcgacctctcctgtcgaggccctcgctgacctcaaagaagcacgtggtttcttggcgaaagatttagccgtgcttgcattacgcgaaggcgttgcgctcgatccgacggacgacccgcttttggtggcttatttgctcgatcctgcgaataccaacccggaacgtgtcgcccgtcgttacggcggcgagtttactgaagatgcggcagaacgcgcgttgcttagcgaacgcctcttccagacgttatttccacgtctttcggagaaattactctggctctatcaggaagtcgaacgtccattgagtcgcgtgcttgcccatatggaggctcgcggtgtgcgcttagatgttccgttgttagaagcactcagcttcgagttggtgaaagaactggaacgtcttgaaggcgaagtctttcgtttagcggggcatcccttcaatctcaactctcgcgaccaattggagaaagtgctctttgatgaattaggtttaacccctgtcacgcgtacagagaagaccggcaaacgttccacttcggcagccgccttggaagcacttcgtggtgctcacccgatcgtcgagttgattttgcagtatcgcgagctcagcaaactcaaatcaacctatcttgataggttacctcgtcttgttcatccacgtacgggtcgtttacacacccgcttcaatcaaacggcgacagccaccgggcgcttgtcgtcgagtgacccgaacctccagaatattccagtgcgcacgccgctgggccaacacattcgtaaagcgtttgttgcggaagaaggttggttattacttgcggccgattactcccagatcgaacttcgtgtattggcgcatctctctggcgacgagaatcttaaacgcgtgtttcgcgaaggcaaggatattcacactgaaaccgcagcctggatgttcggggtggacccagccttagtggaccccaagatgcgtcgtgccgccaagaccgtcaactttggcgtactctatggtatgtcagcagcacgtcttagtcaggaattgggcattgactacaaagaagctgaagcgtttatcgagcgctatttccaatcctttccgaaagttcgcgcgtggattgaacgtaccctcgaagaaggtcgcactcgcggctatgtggaaacgttattcgggcgtcgtcgctacgttccagatcttacgtctcgtgtccgctcagtgcgcgaagctgctgagcgtatggcctggaatatgcctgttcagggaacagcggcggacctcatgaagatcgccatggtgaaattgtttccgcgcttgaaacccttaggagcccaccttcttttacaggtgcatgatgaattggtcttggaagtacccgaggatcgcgcagaagaagccaaagcactcgtgaaagaggttatggaaaacgcgtatccgttagatgttccgttggaggtcgaagtgggtgtaggccgtgattggcttgaagcgaaacaagactaatga

SEQ ID NO: 648 - protein, 844 aa, synthetic construct
  REGION 1..844: note = DNA Polymerase Variant
MHHHHHHGGSGMLPLFDLEEPPKRVLLVDGHHLAYRTFYALSLTTSRGEPVQMVYGFARSLLKALKEDGQAVVVVFDAKAPSFRHEAYEAYKAGRAPTPEDFPRQLALVKRLVDLLGLVRLEAPGYEADDVLGTLAKKAEREGMEVCILTGDRDFFQLLSEKVSVLLPDGTLVTPKDVQEKYGVPPERWVDFRALTGDRSDNIPGVAGIGEKTALRLLAEWGSVENLLKNLDRVKPDSLRRKIEAHLEDLRLSLDLARIRTDLPLEVDFKALRRRTPDLEGLRAFLEELELGSLLHEFGLLGGEKPREEAPWPPPGGAFVGFLLSRKEPMWAELLALAAAAEGRVHRATSPVEALADLKEARGFLAKDLAVLALREGVALDPTDDPLLVAYLLDPANTNPERVARRYGGEFTEDAAERALLSERLFQTLFPRLSEKLLWLYQEVERPLSRVLAHMEARGVRLDVPLLEALSFELVKELERLEGEVFRLAGHPFNLNSRDQLEKVLFDELGLTPVTRTEKTGKRSTSAAALEALRGAHPIVELILQYRELSKLKSTYLDRLPRLVHPRTGRLHTRFNQTATATGRLSSSDPNLQNIPVRTPLGQHIRKAFVAEEGWLLLAADYSQIELRVLAHLSGDENLKRVFREGKDIHTETAAWMFGVDPALVDPKMRRAAKTVNFGVLYGMSAARLSQELGIDYKEAEAFIERYFQSFPKVRAWIERTLEEGRTRGYVETLFGRRRYVPDLTSRVRSVREAAERMAWNMPVQGTAADLMKIAMVKLFPRLKPLGAHLLLQVHDELVLEVPEDRAEEAKALVKEVMENAYPLDVPLEVEVGVGRDWLEAKQD

SEQ ID NO: 649 - DNA, 2538 bp, synthetic construct
  misc_feature 1..2538: note = DNA Polymerase Variant
  source 1..2538: mol_type = other DNA
atgcaccatcatcatcatcatggcggtagcggcatgttaccgctgtttgatttggaagaaccaccaaaacgcgtgctgcttgttgacggccatcatctggcgtatcgtaccttctacgcactgagccttacgacctcacgtggtgagcctgtccagatggtgtatgggtttgctcgctccctgctgaaagccctgaaggaagatggtcaagccgtagtagtggttttcgatgcgaaagcaccgtcgtttcgtcacgaagcgtacgaggcctataaagctggccgcgcaccgaccccggaagactttccgcgtcagttagcgctcgtcaaacgcctcgtggatttgctgggattagttcgcttggaagctcctggctacgaggcggacgacgtgctcggtacactggccaagaaagcagaacgtgaaggcatggaggtctgcattcttaccggtgatcgcgatttcttccagctgctgtctgagaaagtgagcgttttgctgcccgatggcacgttagtaaccccgaaagatgtgcaagagaaatatggagttccgccagaacgttgggtggactttcgcgcactgactggtgatcgttcagacaacatcccgggcgttgccgggattggtgaaaagacggcgctgcgcctgctggcagaatggggctcggtggaaaatctgctcaagaaccttgatcgtgtgaaacctgatagcttacgccgcaagatcgaagcccacctggaagacttgcgtctgagtctggatcttgtccgtattcgcaccgatctgccgttggaagtagactttaaagctctgcgtcgtcgcacacccgatttagaggggttacgcgcgttcctcgaagaactggagctgggctccctgctgcatgaattcggtttgttgggcggagagaaaccgcgtgaagaagcaccatggccgccgcccgagggtgcctttgtcggctttcttctgtcacgcaaagagccaatgtgggcggaactgttagctcttgcagccgccgcggaagggcgtgttcaccgcgcgacctctcctgtcgaggccctcgctgacctcaaagaagcacgtggtttcttggcgaaagatttagccgtgcttgcattacgcgaaggcgttgcgctcgatccgacggacgacccgcttttggtggcttatttgctcgatcatgcgaataccaacccggaacgtgtcgcccgtcgttacggcggcgagtttactgaagatgcggcagaacgcgcgttgcttagcgaacgcctcttccagacgttatttccacgtctttcggagaaattactctggctctatcaggaagtcgaacgtccattgagtcgcgtgcttgcccatatggaggctcgcggtgtgcgcttagatgttccgttgttagaagcactcagcttcgagttggagaaagaactggaacgtcttgagggcgaagtctttcgtttagcggggcatcccttcaatctcaactctcgcgaccaattggagaaagtgctctttgatgaattaggtttaacccctgtcacgcgtacagagaagaccggcaaacgttccacttcggcagccgccttggaagcacttcgtggtgctcacccgatcgtcgagttgattttgcagtatcgcgagctcagcaaactcaaatcaacctatcttgataggttacctcgtcttgttcatccacgtacgggtcgtttacacacccgcttcaatcaaacggcaacagccaccgggcgcttgtcgtcgagtgacccgaacctccagaatattccagtgcgcacgccgctgggccaacacattcgtaaagcgtttgttgcggaagaaggttggttattacttgcggccgattactcccagatcgaacttcgtgtattggcgcatctctctggcgacgagaatcttaaacgcgtgtttcgcgaaggcaaggatattcacactgaaaccgcagcctggatgttcggggtggacccagccttagtggaccccaagatgcgtcgtgccgccaagaccgtcaactttggcgtactctatggtatgtcagcacaccgtcttagtcaggaattgggcattgactacaaagaagctgaagcgtttatcgagcgctatttccaatcctttccgaaagttcgcgcgtggattgaacgtacgctcgaagaaggtcgcactcgcggctatgtggaaacgttattcgggcgtcgtcgcgtcgttccagatcttacgtctcgtgtccgctcagtgcgcgaagctgctgagcgtatggcctggaatatgcctgttcagggaacagcggcggacctcatgaagatcgccatggtgaaattgtttccgcgcttgaaacccttaggagcccaccttcttttacaggtgcatgatgaattggtcttggaagtacccgaggatcgcgcagaagaagccaaagcactcgtgaaagaggttatggaaaacgcgtatccgttagatgttccgttggaggtcgaagtgggtgtaggccgtgattggcttgaagcgaaacaagactaatga

SEQ ID NO: 650 - protein, 844 aa, synthetic construct
  REGION 1..844: note = DNA Polymerase Variant
MHHHHHHGGSGMLPLFDLEEPPKRVLLVDGHHLAYRTFYALSLTTSRGEPVQMVYGFARSLLKALKEDGQAVVVVFDAKAPSFRHEAYEAYKAGRAPTPEDFPRQLALVKRLVDLLGLVRLEAPGYEADDVLGTLAKKAEREGMEVCILTGDRDFFQLLSEKVSVLLPDGTLVTPKDVQEKYGVPPERWVDFRALTGDRSDNIPGVAGIGEKTALRLLAEWGSVENLLKNLDRVKPDSLRRKIEAHLEDLRLSLDLVRIRTDLPLEVDFKALRRRTPDLEGLRAFLEELELGSLLHEFGLLGGEKPREEAPWPPPEGAFVGFLLSRKEPMWAELLALAAAAEGRVHRATSPVEALADLKEARGFLAKDLAVLALREGVALDPTDDPLLVAYLLDHANTNPERVARRYGGEFTEDAAERALLSERLFQTLFPRLSEKLLWLYQEVERPLSRVLAHMEARGVRLDVPLLEALSFELEKELERLEGEVFRLAGHPFNLNSRDQLEKVLFDELGLTPVTRTEKTGKRSTSAAALEALRGAHPIVELILQYRELSKLKSTYLDRLPRLVHPRTGRLHTRFNQTATATGRLSSSDPNLQNIPVRTPLGQHIRKAFVAEEGWLLLAADYSQIELRVLAHLSGDENLKRVFREGKDIHTETAAWMFGVDPALVDPKMRRAAKTVNFGVLYGMSAHRLSQELGIDYKEAEAFIERYFQSFPKVRAWIERTLEEGRTRGYVETLFGRRRVVPDLTSRVRSVREAAERMAWNMPVQGTAADLMKIAMVKLFPRLKPLGAHLLLQVHDELVLEVPEDRAEEAKALVKEVMENAYPLDVPLEVEVGVGRDWLEAKQD

SEQ ID NO: 651 - DNA, 2538 bp, synthetic construct
  misc_feature 1..2538: note = DNA Polymerase Variant
  source 1..2538: mol_type = other DNA
atgcaccatcatcatcatcatggcggtagcggcatgttaccgctgtttgatttggaagaaccaccaaaacgcgtgctgcttgttgacggccatcatctggcgtatcgtaccttctacgcactgagccttacgacctcacgtggtgagcctgtccagatggtgtatgggtttgctcgctccctgctgaaagccctgaaggaagatggtcaagccgtagtagtggttttcgatgcgaaagcaccgtcgtttcgtcacgaagcgtacgaggcctataaagctggccgcgcaccgaccccggaagactttccgcgtcagttagcgctcgtcaaacgcctcgtggatttgctgggattagttcgcttggaagctcctggctacgaggcggacgacgtgctcggtacactggccaagaaagcagaacgtgaaggcatggaggtctgcattcttaccggtgatcgcgatttcttccagctgctgtctgagaaagtgagcgttttgctgcccgatggcacgttagtaaccccgaaagatgtccaagagaaatatggagttccgccagaacgttgggtggactttcgcgcactgactggtgatcgttcagacaacatcccgggcgttgccgggattggtgaaaagacggcgctgcgcctgctggcagaatggggctcggtggaaaatctgctcaagaaccttgatcgtgtgaaacctgatagcttacgccgcaagatcgaagcccacctggaagacttgcgtctgagtctggatcttgcgcgtattcgcaccgatctgccgttggaagtagactttaaagctctgcgtcgtcgcacacccgatttagaggggttacgcgcgttcctcgaagaactggagtttggctccctgctgcatgaattcggtttgttgggcggagagaaaccgcgtgaagaagcaccatggccgccgcccgaaggtgcctttgtcggctttcttctgtcacgcaaagagccaatgtgggcggaactgttagctcttgcagccgccgcggaagggcgtgttcaccgcgcgacctctcctgtcgaggccctcgctgacctcaaagaagcacgtggtttcttggcgaaagatttagccgtgcttgcattacgcgaaggcgttgcgctcgatccgacggacgacccgcttttggtggcttatttgctcgatcctgcgaataccaacccggaacgtgtcgcccgtcgttacggcggcgagtttactgaagatgcggcagaacgcgcgttgcttagcgaacgcctcttccagacgttatttccacgtctttcggagaaattactctggctctatcaggaagtcgaacgtccattgagtgttgtgcttgcccatatggaggctcgcggtgtgcgcttagatgttccgttgttagaagcactcagcttcgagttggagaaagaactggaacgtcttgaaggcgaagtctttcgtttagcggggcatcccttcaatctcaactctcgcgaccaattggagaaagtgctctttgatgaattaggtttaacccctgtcacgcgtacagagaagaccggcaaacgttccacttcggcagccgccttggaagcacttcgtggtgctcacccgatcgtcgagttgattttgcagtatcgcgagctcagcaaactcaaatcaacctatcttgataggttacctcgtcttgttcatccacgtacgggtcgtttacacacccgcttcaatcaaacggcgacagccaccgggcgcttgtcgtcgagtgacccgaacctccagaatattccagtgcgcacgccgctgggccaacacattcgtaaagcgtttgttgcggaagaaggttggttattacttgcggccgattactcccagatcgaacttcgtgtattggcgcatctctctggcgacgagaatcttaaacgcgtgtttcgcgaaggcaaggatattcacactgaaaccgcagcctggatgttcggggtggacccagccttagtggaccccaagatgcgtcgtgccgccaagaccgtcaactttggcgtactctatggtatgtcagcacatcgtcttagtcaggaattgggcattgactacaaagaagctgaagcgtttatcgagcgctatttccaatcctttccgaaagttcgcgcgtggattgaacgtaccctcgaagaaggtcgcactcgcggctatgtggaaacgttattcgggcgtcgtcgctacgttccagatcttgcatctcgtgtccgctcagtgcgcgaagctgctgagcgtatggcctggaatatgcctgttcagggaacagcggcggacctcatgaagatcgccatggtgaaattgtttccgcgcttgaaacccttaggagcccaccttcttttacaggtgcatgatgaattggtcttggaagtacccgaggatcgcgcagaagaagccaaagcactcgtgaaagaggttatggaaaacgcgtatccgttagatgttccgttggaggtcgaagtgggtgtaggccgtgattggcttgaagcgaaacaagactaatga

SEQ ID NO: 652 - protein, 844 aa, synthetic construct
  REGION 1..844: note = DNA Polymerase Variant
MHHHHHHGGSGMLPLFDLEEPPKRVLLVDGHHLAYRTFYALSLTTSRGEPVQMVYGFARSLLKALKEDGQAVVVVFDAKAPSFRHEAYEAYKAGRAPTPEDFPRQLALVKRLVDLLGLVRLEAPGYEADDVLGTLAKKAEREGMEVCILTGDRDFFQLLSEKVSVLLPDGTLVTPKDVQEKYGVPPERWVDFRALTGDRSDNIPGVAGIGEKTALRLLAEWGSVENLLKNLDRVKPDSLRRKIEAHLEDLRLSLDLARIRTDLPLEVDFKALRRRTPDLEGLRAFLEELEFGSLLHEFGLLGGEKPREEAPWPPPEGAFVGFLLSRKEPMWAELLALAAAAEGRVHRATSPVEALADLKEARGFLAKDLAVLALREGVALDPTDDPLLVAYLLDPANTNPERVARRYGGEFTEDAAERALLSERLFQTLFPRLSEKLLWLYQEVERPLSVVLAHMEARGVRLDVPLLEALSFELEKELERLEGEVFRLAGHPFNLNSRDQLEKVLFDELGLTPVTRTEKTGKRSTSAAALEALRGAHPIVELILQYRELSKLKSTYLDRLPRLVHPRTGRLHTRFNQTATATGRLSSSDPNLQNIPVRTPLGQHIRKAFVAEEGWLLLAADYSQIELRVLAHLSGDENLKRVFREGKDIHTETAAWMFGVDPALVDPKMRRAAKTVNFGVLYGMSAHRLSQELGIDYKEAEAFIERYFQSFPKVRAWIERTLEEGRTRGYVETLFGRRRYVPDLASRVRSVREAAERMAWNMPVQGTAADLMKIAMVKLFPRLKPLGAHLLLQVHDELVLEVPEDRAEEAKALVKEVMENAYPLDVPLEVEVGVGRDWLEAKQD

SEQ ID NO: 653 - DNA, 2538 bp, synthetic construct
  misc_feature 1..2538: note = DNA Polymerase Variant
  source 1..2538: mol_type = other DNA
atgcaccatcatcatcatcatggcggtagcggcatgttaccgctgtttgatttggaagaaccaccaaaacgcgtgctgcttgttgacggccatcatctggcgtatcgtaccttctacgcactgagccttacgacctcacgtggtgagcctgtccagatggtgtatgggtttgctcgctccctgctgaaagccctgaaggaagatggtcaagccgtagtagtggttttcgatgcgaaagcaccgtcgtttcgtcacgaagcgtacgaggcctataaagctggccgcgcaccgaccccggaagactttccgcgtcagttagcgctcgtcaaacgcctcgtggatttgctgggattagttcgcttggaagctcctggctacgaggcggacgacgtgctcggtacactggccaagaaagcagaacgtgaaggcatggaggtctgcattcttaccggtgatcgcgatttcttccagctgctgtctgagaaagtgagcgttttgctgcccgatggcacgttagtaaccccgaaagatgtccaagagaaatatggagttccgccagaacgttgggtggactttcgcgcactgactggtgatcgttcagacaacatcccgggcgttgccgggattggtgaaaagacggcgctgcgcctgctggcagaatggggctcggtggaaaatctgctcaagaaccttgatcgtgtgaaacctgatagcttacgccgcaagatcgaagcccacctggaagacttgcgtctgagtctggatcttgcgcgtattcgcaccgatctgccgttggaagtagactttaaagctctgcgtcgtcgcacacccgatttagaggggttacgcgcgttcctcgaagaactggagtttggctccctgctgcatgaattcggtttgttgggcggagagaaaccgcgtgaagaagcaccatggccgccgcccgaaggtgcctttgtcggctttcttctgtcacgcaaagagccaatgtgggcggaactgttagctcttgcagccgccgcggaagggcgtgttcaccgcgcgacctctcctgtcgaggccctcgctgacctcaaagaagcacgtggtttcttggcgaaagatttagccgtgcttgcattacgcgaaggcgttgcgctcgatccgacggacgacccgcttttggtggcttatttgctcgatcctgcgaataccaacccggaacgtgtcgcccgtcgttacggcggcgagtttactgaagatgcggcagaacgcgcgttgcttagcgaacgcctcttccagacgttatttccacgtctttcggagaaattactctggctctatcaggaagtcgaacgtccattgagtcgcgtgcttgcccatatggaggctcgcggtgtgcgcttagatgttccgttgttagaagcactcagcttcaatttggagaaagaactggaacgtcttgaaggcgaagtctttcgtttagcggggcatcccttcaatctcaactctcgcgaccaattggagaaagtgctctttgatgaattaggtttaacccctgtcacgcgtacagagaagaccggcaaacgttccacttcggcagccgccttggaagcacttcgtggtgctcacccgatcgtcgagttgattttgcagtatcgcgagctcagcaaactcaaatcaacctatcttgataggttacctcgtcttgttcatccacgtacgggtcgtttacacacccgcttcaatcaaacggcgacagccaccgggcgcttgtcgtcgagtgacccgaacctccagaatattccagtgcgcacgccgctgggccaacacattcgtaaagcgtttgttgcggaagaaggttggttattacttgcggccgattactcccagatcgaacttcgtgtattggcgcatctctctggcgacgagaatcttaaacgcgtgtttcgcgaaggcaaggatattcacactgaaaccgcagcctggatgttcggggtggacccagccttagtggaccccaagatgcgtcgtgccgccaagaccgtcaactttggcgtactctatggtatgtcagcacatcgtcttagtcaggaattgggcattgactacaaagaagctgaagcgtttatcgagcgctatttccaatcctttccgaaagttcgcgcgtggattgaacgtaccctcgaagaaggtcgcactcgcggctatgtggaaacgttattcgggcgtcgtcgctacgttccagatcttgcatctcgtgtccgctcagtgcgcgaagctgctgagcgtatggcctggaatatgcctgttcagggaacagcggcggacctcatgaagatcgccatggtgaaattgtttccgcgcttgaaacccttaggagcccaccttcttttacaggtgcatgatgaattggtcttggaagtacccgaggatcgcgcagaagaagccaaagcactcgtgaaagaggttatggaaaacgcgtatccgttagatgttccgttggaggtcgaagtgggtgtaggccgtgattggcttgaagcgaaacaagactaatga

SEQ ID NO: 654 - protein, 844 aa, synthetic construct
  REGION 1..844: note = DNA Polymerase Variant
MHHHHHHGGSGMLPLFDLEEPPKRVLLVDGHHLAYRTFYALSLTTSRGEPVQMVYGFARSLLKALKEDGQAVVVVFDAKAPSFRHEAYEAYKAGRAPTPEDFPRQLALVKRLVDLLGLVRLEAPGYEADDVLGTLAKKAEREGMEVCILTGDRDFFQLLSEKVSVLLPDGTLVTPKDVQEKYGVPPERWVDFRALTGDRSDNIPGVAGIGEKTALRLLAEWGSVENLLKNLDRVKPDSLRRKIEAHLEDLRLSLDLARIRTDLPLEVDFKALRRRTPDLEGLRAFLEELEFGSLLHEFGLLGGEKPREEAPWPPPEGAFVGFLLSRKEPMWAELLALAAAAEGRVHRATSPVEALADLKEARGFLAKDLAVLALREGVALDPTDDPLLVAYLLDPANTNPERVARRYGGEFTEDAAERALLSERLFQTLFPRLSEKLLWLYQEVERPLSRVLAHMEARGVRLDVPLLEALSFNLEKELERLEGEVFRLAGHPFNLNSRDQLEKVLFDELGLTPVTRTEKTGKRSTSAAALEALRGAHPIVELILQYRELSKLKSTYLDRLPRLVHPRTGRLHTRFNQTATATGRLSSSDPNLQNIPVRTPLGQHIRKAFVAEEGWLLLAADYSQIELRVLAHLSGDENLKRVFREGKDIHTETAAWMFGVDPALVDPKMRRAAKTVNFGVLYGMSAHRLSQELGIDYKEAEAFIERYFQSFPKVRAWIERTLEEGRTRGYVETLFGRRRYVPDLASRVRSVREAAERMAWNMPVQGTAADLMKIAMVKLFPRLKPLGAHLLLQVHDELVLEVPEDRAEEAKALVKEVMENAYPLDVPLEVEVGVGRDWLEAKQD

SEQ ID NO: 655 - DNA, 2538 bp, synthetic construct
  misc_feature 1..2538: note = DNA Polymerase Variant
  source 1..2538: mol_type = other DNA
atgcaccatcatcatcatcatggcggtagcggcatgttaccgctgtttgatttggaagaagggccaaaacgcgtgctgcttgttgacggccatcatctggcgtatcgtaccttctacgcactgagccttacgacctcacgtggtgagcctgtccagatggtgtatgggtttgctcgctccctgctgaaagccctgaaggaagatggtcaagccgtagtagtggttttcgatgcgaaagcaccgtcgtttcgtcacgaagcgtacgaggcctataaagctggccgcgcaccgaccccggaagactttccgcgtcagttagcgctcgtcaaacgcctcgtggatttgctgggattagttcgcttggaagctcctggctacgaggcggacgacgtgctcggtacactggccaagaaagcagaacgtgaaggcatggaggtctgcattcttaccggtgatcgcgatttcttccagctgctgtctgagaaagtgagcgttttgctgcccgatggcacgttagtaaccccgaaagatgtccaagagaaatatggagttccgccagaacgttgggtggactttcgcgcactgactggtgatcgttcagacaacatcccgggcgttgccgggattggtgaaaagacggcgctgcgcctgctggcagaatggggctcggtggaaaatctgctcaagaaccttgatcgtgtgaaacctgatagcttacgccgcaagatcgaagcccacctggaagacttgcgtctgagtctggatcttgcgcgtattcgcaccgatctgccgttggaagtagactttaaagctctgcgtcgtcgcacacccgatttagaggggttacgcgcgttcctcgaagaactggagtttggctccctgctgcatgaattcggtttgttgggcggagagaaaccgcgtgaagaagcaccatggccgccgcccgaaggtgcctttgtcggctttcttctgtcacgcaaagagccaatgtgggcggaactgttagctcttgcagccgccgcggaagggcgtgttcaccgcgcgacctctcctgtcgaggccctcgctgacctcaaagaagcacgtggtttcttggcgaaagatttagccgtgcttgcattacgcgaaggcgttgcgctcgatccgacggacgacccgcttttggtggcttatttgctcgatcctgcgaataccaacccggaacgtgtcgcccgtcgttacggcggcgagtttactgaagatgcggcagaacgcgcgttgcttagcgaacgcctcttccagacgttatttccacgtctttcggagaaattactctggctctatcaggaagtcgaacgtccattgagtcgcgtgcttgcccatatggaggctcgcggtgtgcgcttagatgttccgttgttagaagcactcagcttcgagttggagaaagaactggaacgtcttgaaggcgaagtctttcgtttagcggggcatcccttcaatctcaactctcgcgaccaattggagaaagtgctctttgatgaattaggtttaacccctgtcacgcgtacagagaagaccggcaaacgttccacttcggcagccgccttggaagcacttcgtggtgctcacccgatcgtcgagttgattttgcagtatcgcgagctcagcaaactcaaatcaacctatcttgataggttacctcgtcttgttcatccacgtacgggtcgtttacacacccgcttcaatcaaacggcgacagccaccgggcgcttgtcgtcgagtgacccgaacctccagaatattccagtgcgcacgccgctgggccaacacattcgtaaagcgtttgttgcggaagaaggttggttattacttgcggccgattactcccagatcgaacttcgtgtattggcgcatctctctggcgacgagaatcttaaacgcgtgtttcgcgaaggcaaggatattcacactgaaaccgcagcctggatgttcggggtggacccagccttagtggaccccaagatgcgtcgtgccgccaagaccgtcaactttggcgtactctatggtatgtcagcacatcgtcttagtcaggaattgggcattgactacaaagaagctgaagcgtttatcgagcgctatttccaatcctttccgaaagttcgcgcgtggattgaacgtaccctcgaagaaggtcgcactcgcggctatgtggaaacgttattcgggcgtcgtcgctacgttccagatcttgcatctcgtgtccgctcagtgcgcgaagctgctgagcgtatggcctggaatatgcctgttcagggaacagcggcggacctcatgaagatcgccatggtgaaattgtttccgcgcttgaaacccttaggagcccaccttcttttacaggtgcatgatgaattggtcttggaagtacccgaggatcgcgcagaagaagccaaagcactcgtgaaagaggttatggaaaacgcgtatccgttagatgttccgttggaggtcgaagtgggtgtaggccgtgattggcttgaagcgaaacaagactaatga

SEQ ID NO: 656 - protein, 844 aa, synthetic construct
  REGION 1..844: note = DNA Polymerase Variant
MHHHHHHGGSGMLPLFDLEEGPKRVLLVDGHHLAYRTFYALSLTTSRGEPVQMVYGFARSLLKALKEDGQAVVVVFDAKAPSFRHEAYEAYKAGRAPTPEDFPRQLALVKRLVDLLGLVRLEAPGYEADDVLGTLAKKAEREGMEVCILTGDRDFFQLLSEKVSVLLPDGTLVTPKDVQEKYGVPPERWVDFRALTGDRSDNIPGVAGIGEKTALRLLAEWGSVENLLKNLDRVKPDSLRRKIEAHLEDLRLSLDLARIRTDLPLEVDFKALRRRTPDLEGLRAFLEELEFGSLLHEFGLLGGEKPREEAPWPPPEGAFVGFLLSRKEPMWAELLALAAAAEGRVHRATSPVEALADLKEARGFLAKDLAVLALREGVALDPTDDPLLVAYLLDPANTNPERVARRYGGEFTEDAAERALLSERLFQTLFPRLSEKLLWLYQEVERPLSRVLAHMEARGVRLDVPLLEALSFELEKELERLEGEVFRLAGHPFNLNSRDQLEKVLFDELGLTPVTRTEKTGKRSTSAAALEALRGAHPIVELILQYRELSKLKSTYLDRLPRLVHPRTGRLHTRFNQTATATGRLSSSDPNLQNIPVRTPLGQHIRKAFVAEEGWLLLAADYSQIELRVLAHLSGDENLKRVFREGKDIHTETAAWMFGVDPALVDPKMRRAAKTVNFGVLYGMSAHRLSQELGIDYKEAEAFIERYFQSFPKVRAWIERTLEEGRTRGYVETLFGRRRYVPDLASRVRSVREAAERMAWNMPVQGTAADLMKIAMVKLFPRLKPLGAHLLLQVHDELVLEVPEDRAEEAKALVKEVMENAYPLDVPLEVEVGVGRDWLEAKQD

SEQ ID NO: 657 - DNA, 2538 bp, synthetic construct
  misc_feature 1..2538: note = DNA Polymerase Variant
  source 1..2538: mol_type = other DNA
atgcaccatcatcatcatcatggcggtagcggcatgttaccgctgtttgatttggaagaaccaccaaaacgcgtgctgcttgttgacggccatcatctggcgtatcgtaccttctacgcactgagccttacgacctcacgtggtgagcctgtccagatggtgtatgggtttgctcgctccctgctgaaagccctgaaggaagatggtcaagccgtagtagtggttttcgatgcgaaagcaccgtcgtttcgtcacgaagcgtacgaggcctataaagctggccgcgcaccgaccccggaagactttccgcgtcagttagcgctcgtcaaacgcctcgtggatttgctgggattagttcgcttggaagctgcgggctacgaggcggacgacgtgctcggtacactggccaagaaagcagaacgtgaaggcatggaggtctgcattcttaccggtgatcgcgatttcttccagctgctgtctgagaaagtgagcgttttgctgcccgatggcacgttagtaaccccgaaagatgtccaagagaaatatggagttccgccagaacgttgggtggactttcgcgcactgactggtgatcgttcagacaacatcccgggcgttgccgggattggtgaaaagacggcgctgcgcctgctggcagaatggggctcggtggaaaatctgctcaagaaccttgatcgtgtgaaacctgatagcttacgccgcaagatcgaagcccacctggaagacttgcgtctgagtctggatcttgcgcgtattcgcaccgatctgccgttggaagtagactttaaagctctgcgtcgtcgcacacccgatttagaggggttacgcgcgttcctcgaagaactggagtttggctccctgctgcatgaattcggtttgttgggcggagagaaaccgcgtgaagaagcaccatggccgccgcccgaaggtgcctttgtcggctttcttctgtcacgcaaagagccaatgtgggcggaactgttagctcttgcagccgccgcggaagggcgtgttcaccgcgcgacctctcctgtcgaggccctcgctgacctcaaagaagcacgtggtttcttggcgaaagatttagccgtgcttgcattacgcgaaggcgttgcgctcgatccgacggacgacccgcttttggtggcttatttgctcgatcctgcgaataccaacccggaacgtgtcgcccgtcgttacggcggcgagtttactgaagatgcggcagaacgcgcgttgcttagcgaacgcctcttccagacgttatttccacgtctttcggagaaattactctggctctatcaggaagtcgaacgtccattgagtcgcgtgcttgcccatatggaggctcgcggtgtgcgcttagatgttccgttgttagaagcactcagcttcgagttggagaaagaactggaacgtcttgaaggcgaagtctttcgtttagcggggcatcccttcaatctcaactctcgcgaccaattggagaaagtgctctttgatgaattaggtttaacccctgtcacgcgtacagagaagaccggcaaacgttccacttcggcagccgccttggaagcacttcgtggtgctcacccgatcgtcgagttgattttgcagtatcgcgagctcagcaaactcaaatcaacctatcttgataggttacctcgtcttgttcatccacgtacgggtcgtttacacacccgcttcaatcaaacggcgacagccaccgggcgcttgtcgtcgagtgacccgaacctccagaatattccagtgcgcacgccgctgggccaacacattcgtaaagcgtttgttgcggaagaaggttggttattacttgcggccgattactcccagatcgaacttcgtgtattggcgcatctctctggcgacgagaatcttaaacgcgtgtttcgcgaaggcaaggatattcacactgaaaccgcagcctggatgttcggggtggacccagccttagtggaccccaagatgcgtcgtgccgccaagaccgtcaactttggcgtactctatggtatgtcagcacatcgtcttagtcaggaattgggcattgactacaaagaagctgaagcgtttatcgagcgctatttccaatcctttccgaaagttcgcgcgtggattgaacgtaccctcgaagaaggtcgcactcgcggctatgtggaaacgttattcgggcgtcgtcgctacgttccagatcttgcatctcgtgtccgctcagtgcgcgaagctgctgagcgtatggcctggaatatgcctgttcagggaacagcggcggacctcatgaagatcgccatggtgaaattgtttccgcgcttgaaacccttaggagcccaccttcttttacaggtgcatgatgaattggtcttggaagtacccgaggatcgcgcagaagaagccaaagcactcgtgaaagaggttatggaaaacgcgtatccgttagatgttccgttggaggtcgaagtgggtgtaggccgtgattggcttgaagcgaaacaagactaatga

SEQ ID NO: 658 - protein, 844 aa, synthetic construct
  REGION 1..844: note = DNA Polymerase Variant
MHHHHHHGGSGMLPLFDLEEPPKRVLLVDGHHLAYRTFYALSLTTSRGEPVQMVYGFARSLLKALKEDGQAVVVVFDAKAPSFRHEAYEAYKAGRAPTPEDFPRQLALVKRLVDLLGLVRLEAAGYEADDVLGTLAKKAEREGMEVCILTGDRDFFQLLSEKVSVLLPDGTLVTPKDVQEKYGVPPERWVDFRALTGDRSDNIPGVAGIGEKTALRLLAEWGSVENLLKNLDRVKPDSLRRKIEAHLEDLRLSLDLARIRTDLPLEVDFKALRRRTPDLEGLRAFLEELEFGSLLHEFGLLGGEKPREEAPWPPPEGAFVGFLLSRKEPMWAELLALAAAAEGRVHRATSPVEALADLKEARGFLAKDLAVLALREGVALDPTDDPLLVAYLLDPANTNPERVARRYGGEFTEDAAERALLSERLFQTLFPRLSEKLLWLYQEVERPLSRVLAHMEARGVRLDVPLLEALSFELEKELERLEGEVFRLAGHPFNLNSRDQLEKVLFDELGLTPVTRTEKTGKRSTSAAALEALRGAHPIVELILQYRELSKLKSTYLDRLPRLVHPRTGRLHTRFNQTATATGRLSSSDPNLQNIPVRTPLGQHIRKAFVAEEGWLLLAADYSQIELRVLAHLSGDENLKRVFREGKDIHTETAAWMFGVDPALVDPKMRRAAKTVNFGVLYGMSAHRLSQELGIDYKEAEAFIERYFQSFPKVRAWIERTLEEGRTRGYVETLFGRRRYVPDLASRVRSVREAAERMAWNMPVQGTAADLMKIAMVKLFPRLKPLGAHLLLQVHDELVLEVPEDRAEEAKALVKEVMENAYPLDVPLEVEVGVGRDWLEAKQD

SEQ ID NO: 659 - DNA, 2538 bp, synthetic construct
  misc_feature 1..2538: note = DNA Polymerase Variant
  source 1..2538: mol_type = other DNA
atgcaccatcatcatcatcatggcggtagcggcatgttaccgctgtttgatttggaagaaccaccaaaacgcgtgctgcttgttgacggccatcatctggcgtatcgtaccttctacgcactgagccttacgacctcacgtggtgagcctgtccagatggtgtatgggtttgctcgctccctgctgaaagccctgaaggaagatggtcaagccgtagtagtggttttcgatgcgaaagcaccgtcgtttcgtcacgaagcgtacgaggcctataaagctggccgcgcaccgaccccggaagactttccgcgtcagttagcgctcgtcaaacgcctcgtggatttgctgggattagttcgcttggaagctcctggctacgaggcggacgacgtgctcggtacactggccaagaaagcagaacgtgaaggcatggaggtctgcattcttaccggtgatcgcgatttcttccagctgctgtctgagaaagtgagcgttttgctgcccgatggcacgttagtaaccccgaaagatgtccaagagaaatatggagttccgccagaacgttgggtggactttcgcgcactgactggtgatcgttcagacaacatcccgggcgttgccgggattggtgaaaagacggcgctgcgcctgctggcagaatggggctcggtggaaaatctgctcaagaaccttgatcgtgtgaaacctgatagcttacgccgcaagatcgaagcccacctggaagacttgcgtctgagtctggatcttgcgcgtattcgcaccgatctgccgttggaagtagactttaaagctctgcgtcgtcgcacacccgatttagaggggttacgcgcgttcctcgaagaactggagtttggctccctgctgcatgaattcggtttgttgggcggagagaaaccgcgtgaagaagcaccatggccgccgcccgaaggtgcctttgtcggctttcttctgtcacgcaaagagccaatgtgggcggaactgttagctcttgcagccgccgcggaagggcgtgttcaccgcgcgacctctcctgtcgaggccctcgctgacctcaaagaagcacgtggtttcttggcgaaagatttagccgtgcttgcattacgcgaaggcgttgcgctcgatccgacggacgacccgcttttggtggcttatttgctcgatcctgcgaataccaacccggaacgtgtcgcccgtcgttacggcggcgagtttactgaagatgcggcagaacgcgcgttgcttagcgaacgcctcttccagacgttatttccacgtctttcggagaaattactctggctctatcaggaagtcgaacgtccattgagtcgcgtgcttgcccatatggaggctcgcggtgtgcgcttagatgttccgttgttagaagcactcagcttcgagttggagaaagaactggaacgtcttgaaggcgaagtctttcgtttagcggggcatcccttcaatctcaactctcgcgaccaattggagaaagtgctctttgatgaattaggtttaacccctgtcacgcgtacagagaagaccggcaaacgttccacttcggcagccgccttggaagcacttcgtggtgctcacccgatcgtcgagttgattttgcagtatcgcgagctcagcaaactcaaatcaacctatcttgataggttacctcgtcttgttcatccacgtacgggtcgtttacacacccgcttcaatcaaacggcgacagccaccgggcgcttgtcgtcgagtgacccgaacctccagaatattccagtgcgcacgccgctgggccaacacattcgtaaagcgtttgttgcggaaaggggttggttattacttgcggccgattactcccagatcgaacttcgtgtattggcgcatctctctggcgacgagaatcttaaacgcgtgtttcgcgaaggcaaggatattcacactgaaaccgcagcctggatgttcggggtggacccagccttagtggaccccaagatgcgtcgtgccgccaagaccgtcaactttggcgtactctatggtatgtcagcacatcgtcttagtcaggaattgggcattgactacaaagaagctgaagcgtttatcgagcgctatttccaatcctttccgaaagttcgcgcgtggattgaacgtaccctcgaagaaggtcgcactcgcggctatgtggaaacgttattcgggcgtcgtcgctacgttccagatcttgcatctcgtgtccgctcagtgcgcgaagctgctgagcgtatggcctggaatatgcctgttcagggaacagcggcggacctcatgaagatcgccatggtgaaattgtttccgcgcttgaaacccttaggagcccaccttcttttacaggtgcatgatgaattggtcttggaagtacccgaggatcgcgcagaagaagccaaagcactcgtgaaagaggttatggaaaacgcgtatccgttagatgttccgttggaggtcgaagtgggtgtaggccgtgattggcttgaagcgaaacaagactaatga

SEQ ID NO: 660 - protein, 844 aa, synthetic construct
  REGION 1..844: note = DNA Polymerase Variant
MHHHHHHGGSGMLPLFDLEEPPKRVLLVDGHHLAYRTFYALSLTTSRGEPVQMVYGFARSLLKALKEDGQAVVVVFDAKAPSFRHEAYEAYKAGRAPTPEDFPRQLALVKRLVDLLGLVRLEAPGYEADDVLGTLAKKAEREGMEVCILTGDRDFFQLLSEKVSVLLPDGTLVTPKDVQEKYGVPPERWVDFRALTGDRSDNIPGVAGIGEKTALRLLAEWGSVENLLKNLDRVKPDSLRRKIEAHLEDLRLSLDLARIRTDLPLEVDFKALRRRTPDLEGLRAFLEELEFGSLLHEFGLLGGEKPREEAPWPPPEGAFVGFLLSRKEPMWAELLALAAAAEGRVHRATSPVEALADLKEARGFLAKDLAVLALREGVALDPTDDPLLVAYLLDPANTNPERVARRYGGEFTEDAAERALLSERLFQTLFPRLSEKLLWLYQEVERPLSRVLAHMEARGVRLDVPLLEALSFELEKELERLEGEVFRLAGHPFNLNSRDQLEKVLFDELGLTPVTRTEKTGKRSTSAAALEALRGAHPIVELILQYRELSKLKSTYLDRLPRLVHPRTGRLHTRFNQTATATGRLSSSDPNLQNIPVRTPLGQHIRKAFVAERGWLLLAADYSQIELRVLAHLSGDENLKRVFREGKDIHTETAAWMFGVDPALVDPKMRRAAKTVNFGVLYGMSAHRLSQELGIDYKEAEAFIERYFQSFPKVRAWIERTLEEGRTRGYVETLFGRRRYVPDLASRVRSVREAAERMAWNMPVQGTAADLMKIAMVKLFPRLKPLGAHLLLQVHDELVLEVPEDRAEEAKALVKEVMENAYPLDVPLEVEVGVGRDWLEAKQD

SEQ ID NO: 661 - DNA, 2538 bp, synthetic construct
  misc_feature 1..2538: note = DNA Polymerase Variant
  source 1..2538: mol_type = other DNA
atgcaccatcatcatcatcatggcggtagcggcatgttaccgctgtttgatttggaagaaccaccaaaacgcgtgctgcttgttgacggccatcatctggcgtatcgtaccttctacgcactgagccttacgacctcacgtggtgagcctgtccagatggtgtatgggtttgctcgctccctgctgaaagccctgaaggaagatggtcaagccgtagtagtggttttcgatgcgaaagcaccgtcgtttcgtcacgaagcgtacgaggcctataaagctggccgcgcaccgaccccggaagactttccgcgtcagttagcgctcgtcaaacgcctcgtggatttgctgggattagttcgcttggaagctcctggctacgaggcggacgacgtgctcggtacactggccaagaaagcagaacgtgaaggcatggaggtctgcattcttaccggtgatcgcgatttcttccagctgctgtctgagaaagtgagcgttttgctgcccgatggcacgttagtaaccccgaaagatgtccaagagaaatatggagttccgccagaacgttgggtggactttcgcgcactgactggtgatcgttcagacaacatcccgggcgttgccgggattggtgaaaagacggcgctgcgcctgctggcagaatggggctcggtggaaaatctgctcaagaaccttgatcgtgtgaaacctgatagcttacgccgcaagatcgaagcccacctggaagacttgcgtctgagtctggatcttgcgcgtattcgcaccgatctgccgttggaagtagactttaaagctctgcgtcgtcgcacacccgatttagaggggttacgcgcgttcctcgaagaactggagtttggctccctgctgcatgaattcggtttgttgggcggagagaaaccgcgtgaagaagcaccatggccgccgcccgaaggtgcctttgtcggctttcttctgtcacgcaaagagccaatgtgggcggaactgttagctcttgcagccgccgcggaagggcgtgttcaccgcgcgacctctcctgtcgaggccctcgctgacctcaaagaagcacgtggtttcttggcgaaagatttagccgtgcttgcattacgcgaaggcgttgcgctcgatccgacggacgacccgcttttggtggcttatttgctcgatcctgcgaataccaacccggaacgtgtcgcccgtcgttacggcggcgagtttactgaagatgcggcagaacgcgcgttgcttagcgaacgcctcttccagacgttatttccacgtctttcggagaaattactctggctctatcaggaagtcgaacgtccattgagtcgcgtgcttgcccatatggaggctcgcggtgtgcgcttagatgttccgttgttagaagcactcagcttcgagttggagaaagaactggaacgtcttgaaggcgaagtctttcgtttagcggggcatcccttcaatctcaactctcgcgaccaattggagaaagtgctctttgatgaattaggtttaacccctgtcacgcgtacagagaagaccggcaaacgttccacttcggcagccgccttggaagcacttcgtggtgctcacccgatcgtcgagttgattttgcagtatcgcgagctcagcaaactcaaatcaacctatcttgataggttacctcgtcttgttcatccacgtacgggtcgtttacacacccgcttcaatcaaacggcgacagccaccgggcgcttgtcgtcgagtgacccgaacctccagaatattccagtgcgcacgccgctgggccaacacattcgtaaagcgtttgttgcggaagaaggttggttattacttgcggccgattactcccagatcgaacttcgtgtattggcgcatctctctggcgacgagaatcttaaacgcgtgtttcgcgaaggcaaggatattcacactgaaaccgcagcccagatgttcggggtggacccagccttagtggaccccaagatgcgtcgtgccgccaagaccgtcaactttggcgtactctatggtatgtcagcacatcgtcttagtcaggaattgggcattgactacaaagaagctgaagcgtttatcgagcgctatttccaatcctttccgaaagttcgcgcgtggattgaacgtaccctcgaagaaggtcgcactcgcggctatgtggaaacgttattcgggcgtcgtcgctacgttccagatcttgcatctcgtgtccgctcagtgcgcgaagctgctgagcgtatggcctggaatatgcctgttcagggaacagcggcggacctcatgaagatcgccatggtgaaattgtttccgcgcttgaaacccttaggagcccaccttcttttacaggtgcatgatgaattggtcttggaagtacccgaggatcgcgcagaagaagccaaagcactcgtgaaagaggttatggaaaacgcgtatccgttagatgttccgttggaggtcgaagtgggtgtaggccgtgattggcttgaagcgaaacaagactaatga

SEQ ID NO: 662 - protein, 844 aa, synthetic construct
  REGION 1..844: note = DNA Polymerase Variant
MHHHHHHGGSGMLPLFDLEEPPKRVLLVDGHHLAYRTFYALSLTTSRGEPVQMVYGFARSLLKALKEDGQAVVVVFDAKAPSFRHEAYEAYKAGRAPTPEDFPRQLALVKRLVDLLGLVRLEAPGYEADDVLGTLAKKAEREGMEVCILTGDRDFFQLLSEKVSVLLPDGTLVTPKDVQEKYGVPPERWVDFRALTGDRSDNIPGVAGIGEKTALRLLAEWGSVENLLKNLDRVKPDSLRRKIEAHLEDLRLSLDLARIRTDLPLEVDFKALRRRTPDLEGLRAFLEELEFGSLLHEFGLLGGEKPREEAPWPPPEGAFVGFLLSRKEPMWAELLALAAAAEGRVHRATSPVEALADLKEARGFLAKDLAVLALREGVALDPTDDPLLVAYLLDPANTNPERVARRYGGEFTEDAAERALLSERLFQTLFPRLSEKLLWLYQEVERPLSRVLAHMEARGVRLDVPLLEALSFELEKELERLEGEVFRLAGHPFNLNSRDQLEKVLFDELGLTPVTRTEKTGKRSTSAAALEALRGAHPIVELILQYRELSKLKSTYLDRLPRLVHPRTGRLHTRFNQTATATGRLSSSDPNLQNIPVRTPLGQHIRKAFVAEEGWLLLAADYSQIELRVLAHLSGDENLKRVFREGKDIHTETAAQMFGVDPALVDPKMRRAAKTVNFGVLYGMSAHRLSQELGIDYKEAEAFIERYFQSFPKVRAWIERTLEEGRTRGYVETLFGRRRYVPDLASRVRSVREAAERMAWNMPVQGTAADLMKIAMVKLFPRLKPLGAHLLLQVHDELVLEVPEDRAEEAKALVKEVMENAYPLDVPLEVEVGVGRDWLEAKQD

SEQ ID NO: 663 - DNA, 2538 bp, synthetic construct
  misc_feature 1..2538: note = DNA Polymerase Variant
  source 1..2538: mol_type = other DNA
atgcaccatcatcatcatcatggcggtagcggcatgttaccgctgtttgatttggaagaaccaccaaaacgcgtgctgcttgttgacggccatcatctggcgtatcgtaccttctacgcactgagccttacgacctcacgtggtgagcctgtccagatggtgtatgggtttgctcgctccctgctgaaagccctgaaggaagatggtcaagccgtagtagtggttttcgatgcgaaagcaccgtcgtttcgtcacgaagcgtacgaggcctataaagctggccgcgcaccgaccccggaagactttccgcgtcagttagcgctcgtcaaacgcctcgtggatttgctgggattagttcgcttggaagctcctggctacgaggcggacgacgtgctcggtacactggccaagaaagcagaacgtgaaggcatggaggtctgcattcttaccggtgatcgcgatttcttccagctgctgtctgagaaagtgagcgttttgctgcccgatggcacgttagtaaccccgaaagatgtccaagagaaatatggagttccgccagaacgttgggtggactttcgcgcactgactggtgatcgttcagacaacatcccgggcgttgccgggattggtgaaaagacggcgctgcgcctgctggcagaatggggctcggtggaaaatctgctcaagaaccttgatcgtgtgaaacctgatagcttacgccgcaagatcgaagcccacctggaagacttgcgtctgagtctggatcttgcgcgtattcgcaccgatctgccgttggaagtagactttaaagctctgcgtcgtcgcacacccgatttagaggggttacgcgcgttcctcgaagaactggagtttggctccctgctgcatgaattcggtttgttgggcggagagaaaccgcgtgaagaagcaccatggccgccgcccgaaggtgcctttgtcggctttcttctgtcacgcaaagagccaatgtgggcggaactgttagctcttgcagccgccgcggaagggcgtgttcaccgcgcgacctctcctgtcgaggccctcgctgacctcaaagaagcacgtggtttcttggcgaaagatttagccgtgcttgcattacgcgaaggcgttgcgctcgatccgacggacgacccgcttttggtggcttatttgctcgatcctgcgaataccaacccggaacgtgtcgcccgtcgttacggcggcgagtttactgaagatgcggcagaacgcgcgttgcttagcgaacgcctcttccagacgttagggccacgtctttcggagaaattactctggctctatcaggaagtcgaacgtccattgagtcgcgtgcttgcccatatggaggctcgcggtgtgcgcttagatgttccgttgttagaagcactcagcttcgagttggagaaagaactggaacgtcttgaaggcgaagtctttcgtttagcggggcatcccttcaatctcaactctcgcgaccaattggagaaagtgctctttgatgaattaggtttaacccctgtcacgcgtacagagaagaccggcaaacgttccacttcggcagccgccttggaagcacttcgtggtgctcacccgatcgtcgagttgattttgcagtatcgcgagctcagcaaactcaaatcaacctatcttgataggttacctcgtcttgttcatccacgtacgggtcgtttacacacccgcttcaatcaaacggcgacagccaccgggcgcttgtcgtcgagtgacccgaacctccagaatattccagtgcgcacgccgctgggccaacacattcgtaaagcgtttgttgcggaagaaggttggttattacttgcggccgattactcccagatcgaacttcgtgtattggcgcatctctctggcgacgagaatcttaaacgcgtgtttcgcgaaggcaaggatattcacactgaaaccgcagcctggatgttcggggtggacccagccttagtggaccccaagatgcgtcgtgccgccaagaccgtcaactttggcgtactctatggtatgtcagcacatcgtcttagtcaggaattgggcattgactacaaagaagctgaagcgtttatcgagcgctatttccaatcctttccgaaagttcgcgcgtggattgaacgtaccctcgaagaaggtcgcactcgcggctatgtggaaacgttattcgggcgtcgtcgctacgttccagatcttgcatctcgtgtccgctcagtgcgcgaagctgctgagcgtatggcctggaatatgcctgttcagggaacagcggcggacctcatgaagatcgccatggtgaaattgtttccgcgcttgaaacccttaggagcccaccttcttttacaggtgcatgatgaattggtcttggaagtacccgaggatcgcgcagaagaagccaaagcactcgtgaaagaggttatggaaaacgcgtatccgttagatgttccgttggaggtcgaagtgggtgtaggccgtgattggcttgaagcgaaacaagactaatga

SEQ ID NO: 664 - protein, 844 aa, synthetic construct
  REGION 1..844: note = DNA Polymerase Variant
MHHHHHHGGSGMLPLFDLEEPPKRVLLVDGHHLAYRTFYALSLTTSRGEPVQMVYGFARSLLKALKEDGQAVVVVFDAKAPSFRHEAYEAYKAGRAPTPEDFPRQLALVKRLVDLLGLVRLEAPGYEADDVLGTLAKKAEREGMEVCILTGDRDFFQLLSEKVSVLLPDGTLVTPKDVQEKYGVPPERWVDFRALTGDRSDNIPGVAGIGEKTALRLLAEWGSVENLLKNLDRVKPDSLRRKIEAHLEDLRLSLDLARIRTDLPLEVDFKALRRRTPDLEGLRAFLEELEFGSLLHEFGLLGGEKPREEAPWPPPEGAFVGFLLSRKEPMWAELLALAAAAEGRVHRATSPVEALADLKEARGFLAKDLAVLALREGVALDPTDDPLLVAYLLDPANTNPERVARRYGGEFTEDAAERALLSERLFQTLGPRLSEKLLWLYQEVERPLSRVLAHMEARGVRLDVPLLEALSFELEKELERLEGEVFRLAGHPFNLNSRDQLEKVLFDELGLTPVTRTEKTGKRSTSAAALEALRGAHPIVELILQYRELSKLKSTYLDRLPRLVHPRTGRLHTRFNQTATATGRLSSSDPNLQNIPVRTPLGQHIRKAFVAEEGWLLLAADYSQIELRVLAHLSGDENLKRVFREGKDIHTETAAWMFGVDPALVDPKMRRAAKTVNFGVLYGMSAHRLSQELGIDYKEAEAFIERYFQSFPKVRAWIERTLEEGRTRGYVETLFGRRRYVPDLASRVRSVREAAERMAWNMPVQGTAADLMKIAMVKLFPRLKPLGAHLLLQVHDELVLEVPEDRAEEAKALVKEVMENAYPLDVPLEVEVGVGRDWLEAKQD

SEQ ID NO: 665 - DNA, 2538 bp, synthetic construct
  misc_feature 1..2538: note = DNA Polymerase Variant
  source 1..2538: mol_type = other DNA
atgcaccatcatcatcatcatggcggtagcggcatgttaccgctgtttgatttggaagaaccaccaaaacgcgtgctgcttgttgacggccatcatctggcgtatcgtaccttctacgcactgagccttacgacctcacgtggtgagcctgtccagatggtgtatgggtttgctcgctccctgctgaaagccctgaaggaagatggtcaagccgtagtagtggttttcgatgcgaaagcaccgtcgtttcgtcacgaagcgtacgaggcctataaagctggccgcgcaccgaccccggaagactttccgcgtcagttagcgctcgtcaaacgcctcgtggatttgctgggattagttcgcttggaagctcctggctacgaggcggacgacgtgctcggtacactggccaagaaagcagaacgtgaaggcatggaggtctgcattcttaccggtgatcgcgatttcttccagctgctgtctgagaaagtgagcgttttgctgcccgatggcacgttagtaaccccgaaagatgtccaagagaaatatggagttccgccagaacgttgggtggactttcgcgcactgactggtgatcgttcagacaacatcccgggcgttgccgggattggtgaaaagacggcgctgcgcctgctggcagaatggggctcggtggaaaatctgctcaagaaccttgatcgtgtgaaacctgatagcttacgccgcaagatcgaagcccacctggaagacttgcgtctgagtctggatcttgcgcgtattcgcaccgatctgccgttggaagtagactttaaagctctgcgtcgtcgcacacccgatttagaggggttacgcgcgttcctcgaagaactggagtttggctccctgctgcatgaattcggtttgttgggcggagagaaaccgcgtgaagaagcaccatggccgccgcccgaaggtgcctttgtcggctttcttctgtcacgcaaagagccaatgtgggcggaactgttagctcttgcagccgccgcggaagggcgtgttcaccgcgcgacctctcctgtcgaggccctcgctgacctcaaagaagcacgtggtttcttggcgaaagatttagccgtgcttgcattacgcgaaggcgttgcgctcgatccgacggacgacccgcttttggtggcttatttgctcgatcctgcgaataccaacccggaacgtgtcgcccgtcgttacggcggcgagtttactactgatgcggcagaacgcgcgttgcttagcgaacgcctcttccagacgttatttccacgtctttcggagaaattactctggctctatcaggaagtcgaacgtccattgagtcgcgtgcttgcccatatggaggctcgcggtgtgcgcttagatgttccgttgttagaagcactcagcttcgagttggagaaagaactggaacgtcttgaaggcgaagtctttcgtttagcggggcatcccttcaatctcaactctcgcgaccaattggagaaagtgctctttgatgaattaggtttaacccctgtcacgcgtacagagaagaccggcaaacgttccacttcggcagccgccttggaagcacttcgtggtgctcacccgatcgtcgagttgattttgcagtatcgcgagctcagcaaactcaaatcaacctatcttgataggttacctcgtcttgttcatccacgtacgggtcgtttacacacccgcttcaatcaaacggcgacagccaccgggcgcttgtcgtcgagtgacccgaacctccagaatattccagtgcgcacgccgctgggccaacacattcgtaaagcgtttgttgcggaagaaggttggttattacttgcggccgattactcccagatcgaacttcgtgtattggcgcatctctctggcgacgagaatcttaaacgcgtgtttcgcgaaggcaaggatattcacactgaaaccgcagcctggatgttcggggtggacccagccttagtggaccccaagatgcgtcgtgccgccaagaccgtcaactttggcgtactctatggtatgtcagcacatcgtcttagtcaggaattgggcattgactacaaagaagctgaagcgtttatcgagcgctatttccaatcctttccgaaagttcgcgcgtggattgaacgtaccctcgaagaaggtcgcactcgcggctatgtggaaacgttattcgggcgtcgtcgctacgttccagatcttgcatctcgtgtccgctcagtgcgcgaagctgctgagcgtatggcctggaatatgcctgttcagggaacagcggcggacctcatgaagatcgccatggtgaaattgtttccgcgcttgaaacccttaggagcccaccttcttttacaggtgcatgatgaattggtcttggaagtacccgaggatcgcgcagaagaagccaaagcactcgtgaaagaggttatggaaaacgcgtatccgttagatgttccgttggaggtcgaagtgggtgtaggccgtgattggcttgaagcgaaacaagactaatga

SEQ ID NO: 666 - protein, 844 aa, synthetic construct
  REGION 1..844: note = DNA Polymerase Variant
MHHHHHHGGSGMLPLFDLEEPPKRVLLVDGHHLAYRTFYALSLTTSRGEPVQMVYGFARSLLKALKEDGQAVVVVFDAKAPSFRHEAYEAYKAGRAPTPEDFPRQLALVKRLVDLLGLVRLEAPGYEADDVLGTLAKKAEREGMEVCILTGDRDFFQLLSEKVSVLLPDGTLVTPKDVQEKYGVPPERWVDFRALTGDRSDNIPGVAGIGEKTALRLLAEWGSVENLLKNLDRVKPDSLRRKIEAHLEDLRLSLDLARIRTDLPLEVDFKALRRRTPDLEGLRAFLEELEFGSLLHEFGLLGGEKPREEAPWPPPEGAFVGFLLSRKEPMWAELLALAAAAEGRVHRATSPVEALADLKEARGFLAKDLAVLALREGVALDPTDDPLLVAYLLDPANTNPERVARRYGGEFTTDAAERALLSERLFQTLFPRLSEKLLWLYQEVERPLSRVLAHMEARGVRLDVPLLEALSFELEKELERLEGEVFRLAGHPFNLNSRDQLEKVLFDELGLTPVTRTEKTGKRSTSAAALEALRGAHPIVELILQYRELSKLKSTYLDRLPRLVHPRTGRLHTRFNQTATATGRLSSSDPNLQNIPVRTPLGQHIRKAFVAEEGWLLLAADYSQIELRVLAHLSGDENLKRVFREGKDIHTETAAWMFGVDPALVDPKMRRAAKTVNFGVLYGMSAHRLSQELGIDYKEAEAFIERYFQSFPKVRAWIERTLEEGRTRGYVETLFGRRRYVPDLASRVRSVREAAERMAWNMPVQGTAADLMKIAMVKLFPRLKPLGAHLLLQVHDELVLEVPEDRAEEAKALVKEVMENAYPLDVPLEVEVGVGRDWLEAKQD

SEQ ID NO: 667 - DNA, 2538 bp, synthetic construct
  misc_feature 1..2538: note = DNA Polymerase Variant
  source 1..2538: mol_type = other DNA
atgcaccatcatcatcatcatggcggtagcggcatgttaccgctgtttgatttggaagaaccaccaaaacgcgtgctgcttgttgacggccatcatctggcgtatcgtaccttctacgcactgagccttacgacctcacgtggtgagcctgtccagatggtgtatgggtttgctcgctccctgctgaaagccctgaaggaagatggtcaagccgtagtagtggttttcgatgcgaaagcaccgtcgtttcgtcacgaagcgtacgaggcctataaagctggccgcgcaccgaccccggaagactttccgcgtcagttagcgctcgtcaaacgcctcgtggatttgctgggattagttcgcttggaagctcctggctacgaggcggacgacgtgctcggtacactggccaagaaagcagaacgtgaaggcatggaggtctgcattcttaccggtgatcgcgatttcttccagctgctgtctgagaaagtgagcgttttgctgcccgatggcacgttagtaaccccgaaagatgtccaagagaaatatggagttccgccagaacgttgggtggactttcgcgcactgactggtgatcgttcagacaacatcccgggcgttgccgggattggtgaaaagacggcgctgcgcctgctggcagaatggggctcggtggaaaatctgctcaagaaccttgatctggtgaaacctgatagcttacgccgcaagatcgaagcccacctggaagacttgcgtctgagtctggatcttgcgcgtattcgcaccgatctgccgttggaagtagactttaaagctctgcgtcgtcgcacacccgatttagaggggttacgcgcgttcctcgaagaactggagtttggctccctgctgcatgaattcggtttgttgggcggagagaaaccgcgtgaagaagcaccatggccgccgcccgaaggtgcctttgtcggctttcttctgtcacgcaaagagccaatgtgggcggaactgttagctcttgcagccgccgcggaagggcgtgttcaccgcgcgacctctcctgtcgaggccctcgctgacctcaaagaagcacgtggtttcttggcgaaagatttagccgtgcttgcattacgcgaaggcgttgcgctcgatccgacggacgacccgcttttggtggcttatttgctcgatcctgcgaataccaacccggaacgtgtcgcccgtcgttacggcggcgagtttactgaagatgcggcagaacgcgcgttgcttagcgaacgcctcttccagacgttatttccacgtctttcggagaaattactctggctctatcaggaagtcgaacgtccattgagtcgcgtgcttgcccatatggaggctcgcggtgtgcgcttagatgttccgttgttagaagcactcagcttcgagttggagaaagaactggaacgtcttgaaggcgaagtctttcgtttagcggggcatcccttcaatctcaactctcgcgaccaattggagaaagtgctctttgatgaattaggtttaacccctgtcacgcgtacagagaagaccggcaaacgttccacttcggcagccgccttggaagcacttcgtggtgctcacccgatcgtcgagttgattttgcagtatcgcgagctcagcaaactcaaatcaacctatcttgataggttacctcgtcttgttcatccacgtacgggtcgtttacacacccgcttcaatcaaacggcgacagccaccgggcgcttgtcgtcgagtgacccgaacctccagaatattccagtgcgcacgccgctgggccaacacattcgtaaagcgtttgttgcggaagaaggttggttattacttgcggccgattactcccagatcgaacttcgtgtattggcgcatctctctggcgacgagaatcttaaacgcgtgtttcgcgaaggcaaggatattcacactgaaaccgcagcctggatgttcggggtggacccagccttagtggaccccaagatgcgtcgtgccgccaagaccgtcaactttggcgtactctatggtatgtcagcacatcgtcttagtcaggaattgggcattgactacaaagaagctgaagcgtttatcgagcgctatttccaatcctttccgaaagttcgcgcgtggattgaacgtaccctcgaagaaggtcgcactcgcggctatgtggaaacgttattcgggcgtcgtcgctacgttccagatcttgcatctcgtgtccgctcagtgcgcgaagctgctgagcgtatggcctggaatatgcctgttcagggaacagcggcggacctcatgaagatcgccatggtgaaattgtttccgcgcttgaaacccttaggagcccaccttcttttacaggtgcatgatgaattggtcttggaagtacccgaggatcgcgcagaagaagccaaagcactcgtgaaagaggttatggaaaacgcgtatccgttagatgttccgttggaggtcgaagtgggtgtaggccgtgattggcttgaagcgaaacaagactaatga

SEQ ID NO: 668 - protein, 844 aa, synthetic construct
  REGION 1..844: note = DNA Polymerase Variant
MHHHHHHGGSGMLPLFDLEEPPKRVLLVDGHHLAYRTFYALSLTTSRGEPVQMVYGFARSLLKALKEDGQAVVVVFDAKAPSFRHEAYEAYKAGRAPTPEDFPRQLALVKRLVDLLGLVRLEAPGYEADDVLGTLAKKAEREGMEVCILTGDRDFFQLLSEKVSVLLPDGTLVTPKDVQEKYGVPPERWVDFRALTGDRSDNIPGVAGIGEKTALRLLAEWGSVENLLKNLDLVKPDSLRRKIEAHLEDLRLSLDLARIRTDLPLEVDFKALRRRTPDLEGLRAFLEELEFGSLLHEFGLLGGEKPREEAPWPPPEGAFVGFLLSRKEPMWAELLALAAAAEGRVHRATSPVEALADLKEARGFLAKDLAVLALREGVALDPTDDPLLVAYLLDPANTNPERVARRYGGEFTEDAAERALLSERLFQTLFPRLSEKLLWLYQEVERPLSRVLAHMEARGVRLDVPLLEALSFELEKELERLEGEVFRLAGHPFNLNSRDQLEKVLFDELGLTPVTRTEKTGKRSTSAAALEALRGAHPIVELILQYRELSKLKSTYLDRLPRLVHPRTGRLHTRFNQTATATGRLSSSDPNLQNIPVRTPLGQHIRKAFVAEEGWLLLAADYSQIELRVLAHLSGDENLKRVFREGKDIHTETAAWMFGVDPALVDPKMRRAAKTVNFGVLYGMSAHRLSQELGIDYKEAEAFIERYFQSFPKVRAWIERTLEEGRTRGYVETLFGRRRYVPDLASRVRSVREAAERMAWNMPVQGTAADLMKIAMVKLFPRLKPLGAHLLLQVHDELVLEVPEDRAEEAKALVKEVMENAYPLDVPLEVEVGVGRDWLEAKQD

SEQ ID NO: 669 - DNA, 2538 bp, synthetic construct
  misc_feature 1..2538: note = DNA Polymerase Variant
  source 1..2538: mol_type = other DNA
atgcaccatcatcatcatcatggcggtagcggcatgttaccgctgtttgatttggaagaaccaccaaaacgcgtgctgcttgttgacggccatcatctggcgtatcgtaccttctacgcactgagccttacgacctcacgtggtgagcctgtccagatggtgtatgggtttgctcgctccctgctgaaagccctgagggaagatggtcaagccgtagtagtggttttcgatgcgaaagcaccgtcgtttcgtcacgaagcgtacgaggcctataaagctggccgcgcaccgaccccggaagactttccgcgtcagttagcgctcgtcaaacgcctcgtggatttgctgggattagttcgcttggaagctcctggctacgaggcggacgacgtgctcggtacactggccaagaaagcagaacgtgaaggcatggaggtctgcattcttaccggtgatcgcgatttcttccagctgctgtctgagaaagtgagcgttttgctgcccgatggcacgttagtaaccccgaaagatgtccaagagaaatatggagttccgccagaacgttgggtggactttcgcgcactgactggtgatcgttcagacaacatcccgggcgttgccgggattggtgaaaagacggcgctgcgcctgctggcagaatggggctcggtggaaaatctgctcaagaaccttgatcgtgtgaaacctgatagcttacgccgcaagatcgaagcccacctggaagacttgcgtctgagtctggatcttgcgcgtattcgcaccgatctgccgttggaagtagactttaaagctctgcgtcgtcgcacacccgatttagaggggttacgcgcgttcctcgaagaactggagtttggctccctgctgcatgaattcggtttgttgggcggagagaaaccgcgtgaagaagcaccatggccgccgcccgaaggtgcctttgtcggctttcttctgtcacgcaaagagccaatgtgggcggaactgttagctcttgcagccgccgcggaagggcgtgttcaccgcgcgacctctcctgtcgaggccctcgctgacctcaaagaagcacgtggtttcttggcgaaagatttagccgtgcttgcattacgcgaaggcgttgcgctcgatccgacggacgacccgcttttggtggcttatttgctcgatcctgcgaataccaacccggaacgtgtcgcccgtcgttacggcggcgagtttactgaagatgcggcagaacgcgcgttgcttagcgaacgcctcttccagacgttatttccacgtctttcggagaaattactctggctctatcaggaagtcgaacgtccattgagtcgcgtgcttgcccatatggaggctcgcggtgtgcgcttagatgttccgttgttagaagcactcagcttcgagttggagaaagaactggaacgtcttgaaggcgaagtctttcgtttagcggggcatcccttcaatctcaactctcgcgaccaattggagaaagtgctctttgatgaattaggtttaacccctgtcacgcgtacagagaagaccggcaaacgttccacttcggcagccgccttggaagcacttcgtggtgctcacccgatcgtcgagttgattttgcagtatcgcgagctcagcaaactcaaatcaacctatcttgataggttacctcgtcttgttcatccacgtacgggtcgtttacacacccgcttcaatcaaacggcgacagccaccgggcgcttgtcgtcgagtgacccgaacctccagaatattccagtgcgcacgccgctgggccaacacattcgtaaagcgtttgttgcggaagaaggttggttattacttgcggccgattactcccagatcgaacttcgtgtattggcgcatctctctggcgacgagaatcttaaacgcgtgtttcgcgaaggcaaggatattcacactgaaaccgcagcctggatgttcggggtggacccagccttagtggaccccaagatgcgtcgtgccgccaagaccgtcaactttggcgtactctatggtatgtcagcacatcgtcttagtcaggaattgggcattgactacaaagaagctgaagcgtttatcgagcgctatttccaatcctttccgaaagttcgcgcgtggattgaacgtaccctcgaagaaggtcgcactcgcggctatgtggaaacgttattcgggcgtcgtcgctacgttccagatcttgcatctcgtgtccgctcagtgcgcgaagctgctgagcgtatggcctggaatatgcctgttcagggaacagcggcggacctcatgaagatcgccatggtgaaattgtttccgcgcttgaaacccttaggagcccaccttcttttacaggtgcatgatgaattggtcttggaagtacccgaggatcgcgcagaagaagccaaagcactcgtgaaagaggttatggaaaacgcgtatccgttagatgttccgttggaggtcgaagtgggtgtaggccgtgattggcttgaagcgaaacaagactaatga

SEQ ID NO: 670 - protein, 844 aa, synthetic construct
  REGION 1..844: note = DNA Polymerase Variant
MHHHHHHGGSGMLPLFDLEEPPKRVLLVDGHHLAYRTFYALSLTTSRGEPVQMVYGFARSLLKALREDGQAVVVVFDAKAPSFRHEAYEAYKAGRAPTPEDFPRQLALVKRLVDLLGLVRLEAPGYEADDVLGTLAKKAEREGMEVCILTGDRDFFQLLSEKVSVLLPDGTLVTPKDVQEKYGVPPERWVDFRALTGDRSDNIPGVAGIGEKTALRLLAEWGSVENLLKNLDRVKPDSLRRKIEAHLEDLRLSLDLARIRTDLPLEVDFKALRRRTPDLEGLRAFLEELEFGSLLHEFGLLGGEKPREEAPWPPPEGAFVGFLLSRKEPMWAELLALAAAAEGRVHRATSPVEALADLKEARGFLAKDLAVLALREGVALDPTDDPLLVAYLLDPANTNPERVARRYGGEFTEDAAERALLSERLFQTLFPRLSEKLLWLYQEVERPLSRVLAHMEARGVRLDVPLLEALSFELEKELERLEGEVFRLAGHPFNLNSRDQLEKVLFDELGLTPVTRTEKTGKRSTSAAALEALRGAHPIVELILQYRELSKLKSTYLDRLPRLVHPRTGRLHTRFNQTATATGRLSSSDPNLQNIPVRTPLGQHIRKAFVAEEGWLLLAADYSQIELRVLAHLSGDENLKRVFREGKDIHTETAAWMFGVDPALVDPKMRRAAKTVNFGVLYGMSAHRLSQELGIDYKEAEAFIERYFQSFPKVRAWIERTLEEGRTRGYVETLFGRRRYVPDLASRVRSVREAAERMAWNMPVQGTAADLMKIAMVKLFPRLKPLGAHLLLQVHDELVLEVPEDRAEEAKALVKEVMENAYPLDVPLEVEVGVGRDWLEAKQD

SEQ ID NO: 671 - DNA, 2538 bp, synthetic construct
  misc_feature 1..2538: note = DNA Polymerase Variant
  source 1..2538: mol_type = other DNA
atgcaccatcatcatcatcatggcggtagcggcatgttaccgctgtttgatttggaagaaccaccaaaacgcgtgctgcttgttgacggccatcatctggcgtatcgtaccttctacgcactgagccttacgacctcacgtggtgagcctgtccagatggtgtatgggtttgctcgctccctgctgaaagccctgaaggaagatggtcaagccgtagtagtggttttcgatgcgaaagcaccgtcgtttcgtcacgaagcgtacgaggcctataaagctggccgcgcaccgaccccggaagactttccgcgtcagttagcgctcgtcaaacgcctcgtggatttgctgggattagttcgcttggaagctcctggctacgaggcggacgacgtgctcggtacactggccaagaaagcagaacgtgaaggcatggaggtctgcattcttaccggtgatcgcgatttcttccagctgctgtctgagaaagtgagcgttttgctgcccgatggcacgttagtaaccccgaaagatgtccaagagaaatatggagttccgccagaacgttgggtggactttcgcgcactgactggtgatcgttcagacaacatcccgggcgttgccgggattggtgaaaagacggcgctgcgcctgctggcagaatggggctcggtggaaaatctgctcaagaaccttgatcgtgtgaaacctgatagcttacgccgcaagatcgaagcccacctggaagacttgcgtctgagtctggatcttgcgcgtattcgcaccgatctgccgttggaagtagactttaaagctctgcgtcgtcgcacacccgatttagaggggttacgcgcgttcctcgaagaactggagtttggctccctgctgcatgaattcggtttgttgggcggagagaaaccgcgtgaagaagcaccatggccgccgcccgaaggtgcctttgtcggctttcttctgtcacgcaaagagccaatgtgggcggaactgttagctcttgcagccgccgcggaagggcgtgttcaccgcgcgacctctcctgtcgaggccctcgctgacctcaaagaagcacgtggtttcactgcgaaagatttagccgtgcttgcattacgcgaaggcgttgcgctcgatccgacggacgacccgcttttggtggcttatttgctcgatcctgcgaataccaacccggaacgtgtcgcccgtcgttacggcggcgagtttactgaagatgcggcagaacgcgcgttgcttagcgaacgcctcttccagacgttatttccacgtctttcggagaaattactctggctctatcaggaagtcgaacgtccattgagtcgcgtgcttgcccatatggaggctcgcggtgtgcgcttagatgttccgttgttagaagcactcagcttcgagttggagaaagaactggaacgtcttgaaggcgaagtctttcgtttagcggggcatcccttcaatctcaactctcgcgaccaattggagaaagtgctctttgatgaattaggtttaacccctgtcacgcgtacagagaagaccggcaaacgttccacttcggcagccgccttggaagcacttcgtggtgctcacccgatcgtcgagttgattttgcagtatcgcgagctcagcaaactcaaatcaacctatcttgataggttacctcgtcttgttcatccacgtacgggtcgtttacacacccgcttcaatcaaacggcgacagccaccgggcgcttgtcgtcgagtgacccgaacctccagaatattccagtgcgcacgccgctgggccaacacattcgtaaagcgtttgttgcggaagaaggttggttattacttgcggccgattactcccagatcgaacttcgtgtattggcgcatctctctggcgacgagaatcttaaacgcgtgtttcgcgaaggcaaggatattcacactgaaaccgcagcctggatgttcggggtggacccagccttagtggaccccaagatgcgtcgtgccgccaagaccgtcaactttggcgtactctatggtatgtcagcacatcgtcttagtcaggaattgggcattgactacaaagaagctgaagcgtttatcgagcgctatttccaatcctttccgaaagttcgcgcgtggattgaacgtaccctcgaagaaggtcgcactcgcggctatgtggaaacgttattcgggcgtcgtcgctacgttccagatcttgcatctcgtgtccgctcagtgcgcgaagctgctgagcgtatggcctggaatatgcctgttcagggaacagcggcggacctcatgaagatcgccatggtgaaattgtttccgcgcttgaaacccttaggagcccaccttcttttacaggtgcatgatgaattggtcttggaagtacccgaggatcgcgcagaagaagccaaagcactcgtgaaagaggttatggaaaacgcgtatccgttagatgttccgttggaggtcgaagtgggtgtaggccgtgattggcttgaagcgaaacaagactaatga

SEQ ID NO: 672 - protein, 844 aa, synthetic construct
  REGION 1..844: note = DNA Polymerase Variant
MHHHHHHGGSGMLPLFDLEEPPKRVLLVDGHHLAYRTFYALSLTTSRGEPVQMVYGFARSLLKALKEDGQAVVVVFDAKAPSFRHEAYEAYKAGRAPTPEDFPRQLALVKRLVDLLGLVRLEAPGYEADDVLGTLAKKAEREGMEVCILTGDRDFFQLLSEKVSVLLPDGTLVTPKDVQEKYGVPPERWVDFRALTGDRSDNIPGVAGIGEKTALRLLAEWGSVENLLKNLDRVKPDSLRRKIEAHLEDLRLSLDLARIRTDLPLEVDFKALRRRTPDLEGLRAFLEELEFGSLLHEFGLLGGEKPREEAPWPPPEGAFVGFLLSRKEPMWAELLALAAAAEGRVHRATSPVEALADLKEARGFTAKDLAVLALREGVALDPTDDPLLVAYLLDPANTNPERVARRYGGEFTEDAAERALLSERLFQTLFPRLSEKLLWLYQEVERPLSRVLAHMEARGVRLDVPLLEALSFELEKELERLEGEVFRLAGHPFNLNSRDQLEKVLFDELGLTPVTRTEKTGKRSTSAAALEALRGAHPIVELILQYRELSKLKSTYLDRLPRLVHPRTGRLHTRFNQTATATGRLSSSDPNLQNIPVRTPLGQHIRKAFVAEEGWLLLAADYSQIELRVLAHLSGDENLKRVFREGKDIHTETAAWMFGVDPALVDPKMRRAAKTVNFGVLYGMSAHRLSQELGIDYKEAEAFIERYFQSFPKVRAWIERTLEEGRTRGYVETLFGRRRYVPDLASRVRSVREAAERMAWNMPVQGTAADLMKIAMVKLFPRLKPLGAHLLLQVHDELVLEVPEDRAEEAKALVKEVMENAYPLDVPLEVEVGVGRDWLEAKQD

SEQ ID NO: 673 - DNA, 2538 bp, synthetic construct
  misc_feature 1..2538: note = DNA Polymerase Variant
  source 1..2538: mol_type = other DNA
atgcaccatcatcatcatcatggcggtagcggcatgttaccgctgtttgatttggaagaaccaccaaaacgcgtgctgcttgttgacggccatcatctggcgtatcgtaccttctacgcactgagccttacgacctcacgtggtgagcctgtccagatggtgtatgggtttgctcgctccctgctgaaagccctgaaggaagatggtcaagccgtagtagtggttttcgatgcgaaagcaccgtcgtttcgtcacgaagcgtacgaggcctataaagctggccgcgcaccgaccccggaagactttccgcgtcagttagcgctcgtcaaacgcctcgtggatttgctgggattagttcgcttggaagctcctggctacgaggcggacgacgtgctcggtacactggccaagaaagcagaacgtgaaggcatggaggtctgcattcttaccggtgatcgcgatttcttccagctgctgtctgagaaagtgagcgttttgctgcccgatggcacgttagtaaccccgaaagatgtccaagagaaatatggagttccgccagaacgttgggtggactttcgcgcactgactggtgatcgttcagacaacatcccgggcgttgccgggattggtgaaaagacggcgctgcgcctgctggcagaatggggctcggtggaaaatctgctcaagaaccttgatcgtgtgaaacctgatagcttacgccgcaagatcgaagcccacctggaagacttgcgtctgagtctggatcttgcgcgtattcgcaccgatctgccgttggaagtagactttaaagctctgcgtcgtcgcacacccgatttagaggggttacgcgcgttcctcgaagaactggagtttggctccctgctgcatgaattcggtttgttgggcggagagaaaccgcgtgaagaagcaccatggccgccgcccgaaggtgcctttgtcggctttcttctgtcacgcaaagagccaatgtgggcggaactgttagctcttgcagccgccgcggaagggcgtgttcaccgcgcgacctctcctgtcgaggccctcgctgacctcaaagaagcacgtggtttcttggcgaaagatttagccgtgcttgcattacgcgaaggcgttgcgctcgatccgacggacgacccgcttttggtggcttatttgctcgatcctgcgaataccaacccggaacgtgtcgcccgtcgttacggcggcgagtttactgaagatgcggcagaacgcgcgttgcttagcgaacgcctcttccagacgttatttccacgtctttcggagaaattactctggctctatcaggaagtcgaacgtccattgagtcgcgtgcttgcccatatggaggctcgcggtgtgcgcttagatgttccgttgttagaagcactcagcttcgagttggagaaagaactggaacgtcttgaaggcgaagtctttcgtttagcggggcatcccttcaatctcaactctcgcgaccaattggagaaagtgctctttgatgaattaggtttaacccctgtcacgcgtacagagaagaccggcaaacgttccacttcggcagccgccttggaagcacttcgtggtgctcacccgatcgtcgagttgattttgcagtatcgcgagctcagcaaactcaaatcaacctatcttgataggttacctcgtcttgttcatccacgtacgggtcgtttacacacccgcttcaatcaaacggcgacagccaccgggcgcttgtcgtcgagtgacccgaacctccagaatattccagtgcgcacgccgctgggccaacacattcgtaaagcgtttgttgcggaagaaggttggttattacttgcggccgattactcccagatcgaacttcgtgtattggcgcatctctctggcgacgagaatcttaaacgcgtgtttcgcgaaggcaaggatattcacactgaaaccgcagcctggatgttcggggtggacccagccttagtggaccccaagatgcgtcgtgccgccaagaccgtcaactttggcgtactctatggtatgtcagcacatcgtcttagtcaggaattgggcattgactacaaagaagctgaagcgtttatcgagcgctatttccaatcctttccgaaagttcgcgcgtggattgaacgtaccctcgaagaaggtcgcactcgcggctatgtggaaacgttattcgggcgtcgtcgctacgttccagatcttgcatctcgtgtccgctcagtgcgcgaagctgctgagcgtatggcctggaatatgcctgttcagggaacagcggcggacctcatgaagatcgccatggtgaaattgtttccgcgcttgaaacccttaggagcccaccttcttttacaggtgcatgatgaattggtcttggaagtacccgaggatcgcgcagaagaagccaaacggctcgtgaaagaggttatggaaaacgcgtatccgttagatgttccgttggaggtcgaagtgggtgtaggccgtgattggcttgaagcgaaacaagactaatga

SEQ ID NO: 674 - protein, 844 aa, synthetic construct
  REGION 1..844: note = DNA Polymerase Variant
MHHHHHHGGSGMLPLFDLEEPPKRVLLVDGHHLAYRTFYALSLTTSRGEPVQMVYGFARSLLKALKEDGQAVVVVFDAKAPSFRHEAYEAYKAGRAPTPEDFPRQLALVKRLVDLLGLVRLEAPGYEADDVLGTLAKKAEREGMEVCILTGDRDFFQLLSEKVSVLLPDGTLVTPKDVQEKYGVPPERWVDFRALTGDRSDNIPGVAGIGEKTALRLLAEWGSVENLLKNLDRVKPDSLRRKIEAHLEDLRLSLDLARIRTDLPLEVDFKALRRRTPDLEGLRAFLEELEFGSLLHEFGLLGGEKPREEAPWPPPEGAFVGFLLSRKEPMWAELLALAAAAEGRVHRATSPVEALADLKEARGFLAKDLAVLALREGVALDPTDDPLLVAYLLDPANTNPERVARRYGGEFTEDAAERALLSERLFQTLFPRLSEKLLWLYQEVERPLSRVLAHMEARGVRLDVPLLEALSFELEKELERLEGEVFRLAGHPFNLNSRDQLEKVLFDELGLTPVTRTEKTGKRSTSAAALEALRGAHPIVELILQYRELSKLKSTYLDRLPRLVHPRTGRLHTRFNQTATATGRLSSSDPNLQNIPVRTPLGQHIRKAFVAEEGWLLLAADYSQIELRVLAHLSGDENLKRVFREGKDIHTETAAWMFGVDPALVDPKMRRAAKTVNFGVLYGMSAHRLSQELGIDYKEAEAFIERYFQSFPKVRAWIERTLEEGRTRGYVETLFGRRRYVPDLASRVRSVREAAERMAWNMPVQGTAADLMKIAMVKLFPRLKPLGAHLLLQVHDELVLEVPEDRAEEAKRLVKEVMENAYPLDVPLEVEVGVGRDWLEAKQD

SEQ ID NO: 675 - DNA, 2538 bp, synthetic construct
  misc_feature 1..2538: note = DNA Polymerase Variant
  source 1..2538: mol_type = other DNA
atgcaccatcatcatcatcatggcggtagcggcatgttaccgctgtttgatttggaagaaccaccaaaacgcgtgctgcttgttgacggccatcatctggcgtatcgtaccttctacgcactgagccttacgacctcacgtggtgagcctgtccagatggtgtatgggtttgctcgctccctgctgaaagccctgaaggaagatggtcaagccgtagtagtggttttcgatgcgaaagcaccgtcgtttcgtcacgaagcgtacgaggcctataaagctggccgcgcaccgaccccggaagactttccgcgtcagttagcgctcgtcaaacgcctcgtggatttgctgggattagttcgcttggaagctcctggctacgaggcggacgacgtgctcggtacactggccaagaaagcagaacgtgaaggcatggaggtctgcattcttaccggtgatcgcgatttcttccagctgctgtctgagaaagtgagcgttttgctgcccgatggcacgttagtaaccccgaaagatgtgcaagagaaatatggagttccgccagaacgttgggtggactttcgcgcactgactggtgatcgttcagacaacatcccgggcgttgccgggattggtgaaaagacggcgctgcgcctgctggcagaatggggctcggtggaaaatctgctcaagaaccttgatcgtgtgaaacctgatagcttacgccgcaagatcgaagcccacctggaagacttgcgtctgagtctggatcttgcccgtattcgcaccgatctgccgttggaagtagactttaaagctctgcgtcgtcgcacacccgatttagaggggttacgcgcgttcctcgaagaactggagctgggctccctgctgcatgaattcggtttgttgggcggagagaaaccgcgtgaagaagcaccatggccgccgcccgaaggtgcctttgtcggctttcttctgtcacgcaaagagccaatgtgggcggaactgttagctcttgcagccgccgcggaagggcgtgttcaccgcgcgacctctcctgtcgaggccctcgctgacctcaaagaagcacgtggtttcttggcgaaagatttagccgtgcttgcattacgcgaaggcgttgcgctcgatccgacggacgacccgcttttggtggcttatttgctcgatcatgcgaataccaacccggaacgtgtcgcccgtcgttacggcggcgagtttactgaagatgcggcagaacgcgcgttgcttagcgaacgcctcttccagacgttatttccacgtctttcggagaaattattttggctctatcaggaagtcgaacgtccattgagtcgcgtgcttgcccatatggaggctcgcggtgtgcgcttagatgttccgttgttagaagcactcagcttcgagttggagaaagaactggaacgtcttgaaggcgaagtctttcgtttagcggggcatcccttcaatctcaactctcgcgaccaattggagaaagtgctctttgatgaattaggtttaacccctgtcacgcgtacagagaagaccggcaaacgttccacttcggcagccgccttggaagcacttcgtggtgctcacccgatcgtcgagttgattttgcagtatcgcgagctcagcaaactcaaatcaacctatcttgataggttacctcgtcttgttcatccacgtacgggtcgtttacacacccgcttcaatcaaacggcaacagccaccgggcgcttgtcgtcgagtgacccgaacctccagaatattccagtgcgcacgccgctgggccaacacattcgtaaagcgtttgttgcggaagaaggttggttattacttgcggccgattactcccagatcgaacttcgtgtattggcgcatctctctggcgacgagaatcttaaacgcgtgtttcgcgaaggcaaggatattcacactgaaaccgcagcctggatgttcggggtggacccagccttagtggaccccaagatgcgtcgtgccgccaagaccgtcaactttggcgtactctatggtatgtcagcagcacgtcttagtcaggaattgggcattgactacaaagaagctgaagcgtttatcgagcgctatttccaatcctttccgaaagttcgcgcgtggattgaacgtacgctcgaagaaggtcgcactcgcggctatgtggaaacgttattcgggcgtcgtcgctacgttccagatcttacgtctcgtgtccgctcagtgcgcgaagctgctgagcgtatggcctggaatatgcctgttcagggaacagcggcggacctcatgaagatcgccatggtgaaattgtttccgcgcttgaaacccttaggagcccaccttcttttacaggtgcatgatgaattggtcttggaagtacccgaggatcgcgcagaagaagccaaagcactcgtgaaagaggttatggaaaacgcgtatccgttagatgttccgttggaggtcgaagtgggtgtaggccgtgattggcttgaagcgaaacaagactaatga

SEQ ID NO: 676 - protein, 844 aa, synthetic construct
  REGION 1..844: note = DNA Polymerase Variant
MHHHHHHGGSGMLPLFDLEEPPKRVLLVDGHHLAYRTFYALSLTTSRGEPVQMVYGFARSLLKALKEDGQAVVVVFDAKAPSFRHEAYEAYKAGRAPTPEDFPRQLALVKRLVDLLGLVRLEAPGYEADDVLGTLAKKAEREGMEVCILTGDRDFFQLLSEKVSVLLPDGTLVTPKDVQEKYGVPPERWVDFRALTGDRSDNIPGVAGIGEKTALRLLAEWGSVENLLKNLDRVKPDSLRRKIEAHLEDLRLSLDLARIRTDLPLEVDFKALRRRTPDLEGLRAFLEELELGSLLHEFGLLGGEKPREEAPWPPPEGAFVGFLLSRKEPMWAELLALAAAAEGRVHRATSPVEALADLKEARGFLAKDLAVLALREGVALDPTDDPLLVAYLLDHANTNPERVARRYGGEFTEDAAERALLSERLFQTLFPRLSEKLFWLYQEVERPLSRVLAHMEARGVRLDVPLLEALSFELEKELERLEGEVFRLAGHPFNLNSRDQLEKVLFDELGLTPVTRTEKTGKRSTSAAALEALRGAHPIVELILQYRELSKLKSTYLDRLPRLVHPRTGRLHTRFNQTATATGRLSSSDPNLQNIPVRTPLGQHIRKAFVAEEGWLLLAADYSQIELRVLAHLSGDENLKRVFREGKDIHTETAAWMFGVDPALVDPKMRRAAKTVNFGVLYGMSAARLSQELGIDYKEAEAFIERYFQSFPKVRAWIERTLEEGRTRGYVETLFGRRRYVPDLTSRVRSVREAAERMAWNMPVQGTAADLMKIAMVKLFPRLKPLGAHLLLQVHDELVLEVPEDRAEEAKALVKEVMENAYPLDVPLEVEVGVGRDWLEAKQD

SEQ ID NO: 677 - DNA, 2538 bp, synthetic construct
  misc_feature 1..2538: note = DNA Polymerase Variant
  source 1..2538: mol_type = other DNA
atgcaccatcatcatcatcatggcggtagcggcatgttaccgctgtttgatttggaagaaccaccaaaacgcgtgctgcttgttgacggccatcatctggcgtatcgtaccttctacgcactgagccttacgacctcacgtggtgagcctgtccagatggtgtatgggtttgctcgctccctgctgaaagccctgaaggaagatggtcaagccgtagtagtggttttcgatgcgaaagcaccgtcgtttcgtcacgaagcgtacgaggcctataaagctggccgcgcaccgaccccggaagactttccgcgtcagttagcgctcgtcaaacgcctcgtggatttgctgggattagttcgcttggaagctcctggctacgaggcggacgacgtgctcggtacactggccaagaaagcagaacgtgaaggcatggaggtctgcattcttaccggtgatcgcgatttcttccagctgctgtctgagaaagtgagcgttttgctgcccgatggcacgttagtaaccccgaaagatgtgcaagagaaatatggagttccgccagaacgttgggtggactttcgcgcactgactggtgatcgttcagacaacatcccgggcgttgccgggattggtgaaaagacggcgctgcgcctgctggcagaatggggctcggtggaaaatctgctcaagaaccttgatcgtgtgaaacctgatagcttacgccgcaagatcgaagcccacctggaagacttgcgtctgagtctggatcttgcccgtattcgcaccgatctgccgttggaagtagactttaaagctctgcgtcgtcgcacacccgatttagaggggttacgcgcgttcctcgaagaactggagctgggctccctgctgcatgaattcggtttgttgggcggagagaaaccgcgtgaagaagcaccatggccgccgcccgaaggtgcctttgtcggctttcttctgtcacgcaaagagccaatgtgggcggaactgttagctcttgcagccgccgcggaagggcgtgttcaccgcgcgacctctcctgtcgaggccctcgctgacctcaaagaagcacgtggtttcttggcgaaagatttagccgtgcttgcattacgcgaaggcgttgcgctcgatccgacggacgacccgcttttggtggcttatttgctcgatcatgcgaataccaacccggaacgtgtcgcccgtcgttacggcggcgagtttactgaagatgcggcagaacgcgcgttgcttagcgaacgcctcttccagacgttatttccacgtctttcggagaaattactctggctctatcaggaagtcgaacgtccattgagtcgcgtgcttgcccatatggaggctcgcggtgtgcgcttagatgttccgttgttagaagcactcagcttcgagttggagaaagaactggaacgtcttgaaggcgaagtctttcgtttagcggggcatcccttcaatctcaactctcgcgaccaattggagaaagtgctctttgatgaattaggtttaacccctgtcacgcgtacagagaagaccggcaaacgttccacttcggcagccgccttggaagcacttcgtggtgctcacccgatcgtcgagttgattttgcagtatcgcgagctcagcaaactcaaatcaacctatcttgataggttacctcgtcttgttcatccacgtacgggtcgtttacacacccgcttcaatcaaacggcaacagccaccgggcgcttgtcgtcgagtgacccgaacctccagaatattccagtgcgcacgccgctgggccaacacattcgtaaagcgtttgttgcggaagaaggttggttattacttgcggccgattactcccagatcgaacttcgtgtattggcgcatctctctggcgacgagaatcttaaacgcgtgtttcgcgaaggcaaggatattcacactgaaaccgcagcctggatgttcggggtggacccagccttagtggaccccaagatgcgtcgtgccgccaagaccgtcaactttggcgtactctatggtatgtcagcagcacgtcttagtcaggaattgggcattgacattaaagaagctgaagcgtttatcgagcgctatttccaatcctttccgaaagttcgcgcgtggattgaacgtacgctcgaagaaggtcgcactcgcggctatgtggaaacgttattcgggcgtcgtcgctacgttccagatcttacgtctcgtgtccgctcagtgcgcgaagctgctgagcgtatggcctggaatatgcctgttcagggaacagcggcggacctcatgaagatcgccatggtgaaattgtttccgcgcttgaaacccttaggagcccaccttcttttacaggtgcatgatgaattggtcttggaagtacccgaggatcgcgcagaagaagccaaagcactcgtgaaagaggttatggaaaacgcgtatccgttagatgttccgttggaggtcgaagtgggtgtaggccgtgattggcttgaagcgaaacaagactaatga

SEQ ID NO: 678 - protein, 844 aa, synthetic construct
  REGION 1..844: note = DNA Polymerase Variant
MHHHHHHGGSGMLPLFDLEEPPKRVLLVDGHHLAYRTFYALSLTTSRGEPVQMVYGFARSLLKALKEDGQAVVVVFDAKAPSFRHEAYEAYKAGRAPTPEDFPRQLALVKRLVDLLGLVRLEAPGYEADDVLGTLAKKAEREGMEVCILTGDRDFFQLLSEKVSVLLPDGTLVTPKDVQEKYGVPPERWVDFRALTGDRSDNIPGVAGIGEKTALRLLAEWGSVENLLKNLDRVKPDSLRRKIEAHLEDLRLSLDLARIRTDLPLEVDFKALRRRTPDLEGLRAFLEELELGSLLHEFGLLGGEKPREEAPWPPPEGAFVGFLLSRKEPMWAELLALAAAAEGRVHRATSPVEALADLKEARGFLAKDLAVLALREGVALDPTDDPLLVAYLLDHANTNPERVARRYGGEFTEDAAERALLSERLFQTLFPRLSEKLLWLYQEVERPLSRVLAHMEARGVRLDVPLLEALSFELEKELERLEGEVFRLAGHPFNLNSRDQLEKVLFDELGLTPVTRTEKTGKRSTSAAALEALRGAHPIVELILQYRELSKLKSTYLDRLPRLVHPRTGRLHTRFNQTATATGRLSSSDPNLQNIPVRTPLGQHIRKAFVAEEGWLLLAADYSQIELRVLAHLSGDENLKRVFREGKDIHTETAAWMFGVDPALVDPKMRRAAKTVNFGVLYGMSAARLSQELGIDIKEAEAFIERYFQSFPKVRAWIERTLEEGRTRGYVETLFGRRRYVPDLTSRVRSVREAAERMAWNMPVQGTAADLMKIAMVKLFPRLKPLGAHLLLQVHDELVLEVPEDRAEEAKALVKEVMENAYPLDVPLEVEVGVGRDWLEAKQD

SEQ ID NO: 679 - DNA, 2538 bp, synthetic construct
  misc_feature 1..2538: note = DNA Polymerase Variant
  source 1..2538: mol_type = other DNA
atgcaccatcatcatcatcatggcggtagcggcatgttaccgctgtttgatttggaagaaccaccaaaacgcgtgctgcttgttgacggccatcatctggcgtatcgtaccttctacgcactgagccttacgacctcacgtggtgagcctgtccagatggtgtatgggtttgctcgctccctgctgaaagccctgaaggaagatggtcaagccgtagtagtggttttcgatgcgaaagcaccgtcgtttcgtcacgaagcgtacgaggcctataaagctggccgcgcaccgaccccggaagactttccgcgtcagttagcgctcgtcaaacgcctcgtggatttgctgggattagttcgcttggaagctcctggctacgaggcggacgacgtgctcggtacactggccaagaaagcagaacgtgaaggcatggaggtctgcattcttaccggtgatcgcgatttcttccagctgctgtctgagaaagtgagcgttttgctgcccgatggcacgttagtaaccccgaaagatgtgcaagagaaatatggagttccgccagaacgttgggtggactttcgcgcactgactggtgatcgttcagacaacatcccgggcgttgccgggattggtgaaaagacggcgctgcgcctgctggcagaatggggctcggtggaaaatctgctcaagaaccttgatcgtgtgaaacctgatagcttacgccgcaagatcgaagcccacctggaagacttgcgtctgagtctggatcttgcccgtattcgcaccgatctgccgttggaagtagactttaaagctctgcgtcgtcgcacacccgatttagaggggttacgcgcgttcctcgaagaactggagctgggctccctgctgcatgaattcggtttgttgggcggagagaaaccgcgtgaagaagcaccatggccgccgcccgaaggtgcctttgtcggctttcttctgtcacgcaaagagccaatgtgggcggaactgttagctcttgcagccgccgcggaagggcgtgttcaccgcgcgacctctcctgtcgaggccctcgctgacctcaaagaagcacgtggtttcttggcgaaagatttagccgtgcttgcattacgcgaaggcgttgcgctcgatccgacggacgacccgcttttggtggcttatttgctcgatcatgcgaataccaacccggaacgtgtcgcccgtcgttacggcggcgagtttactgaagatgcggcagaacgcgcgttgcttagcgaacgcctcttccagacgttatttccacgtctttcggagaaattactctggctctatcaggaagtcgaacgtccattgagtcgcgtgcttgcccatatggagtggcgcggtgtgcgcttagatgttccgttgttagaagcactcagcttcgagttggagaaagaactggaacgtcttgaaggcgaagtctttcgtttagcggggcatcccttcaatctcaactctcgcgaccaattggagaaagtgctctttgatgaattaggtttaacccctgtcacgcgtacagagaagaccggcaaacgttccacttcggcagccgccttggaagcacttcgtggtgctcacccgatcgtcgagttgattttgcagtatcgcgagctcagcaaactcaaatcaacctatcttgataggttacctcgtcttgttcatccacgtacgggtcgtttacacacccgcttcaatcaaacggcaacagccaccgggcgcttgtcgtcgagtgacccgaacctccagaatattccagtgcgcacgccgctgggccaacacattcgtaaagcgtttgttgcggaagaaggttggttattacttgcggccgattactcccagatcgaacttcgtgtattggcgcatctctctggcgacgagaatcttaaacgcgtgtttcgcgaaggcaaggatattcacactgaaaccgcagcctggatgttcggggtggacccagccttagtggaccccaagatgcgtcgtgccgccaagaccgtcaactttggcgtactctatggtatgtcagcagcacgtcttagtcaggaattgggcattgactacaaagaagctgaagcgtttatcgagcgctatttccaatcctttccgaaagttcgcgcgtggattgaacgtacgctcgaagaaggtcgcactcgcggctatgtggaaacgttattcgggcgtcgtcgctacgttccagatcttacgtctcgtgtccgctcagtgcgcgaagctgctgagcgtatggcctggaatatgcctgttcagggaacagcggcggacctcatgaagatcgccatggtgaaattgtttccgcgcttgaaacccttaggagcccaccttcttttacaggtgcatgatgaattggtcttggaagtacccgaggatcgcgcagaagaagccaaagcactcgtgaaagaggttatggaaaacgcgtatccgttagatgttccgttggaggtcgaagtgggtgtaggccgtgattggcttgaagcgaaacaagactaatga

SEQ ID NO: 680 - protein, 844 aa, synthetic construct
  REGION 1..844: note = DNA Polymerase Variant
MHHHHHHGGSGMLPLFDLEEPPKRVLLVDGHHLAYRTFYALSLTTSRGEPVQMVYGFARSLLKALKEDGQAVVVVFDAKAPSFRHEAYEAYKAGRAPTPEDFPRQLALVKRLVDLLGLVRLEAPGYEADDVLGTLAKKAEREGMEVCILTGDRDFFQLLSEKVSVLLPDGTLVTPKDVQEKYGVPPERWVDFRALTGDRSDNIPGVAGIGEKTALRLLAEWGSVENLLKNLDRVKPDSLRRKIEAHLEDLRLSLDLARIRTDLPLEVDFKALRRRTPDLEGLRAFLEELELGSLLHEFGLLGGEKPREEAPWPPPEGAFVGFLLSRKEPMWAELLALAAAAEGRVHRATSPVEALADLKEARGFLAKDLAVLALREGVALDPTDDPLLVAYLLDHANTNPERVARRYGGEFTEDAAERALLSERLFQTLFPRLSEKLLWLYQEVERPLSRVLAHMEWRGVRLDVPLLEALSFELEKELERLEGEVFRLAGHPFNLNSRDQLEKVLFDELGLTPVTRTEKTGKRSTSAAALEALRGAHPIVELILQYRELSKLKSTYLDRLPRLVHPRTGRLHTRFNQTATATGRLSSSDPNLQNIPVRTPLGQHIRKAFVAEEGWLLLAADYSQIELRVLAHLSGDENLKRVFREGKDIHTETAAWMFGVDPALVDPKMRRAAKTVNFGVLYGMSAARLSQELGIDYKEAEAFIERYFQSFPKVRAWIERTLEEGRTRGYVETLFGRRRYVPDLTSRVRSVREAAERMAWNMPVQGTAADLMKIAMVKLFPRLKPLGAHLLLQVHDELVLEVPEDRAEEAKALVKEVMENAYPLDVPLEVEVGVGRDWLEAKQD

SEQ ID NO: 681 - DNA, 2538 bp, synthetic construct
  misc_feature 1..2538: note = DNA Polymerase Variant
  source 1..2538: mol_type = other DNA
atgcaccatcatcatcatcatggcggtagcggcatgttaccgctgtttgatttggaagaaccaccaaaacgcgtgctgcttgttgacggccatcatctggcgtatcgtaccttctacgcactgagccttacgacctcacgtggtgagcctgtccagatggtgtatgggtttgctcgctccctgctgaaagccctgaaggaagatggtcaagccgtagtagtggttttcgatgcgaaagcaccgtcgtttcgtcacgaagcgtacgaggcctataaagctggccgcgcaccgaccccggaagactttccgcgtcagttagcgctcgtcaaacgcctcgtggatttgctgggattagttcgcttggaagctcctggctacgaggcggacgacgtgctcggtacactggccaagaaagcagaacgtgaaggcatggaggtctgcattcttaccggtgatcgcgatttcttccagctgctgtctgagaaagtgagcgttttgctgcccgatggcacgttagtaaccccgaaagatgtgcaagagaaatatggagttccgccagaacgttgggtggactttcgcgcactgactggtgatcgttcagacaacatcccgggcgttgccgggattggtgaaaagacggcgctgcgcctgctggcagaatggggctcggtggaaaatctgctcaagaaccttgatcgtgtgaaacctgatagcttacgccgcaagatcgaagcccacctggaagacttgcgtctgagtctggatcttgcccgtattcgcaccgatctgccgttggaagtagactttaaagctctgcgtcgtcgcacacccgatttagaggggttacgcgcgttcctcgaagaactggagctgggctccctgctgcatgaattcggtttgttgggcggagagaaaccgcgtgaagaagcaccatggccgccgcccgaaggtgcctttgtcggctttcttctgtcacgcaaagagccaatgtgggcggaactgttagctcttgcagccgccgcggaagggcgtgttcaccgcgcgacctctcctgtcgaggccctcgctgacctcaaagaagcacgtggtttcttggcgaaagatttagccgtgcttgcattacgcgaaggcgttgcgctcgatccgacggacgacccgcttttggtggcttatttgctcgatcatgcgaataccaacccggaacgtgtcgcccgtcgttacggcggcgagtttactgaagatgcggcagaacgcgcgttgcttagcgaacgcctcttccagacgttatttccacgtctttcggagaaattactctggctctatcaggaagtcgaacgtccattgagtcgcgtgcttgcccatatggaggctcgcggtgtgcgcttagatgttccgttgttagaagcactcagcttcgagttggagaaagaactggaacgtcttgaaggcgaagtctttcgtttagcggggcatcccttcaatctcaactctcgcgaccaattggagaaagtgctctttgatgaattaggtttaacccctgtcacgcgtacagagaagaccggcaaacgttccacttcggcagccgccttggaagcacttcgtggtgctcacccgatcgtcgagttgattttgcagtatcgcgagctcagcaaactcaaatcaacctatcttgataggttacctcgtcttgttcatccacgtacgggtcgtttacacacccgcttcaatcaaacggcaacagccaccgggcgcttgtcgtcgagtgacccgaacctccagaatattccagtgcgcacgccgctgggccaacacattcgtaaagcgtttgttgcggaagaaggttggttattacttgcggccgattactcccagatcgaacttcgtgtattggcgcatctctctggcgacgagaatcttaaacgcgtgtttcgcgaaggcaaggatattcacactgaaaccgcagcctggatgttcggggtggacccagccttagtggaccccaagatgcgtcgtgccgccaagaccgtcaactttggcgtactctatggtatgtcagcagcacgtcttagtcaggaattgggcattgactacaaagaagctgaagcgtttatcgagcgctatttccaatcctttccgaaagttcgcgagtggattgaacgtacgctcgaagaaggtcgcactcgcggctatgtggaaacgttattcgggcgtcgtcgctacgttccagatcttacgtctcgtgtccgctcagtgcgcgaagctgctgagcgtatggcctggaatatgcctgttcagggaacagcggcggacctcatgaagatcgccatggtgaaattgtttccgcgcttgaaacccttaggagcccaccttcttttacaggtgcatgatgaattggtcttggaagtacccgaggatcgcgcagaagaagccaaagcactcgtgaaagaggttatggaaaacgcgtatccgttagatgttccgttggaggtcgaagtgggtgtaggccgtgattggcttgaagcgaaacaagactaatga

SEQ ID NO: 682 - protein, 844 aa, synthetic construct
  REGION 1..844: note = DNA Polymerase Variant
MHHHHHHGGSGMLPLFDLEEPPKRVLLVDGHHLAYRTFYALSLTTSRGEPVQMVYGFARSLLKALKEDGQAVVVVFDAKAPSFRHEAYEAYKAGRAPTPEDFPRQLALVKRLVDLLGLVRLEAPGYEADDVLGTLAKKAEREGMEVCILTGDRDFFQLLSEKVSVLLPDGTLVTPKDVQEKYGVPPERWVDFRALTGDRSDNIPGVAGIGEKTALRLLAEWGSVENLLKNLDRVKPDSLRRKIEAHLEDLRLSLDLARIRTDLPLEVDFKALRRRTPDLEGLRAFLEELELGSLLHEFGLLGGEKPREEAPWPPPEGAFVGFLLSRKEPMWAELLALAAAAEGRVHRATSPVEALADLKEARGFLAKDLAVLALREGVALDPTDDPLLVAYLLDHANTNPERVARRYGGEFTEDAAERALLSERLFQTLFPRLSEKLLWLYQEVERPLSRVLAHMEARGVRLDVPLLEALSFELEKELERLEGEVFRLAGHPFNLNSRDQLEKVLFDELGLTPVTRTEKTGKRSTSAAALEALRGAHPIVELILQYRELSKLKSTYLDRLPRLVHPRTGRLHTRFNQTATATGRLSSSDPNLQNIPVRTPLGQHIRKAFVAEEGWLLLAADYSQIELRVLAHLSGDENLKRVFREGKDIHTETAAWMFGVDPALVDPKMRRAAKTVNFGVLYGMSAARLSQELGIDYKEAEAFIERYFQSFPKVREWIERTLEEGRTRGYVETLFGRRRYVPDLTSRVRSVREAAERMAWNMPVQGTAADLMKIAMVKLFPRLKPLGAHLLLQVHDELVLEVPEDRAEEAKALVKEVMENAYPLDVPLEVEVGVGRDWLEAKQD

SEQ ID NO: 683 - DNA, 2538 bp, synthetic construct
  misc_feature 1..2538: note = DNA Polymerase Variant
  source 1..2538: mol_type = other DNA
atgcaccatcatcatcatcatggcggtagcggcatgttaccgctgtttgatttggaagaaccaccaaaacgcgtgctgcttgttgacggccatcatctggcgtatcgtaccttctacgcactgagccttacgacctcacgtggtgagcctgtccagatggtgtatgggtttgctcgctccctgctgaaagccctgaaggaagatggtcaagccgtagtagtggttttcgatgcgcgtgcaccgtcgtttcgtcacgaagcgtacgaggcctataaagctggccgcgcaccgaccccggaagactttccgcgtcagttagcgctcgtcaaacgcctcgtggatttgctgggattagttcgcttggaagctcctggctacgaggcggacgacgtgctcggtacactggccaagaaagcagaacgtgaaggcatggaggtctgcattcttaccggtgatcgcgatttcttccagctgctgtctgagaaagtgagcgttttgctgcccgatggcacgttagtaaccccgaaagatgtgcaagagaaatatggagttccgccagaacgttgggtggactttcgcgcactgactggtgatcgttcagacaacatcccgggcgttgccgggattggtgaaaagacggcgctgcgcctgctggcagaatggggctcggtggaaaatctgctcaagaaccttgatcgtgtgaaacctgatagcttacgccgcaagatcgaagcccacctggaagacttgcgtctgagtctggatcttgcccgtattcgcaccgatctgccgttggaagtagactttaaagctctgcgtcgtcgcacacccgatttagaggggttacgcgcgttcctcgaagaactggagctgggctccctgctgcatgaattcggtttgttgggcggagagaaaccgcgtgaagaagcaccatggccgccgcccgagggtgcctttgtcggctttcttctgtcacgcaaagagccaatgtgggcggaactgttagctcttgcagccgccgcggaagggcgtgttcaccgcgcgacctctcctgtcgaggccctcgctgacctcaaagaagcacgtggtttcttggcgaaagatttagccgtgcttgcattacgcgaaggcgttgcgctcgatccgacggacgacccgcttttggtggcttatttgctcgatcatgcgaataccaacccggaacgtgtcgcccgtcgttacggcggcgagtttactgaagatgcggcagaacgcgcgttgcttagcgaacgcctcttccagacgttatttccacgtctttcggagaaattactctggctctatcaggaagtcgaacgtccattgagtcgcgtgcttgcccatatggaggctcgcggtgtgcgcttagatgttccgttgttagaagcactcagcttcgaggcggaaaaagaactggaacgtcttgaaggcgaagtctttcgtttagcggggcatcccttcaatctcaactctcgcgaccaattggagaaagtgctctttgatgaattaggtttaacccctgtcacgcgtacagagaagaccggcaaacgttccacttcggcagccgccttggaagcacttcgtggtgtgcacccgatcgtcgagttgattttgcagtatcgcgagctcagcaaactcaaatcaacctatcttgataggttacctcgtcttgttcatccacgtacgggtcgtttacacacccgcttcaatcaaacggcaacagccaccgggcgcttgtcgtcgagtgacccgaacctccagaatattccagtgcgcacgccgctgggccaacacattcgtaaagcgtttgttgcggaagaaggttggttattacttgcggccgattactcccagatcgaacttcgtgtattggcgcatctctctggcgacgagaatcttaaacgcgtgtttcgcgaaggcaaggatattcacactgaaaccgcagcctggatgttcggggtggacccggccttagtggaccccaagatgcgtcgtgccgccaagaccgtcaactttggcgtactctatggtatgtcagcagcacgtcttagtcaggaattgggcattgactacaaagtagctgaagcgtttatcgagcgctatttccaatcctttccgaaagttcgcgcgtggattgaacgtacgctcgaagaaggtcgcactcgcggctatgtggaaacgttattcgggcgtcgtcgctacgttccagatcttacgtctcgtgtccgctcagtgcgcgaagctgctgagcgtatggcctggaatatgcctgttcagggaacagcggcggacctcatgaagatcgccatggtgaaattgtttccgcgcttgaaacccttaggagcccaccttcttctgcaggtgcatgatgaattggtcttggaagtacccgaggatcgcgcagaagaagccaaagcactcgtgaaagaggttatggaaaacgcgtatccgttagatgttccgttggaggtcgaagtgggtgtaggccgtgattggcttgaagcgaaacaagactaatga

SEQ ID NO: 684 - protein, 844 aa, synthetic construct
  REGION 1..844: note = DNA Polymerase Variant
MHHHHHHGGSGMLPLFDLEEPPKRVLLVDGHHLAYRTFYALSLTTSRGEPVQMVYGFARSLLKALKEDGQAVVVVFDARAPSFRHEAYEAYKAGRAPTPEDFPRQLALVKRLVDLLGLVRLEAPGYEADDVLGTLAKKAEREGMEVCILTGDRDFFQLLSEKVSVLLPDGTLVTPKDVQEKYGVPPERWVDFRALTGDRSDNIPGVAGIGEKTALRLLAEWGSVENLLKNLDRVKPDSLRRKIEAHLEDLRLSLDLARIRTDLPLEVDFKALRRRTPDLEGLRAFLEELELGSLLHEFGLLGGEKPREEAPWPPPEGAFVGFLLSRKEPMWAELLALAAAAEGRVHRATSPVEALADLKEARGFLAKDLAVLALREGVALDPTDDPLLVAYLLDHANTNPERVARRYGGEFTEDAAERALLSERLFQTLFPRLSEKLLWLYQEVERPLSRVLAHMEARGVRLDVPLLEALSFEAEKELERLEGEVFRLAGHPFNLNSRDQLEKVLFDELGLTPVTRTEKTGKRSTSAAALEALRGVHPIVELILQYRELSKLKSTYLDRLPRLVHPRTGRLHTRFNQTATATGRLSSSDPNLQNIPVRTPLGQHIRKAFVAEEGWLLLAADYSQIELRVLAHLSGDENLKRVFREGKDIHTETAAWMFGVDPALVDPKMRRAAKTVNFGVLYGMSAARLSQELGIDYKVAEAFIERYFQSFPKVRAWIERTLEEGRTRGYVETLFGRRRYVPDLTSRVRSVREAAERMAWNMPVQGTAADLMKIAMVKLFPRLKPLGAHLLLQVHDELVLEVPEDRAEEAKALVKEVMENAYPLDVPLEVEVGVGRDWLEAKQD

SEQ ID NO: 685 - DNA, 2538 bp, synthetic construct
  misc_feature 1..2538: note = DNA Polymerase Variant
  source 1..2538: mol_type = other DNA
atgcaccatcatcatcatcatggcggtagcggcatgttaccgctgtttgatttggaagaaccaccaaaacgcgtgctgcttgttgacggccatcatctggcgtatcgtaccttctacgcactgagccttacgacctcacgtggtgagcctgtccagatggtgtatgggtttgctcgctccctgctgaaagccctgaaggaagatggtcaagccgtagtagtggttttcgatgcgaaagcaccgtcgtttcgtcacgaagcgtacgaggcctataaagctggccgcgcaccgaccccggaagactttccgcgtcagttagcgctcgtcaaacgcctcgtggatttgctgggattagttcgcttggaagctcctggctacgaggcggacgacgtgctcggtacactggccaagaaagcagaacgtgaaggcatggaggtctgcattcttaccggtgatcgcgatttcttccagctgctgtctgagaaagtgagcgttttgctgcccgatggcacgttagtaaccccgaaagatgtgcaagagaaatatggagttccgccagaacgttgggtggactttcgcgcactgactggtgatcgttcagacaacatcccgggcgttgccgggattggtgaaaagacggcgctgcgcctgctggcagaatggggctcggtggaaaatctgctcaagaaccttgatcgtgtgaaacctgatagcttacgccgcaagatcgaagcccacctggaagacttgcgtctgagtctggatcttgcccgtattcgcaccgatctgccgttggaagtagactttaaagctctgcgtcgtcgcacacccgatttagaggggttacgcgcgttcctcgaagaactggagctgggctccctgctgcatgaattcggtttgttgggcggagagaaaccgcgtgaagaagcaccatggccgccgcccgagggtgcctttgtcggctttcttctgtcacgcaaagagccaatgtgggcggaactgttagctcttgcagccgccgcggaagggcgtgttcaccgcgcgacctctcctgtcgaggccctcgctgacctcaaagaagcacgtggtttcttggcgaaagatttagccgtgcttgcattacgcgaaggcgttgcgctcgatccgacggacgacccgcttttggtggcttatttgctcgatcatgcgaataccaacccggaacgtgtcgcccgtcgttacggcggcgagtttactgaagatgcggcagaacgcgcgttgcttagcgaacgcctcttccagacgttatttccacgtctttcggagaaattactctggctctatcaggaagtcgaacgtccattgagtcgcgtgcttgcccatatggaggctcgcggtgtgcgcttagatgttccgttgttagaagcactcagcttcgagttggagaaagaactggaacgtcttgaaggcgaagtctttcgtttagcggggcatcccttcaatctcaactctcgcgaccaattggagaaagtgctctttgatgaattaggtttaacccctgtcacgcgtacagagaagaccggcaaacgttccacttcggcagccgccttggaagcacttcgtggtgtgcacccgatcgtcgagttgattttgcagtatcgcgagctcagcaaactcaaatcaacctatcttgataggttacctcgtcttgttcatccacgtacgggtcgtttacacacccgcttcaatcaaacggcaacagccaccgggcgcttgtcgtcgagtgacccgaacctccagaatattccagtgcgcacgccgctgggccaacacattcgtaaagcgtttgttgcggaagaaggttggttattacttgcggccgattactcccagatcgaacttcgtgtattggcgcatctctctggcgacgagaatcttaaacgcgtgtttcgcgaaggcaaggatattcacactgaaaccgcagcctggatgttcggggtggacccggccttagtggaccccaagatgcgtcgtgccgccaagaccgtcaactttggcgtactctatggtatgtcagcagcacgtcttagtcaggaattgggcattgactacaaagaagctgaagcgtttatcgagcgctatttccaatcctttccgaaagttcgcgcgtggattgaacgtacgctcgaagaaggtcgcactcgcggctatgtggaaacgttattcgggcgtcgtcgctacgttccagatcttacgtctcgtgtccgctcagtgcgcgaagctgctgagcgtatggcctggaatatgcctgttcagggaacagcggcggacctcatgaagatcgccatggtgaaattgtttccgcgcttgaaacccttaggagcccaccttcttctgcaggtgcatgatgaattggtcttggaagtacccgaggatcgcgcagaagaagccaaagcactcgtgaaagaggttatggaaaacgcgtatccgttagatgttccgttggaggtcgaagtgggtgtaggccgtgattggcttgaagcgaaacaagactaatga

SEQ ID NO: 686 - protein, 844 aa, synthetic construct
  REGION 1..844: note = DNA Polymerase Variant
MHHHHHHGGSGMLPLFDLEEPPKRVLLVDGHHLAYRTFYALSLTTSRGEPVQMVYGFARSLLKALKEDGQAVVVVFDAKAPSFRHEAYEAYKAGRAPTPEDFPRQLALVKRLVDLLGLVRLEAPGYEADDVLGTLAKKAEREGMEVCILTGDRDFFQLLSEKVSVLLPDGTLVTPKDVQEKYGVPPERWVDFRALTGDRSDNIPGVAGIGEKTALRLLAEWGSVENLLKNLDRVKPDSLRRKIEAHLEDLRLSLDLARIRTDLPLEVDFKALRRRTPDLEGLRAFLEELELGSLLHEFGLLGGEKPREEAPWPPPEGAFVGFLLSRKEPMWAELLALAAAAEGRVHRATSPVEALADLKEARGFLAKDLAVLALREGVALDPTDDPLLVAYLLDHANTNPERVARRYGGEFTEDAAERALLSERLFQTLFPRLSEKLLWLYQEVERPLSRVLAHMEARGVRLDVPLLEALSFELEKELERLEGEVFRLAGHPFNLNSRDQLEKVLFDELGLTPVTRTEKTGKRSTSAAALEALRGVHPIVELILQYRELSKLKSTYLDRLPRLVHPRTGRLHTRFNQTATATGRLSSSDPNLQNIPVRTPLGQHIRKAFVAEEGWLLLAADYSQIELRVLAHLSGDENLKRVFREGKDIHTETAAWMFGVDPALVDPKMRRAAKTVNFGVLYGMSAARLSQELGIDYKEAEAFIERYFQSFPKVRAWIERTLEEGRTRGYVETLFGRRRYVPDLTSRVRSVREAAERMAWNMPVQGTAADLMKIAMVKLFPRLKPLGAHLLLQVHDELVLEVPEDRAEEAKALVKEVMENAYPLDVPLEVEVGVGRDWLEAKQD

SEQ ID NO: 687 - DNA, 2538 bp, synthetic construct
  misc_feature 1..2538: note = DNA Polymerase Variant
  source 1..2538: mol_type = other DNA
atgcaccatcatcatcatcatggcggtagcggcatgttaccgctgtttgatttggaagaaccaccaaaacgcgtgctgcttgttgacggccatcatctggcgtatcgtaccttctacgcactgagccttacgacctcacgtggtgagcctgtccagatggtgtatgggtttgctcgctccctgctgaaagccctgaaggaagatggtcaagccgtagtagtggttttcgatgcgaaagcaccgtcgtttcgtcacgaagcgtacgaggcctataaagctggccgcgcaccgaccccggaagactttccgcgtcagttagcgctcgtcaaacgcctcgtggatttgctgggattagttcgcttggaagctcctggctacgaggcggacgacgtgctcggtacactggccaagaaagcagaacgtgaaggcatggaggtctgcattcttaccggtgatcgcgatttcttccagctgctgtctgagaaagtgagcgttttgctgcccgatggcacgttagtaaccccgaaagatgtgcaagagaaatatggagttccgccagaacgttgggtggactttcgcgcactgactggtgatcgttcagacaacatcccgggcgttgccgggattggtgaaaagacggcgctgcgcctgctggcagaatggggctcggtggaaaatctgctcaagaaccttgatcgtgtgaaacctgatagcttacgccgcaagatcgaagcccacctggaagacttgcgtctgagtctggatcttgcccgtattcgcaccgatctgccgttggaagtagactttaaagctctgcgtcgtcgcacacccgatttagaggggttacgcgcgttcctcgaagaactggagctgggctccctgctgcatgaattcggtttgttgggcggagagaaaccgcgtgaagaagcaccatggccgccgcccgaaggtgcctttgtcggctttcttctgtcacgcaaagagccaatgtgggcggaactgttagctcttgcagccgccgcggaagggcgtgttcaccgcgcgacctctcctgtcgaggccctcgctgacctcaaagaagcacgtggtttcttggcgaaagatttagccgtgcttgcattacgcgaaggcgttgcgctcgatccgacggacgacccgcttttggtggcttatgtgctcgatcatgcgaataccaacccggaacgtgtcgcccgtcgttacggcggcgagtttactgaagatgcggcagaacgcgcgttgcttagcgaacgcctcttccagacgttatttccacgtctttcggagaaattactctggctctatcaggaagtcgaacgtccattgagtcgcgtgcttgcccatatggaggctcgcggtgtgcgcttagatgttccgttgttagaagcactcagcttcgagttggagaaagaactggaacgtcttgaaggcgaagtctttcgtttagcggggcatcccttcaatctcaactctcgcgaccaattggagaaagtgctctttgatgaattaggtttaacccctgtcacgcgtacagagaagaccggcaaacgttccacttcggcagccgccttggaagcacttcgtggtgctcacccgatcgtcgagttgattttgcagtatcgcgagctcagcaaactcaaatcaacctatcttgataggttacctcgtcttgttcatccacgtacgggtcgtttacacacccgcttcaatcaaacggcaacagccaccgggcgcttgtcgtcgagtgacccgaacctccagaatattccagtgcgcacgccgctgggccaacacattcgtaaagcgtttgttgcggaagaaggttggttattacttgcggccgattactcccagatcgaacttcgtgtattggcgcatctctctggcgacgagaatcttaaacgcgtgtttcgcgaaggcaaggatattcacactgaaaccgcagcctggatgttcggggtggacccagccttagtggaccccaagatgcgtcgtgccgccaagaccgtcaactttggcgtactctatggtatgtcagcagcacgtcttagtcaggaattgggcattgactacaaagaagctgaagcgtttatcgagcgctatttccaatcctttccgaaagttcgcgcgtggattgaacgtacgctcgaagaaggtcgcactcgcggctatgtggaaacgttattcgggcgtcgtcgctacgttccagatcttacgtctcgtgtccgctcagtgcgcgaagctgctgagcgtatggcctggaatatgcctgttcagggaacagcggcggacctcatgaagatcgccatggtgaaattgtttccgcgcttgaaacccttaggagcccaccttcttttacaggtgcatgatgaattggtcttggaagtacccgaggatcgcgcagaagaagccaaagcactcgtgaaagaggttatggaaaacgcgtatccgttagatgttccgttggaggtcgaagtgggtgtaggccgtgattggcttgaagcgaaacaagactaatga

SEQ ID NO: 688 - protein, 844 aa, synthetic construct
  REGION 1..844: note = DNA Polymerase Variant
MHHHHHHGGSGMLPLFDLEEPPKRVLLVDGHHLAYRTFYALSLTTSRGEPVQMVYGFARSLLKALKEDGQAVVVVFDAKAPSFRHEAYEAYKAGRAPTPEDFPRQLALVKRLVDLLGLVRLEAPGYEADDVLGTLAKKAEREGMEVCILTGDRDFFQLLSEKVSVLLPDGTLVTPKDVQEKYGVPPERWVDFRALTGDRSDNIPGVAGIGEKTALRLLAEWGSVENLLKNLDRVKPDSLRRKIEAHLEDLRLSLDLARIRTDLPLEVDFKALRRRTPDLEGLRAFLEELELGSLLHEFGLLGGEKPREEAPWPPPEGAFVGFLLSRKEPMWAELLALAAAAEGRVHRATSPVEALADLKEARGFLAKDLAVLALREGVALDPTDDPLLVAYVLDHANTNPERVARRYGGEFTEDAAERALLSERLFQTLFPRLSEKLLWLYQEVERPLSRVLAHMEARGVRLDVPLLEALSFELEKELERLEGEVFRLAGHPFNLNSRDQLEKVLFDELGLTPVTRTEKTGKRSTSAAALEALRGAHPIVELILQYRELSKLKSTYLDRLPRLVHPRTGRLHTRFNQTATATGRLSSSDPNLQNIPVRTPLGQHIRKAFVAEEGWLLLAADYSQIELRVLAHLSGDENLKRVFREGKDIHTETAAWMFGVDPALVDPKMRRAAKTVNFGVLYGMSAARLSQELGIDYKEAEAFIERYFQSFPKVRAWIERTLEEGRTRGYVETLFGRRRYVPDLTSRVRSVREAAERMAWNMPVQGTAADLMKIAMVKLFPRLKPLGAHLLLQVHDELVLEVPEDRAEEAKALVKEVMENAYPLDVPLEVEVGVGRDWLEAKQD

SEQ ID NO: 689 - DNA, 2538 bp, synthetic construct
  misc_feature 1..2538: note = DNA Polymerase Variant
  source 1..2538: mol_type = other DNA
atgcaccatcatcatcatcatggcggtagcggcatgttaccgctgtttgatttggaagaaccaccaaaacgcgtgctgcttgttgacggccatcatctggcgtatcgtaccttctacgcactgagccttacgacctcacgtggtgagcctgtccagatggtgtatgggtttgctcgctccctgctgaaagccctgaaggaagatggtcaagccgtagtagtggttttcgatgcgaaagcaccgtcgtttcgtcacgaagcgtacgaggcctataaagctggccgcgcaccgaccccggaagactttccgcgtcagttagcgctcgtcaaacgcctcgtggatttgctgggattagttcgcttggaagctcctggctacgaggcggacgacgtgctcggtacactggccaagaaagcagaacgtgaaggcatggaggtctgcattcttaccggtgatcgcgatttcttccagctgctgtctgagaaagtgagcgttttgctgcccgatggcacgttagtaaccccgaaagatgtgcaagagaaatatggagttccgccagaacgttgggtggactttcgcgcactgactggtgatcgttcagacaacatcccgggcgttgccgggattggtgaaaagacggcgctgcgcctgctggcagaatggggctcggtggaaaatctgctcaagaaccttgatcgtgtgaaacctgatagcttacgccgcaagatcgaagcccacctggaagacttgcgtctgagtctggatcttgcccgtattcgcaccgatctgccgttggaagtagactttaaagctctgcgtcgtcgcacacccgatttagaggggttacgcgcgttcctcgaagaactggagctgggctccctgctgcatgaattcggtttgttgggcggagagaaaccgcgtgaagaagcaccatggccgccgcccgaaggtgcctttgtcggctttcttctgtcacgcaaagagccaatgtgggcggaactgttagctcttgcagccgccgcggaagggcgtgttcaccgcgcgacctctcctgtcgaggccctcgctgacctcaaagaagcacgtggtttcttggcgaaagatttagccgtgcttgcattacgcgaaggcgttgcgctcgatccgacggacgacccgcttttggtggcttatttgctcgatcatgcgaataccaacccggaacgtgtcgcccgtcgttacggcggcgagtttactgaagatgcggcagaacgcgcgttgcttagcgaacgcctcttccagacgttatttccacgtctttcggagaaattactctggctctatcaggaagtcgaacgtccattgagtcgcgtgcttgcccatatggaggctcgcggtgtgcgcttagatgttccgttgttagaagcactcagcttcgagttggagaaagaactggaacgtcttgaaggcgaagtctttcgtttagcggggcatcccttcaatctcaactctcgcgaccaattggagaaagtgctctttgatgaattaggtttaacccctgtcacgcgtacagagaagaccggcaaacgttccacttcggcagccgccttggaagcacttcgtggtgctcacccgatcgtcgagttgattttgcagtatcgcgagctcagcaaactcaaatcaacctatcttgataggttacctcgtcttgttcatccacgtacgggtcgtttacacacccgcttcaatcaaacggcaacagccaccgggcgcttgtcgtcgagtgacccgaacctccagaatattccagtgcgcacgccgctgggccaacacattcgtaaagcgtttgttgcggaagaaggttggttattacttgcggccgattactcccagatcgaacttcgtgtattggcgcatctctctggcgacgagaatcttaaacgcgtgtttcgcgaaggcaaggatattcacactgaaaccgcagcctggatgttcggggtggacccagccttagtggaccccaagatgcgtcgtgccgccaagaccgtcaactttggcgtactctatggtatgtcagcagcacgtcttagtcaggaattgggcattgactacaaagaagctgaagcgtttatcgagcgctatttgcaatcctttccgaaagttcgcgcgtggattgaacgtacgctcgaagaaggtcgcactcgcggctatgtggaaacgttattcgggcgtcgtcgctacgttccagatcttacgtctcgtgtccgctcagtgcgcgaagctgctgagcgtatggcctggaatatgcctgttcagggaacagcggcggacctcatgaagatcgccatggtgaaattgtttccgcgcttgaaacccttaggagcccaccttcttttacaggtgcatgatgaattggtcttggaagtacccgaggatcgcgcagaagaagccaaagcactcgtgaaagaggttatggaaaacgcgtatccgttagatgttccgttggaggtcgaagtgggtgtaggccgtgattggcttgaagcgaaacaagactaatga

SEQ ID NO: 690 - protein, 844 aa, synthetic construct
  REGION 1..844: note = DNA Polymerase Variant
MHHHHHHGGSGMLPLFDLEEPPKRVLLVDGHHLAYRTFYALSLTTSRGEPVQMVYGFARSLLKALKEDGQAVVVVFDAKAPSFRHEAYEAYKAGRAPTPEDFPRQLALVKRLVDLLGLVRLEAPGYEADDVLGTLAKKAEREGMEVCILTGDRDFFQLLSEKVSVLLPDGTLVTPKDVQEKYGVPPERWVDFRALTGDRSDNIPGVAGIGEKTALRLLAEWGSVENLLKNLDRVKPDSLRRKIEAHLEDLRLSLDLARIRTDLPLEVDFKALRRRTPDLEGLRAFLEELELGSLLHEFGLLGGEKPREEAPWPPPEGAFVGFLLSRKEPMWAELLALAAAAEGRVHRATSPVEALADLKEARGFLAKDLAVLALREGVALDPTDDPLLVAYLLDHANTNPERVARRYGGEFTEDAAERALLSERLFQTLFPRLSEKLLWLYQEVERPLSRVLAHMEARGVRLDVPLLEALSFELEKELERLEGEVFRLAGHPFNLNSRDQLEKVLFDELGLTPVTRTEKTGKRSTSAAALEALRGAHPIVELILQYRELSKLKSTYLDRLPRLVHPRTGRLHTRFNQTATATGRLSSSDPNLQNIPVRTPLGQHIRKAFVAEEGWLLLAADYSQIELRVLAHLSGDENLKRVFREGKDIHTETAAWMFGVDPALVDPKMRRAAKTVNFGVLYGMSAARLSQELGIDYKEAEAFIERYLQSFPKVRAWIERTLEEGRTRGYVETLFGRRRYVPDLTSRVRSVREAAERMAWNMPVQGTAADLMKIAMVKLFPRLKPLGAHLLLQVHDELVLEVPEDRAEEAKALVKEVMENAYPLDVPLEVEVGVGRDWLEAKQD

SEQ ID NO: 691 - DNA, 2538 bp, synthetic construct
  misc_feature 1..2538: note = DNA Polymerase Variant
  source 1..2538: mol_type = other DNA
atgcaccatcatcatcatcatggcggtagcggcatgttaccgctgtttgatttggaagaaccaccaaaacgcgtgctgcttgttgacggccatcatctggcgtatcgtaccttctacgcactgagccttacgacctcacgtggtgagcctgtccagatggtgtatgggtttgctcgctccctgctgaaagccctgaaggaagatggtcaagccgtagtagtggttttcgatgcgaaagcaccgtcgtttcgtcacgaagcgtacgaggcctataaagctggccgcgcaccgaccccggaagactttccgcgtcagttagcgctcgtcaaacgcctcgtggatttgctgggattagttcgcttggaagctcctggctacgaggcggacgacgtgctcggtacactggccaagaaagcagaacgtgaaggcatggaggtctgcattcttaccggtgatcgcgatttcttccagctgctgtctgagaaagtgagcgttttgctgcccgatggcacgttagtaaccccgaaagatgtgcaagagaaatatggagttccgccagaacgttgggtggactttcgcgcactgactggtgatcgttcagacaacatcccgggcgttgccgggattggtgaaaagacggcgctgcgcctgctggcagaatggggctcggtggaaaatctgctcaagaaccttgatcgtgtgaaacctgatagcttacgccgcaagatcgaagcccacctggaagacttgcgtctgagtctggatcttgcccgtattcgcaccgatctgccgttggaagtagactttaaagctctgcgtcgtcgcacacccgatttagaggggttacgcgcgttcctcgaagaactggagctgggctccctgctgcatgaattcggtttgttgggcggagagaaaccgcgtgaagaagcaccatggccgccgcccgaaggtgcctttgtcggctttcttctgtcacgcaaagagccaatgtgggcggaactgttagctcttgcagccgccgcggaagggcgtgttcaccgcgcgacctctcctgtcgaggccctcgctgacctcaaagaagcacgtggtttcttggcgaaagatttagccgtgcttgcattacgcgaaggcgttgcgctcgatccgacggacgacccgcttttggtggcttatttgctcgatcatgcgaataccaacccggaacgtgtcgcccgtcgttacggcggcgagtttactgaagatgcggcagaacgcgcgttgcttagcgaacgcctcttccagacgttatttgggcgtctttcggagaaattactctggctctatcaggaagtcgaacgtccattgagtcgcgtgcttgcccatatggaggctcgcggtgtgcgcttagatgttccgttgttagaagcactcagcttcgagttggagaaagaactggaacgtcttgaaggcgaagtctttcgtttagcggggcatcccttcaatctcaactctcgcgaccaattggagaaagtgctctttgatgaattaggtttaacccctgtcacgcgtacagagaagaccggcaaacgttccacttcggcagccgccttggaagcacttcgtggtgctcacccgatcgtcgagttgattttgcagtatcgcgagctcagcaaactcaaatcaacctatcttgataggttacctcgtcttgttcatccacgtacgggtcgtttacacacccgcttcaatcaaacggcaacagccaccgggcgcttgtcgtcgagtgacccgaacctccagaatattccagtgcgcacgccgctgggccaacacattcgtaaagcgtttgttgcggaagaaggttggttattacttgcggccgattactcccagatcgaacttcgtgtattggcgcatctctctggcgacgagaatcttaaacgcgtgtttcgcgaaggcaaggatattcacactgaaaccgcagcctggatgttcggggtggacccagccttagtggaccccaagatgcgtcgtgccgccaagaccgtcaactttggcgtactctatggtatgtcagcagcacgtcttagtcaggaattgggcattgactacaaagaagctgaagcgtttatcgagcgctatttccaatcctttccgaaagttcgcgcgtggattgaacgtacgctcgaagaaggtcgcactcgcggctatgtggaaacgttattcgggcgtcgtcgctacgttccagatcttacgtctcgtgtccgctcagtgcgcgaagctgctgagcgtatggcctggaatatgcctgttcagggaacagcggcggacctcatgaagatcgccatggtgaaattgtttccgcgcttgaaacccttaggagcccaccttcttttacaggtgcatgatgaattggtcttggaagtacccgaggatcgcgcagaagaagccaaagcactcgtgaaagaggttatggaaaacgcgtatccgttagatgttccgttggaggtcgaagtgggtgtaggccgtgattggcttgaagcgaaacaagactaatga

SEQ ID NO: 692 - protein, 844 aa, synthetic construct
  REGION 1..844: note = DNA Polymerase Variant
MHHHHHHGGSGMLPLFDLEEPPKRVLLVDGHHLAYRTFYALSLTTSRGEPVQMVYGFARSLLKALKEDGQAVVVVFDAKAPSFRHEAYEAYKAGRAPTPEDFPRQLALVKRLVDLLGLVRLEAPGYEADDVLGTLAKKAEREGMEVCILTGDRDFFQLLSEKVSVLLPDGTLVTPKDVQEKYGVPPERWVDFRALTGDRSDNIPGVAGIGEKTALRLLAEWGSVENLLKNLDRVKPDSLRRKIEAHLEDLRLSLDLARIRTDLPLEVDFKALRRRTPDLEGLRAFLEELELGSLLHEFGLLGGEKPREEAPWPPPEGAFVGFLLSRKEPMWAELLALAAAAEGRVHRATSPVEALADLKEARGFLAKDLAVLALREGVALDPTDDPLLVAYLLDHANTNPERVARRYGGEFTEDAAERALLSERLFQTLFGRLSEKLLWLYQEVERPLSRVLAHMEARGVRLDVPLLEALSFELEKELERLEGEVFRLAGHPFNLNSRDQLEKVLFDELGLTPVTRTEKTGKRSTSAAALEALRGAHPIVELILQYRELSKLKSTYLDRLPRLVHPRTGRLHTRFNQTATATGRLSSSDPNLQNIPVRTPLGQHIRKAFVAEEGWLLLAADYSQIELRVLAHLSGDENLKRVFREGKDIHTETAAWMFGVDPALVDPKMRRAAKTVNFGVLYGMSAARLSQELGIDYKEAEAFIERYFQSFPKVRAWIERTLEEGRTRGYVETLFGRRRYVPDLTSRVRSVREAAERMAWNMPVQGTAADLMKIAMVKLFPRLKPLGAHLLLQVHDELVLEVPEDRAEEAKALVKEVMENAYPLDVPLEVEVGVGRDWLEAKQD

SEQ ID NO: 693 - DNA, 2538 bp, synthetic construct
  misc_feature 1..2538: note = DNA Polymerase Variant
  source 1..2538: mol_type = other DNA
atgcaccatcatcatcatcatggcggtagcggcatgttaccgctgtttgatttggaagaaccaccaaaacgcgtgctgcttgttgacggccatcatctggcgtatcgtaccttctacgcactgagccttacgacctcacgtggtgagcctgtccagatggtgtatgggtttgctcgctccctgctgaaagccctgaaggaagatggtcaagccgtagtagtggttttcgatgcgaaggcaccgtcgtttcgtcacgaagcgtacgaggcctataaagctggccgcgcaccgaccccggaagactttccgcgtcagttagcgctcgtcaaacgcctcgtggatttgctgggattagttcgcttggaagctcctggctacgaggcggacgacgtgctcggtacactggccaagaaagcagaacgtgaaggcatggaggtctgcattcttaccggtgatcgcgatttcttccagctgctgtctgagaaagtgagcgttttgctgcccgatggcacgttagtaaccccgaaagatgtgcaagagaaatatggagttccgccagaacgttgggtggactttcgcgcactgactggtgatcgttcagacaacatcccgggcgttgccgggattggtgaaaagacggcgctgcgcctgctggcagaatggggctcggtggaaaatctgctcaagaaccttgatcgtgtgaaacctgatagcttacgccgcaagatcgaagcccacctggaagacttgcgtctgagtctggatcttgcacgtattcgcaccgatctgccgttggaagtagactttaaagctctgcgtcgtcgcacacccgatttagaggggttacgcgcgttcctcgaagaactggagctgggctccctgctgcatgaattcggtttgttgggcggagagaaaccgcgtgaagaagcaccatggccgccgcccgagggtgcctttgtcggctttcttctgtcacgcaaagagccaatgtgggcggaactgttagctcttgcagccgccgcggaagggcgtgttcaccgcgcgacctctcctgtcgaggccctcgctgacctcaaagaagcacgtggtttcttggcgaaagatttagccgtgcttgcattacgcgaaggcgttgcgctcgatccgacggacgacccgcttttggtggcttatttgctcgatagcgcgaataccaacccggaacgtgtcgcccgtcgttacggcggcgagtttactgaagatgcggcagaacgcgcgttgcttagcgaacgcctcttccagacgttatttccacgtctttcggagaaattactctggctctatcaggaagtcgaacgtccattgagtcgcgtgcttgcccatatggaggctcgcggtgtgcgcttagatgttccgttgttagaagcactcagcttcgaggcggaaaaagaactggaacgtcttgaaggcgaagtctttcgtttagcggggcatcccttcaatctcaactctcgcgaccaattggagaaagtgctctttgatgaattaggtttaacccctgtcacgcgtacagagaagaccggcaaacgttccacttcggcagccgccttggaagcacttcgtggtgtgcacccgatcgtcgagttgattttgcagtatcgcgagctcagcaaactcaaatcaacctatcttgataggttacctcgtcttgttcatccacgtacgggtcgtttacacacccgcttcaatcaaacggcaacagccaccgggcgcttgtcgtcgagtgacccgaacctccagaatattccagtgcgcacgccgctgggccaacacattcgtaaagcgtttgttgcggaagaaggttggttattacttgcggccgattactcccagatcgaacttcgtgtattggcgcatctctctggcgacgagaatcttaaacgcgtgtttcgcgaaggcaaggatattcacactgaaaccgcagcctggatgttcggggtggacccggccttagtggaccccaagatgcgtcgtgccgccaagaccgtcaactttggcgtactctatggtatgtcagcagcacgtcttagtcaggaattgggcattgactacaaagtagctgaagcgtttatcgagcgctatttccaatcctttccgaaagttcgcgcgtggattgaacgtacgctcgaagaaggtcgcactcgcggctatgtggaaacgttattcgggcgtcgtcgctacgttccagatcttacgtctcgtgtccgctcagtgcgcgaagctgctgagcgtatggcctggaatatgcctgttcagggaacagcggcggacctcatgaagatcgccatggtgaaattgtttccgcgcttgaaacccttaggagcccaccttcttctgcaggtgcatgatgaattggtcttggaagtacccgaggatcgcgcagaagaagccaaagcactcgtgaaagaggttatggaaaacgcgtatccgttagatgttccgttggaggtcgaagtgggtgtaggccgtgattggcttgaagcgaaacaagactaatga

SEQ ID NO: 694 - protein, 844 aa, synthetic construct
  REGION 1..844: note = DNA Polymerase Variant
MHHHHHHGGSGMLPLFDLEEPPKRVLLVDGHHLAYRTFYALSLTTSRGEPVQMVYGFARSLLKALKEDGQAVVVVFDAKAPSFRHEAYEAYKAGRAPTPEDFPRQLALVKRLVDLLGLVRLEAPGYEADDVLGTLAKKAEREGMEVCILTGDRDFFQLLSEKVSVLLPDGTLVTPKDVQEKYGVPPERWVDFRALTGDRSDNIPGVAGIGEKTALRLLAEWGSVENLLKNLDRVKPDSLRRKIEAHLEDLRLSLDLARIRTDLPLEVDFKALRRRTPDLEGLRAFLEELELGSLLHEFGLLGGEKPREEAPWPPPEGAFVGFLLSRKEPMWAELLALAAAAEGRVHRATSPVEALADLKEARGFLAKDLAVLALREGVALDPTDDPLLVAYLLDSANTNPERVARRYGGEFTEDAAERALLSERLFQTLFPRLSEKLLWLYQEVERPLSRVLAHMEARGVRLDVPLLEALSFEAEKELERLEGEVFRLAGHPFNLNSRDQLEKVLFDELGLTPVTRTEKTGKRSTSAAALEALRGVHPIVELILQYRELSKLKSTYLDRLPRLVHPRTGRLHTRFNQTATATGRLSSSDPNLQNIPVRTPLGQHIRKAFVAEEGWLLLAADYSQIELRVLAHLSGDENLKRVFREGKDIHTETAAWMFGVDPALVDPKMRRAAKTVNFGVLYGMSAARLSQELGIDYKVAEAFIERYFQSFPKVRAWIERTLEEGRTRGYVETLFGRRRYVPDLTSRVRSVREAAERMAWNMPVQGTAADLMKIAMVKLFPRLKPLGAHLLLQVHDELVLEVPEDRAEEAKALVKEVMENAYPLDVPLEVEVGVGRDWLEAKQD

SEQ ID NO: 695 - DNA, 2538 bp, synthetic construct
  misc_feature 1..2538: note = DNA Polymerase Variant
  source 1..2538: mol_type = other DNA
atgcaccatcatcatcatcatggcggtagcggcatgttaccgctgtttgatttggaagaaccaccaaaacgcgtgctgcttgttgacggccatcatctggcgtatcgtaccttctacgcactgagccttacgacctcacgtggtgagcctgtccagatggtgtatgggtttgctcgctccctgctgaaagccctgaaggaagatggtcaagccgtagtagtggttttcgatgcgaaagcaccgtcgtttcgtcacgaagcgtacgaggcctataaagctggccgcgcaccgaccccggaagactttccgcgtcagttagcgctcgtcaaacgcctcgtggatttgctgggattagttcgcttggaagctcctggctacgaggcggacgacgtgctcggtacactggccaagaaagcagaacgtgaaggcatggaggtctgcattcttaccggtgatcgcgatttcttccagctgctgtctgagaaagtgagcgttttgctgcccgatggcacgttagtaaccccgaaagatgtgcaagagaaatatggagttccgccagaacgttgggtggactttcgcgcactgactggtgatcgttcagacaacatcccgggcgttgccgggattggtgaaaagacggcgctgcgcctgctggcagaatggggctcggtggaaaatctgctcaagaaccttgatcgtgtgaaacctgatagcttacgccgcaagatcgaagcccacctggaagacttgcgtctgagtctggatcttgcccgtattcgcaccgatctgccgttggaagtagactttaaagctctgcgtcgtcgcacacccgatttagaggggttacgcgcgttcctcgaagaactggagctgggctccctgctgcatgaattcggtttgttgggcggagagaaaccgcgtgaagaagcaccatggccgccgcccgaaggtgcctttgtcggctttcttctgtcacgcaaagagccaatgtgggcggaactgttagctcttgcagccgccgcggaagggcgtgttcaccgcgcgacctctcctgtcgaggccctcgctgacctcaaagaagcacgtggtttcttggcgaaagatttagccgtgcttgcattacgcgaaggcgttgcgctcgatccgacggacgacccgcttttggtggcttatttgctcgatcatgcgaataccaacccggaacgtgtcgcccgtcgttacggcggcgagtttactgaagatgcggcagaacgcgcgttgcttagcgaacgcctcttccagacgttatttccacgtctttcggagaaattactctggctctatcaggaagtcgaacgtccattgagtcgcgtgctttcgcatatggaggctcgcggtgtgcgcttagatgttccgttgttagaagcactcagcttcgagttggagaaagaactggaacgtcttgaaggcgaagtctttcgtttagcggggcatcccttcaatctcaactctcgcgaccaattggagaaagtgctctttgatgaattaggtttaacccctgtcacgcgtacagagaagaccggcaaacgttccacttcggcagccgccttggaagcacttcgtggtgctcacccgatcgtcgagttgattttgcagtatcgcgagctcagcaaactcaaatcaacctatcttgataggttacctcgtcttgttcatccacgtacgggtcgtttacacacccgcttcaatcaaacggcaacagccaccgggcgcttgtcgtcgagtgacccgaacctccagaatattccagtgcgcacgccgctgggccaacacattcgtaaagcgtttgttgcggaagaaggttggttattacttgcggccgattactcccagatcgaacttcgtgtattggcgcatctctctggcgacgagaatcttaaacgcgtgtttcgcgaaggcaaggatattcacactgaaaccgcagcctggatgttcggggtggacccagccttagtggaccccaagatgcgtcgtgccgccaagaccgtcaactttggcgtactctatggtatgtcagcagcacgtcttagtcaggaattgggcattgactacaaagaagctgaagcgtttatcgagcgctatttccaatcctttccgaaagttcgcgcgtggattgaacgtacgctcgaagaaggtcgcactcgcggctatgtggaaacgttattcgggcgtcgtcgctacgttccagatcttacgtctcgtgtccgctcagtgcgcgaagctgctgagcgtatggcctggaatatgcctgttcagggaacagcggcggacctcatgaagatcgccatggtgaaattgtttccgcgcttgaaacccttaggagcccaccttcttttacaggtgcatgatgaattggtcttggaagtacccgaggatcgcgcagaagaagccaaagcactcgtgaaagaggttatggaaaacgcgtatccgttagatgttccgttggaggtcgaagtgggtgtaggccgtgattggcttgaagcgaaacaagactaatga

SEQ ID NO: 696 - protein, 844 aa, synthetic construct
  REGION 1..844: note = DNA Polymerase Variant
MHHHHHHGGSGMLPLFDLEEPPKRVLLVDGHHLAYRTFYALSLTTSRGEPVQMVYGFARSLLKALKEDGQAVVVVFDAKAPSFRHEAYEAYKAGRAPTPEDFPRQLALVKRLVDLLGLVRLEAPGYEADDVLGTLAKKAEREGMEVCILTGDRDFFQLLSEKVSVLLPDGTLVTPKDVQEKYGVPPERWVDFRALTGDRSDNIPGVAGIGEKTALRLLAEWGSVENLLKNLDRVKPDSLRRKIEAHLEDLRLSLDLARIRTDLPLEVDFKALRRRTPDLEGLRAFLEELELGSLLHEFGLLGGEKPREEAPWPPPEGAFVGFLLSRKEPMWAELLALAAAAEGRVHRATSPVEALADLKEARGFLAKDLAVLALREGVALDPTDDPLLVAYLLDHANTNPERVARRYGGEFTEDAAERALLSERLFQTLFPRLSEKLLWLYQEVERPLSRVLSHMEARGVRLDVPLLEALSFELEKELERLEGEVFRLAGHPFNLNSRDQLEKVLFDELGLTPVTRTEKTGKRSTSAAALEALRGAHPIVELILQYRELSKLKSTYLDRLPRLVHPRTGRLHTRFNQTATATGRLSSSDPNLQNIPVRTPLGQHIRKAFVAEEGWLLLAADYSQIELRVLAHLSGDENLKRVFREGKDIHTETAAWMFGVDPALVDPKMRRAAKTVNFGVLYGMSAARLSQELGIDYKEAEAFIERYFQSFPKVRAWIERTLEEGRTRGYVETLFGRRRYVPDLTSRVRSVREAAERMAWNMPVQGTAADLMKIAMVKLFPRLKPLGAHLLLQVHDELVLEVPEDRAEEAKALVKEVMENAYPLDVPLEVEVGVGRDWLEAKQD

SEQ ID NO: 697 - DNA, 2538 bp, synthetic construct
  misc_feature 1..2538: note = DNA Polymerase Variant
  source 1..2538: mol_type = other DNA
atgcaccatcatcatcatcatggcggtagcggcatgttaccgctgtttgatttggaagaaccaccaaaacgcgtgctgcttgttgacggccatcatctggcgtatcgtaccttctacgcactgagccttacgacctcacgtggtgagcctgtccagatggtgtatgggtttgctcgctccctgctgaaagccctgaaggaagatggtcaagccgtagtagtggttttcgatgcgaaagcaccgtcgtttcgtcacgaagcgtacgaggcctataaagctggccgcgcaccgaccccggaagactttccgcgtcagttagcgctcgtcaaacgcctcgtggatttgctgggattagttcgcttggaagctcctggctacgaggcggacgacgtgctcggtacactggccaagaaagcagaacgtgaaggcatggaggtctgcattcttaccggtgatcgcgatttcttccagctgctgtctgagaaagtgagcgttttgctgcccgatggcacgttagtaaccccgaaagatgtgcaagagaaatatggagttccgccagaacgttgggtggactttcgcgcactgactggtgatcgttcagacaacatcccgggcgttgccgggattggtgaaaagacggcgctgcgcctgctggcagaatggggctcggtggaaaatctgctcaagaaccttgatcgtgtgaaacctgatagcttacgccgcaagatcgaagcccacctggaagacttgcgtctgagtctggatcttgcccgtattcgcaccgatctgccgttggaagtagactttaaagctctgcgtcgtcgcacacccgatttagaggggttacgcgcgttcctcgaagaactggagctgggctccctgctgcatgaattcggtttgttgggcggagagaaaccgcgtgaagaagcaccatggccgccgcccgaaggtgcctttgtcggctttcttctgtcacgcaaagagccaatgtgggcggaactgttagctcttgcagccgccgcggaagggcgtgttcaccgcgcgacctctcctgtcgaggccctcgctgacctcaaagaagcacgtggtttcttggcgaaagatttagccgtgcttgcattacgcgaaggcgttgcgctcgatccgacggacgacccgcttttggtggcttatttgctcgatcatgcgaataccaacccggaacgtgtcgcccgtcgttacggcggcgagtttactgaagatgcggcagaacgcgcgttgcttagcgaacgcctcttccagacgttatttccacgtctttcggagaaattactctggctctatcaggaagtcgaacgtccattgagtcgcgtgcttgcccatatggaggctcgcggtgtgcgcttagatgttccgttgttagaagcactcagcttcgagttggagaaagaactggaacgtcttgaaggcgaagtctttcgtttagcggggcatcccttcaatctcaactctcgcgaccaattggagaaagtgctctttgatgaattaggtttaacccctgtcacgcgtacagagaagaccggcaaacgttccacttcggcagccgccttggaagcacttcgtggtgctcacccgatcgtcgagttgattttgcagtatcgcgagctcagcaaactcaaatcaacctatcttgataggttacctcgtcttgttcatccacgtacgggtcgtttacacacccgcttcaatcaaacggcaacagccaccgggcgcttgtcgtcgagtgacccgaacctccagaatattccagtgcgcacgccgctgggccaacacattcgtaaagcgtttgttgcggaagaaggttggttattacttgcggccgattactcccagatcgaacttcgtgtattggcgcatctctctggcgacgagaatcttaaacgcgtgtttcgcgaaggcaaggatattcacactgaaaccgcagcctggatgttcggggtggacccagccttagtggaccccaagatgcgtcgtgccgccaagaccgtcaactttggcgtactctatggtatgtcagcagcacgtcttagtcaggaattgggcattgacgttaaagaagctgaagcgtttatcgagcgctatttccaatcctttccgaaagttcgcgcgtggattgaacgtacgctcgaagaaggtcgcactcgcggctatgtggaaacgttattcgggcgtcgtcgctacgttccagatcttacgtctcgtgtccgctcagtgcgcgaagctgctgagcgtatggcctggaatatgcctgttcagggaacagcggcggacctcatgaagatcgccatggtgaaattgtttccgcgcttgaaacccttaggagcccaccttcttttacaggtgcatgatgaattggtcttggaagtacccgaggatcgcgcagaagaagccaaagcactcgtgaaagaggttatggaaaacgcgtatccgttagatgttccgttggaggtcgaagtgggtgtaggccgtgattggcttgaagcgaaacaagactaatga

SEQ ID NO: 698 - protein, 844 aa, synthetic construct
  REGION 1..844: note = DNA Polymerase Variant
MHHHHHHGGSGMLPLFDLEEPPKRVLLVDGHHLAYRTFYALSLTTSRGEPVQMVYGFARSLLKALKEDGQAVVVVFDAKAPSFRHEAYEAYKAGRAPTPEDFPRQLALVKRLVDLLGLVRLEAPGYEADDVLGTLAKKAEREGMEVCILTGDRDFFQLLSEKVSVLLPDGTLVTPKDVQEKYGVPPERWVDFRALTGDRSDNIPGVAGIGEKTALRLLAEWGSVENLLKNLDRVKPDSLRRKIEAHLEDLRLSLDLARIRTDLPLEVDFKALRRRTPDLEGLRAFLEELELGSLLHEFGLLGGEKPREEAPWPPPEGAFVGFLLSRKEPMWAELLALAAAAEGRVHRATSPVEALADLKEARGFLAKDLAVLALREGVALDPTDDPLLVAYLLDHANTNPERVARRYGGEFTEDAAERALLSERLFQTLFPRLSEKLLWLYQEVERPLSRVLAHMEARGVRLDVPLLEALSFELEKELERLEGEVFRLAGHPFNLNSRDQLEKVLFDELGLTPVTRTEKTGKRSTSAAALEALRGAHPIVELILQYRELSKLKSTYLDRLPRLVHPRTGRLHTRFNQTATATGRLSSSDPNLQNIPVRTPLGQHIRKAFVAEEGWLLLAADYSQIELRVLAHLSGDENLKRVFREGKDIHTETAAWMFGVDPALVDPKMRRAAKTVNFGVLYGMSAARLSQELGIDVKEAEAFIERYFQSFPKVRAWIERTLEEGRTRGYVETLFGRRRYVPDLTSRVRSVREAAERMAWNMPVQGTAADLMKIAMVKLFPRLKPLGAHLLLQVHDELVLEVPEDRAEEAKALVKEVMENAYPLDVPLEVEVGVGRDWLEAKQD

SEQ ID NO: 699 - DNA, 2538 bp, synthetic construct
  misc_feature 1..2538: note = DNA Polymerase Variant
  source 1..2538: mol_type = other DNA
atgcaccatcatcatcatcatggcggtagcggcatgttaccgctgtttgatttggaagaaccaccaaaacgcgtgctgcttgttgacggccatcatctggcgtatcgtaccttctacgcactgagccttacgacctcacgtggtgagcctgtccagatggtgtatgggtttgctcgctccctgctgaaagccctgaaggaagatggtcaagccgtagtagtggttttcgatgcgaaagcaccgtcgtttcgtcacgaagcgtacgaggcctataaagctggccgcgcaccgaccccggaagactttccgcgtcagttagcgctcgtcaaacgcctcgtggatttgctgggattagttcgcttggaagctcctggctacgaggcggacgacgtgctcggtacactggccaagaaagcagaacgtgaaggcatggaggtctgcattcttaccggtgatcgcgatttcttccagctgctgtctgagaaagtgagcgttttgctgcccgatggcacgttagtaaccccgaaagatgtgcaagagaaatatggagttccgccagaacgttgggtggactttcgcgcactgactggtgatcgttcagacaacatcccgggcgttgccgggattggtgaaaagacggcgctgcgcctgctggcagaatggggctcggtggaaaatctgctcaagaaccttgatcgtgtgaaacctgatagcttacgccgcaagatcgaagcccacctggaagacttgcgtctgagtctggatcttgcccgtattcgcaccgatctgccgttggaagtagactttaaagctctgcgtcgtcgcacacccgatttagaggggttacgcgcgttcctcgaagaactggagctgggctccctgctgcatgaattcggtttgttgggcggagagaaaccgcgtgaagaagcaccatggccgccgcccgaaggtgcctttgtcggctttcttctgtcacgcaaagagccaatgtgggcggaactgttagctcttgcagccgccgcggaagggcgtgttcaccgcgcgacctctcctgtcgaggccctcgctgacctcaaagaagcacgtggtttcttggcgaaagatttagccgtgcttgcattacgcgaaggcgttgcgctcgatccgacggacgacccgcttttggtggcttatttgctcgatcatgcgaataccaacccggaacgtgtcgcccgtcgttacggcggcgagtttactgaagatgcggcagaacgcgcgttgcttagcgaacgcctcttccggacgttatttccacgtctttcggagaaattactctggctctatcaggaagtcgaacgtccattgagtcgcgtgcttgcccatatggaggctcgcggtgtgcgcttagatgttccgttgttagaagcactcagcttcgagttggagaaagaactggaacgtcttgaaggcgaagtctttcgtttagcggggcatcccttcaatctcaactctcgcgaccaattggagaaagtgctctttgatgaattaggtttaacccctgtcacgcgtacagagaagaccggcaaacgttccacttcggcagccgccttggaagcacttcgtggtgctcacccgatcgtcgagttgattttgcagtatcgcgagctcagcaaactcaaatcaacctatcttgataggttacctcgtcttgttcatccacgtacgggtcgtttacacacccgcttcaatcaaacggcaacagccaccgggcgcttgtcgtcgagtgacccgaacctccagaatattccagtgcgcacgccgctgggccaacacattcgtaaagcgtttgttgcggaagaaggttggttattacttgcggccgattactcccagatcgaacttcgtgtattggcgcatctctctggcgacgagaatcttaaacgcgtgtttcgcgaaggcaaggatattcacactgaaaccgcagcctggatgttcggggtggacccagccttagtggaccccaagatgcgtcgtgccgccaagaccgtcaactttggcgtactctatggtatgtcagcagcacgtcttagtcaggaattgggcattgactacaaagaagctgaagcgtttatcgagcgctatttccaatcctttccgaaagttcgcgcgtggattgaacgtacgctcgaagaaggtcgcactcgcggctatgtggaaacgttattcgggcgtcgtcgctacgttccagatcttacgtctcgtgtccgctcagtgcgcgaagctgctgagcgtatggcctggaatatgcctgttcagggaacagcggcggacctcatgaagatcgccatggtgaaattgtttccgcgcttgaaacccttaggagcccaccttcttttacaggtgcatgatgaattggtcttggaagtacccgaggatcgcgcagaagaagccaaagcactcgtgaaagaggttatggaaaacgcgtatccgttagatgttccgttggaggtcgaagtgggtgtaggccgtgattggcttgaagcgaaacaagactaatga

SEQ ID NO: 700 - protein, 844 aa, synthetic construct
  REGION 1..844: note = DNA Polymerase Variant
MHHHHHHGGSGMLPLFDLEEPPKRVLLVDGHHLAYRTFYALSLTTSRGEPVQMVYGFARSLLKALKEDGQAVVVVFDAKAPSFRHEAYEAYKAGRAPTPEDFPRQLALVKRLVDLLGLVRLEAPGYEADDVLGTLAKKAEREGMEVCILTGDRDFFQLLSEKVSVLLPDGTLVTPKDVQEKYGVPPERWVDFRALTGDRSDNIPGVAGIGEKTALRLLAEWGSVENLLKNLDRVKPDSLRRKIEAHLEDLRLSLDLARIRTDLPLEVDFKALRRRTPDLEGLRAFLEELELGSLLHEFGLLGGEKPREEAPWPPPEGAFVGFLLSRKEPMWAELLALAAAAEGRVHRATSPVEALADLKEARGFLAKDLAVLALREGVALDPTDDPLLVAYLLDHANTNPERVARRYGGEFTEDAAERALLSERLFRTLFPRLSEKLLWLYQEVERPLSRVLAHMEARGVRLDVPLLEALSFELEKELERLEGEVFRLAGHPFNLNSRDQLEKVLFDELGLTPVTRTEKTGKRSTSAAALEALRGAHPIVELILQYRELSKLKSTYLDRLPRLVHPRTGRLHTRFNQTATATGRLSSSDPNLQNIPVRTPLGQHIRKAFVAEEGWLLLAADYSQIELRVLAHLSGDENLKRVFREGKDIHTETAAWMFGVDPALVDPKMRRAAKTVNFGVLYGMSAARLSQELGIDYKEAEAFIERYFQSFPKVRAWIERTLEEGRTRGYVETLFGRRRYVPDLTSRVRSVREAAERMAWNMPVQGTAADLMKIAMVKLFPRLKPLGAHLLLQVHDELVLEVPEDRAEEAKALVKEVMENAYPLDVPLEVEVGVGRDWLEAKQD

SEQ ID NO: 701 - DNA, 2538 bp, synthetic construct
  misc_feature 1..2538: note = DNA Polymerase Variant
  source 1..2538: mol_type = other DNA
atgcaccatcatcatcatcatggcggtagcggcatgttaccgctgtttgatttggaagaaccaccaaaacgcgtgctgcttgttgacggccatcatctggcgtatcgtaccttctacgcactgagccttacgacctcacgtggtgagcctgtccagatggtgtatgggtttgctcgctccctgctgaaagccctgaaggaagatggtcaagccgtagtagtggttttcgatgcgcgtgcaccgtcgtttcgtcacgaagcgtacgaggcctataaagctggccgcgcaccgaccccggaagactttccgcgtcagttagcgctcgtcaaacgcctcgtggatttgctgggattagttcgcttggaagctcctggctacgaggcggacgacgtgctcggtacactggccaagaaagcagaacgtgaaggcatggaggtctgcattcttaccggtgatcgcgatttcttccagctgctgtctgagaaagtgagcgttttgctgcccgatggcacgttagtaaccccgaaagatgtgcaagagaaatatggagttccgccagaacgttgggtggactttcgcgcactgactggtgatcgttcagacaacatcccgggcgttgccgggattggtgaaaagacggcgctgcgcctgctggcagaatggggctcggtggaaaatctgctcaagaaccttgatcgtgtgaaacctgatagcttacgccgcaagatcgaagcccacctggaagacttgcgtctgagtctggatcttgcccgtattcgcaccgatctgccgttggaagtagactttaaagctctgcgtcgtcgcacacccgatttagaggggttacgcgcgttcctcgaagaactggagctgggctccctgctgcatgaattcggtttgttgggcggagagaaaccgcgtgaagaagcaccatggccgccgcccgagggtgcctttgtcggctttcttctgtcacgcaaagagccaatgtgggcggaactgttagctcttgcagccgccgcggaagggcgtgttcaccgcgcgacctctcctgtcgaggccctcgctgacctcaaagaagcacgtggtttcttggcgaaagatttagccgtgcttgcattacgcgaaggcgttgcgctcgatccgacggacgacccgcttttggtggcttatttgctcgatagcgcgaataccaacccggaacgtgtcgcccgtcgttacggcggcgagtttactgaagatgcggcagaacgcgcgttgcttagcgaacgcctcttccagacgttatttccacgtctttcggagaaattactctggctctatcaggaagtcgaacgtccattgagtcgcgtgcttgcccatatggaggctcgcggtgtgcgcttagatgttccgttgttagaagcactcagcttcgagctggaaaaagaactggaacgtcttgaaggcgaagtctttcgtttagcggggcatcccttcaatctcaactctcgcgaccaattggagaaagtgctctttgatgaattaggtttaacccctgtcacgcgtacagagaagaccggcaaacgttccacttcggcagccgccttggaagcacttcgtggtgcgcacccgatcgtcgagttgattttgcagtatcgcgagctcagcaaactcaaatcaacctatcttgataggttacctcgtcttgttcatccacgtacgggtcgtttacacacccgcttcaatcaaacggcaacagccaccgggcgcttgtcgtcgagtgacccgaacctccagaatattccagtgcgcacgccgctgggccaacacattcgtaaagcgtttgttgcggaagaaggttggttattacttgcggccgattactcccagatcgaacttcgtgtattggcgcatctctctggcgacgagaatcttaaacgcgtgtttcgcgaaggcaaggatattcacactgaaaccgcagcctggatgttcggggtggacccggccttagtggaccccaagatgcgtcgtgccgccaagaccgtcaactttggcgtactctatggtatgtcagcagcacgtcttagtcaggaattgggcattgactacaaagtagctgaagcgtttatcgagcgctatttccaatcctttccgaaagttcgcgcgtggattgaacgtacgctcgaagaaggtcgcactcgcggctatgtggaaacgttattcgggcgtcgtcgctacgttccagatcttacgtctcgtgtccgctcagtgcgcgaagctgctgagcgtatggcctggaatatgcctgttcagggaacagcggcggacctcatgaagatcgccatggtgaaattgtttccgcgcttgaaacccttaggagcccaccttcttctgcaggtgcatgatgaattggtcttggaagtacccgaggatcgcgcagaagaagccaaagcactcgtgaaagaggttatggaaaacgcgtatccgttagatgttccgttggaggtcgaagtgggtgtaggccgtgattggcttgaagcgaaacaagactaatga

SEQ ID NO: 702 - protein, 844 aa, synthetic construct
  REGION 1..844: note = DNA Polymerase Variant
MHHHHHHGGSGMLPLFDLEEPPKRVLLVDGHHLAYRTFYALSLTTSRGEPVQMVYGFARSLLKALKEDGQAVVVVFDARAPSFRHEAYEAYKAGRAPTPEDFPRQLALVKRLVDLLGLVRLEAPGYEADDVLGTLAKKAEREGMEVCILTGDRDFFQLLSEKVSVLLPDGTLVTPKDVQEKYGVPPERWVDFRALTGDRSDNIPGVAGIGEKTALRLLAEWGSVENLLKNLDRVKPDSLRRKIEAHLEDLRLSLDLARIRTDLPLEVDFKALRRRTPDLEGLRAFLEELELGSLLHEFGLLGGEKPREEAPWPPPEGAFVGFLLSRKEPMWAELLALAAAAEGRVHRATSPVEALADLKEARGFLAKDLAVLALREGVALDPTDDPLLVAYLLDSANTNPERVARRYGGEFTEDAAERALLSERLFQTLFPRLSEKLLWLYQEVERPLSRVLAHMEARGVRLDVPLLEALSFELEKELERLEGEVFRLAGHPFNLNSRDQLEKVLFDELGLTPVTRTEKTGKRSTSAAALEALRGAHPIVELILQYRELSKLKSTYLDRLPRLVHPRTGRLHTRFNQTATATGRLSSSDPNLQNIPVRTPLGQHIRKAFVAEEGWLLLAADYSQIELRVLAHLSGDENLKRVFREGKDIHTETAAWMFGVDPALVDPKMRRAAKTVNFGVLYGMSAARLSQELGIDYKVAEAFIERYFQSFPKVRAWIERTLEEGRTRGYVETLFGRRRYVPDLTSRVRSVREAAERMAWNMPVQGTAADLMKIAMVKLFPRLKPLGAHLLLQVHDELVLEVPEDRAEEAKALVKEVMENAYPLDVPLEVEVGVGRDWLEAKQD

SEQ ID NO: 703 - DNA, 2538 bp, synthetic construct
  misc_feature 1..2538: note = DNA Polymerase Variant
  source 1..2538: mol_type = other DNA
atgcaccatcatcatcatcatggcggtagcggcatgttaccgctgtttgatttggaagaaccaccaaaacgcgtgctgcttgttgacggccatcatctggcgtatcgtaccttctacgcactgagccttacgacctcacgtggtgagcctgtccagatggtgtatgggtttgctcgctccctgctgaaagccctgaaggaagatggtcaagccgtagtagtggttttcgatgcgaaagcaccgtcgtttcgtcacgaagcgtacgaggcctataaagctggccgcgcaccgaccccggaagactttccgcgtcagttagcgctcgtcaaacgcctcgtggatttgctgggattagttcgcttggaagctcctggctacgaggcggacgacgtgctcggtacactggccaagaaagcagaacgtgaaggcatggaggtctgcattcttaccggtgatcgcgatttcttccagctgctgtctgagaaagtgagcgttttgctgcccgatggcacgttagtaaccccgaaagatgtgcaagagaaatatggagttccgccagaacgttgggtggactttcgcgcactgactggtgatcgttcagacaacatcccgggcgttgccgggattggtgaaaagacggcgctgcgcctgctggcagaatggggctcggtggaaaatctgctcaagaaccttgatcgtgtgaaacctgatagcttacgccgcaagatcgaagcccacctggaagacttgcgtctgagtctggatcttgcccgtattcgcaccgatctgccgttggaagtagactttaaagctctgcgtcgtcgcacacccgatttagaggggttacgcgcgttcctcgaagaactggagctgggctccctgctgcatgaattcggtttgttgggcggagagaaaccgcgtgaagaagcaccatggccgccgcccgaaggtgcctttgtcggctttcttctgtcacgcaaagagccaatgtgggcggaactgttagctcttgcagccgccgcggaagggcgtgttcaccgcgcgacctctcctgtcgaggccctcgctgacctcaaagaagcacgtggtttcttggcgaaagatttagccgtgcttgcattacgcgaaggctttgcgctcgatccgacggacgacccgcttttggtggcttatttgctcgatcatgcgaataccaacccggaacgtgtcgcccgtcgttacggcggcgagtttactgaagatgcggcagaacgcgcgttgcttagcgaacgcctcttccagacgttatttccacgtctttcggagaaattactctggctctatcaggaagtcgaacgtccattgagtcgcgtgcttgcccatatggaggctcgcggtgtgcgcttagatgttccgttgttagaagcactcagcttcgagttggagaaagaactggaacgtcttgaaggcgaagtctttcgtttagcggggcatcccttcaatctcaactctcgcgaccaattggagaaagtgctctttgatgaattaggtttaacccctgtcacgcgtacagagaagaccggcaaacgttccacttcggcagccgccttggaagcacttcgtggtgctcacccgatcgtcgagttgattttgcagtatcgcgagctcagcaaactcaaatcaacctatcttgataggttacctcgtcttgttcatccacgtacgggtcgtttacacacccgcttcaatcaaacggcaacagccaccgggcgcttgtcgtcgagtgacccgaacctccagaatattccagtgcgcacgccgctgggccaacacattcgtaaagcgtttgttgcggaagaaggttggttattacttgcggccgattactcccagatcgaacttcgtgtattggcgcatctctctggcgacgagaatcttaaacgcgtgtttcgcgaaggcaaggatattcacactgaaaccgcagcctggatgttcggggtggacccagccttagtggaccccaagatgcgtcgtgccgccaagaccgtcaactttggcgtactctatggtatgtcagcagcacgtcttagtcaggaattgggcattgactacaaagaagctgaagcgtttatcgagcgctatttccaatcctttccgaaagttcgcgcgtggattgaacgtacgctcgaagaaggtcgcactcgcggctatgtggaaacgttattcgggcgtcgtcgctacgttccagatcttacgtctcgtgtccgctcagtgcgcgaagctgctgagcgtatggcctggaatatgcctgttcagggaacagcggcggacctcatgaagatcgccatggtgaaattgtttccgcgcttgaaacccttaggagcccaccttcttttacaggtgcatgatgaattggtcttggaagtacccgaggatcgcgcagaagaagccaaagcactcgtgaaagaggttatggaaaacgcgtatccgttagatgttccgttggaggtcgaagtgggtgtaggccgtgattggcttgaagcgaaacaagactaatga

SEQ ID NO: 704 - protein, 844 aa, synthetic construct
  REGION 1..844: note = DNA Polymerase Variant
MHHHHHHGGSGMLPLFDLEEPPKRVLLVDGHHLAYRTFYALSLTTSRGEPVQMVYGFARSLLKALKEDGQAVVVVFDAKAPSFRHEAYEAYKAGRAPTPEDFPRQLALVKRLVDLLGLVRLEAPGYEADDVLGTLAKKAEREGMEVCILTGDRDFFQLLSEKVSVLLPDGTLVTPKDVQEKYGVPPERWVDFRALTGDRSDNIPGVAGIGEKTALRLLAEWGSVENLLKNLDRVKPDSLRRKIEAHLEDLRLSLDLARIRTDLPLEVDFKALRRRTPDLEGLRAFLEELELGSLLHEFGLLGGEKPREEAPWPPPEGAFVGFLLSRKEPMWAELLALAAAAEGRVHRATSPVEALADLKEARGFLAKDLAVLALREGFALDPTDDPLLVAYLLDHANTNPERVARRYGGEFTEDAAERALLSERLFQTLFPRLSEKLLWLYQEVERPLSRVLAHMEARGVRLDVPLLEALSFELEKELERLEGEVFRLAGHPFNLNSRDQLEKVLFDELGLTPVTRTEKTGKRSTSAAALEALRGAHPIVELILQYRELSKLKSTYLDRLPRLVHPRTGRLHTRFNQTATATGRLSSSDPNLQNIPVRTPLGQHIRKAFVAEEGWLLLAADYSQIELRVLAHLSGDENLKRVFREGKDIHTETAAWMFGVDPALVDPKMRRAAKTVNFGVLYGMSAARLSQELGIDYKEAEAFIERYFQSFPKVRAWIERTLEEGRTRGYVETLFGRRRYVPDLTSRVRSVREAAERMAWNMPVQGTAADLMKIAMVKLFPRLKPLGAHLLLQVHDELVLEVPEDRAEEAKALVKEVMENAYPLDVPLEVEVGVGRDWLEAKQD

SEQ ID NO: 705 - DNA, 2538 bp, synthetic construct
  misc_feature 1..2538: note = DNA Polymerase Variant
  source 1..2538: mol_type = other DNA
atgcaccatcatcatcatcatggcggtagcggcatgttaccgctgtttgatttggaagaaccaccaaaacgcgtgctgcttgttgacggccatcatctggcgtatcgtaccttctacgcactgagccttacgacctcacgtggtgagcctgtccagatggtgtatgggtttgctcgctccctgctgaaagccctgaaggaagatggtcaagccgtagtagtggttttcgatgcgaaagcaccgtcgtttcgtcacgaagcgtacgaggcctataaagctggccgcgcaccgaccccggaagactttccgcgtcagttagcgctcgtcaaacgcctcgtggatttgctgggattagttcgcttggaagctcctggctacgaggcggacgacgtgctcggtacactggccaagaaagcagaacgtgaaggcatggaggtctgcattcttaccggtgatcgcgatttcttccagctgctgtctgagaaagtgagcgttttgctgcccgatggcacgttagtaaccccgaaagatgtgcaagagaaatatggagttccgccagaacgttgggtggactttcgcgcactgactggtgatcgttcagacaacatcccgggcgttgccgggattggtgaaaagacggcgctgcgcctgctggcagaatggggctcggtggaaaatctgctcaagaaccttgatcgtgtgaaacctgatagcttacgccgcaagatcgaagcccacctggaagacttgcgtctgagtctggatcttgcccgtattcgcaccgatctgccgttggaagtagactttaaagctctgcgtcgtcgcacacccgatttagaggggttacgcgcgttcctcgaagaactggagctgggctccctgctgcatgaattcggtttgttgggcggagagaaaccgcgtgaagaagcaccatggccgccgcccgaaggtgcctttgtcggctttcttctgtcacgcaaagagccaatgtgggcggaactgttagctcttgcagccgccgcggaagggcgtgttcaccgcgcgacctctcctgtcgaggccctcgctgacctcaaagaagcacgtggtttcttggcgaaagatttagttgtgcttgcattacgcgaaggcgttgcgctcgatccgacggacgacccgcttttggtggcttatttgctcgatcatgcgaataccaacccggaacgtgtcgcccgtcgttacggcggcgagtttactgaagatgcggcagaacgcgcgttgcttagcgaacgcctcttccagacgttatttccacgtctttcggagaaattactctggctctatcaggaagtcgaacgtccattgagtcgcgtgcttgcccatatggaggctcgcggtgtgcgcttagatgttccgttgttagaagcactcagcttcgagttggagaaagaactggaacgtcttgaaggcgaagtctttcgtttagcggggcatcccttcaatctcaactctcgcgaccaattggagaaagtgctctttgatgaattaggtttaacccctgtcacgcgtacagagaagaccggcaaacgttccacttcggcagccgccttggaagcacttcgtggtgctcacccgatcgtcgagttgattttgcagtatcgcgagctcagcaaactcaaatcaacctatcttgataggttacctcgtcttgttcatccacgtacgggtcgtttacacacccgcttcaatcaaacggcaacagccaccgggcgcttgtcgtcgagtgacccgaacctccagaatattccagtgcgcacgccgctgggccaacacattcgtaaagcgtttgttgcggaagaaggttggttattacttgcggccgattactcccagatcgaacttcgtgtattggcgcatctctctggcgacgagaatcttaaacgcgtgtttcgcgaaggcaaggatattcacactgaaaccgcagcctggatgttcggggtggacccagccttagtggaccccaagatgcgtcgtgccgccaagaccgtcaactttggcgtactctatggtatgtcagcagcacgtcttagtcaggaattgggcattgactacaaagaagctgaagcgtttatcgagcgctatttccaatcctttccgaaagttcgcgcgtggattgaacgtacgctcgaagaaggtcgcactcgcggctatgtggaaacgttattcgggcgtcgtcgctacgttccagatcttacgtctcgtgtccgctcagtgcgcgaagctgctgagcgtatggcctggaatatgcctgttcagggaacagcggcggacctcatgaagatcgccatggtgaaattgtttccgcgcttgaaacccttaggagcccaccttcttttacaggtgcatgatgaattggtcttggaagtacccgaggatcgcgcagaagaagccaaagcactcgtgaaagaggttatggaaaacgcgtatccgttagatgttccgttggaggtcgaagtgggtgtaggccgtgattggcttgaagcgaaacaagactaatga

SEQ ID NO: 706 - protein, 844 aa, synthetic construct
  REGION 1..844: note = DNA Polymerase Variant
MHHHHHHGGSGMLPLFDLEEPPKRVLLVDGHHLAYRTFYALSLTTSRGEPVQMVYGFARSLLKALKEDGQAVVVVFDAKAPSFRHEAYEAYKAGRAPTPEDFPRQLALVKRLVDLLGLVRLEAPGYEADDVLGTLAKKAEREGMEVCILTGDRDFFQLLSEKVSVLLPDGTLVTPKDVQEKYGVPPERWVDFRALTGDRSDNIPGVAGIGEKTALRLLAEWGSVENLLKNLDRVKPDSLRRKIEAHLEDLRLSLDLARIRTDLPLEVDFKALRRRTPDLEGLRAFLEELELGSLLHEFGLLGGEKPREEAPWPPPEGAFVGFLLSRKEPMWAELLALAAAAEGRVHRATSPVEALADLKEARGFLAKDLVVLALREGVALDPTDDPLLVAYLLDHANTNPERVARRYGGEFTEDAAERALLSERLFQTLFPRLSEKLLWLYQEVERPLSRVLAHMEARGVRLDVPLLEALSFELEKELERLEGEVFRLAGHPFNLNSRDQLEKVLFDELGLTPVTRTEKTGKRSTSAAALEALRGAHPIVELILQYRELSKLKSTYLDRLPRLVHPRTGRLHTRFNQTATATGRLSSSDPNLQNIPVRTPLGQHIRKAFVAEEGWLLLAADYSQIELRVLAHLSGDENLKRVFREGKDIHTETAAWMFGVDPALVDPKMRRAAKTVNFGVLYGMSAARLSQELGIDYKEAEAFIERYFQSFPKVRAWIERTLEEGRTRGYVETLFGRRRYVPDLTSRVRSVREAAERMAWNMPVQGTAADLMKIAMVKLFPRLKPLGAHLLLQVHDELVLEVPEDRAEEAKALVKEVMENAYPLDVPLEVEVGVGRDWLEAKQD

SEQ ID NO: 707 - DNA, 2538 bp, synthetic construct
  misc_feature 1..2538: note = DNA Polymerase Variant
  source 1..2538: mol_type = other DNA
atgcaccatcatcatcatcatggcggtagcggcatgttaccgctgtttgatttggaagaaccaccaaaacgcgtgctgcttgttgacggccatcatctggcgtatcgtaccttctacgcactgagccttacgacctcacgtggtgagcctgtccagatggtgtatgggtttgctcgctccctgctgaaagccctgaaggaagatggtcaagccgtagtagtggttttcgatgcgaaagcaccgtcgtttcgtcacgaagcgtacgaggcctataaagctggccgcgcaccgaccccggaagactttccgcgtcagttagcgctcgtcaaacgcctcgtggatttgctgggattagttcgcttggaagctcctggctacgaggcggacgacgtgctcggtacactggccaagaaagcagaacgtgaaggcatggaggtctgcattcttaccggtgatcgcgatttcttccagctgctgtctgagaaagtgagcgttttgctgcccgatggcacgttagtaaccccgaaagatgtgcaagagaaatatggagttccgccagaacgttgggtggactttcgcgcactgactggtgatcgttcagacaacatcccgggcgttgccgggattggtgaaaagacggcgctgcgcctgctggcagaatggggctcggtggaaaatctgctcaagaaccttgatcgtgtgaaacctgatagcttacgccgcaagatcgaagcccacctggaagacttgcgtctgagtctggatcttgcccgtattcgcaccgatctgccgttggaagtagactttaaagctctgcgtcgtcgcacacccgatttagaggggttacgcgcgttcctcgaagaactggagctgggctccctgctgcatgaattcggtttgttgggcggagagaaaccgcgtgaagaagcaccatggccgccgcccgaaggtgcctttgtcggctttcttctgtcacgcaaagagccaatgtgggcggaactgttagctcttgcagccgccgcggaagggcgtgttcaccgcgcgacctctcctgtcgaggccctcgctgacctcaaagaagcacgtggtttcttggcgaaagatttagccgtgcttgcattacgcgaaggcgttgcgctcgatccgacggacgacccgcttttggtggcttatttgctcgatcatgcgaataccaacccggaacgtgtcgcccgtcgttacggcggcgagtttactgaagatgcggcagaacgcgcgttgcttagcgaacgcctcttccagacgttatttccacgtctttcggagaaattactctggctctatcaggaagtcgaacgtccattgagtcgcgtgcttgcccatatggaggctcgcggtgtgcgcttagatgttccgttgttagaagcactcagcttcgagttggagaaagaactggaacgtcttgaaggcgaagtctttcgtttagcggggcatcccttcaatctcaactctcgcgaccaattggagaaagtgctctttgatgaattaggtttaacccctgtcacgcgtacagagaagaccggcaaacgttccacttcggcagccgccttggaagcacttcgtggtgctcacccgatcgtcgagttgattttgcagtatcgcgagctcagcaaactcaaatcaacctatcttgataggttacctcgtcttgttcatccacgtacgggtcgtttacacacccgcttcaatcaaacggcaacagccaccgggcgcttgtcgtcgagtgacccgaacctccagaatattccagtgcgcacgccgctgggccaacacattcgtaaagcgtttgttgcggaagaaggttggttattacttgcggccgattactcccagatcgaacttcgtgtattggcgcatctctctggcgacgagaatcttaaacgcgtgtttcgcgaaggcaaggatattcacactgaaaccgcagcctggatgttcggggtggacccagccttagtggaccccaagatgcgtcgtgccgccaagaccgtcaactttggcgtactctatggtatgtcagcagcacgtcttagtcaggaattgggcattgactacaaagaagctgaagcgtttatcgagtcttatttccaatcctttccgaaagttcgcgcgtggattgaacgtacgctcgaagaaggtcgcactcgcggctatgtggaaacgttattcgggcgtcgtcgctacgttccagatcttacgtctcgtgtccgctcagtgcgcgaagctgctgagcgtatggcctggaatatgcctgttcagggaacagcggcggacctcatgaagatcgccatggtgaaattgtttccgcgcttgaaacccttaggagcccaccttcttttacaggtgcatgatgaattggtcttggaagtacccgaggatcgcgcagaagaagccaaagcactcgtgaaagaggttatggaaaacgcgtatccgttagatgttccgttggaggtcgaagtgggtgtaggccgtgattggcttgaagcgaaacaggactaatga

SEQ ID NO: 708 - protein, 844 aa, synthetic construct
  REGION 1..844: note = DNA Polymerase Variant
MHHHHHHGGSGMLPLFDLEEPPKRVLLVDGHHLAYRTFYALSLTTSRGEPVQMVYGFARSLLKALKEDGQAVVVVFDAKAPSFRHEAYEAYKAGRAPTPEDFPRQLALVKRLVDLLGLVRLEAPGYEADDVLGTLAKKAEREGMEVCILTGDRDFFQLLSEKVSVLLPDGTLVTPKDVQEKYGVPPERWVDFRALTGDRSDNIPGVAGIGEKTALRLLAEWGSVENLLKNLDRVKPDSLRRKIEAHLEDLRLSLDLARIRTDLPLEVDFKALRRRTPDLEGLRAFLEELELGSLLHEFGLLGGEKPREEAPWPPPEGAFVGFLLSRKEPMWAELLALAAAAEGRVHRATSPVEALADLKEARGFLAKDLAVLALREGVALDPTDDPLLVAYLLDHANTNPERVARRYGGEFTEDAAERALLSERLFQTLFPRLSEKLLWLYQEVERPLSRVLAHMEARGVRLDVPLLEALSFELEKELERLEGEVFRLAGHPFNLNSRDQLEKVLFDELGLTPVTRTEKTGKRSTSAAALEALRGAHPIVELILQYRELSKLKSTYLDRLPRLVHPRTGRLHTRFNQTATATGRLSSSDPNLQNIPVRTPLGQHIRKAFVAEEGWLLLAADYSQIELRVLAHLSGDENLKRVFREGKDIHTETAAWMFGVDPALVDPKMRRAAKTVNFGVLYGMSAARLSQELGIDYKEAEAFIESYFQSFPKVRAWIERTLEEGRTRGYVETLFGRRRYVPDLTSRVRSVREAAERMAWNMPVQGTAADLMKIAMVKLFPRLKPLGAHLLLQVHDELVLEVPEDRAEEAKALVKEVMENAYPLDVPLEVEVGVGRDWLEAKQD

SEQ ID NO: 709 - DNA, 2538 bp, synthetic construct
  misc_feature 1..2538: note = DNA Polymerase Variant
  source 1..2538: mol_type = other DNA
atgcaccatcatcatcatcatggcggtagcggcatgttaccgctgtttgatttggaagaaccaccaaaacgcgtgctgcttgttgacggccatcatctggcgtatcgtaccttctacgcactgagccttacgacctcacgtggtgagcctgtccagatggtgtatgggtttgctcgctccctgctgaaagccctgaaggaagatggtcaagccgtagtagtggttttcgatgcgaaggcaccgtcgtttcgtcacgaagcgtacgaggcctataaagctggccgcgcaccgaccccggaagactttccgcgtcagttagcgctcgtcaaacgcctcgtggatttgctgggattagttcgcttggaagctcctggctacgaggcggacgacgtgctcggtacactggccaagaaagcagaacgtgaaggcatggaggtctgcattcttaccggtgatcgcgatttcttccagctgctgtctgagaaagtgagcgttttgctgcccgatggcacgttagtaaccccgaaagatgtgcaagagaaatatggagttccgccagaacgttgggtggactttcgcgcactgactggtgatcgttcagacaacatcccgggcgttgccgggattggtgaaaagacggcgctgcgcctgctggcagaatggggctcggtggaaaatctgctcaagaaccttgatcgtgtgaaacctgatagcttacgccgcaagatcgaagcccacctggaagacttgcgtctgagtctggatcttgtacgtattcgcaccgatctgccgttggaagtagactttaaagctctgcgtcgtcgcacacccgatttagaggggttacgcgcgttcctcgaagaactggagctgggctccctgctgcatgaattcggtttgttgggcggagagaaaccgcgtgaagaagcaccatggccgccgcccgagggtgcctttgtcggctttcttctgtcacgcaaagagccaatgtgggcggaactgttagctcttgcagccgccgcggaagggcgtgttcaccgcgcgacctctcctgtcgaggccctcgctgacctcaaagaagcacgtggtttcttggcgaaagatttagccgtgcttgcattacgcgaaggcgttgcgctcgatccgacggacgacccgcttttggtggcttatttgctcgatagcgcgaataccaacccggaacgtgtcgcccgtcgttacggcggcgagtttactgaagatgcggcagaacgcgcgttgcttagcgaacgcctcttccagacgttatttccacgtctttcggagaaattactctggctctatcaggaagtcgaacgtccattgagtcgcgtgcttgcccatatggaggctcgcggtgtgcgcttagatgttccgttgttagaagcactcagcttcgaggcggcaaaagaactggaacgtcttgaaggcgaagtctttcgtttagcggggcatcccttcaatctcaactctcgcgaccaattggagaaagtgctctttgatgaattaggtttaacccctgtcacgcgtacagagaagaccggcaaacgttccacttcggcagccgccttggaagcacttcgtggtgtgcacccgatcgtcgagttgattttgcagtatcgcgagctcagcaaactcaaatcaacctatcttgataggttacctcgtcttgttcatccacgtacgggtcgtttacacacccgcttcaatcaaacggcaacagccaccgggcgcttgtcgtcgagtgacccgaacctccagaatattccagtgcgcacgccgctgggccaacacattcgtaaagcgtttgttgcggaagaaggttggttattacttgcggccgattactcccagatcgaacttcgtgtattggcgcatctctctggcgacgagaatcttaaacgcgtgtttcgcgaaggcaaggatattcacactgaaaccgcagcctggatgttcggggtggactcggccttagtggaccccaagatgcgtcgtgccgccaagaccgtcaactttggcgtactctatggtatgtcagcagcacgtcttagtcaggaattgggcattgactacaaagaagctgaagcgtttatcgagcgctatttccaatcctttccgaaagttcgcgcgtggattgaacgtacgctcgaagaaggtcgcactcgcggctatgtggaaacgttattcgggcgtcgtcgctacgttccagatcttacgtctcgtgtccgctcagtgcgcgaagctgctgagcgtatggcctggaatatgcctgttcagggaacagcggcggacctcatgaagatcgccatggtgaaattgtttccgcgcttgaaacccttaggagcccaccttcttctgcaggtgcatgatgaattggtcttggaagtacccgaggatcgcgcagaagaagccaaagcactcgtgaaagaggttatggaaaacgcgtatccgttagatgttccgttggaggtcgaagtgggtgtaggccgtgattggcttgaagcgaaacaagactaatga

SEQ ID NO: 710 - protein, 844 aa, synthetic construct
  REGION 1..844: note = DNA Polymerase Variant
MHHHHHHGGSGMLPLFDLEEPPKRVLLVDGHHLAYRTFYALSLTTSRGEPVQMVYGFARSLLKALKEDGQAVVVVFDAKAPSFRHEAYEAYKAGRAPTPEDFPRQLALVKRLVDLLGLVRLEAPGYEADDVLGTLAKKAEREGMEVCILTGDRDFFQLLSEKVSVLLPDGTLVTPKDVQEKYGVPPERWVDFRALTGDRSDNIPGVAGIGEKTALRLLAEWGSVENLLKNLDRVKPDSLRRKIEAHLEDLRLSLDLVRIRTDLPLEVDFKALRRRTPDLEGLRAFLEELELGSLLHEFGLLGGEKPREEAPWPPPEGAFVGFLLSRKEPMWAELLALAAAAEGRVHRATSPVEALADLKEARGFLAKDLAVLALREGVALDPTDDPLLVAYLLDSANTNPERVARRYGGEFTEDAAERALLSERLFQTLFPRLSEKLLWLYQEVERPLSRVLAHMEARGVRLDVPLLEALSFEAAKELERLEGEVFRLAGHPFNLNSRDQLEKVLFDELGLTPVTRTEKTGKRSTSAAALEALRGVHPIVELILQYRELSKLKSTYLDRLPRLVHPRTGRLHTRFNQTATATGRLSSSDPNLQNIPVRTPLGQHIRKAFVAEEGWLLLAADYSQIELRVLAHLSGDENLKRVFREGKDIHTETAAWMFGVDSALVDPKMRRAAKTVNFGVLYGMSAARLSQELGIDYKEAEAFIERYFQSFPKVRAWIERTLEEGRTRGYVETLFGRRRYVPDLTSRVRSVREAAERMAWNMPVQGTAADLMKIAMVKLFPRLKPLGAHLLLQVHDELVLEVPEDRAEEAKALVKEVMENAYPLDVPLEVEVGVGRDWLEAKQD

SEQ ID NO: 711 - DNA, 2538 bp, synthetic construct
  misc_feature 1..2538: note = DNA Polymerase Variant
  source 1..2538: mol_type = other DNA
atgcaccatcatcatcatcatggcggtagcggcatgttaccgctgtttgatttggaagaaccaccaaaacgcgtgctgcttgttgacggccatcatctggcgtatcgtaccttctacgcactgagccttacgacctcacgtggtgagcctgtccagatggtgtatgggtttgctcgctccctgctgaaagccctgaaggaagatggtcaagccgtagtagtggttttcgatgcgaaggcaccgtcgtttcgtcacgaagcgtacgaggcctataaagctggccgcgcaccgaccccggaagactttccgcgtcagttagcgctcgtcaaacgcctcgtggatttgctgggattagttcgcttggaagctcctggctacgaggcggacgacgtgctcggtacactggccaagaaagcagaacgtgaaggcatggaggtctgcattcttaccggtgatcgcgatttcttccagctgctgtctgagaaagtgagcgttttgctgcccgatggcacgttagtaaccccgaaagatgtgcaagagaaatatggagttccgccagaacgttgggtggactttcgcgcactgactggtgatcgttcagacaacatcccgggcgttgccgggattggtgaaaagacggcgctgcgcctgctggcagaatggggctcggtggaaaatctgctcaagaaccttgatcgtgtgaaacctgatagcttacgccgcaagatcgaagcccacctggaagacttgcgtctgagtctggatcttgcccgtattcgcaccgatctgccgttggaagtagactttaaagctctgcgtcgtcgcacacccgatttagaggggttacgcgcgttcctcgaagaactggagctgggctccctgctgcatgaattcggtttgttgggcggagagaaaccgcgtgaagaagcaccatggccgccgcccgagggtgcctttgtcggctttcttctgtcacgcaaagagccaatgtgggcggaactgttagctcttgcagccgccgcggaagggcgtgttcaccgcgcgacctctcctgtcgaggccctcgctgacctcaaagaagcacgtggtttcttggcgaaagatttagccgtgcttgcattacgcgaaggcgttgcgctcgatccgacggacgacccgcttttggtggcttatttgctcgatcatgcgaataccaacccggaacgtgtcgcccgtcgttacggcggcgagtttactgaagatgcggcagaacgcgcgttgcttagcgaacgcctcttccagacgttatttccacgtctttcggagaaattactctggctctatcaggaagtcgaacgtccattgagtcgcgtgcttgcccatatggaggctcgcggtgtgcgcttagatgttccgttgttagaagcactcagcttcgaggcggaaaaagaactggaacgtcttgaaggcgaagtctttcgtttagcggggcatcccttcaatctcaactctcgcgaccaattggagaaagtgctctttgatgaattaggtttaacccctgtcacgcgtacagagaagaccggcaaacgttccacttcggcagccgccttggaagcacttcgtggtgtgcacccgatcgtcgagttgattttgcagtatcgcgagctcagcaaactcaaatcaacctatcttgataggttacctaagcttgttcatccacgtacgggtcgtttacacacccgcttcaatcaaacggcaacagccaccgggcgcttgtcgtcgagtgacccgaacctccagaatattccagtgcgcacgccgctgggccaacacattcgtaaagcgtttgttgcggaagaaggttggttattacttgcggccgattactcccagatcgaacttcgtgtattggcgcatctctctggcgacgagaatcttaaacgcgtgtttcgcgaaggcaaggatattcacactgaaaccgcagcctggatgttcggggtggacccggccttagtggaccccaagatgcgtcgtgccgccaagaccgtcaactttggcgtactctatggtatgtcagcagcacgtcttagtcaggaattgggcattgactacaaagaagctgaagcgtttatcgagcgctatttccaatcctttccgaaagttcgcgcgtggattgaacgtacgctcgaagaaggtcgcactcgcggctatgtggaaacgttattcgggcgtcgtcgctacgttccagatcttacgtctcgtgtccgctcagtgcgcgaagctgctgagcgtatggcctggaatatgcctgttcagggaacagcggcggacctcatgaagatcgccatggtgaaattgtttccgcgcttgaaacccttaggagcccaccttcttttacaggtgcatgatgaattggtcttggaagtacccgaggatcgcgcagaagaagccaaagcactcgtgaaagaggttatggaaaacgcgtatccgttagatgttccgttggaggtcgaagtgggtgtaggccgtgattggcttgaagcgaaacaagactaatga

SEQ ID NO: 712 - protein, 844 aa, synthetic construct
  REGION 1..844: note = DNA Polymerase Variant
MHHHHHHGGSGMLPLFDLEEPPKRVLLVDGHHLAYRTFYALSLTTSRGEPVQMVYGFARSLLKALKEDGQAVVVVFDAKAPSFRHEAYEAYKAGRAPTPEDFPRQLALVKRLVDLLGLVRLEAPGYEADDVLGTLAKKAEREGMEVCILTGDRDFFQLLSEKVSVLLPDGTLVTPKDVQEKYGVPPERWVDFRALTGDRSDNIPGVAGIGEKTALRLLAEWGSVENLLKNLDRVKPDSLRRKIEAHLEDLRLSLDLARIRTDLPLEVDFKALRRRTPDLEGLRAFLEELELGSLLHEFGLLGGEKPREEAPWPPPEGAFVGFLLSRKEPMWAELLALAAAAEGRVHRATSPVEALADLKEARGFLAKDLAVLALREGVALDPTDDPLLVAYLLDHANTNPERVARRYGGEFTEDAAERALLSERLFQTLFPRLSEKLLWLYQEVERPLSRVLAHMEARGVRLDVPLLEALSFEAEKELERLEGEVFRLAGHPFNLNSRDQLEKVLFDELGLTPVTRTEKTGKRSTSAAALEALRGVHPIVELILQYRELSKLKSTYLDRLPKLVHPRTGRLHTRFNQTATATGRLSSSDPNLQNIPVRTPLGQHIRKAFVAEEGWLLLAADYSQIELRVLAHLSGDENLKRVFREGKDIHTETAAWMFGVDPALVDPKMRRAAKTVNFGVLYGMSAARLSQELGIDYKEAEAFIERYFQSFPKVRAWIERTLEEGRTRGYVETLFGRRRYVPDLTSRVRSVREAAERMAWNMPVQGTAADLMKIAMVKLFPRLKPLGAHLLLQVHDELVLEVPEDRAEEAKALVKEVMENAYPLDVPLEVEVGVGRDWLEAKQD

SEQ ID NO: 713 - DNA, 2538 bp, synthetic construct
  misc_feature 1..2538: note = DNA Polymerase Variant
  source 1..2538: mol_type = other DNA
atgcaccatcatcatcatcatggcggtagcggcatgttaccgctgtttgatttggaagaaccaccaaaacgcgtgctgcttgttgacggccatcatctggcgtatcgtaccttctacgcactgagccttacgacctcacgtggtgagcctgtccagatggtgtatgggtttgctcgctccctgctgaaagccctgaaggaagatggtcaagccgtagtagtggttttcgatgcgaaggcaccgtcgtttcgtcacgaagcgtacgaggcctataaagctggccgcgcaccgaccccggaagactttccgcgtcagttagcgctcgtcaaacgcctcgtggatttgctgggattagttcgcttggaagctcctggctacgaggcggacgacgtgctcggtacactggccaagaaagcagaacgtgaaggcatggaggtctgcattcttaccggtgatcgcgatttcttccagctgctgtctgagaaagtgagcgttttgctgcccgatggcacgttagtaaccccgaaagatgtgcaagagaaatatggagttccgccagaacgttgggtggactttcgcgcactgactggtgatcgttcagacaacatcccgggcgttgccgggattggtgaaaagacggcgctgcgcctgctggcagaatggggctcggtggaaaatctgctcaagaaccttgatcgtgtgaaacctgatagcttacgccgcaagatcgaagcccacctggaagacttgcgtctgagtctggatcttgtacgtattcgcaccgatctgccgttggaagtagactttaaagctctgcgtcgtcgcacacccgatttagaggggttacgcgcgttcctcgaagaactggagctgggctccctgctgcatgaattcggtttgttgggcggagagaaaccgcgtgaagaagcaccatggccgccgcccgagggtgcctttgtcggctttcttctgtcacgcaaagagccaatgtgggcggaactgttagctcttgcagccgccgcggaagggcgtgttcaccgcgcgacctctcctgtcgaggccctcgctgacctcaaagaagcacgtggtttcttggcgaaagatttagccgtgcttgcattacgcgaaggcgttgcgctcgatccgacggacgacccgcttttggtggcttatttgctcgatagcgcgaataccaacccggaacgtgtcgcccgtcgttacggcggcgagtttactgaagatgcggcagaacgcgcgttgcttagcgaacgcctcttccagacgttatttccacgtctttcggagaaattactctggctctatcaggaagtcgaacgtccattgagtcgcgtgcttgcccatatggaggctcgcggtgtgcgcttagatgttccgttgttagaagcactcagcttcgaggcggaaaaagaactggaacgtcttgaaggcgaagtctttcgtttagcggggcatcccttcaatctcaactctcgcgaccaattggagaaagtgctctttgatgaattaggtttaacccctgtcacgcgtacagagaagaccggcaaacgttccacttcggcagccgccttggaagcacttcgtggtgtgcacccgatcgtcgagttgattttgcagtatcgcgagctcagcaaactcaaatcaacctatcttgataggttacctcgtcttgttcatccacgtacgggtcgtttacacacccgcttcaatcaaacggcaacagccaccgggcgcttgtcgtcgagtgacccgaacctccagaatattccagtgcgcacgccgctgggccaacacattcgtaaagcgtttgttgcggaagaaggttggttattacttgcggccgattactcccagatcgaacttcgtgtattggcgcatctctctggcgacgagaatcttaaacgcgtgtttcgcgaaggcaaggatattcacactgaaaccgcagcctggatgttcggggtggacccggccttagtggaccccaagatgcgtcgtgccgccaagaccgtcaactttggcgtactctatggtatgtcagcagcacgtcttagtcaggaattgggcattgactacaaagaagctgaagcgtttatcgagcgctatttccaatcctttccgaaagttcgcgcgtggattgaacgtacgctcgaagaaggtcgcactcgcggctatgtggaaacgttattcgggcgtcgtcgctacgttccagatcttacgtctcgtgtccgctcagtgcgcgaagctgctgagcgtatggcctggaatatgcctgttcagggaacagcggcggacctcatgaagatcgccatggtgaaattgtttccgcgcttgaaacccttaggagcccaccttcttctgcaggtgcatgatgaattggtcttggaagtacccgaggatcgcgcagaagaagccaaagcactcgtgaaagaggttatggaaaacgcgtatccgttagatgttccgttggaggtcgaagtgggtgtaggccgtgattggcttgaagcgaaacaagactaatga

SEQ ID NO: 714 - protein, 844 aa, synthetic construct
  REGION 1..844: note = DNA Polymerase Variant
MHHHHHHGGSGMLPLFDLEEPPKRVLLVDGHHLAYRTFYALSLTTSRGEPVQMVYGFARSLLKALKEDGQAVVVVFDAKAPSFRHEAYEAYKAGRAPTPEDFPRQLALVKRLVDLLGLVRLEAPGYEADDVLGTLAKKAEREGMEVCILTGDRDFFQLLSEKVSVLLPDGTLVTPKDVQEKYGVPPERWVDFRALTGDRSDNIPGVAGIGEKTALRLLAEWGSVENLLKNLDRVKPDSLRRKIEAHLEDLRLSLDLVRIRTDLPLEVDFKALRRRTPDLEGLRAFLEELELGSLLHEFGLLGGEKPREEAPWPPPEGAFVGFLLSRKEPMWAELLALAAAAEGRVHRATSPVEALADLKEARGFLAKDLAVLALREGVALDPTDDPLLVAYLLDSANTNPERVARRYGGEFTEDAAERALLSERLFQTLFPRLSEKLLWLYQEVERPLSRVLAHMEARGVRLDVPLLEALSFEAEKELERLEGEVFRLAGHPFNLNSRDQLEKVLFDELGLTPVTRTEKTGKRSTSAAALEALRGVHPIVELILQYRELSKLKSTYLDRLPRLVHPRTGRLHTRFNQTATATGRLSSSDPNLQNIPVRTPLGQHIRKAFVAEEGWLLLAADYSQIELRVLAHLSGDENLKRVFREGKDIHTETAAWMFGVDPALVDPKMRRAAKTVNFGVLYGMSAARLSQELGIDYKEAEAFIERYFQSFPKVRAWIERTLEEGRTRGYVETLFGRRRYVPDLTSRVRSVREAAERMAWNMPVQGTAADLMKIAMVKLFPRLKPLGAHLLLQVHDELVLEVPEDRAEEAKALVKEVMENAYPLDVPLEVEVGVGRDWLEAKQD

SEQ ID NO: 715 - DNA, 2538 bp, synthetic construct
  misc_feature 1..2538: note = DNA Polymerase Variant
  source 1..2538: mol_type = other DNA
atgcaccatcatcatcatcatggcggtagcggcatgttaccgctgtttgatttggaagaaccaccaaaacgcgtgctgcttgttgacggccatcatctggcgtatcgtaccttctacgcactgagccttacgacctcacgtggtgagcctgtccagatggtgtatgggtttgctcgctccctgctgaaagccctgaaggaagatggtcaagccgtagtagtggttttcgatgcgcgtgcaccgtcgtttcgtcacgaagcgtacgaggcctataaagctggccgcgcaccgaccccggaagactttccgcgtcagttagcgctcgtcaaacgcctcgtggatttgctgggattagttcgcttggaagctcctggctacgaggcggacgacgtgctcggtacactggccaagaaagcagaacgtgaaggcatggaggtctgcattcttaccggtgatcgcgatttcttccagctgctgtctgagaaagtgagcgttttgctgcccgatggcacgttagtaaccccgaaagatgtgcaagagaaatatggagttccgccagaacgttgggtggactttcgcgcactgactggtgatcgttcagacaacatcccgggcgttgccgggattggtgaaaagacggcgctgcgcctgctggcagaatggggctcggtggaaaatctgctcaagaaccttgatcgtgtgaaacctgatagcttacgccgcaagatcgaagcccacctggaagacttgcgtctgagtctggatcttgtacgtattcgcaccgatctgccgttggaagtagactttaaagctctgcgtcgtcgcacacccgatttagaggggttacgcgcgttcctcgaagaactggagctgggctccctgctgcatgaattcggtttgttgggcggagagaaaccgcgtgaagaagcaccatggccgccgcccgaaggtgcctttgtcggctttcttctgtcacgcaaagagccaatgtgggcggaactgttagctcttgcagccgccgcggaagggcgtgttcaccgcgcgacctctcctgtcgaggccctcgctgacctcaaagaagcacgtggtttcttggcgaaagatttagccgtgcttgcattacgcgaaggcgttgcgctcgatccgacggacgacccgcttttggtggcttatttgctcgatagcgcgaataccaacccggaacgtgtcgcccgtcgttacggcggcgagtttactgaagatgcggcagaacgcgcgttgcttagcgaacgcctcttccagacgttatttccacgtctttcggagaaattactctggctctatcaggaagtcgaacgtccattgagtcgcgtgcttgcccatatggaggctcgcggtgtgcgcttagatgttccgttgttagaagcactcagcttcgaggcggcaaaagaactggaacgtcttgaaggcgaagtctttcgtttagcggggcatcccttcaatctcaactctcgcgaccaattggagaaagtgctctttgatgaattaggtttaacccctgtcacgcgtacagagaagaccggcaaacgttccacttcggcagccgccttggaagcacttcgtggtgtgcacccgatcgtcgagttgattttgcagtatcgcgagctcagcaaactcaaatcaacctatcttgataggttacctaagcttgttcatccacgtacgggtcgtttacacacccgcttcaatcaaacggcaacagccaccgggcgcttgtcgtcgagtgacccgaacctccagaatattccagtgcgcacgccgctgggccaacacattcgtaaagcgtttgttgcggaagaaggttggttattacttgcggccgattactcccagatcgaacttcgtgtattggcgcatctctctggcgacgagaatcttaaacgcgtgtttcgcgaaggcaaggatattcacactgaaaccgcagcctggatgttcggggtggacccggccttagtggaccccaagatgcgtcgtgccgccaagaccgtcaactttggcgtactctatggtatgtcagcagcacgtcttagtcaggaattgggcattgactacaaagaagctgaagcgtttatcgagcgctatttccaatcctttccgaaagttcgcgcgtggattgaacgtacgctcgaagaaggtcgcactcgcggctatgtggaaacgttattcgggcgtcgtcgctacgttccagatcttacgtctcgtgtccgctcagtgcgcgaagctgctgagcgtatggcctggaatatgcctgttcagggaacagcggcggacctcatgaagatcgccatggtgaaattgtttccgcgcttgaaacccttaggagcccaccttcttctgcaggtgcatgatgaattggtcttggaagtacccgaggatcgcgcagaagaagccaaagcactcgtgaaagaggttatggaaaacgcgtatccgttagatgttccgttggaggtcgaagtgggtgtaggccgtgattggcttgaagcgaaacaagactaatga

SEQ ID NO: 716 - protein, 844 aa, synthetic construct
  REGION 1..844: note = DNA Polymerase Variant
MHHHHHHGGSGMLPLFDLEEPPKRVLLVDGHHLAYRTFYALSLTTSRGEPVQMVYGFARSLLKALKEDGQAVVVVFDARAPSFRHEAYEAYKAGRAPTPEDFPRQLALVKRLVDLLGLVRLEAPGYEADDVLGTLAKKAEREGMEVCILTGDRDFFQLLSEKVSVLLPDGTLVTPKDVQEKYGVPPERWVDFRALTGDRSDNIPGVAGIGEKTALRLLAEWGSVENLLKNLDRVKPDSLRRKIEAHLEDLRLSLDLVRIRTDLPLEVDFKALRRRTPDLEGLRAFLEELELGSLLHEFGLLGGEKPREEAPWPPPEGAFVGFLLSRKEPMWAELLALAAAAEGRVHRATSPVEALADLKEARGFLAKDLAVLALREGVALDPTDDPLLVAYLLDSANTNPERVARRYGGEFTEDAAERALLSERLFQTLFPRLSEKLLWLYQEVERPLSRVLAHMEARGVRLDVPLLEALSFEAAKELERLEGEVFRLAGHPFNLNSRDQLEKVLFDELGLTPVTRTEKTGKRSTSAAALEALRGVHPIVELILQYRELSKLKSTYLDRLPKLVHPRTGRLHTRFNQTATATGRLSSSDPNLQNIPVRTPLGQHIRKAFVAEEGWLLLAADYSQIELRVLAHLSGDENLKRVFREGKDIHTETAAWMFGVDPALVDPKMRRAAKTVNFGVLYGMSAARLSQELGIDYKEAEAFIERYFQSFPKVRAWIERTLEEGRTRGYVETLFGRRRYVPDLTSRVRSVREAAERMAWNMPVQGTAADLMKIAMVKLFPRLKPLGAHLLLQVHDELVLEVPEDRAEEAKALVKEVMENAYPLDVPLEVEVGVGRDWLEAKQD

SEQ ID NO: 717 - DNA, 2538 bp, synthetic construct
  misc_feature 1..2538: note = DNA Polymerase Variant
  source 1..2538: mol_type = other DNA
atgcaccatcatcatcatcatggcggtagcggcatgttaccgctgtttgatttggaagaaccaccaaaacgcgtgctgcttgttgacggccatcatctggcgtatcgtaccttctacgcactgagccttacgacctcacgtggtgagcctgtccagatggtgtatgggtttgctcgctccctgctgaaagccctgaaggaagatggtcaagccgtagtagtggttttcgatgcgaaagcaccgtcgtttcgtcacgaagcgtacgaggcctataaagctggccgcgcaccgaccccggaagactttccgcgtcagttagcgctcgtcaaacgcctcgtggatttgctgggattagttcgcttggaagctcctggctacgaggcggacgacgtgctcggtacactggccaagaaagcagaacgtgaaggcatggaggtctgcattcttaccggtgatcgcgatttcttccagctgctgtctgagaaagtgagcgttttgctgcccgatggcacgttagtaaccccgaaagatgtgcaagagaaatatggagttccgccagaacgttgggtggactttcgcgcactgactggtgatcgttcagacaacatcccgggcgttgccgggattggtgaaaagacggcgctgcgcctgctggcagaatggggctcggtggaaaatctgctcaagaaccttgatcgtgtgaaacctgatagcttacgccgcaagatcgaagcccacctggaagacttgcgtctgagtctggatcttgcccgtattcgcaccgatctgccgttggaagtagactttaaagctctgcgtcgtcgcacacccgatttagaggggttacgcgcgttcctcgaagaactggagctgggctccctgctgcatgaattcggtttgttgggcggagagaaaccgcgtgaagaagcaccatggccgccgcccgaaggtgcctttgtcggctttcttctgtcacgcaaagagccaatgtgggcggaactgttagctcttgcagccgccgcggaagggcgtgttcaccgcgcgacctctcctgtcgaggccctcgctgacctcaaagaagcacgtggtttcttggcgaaagatttagccgtgcttgcattacgcgaaggctctgcgctcgatccgacggacgacccgcttttggtggcttatttgctcgatcatgcgaataccaacccggaacgtgtcgcccgtcgttacggcggcgagtttactgaagatgcggcagaacgcgcgttgcttagcgaacgcctcttccagacgttatttccacgtctttcggagaaattactctggctctatcaggaagtcgaacgtccattgagtcgcgtgcttgcccatatggaggctcgcggtgtgcgcttagatgttccgttgttagaagcactcagcttcgagttggagaaagaactggaacgtcttgaaggcgaagtctttcgtttagcggggcatcccttcaatctcaactctcgcgaccaattggagaaagtgctctttgatgaattaggtttaacccctgtcacgcgtacagagaagaccggcaaacgttccacttcggcagccgccttggaagcacttcgtggtgctcacccgatcgtcgagttgattttgcagtatcgcgagctcagcaaactcaaatcaacctatcttgataggttacctcgtcttgttcatccacgtacgggtcgtttacacacccgcttcaatcaaacggcaacagccaccgggcgcttgtcgtcgagtgacccgaacctccagaatattccagtgcgcacgccgctgggccaacacattcgtaaagcgtttgttgcggaagaaggttggttattacttgcggccgattactcccagatcgaacttcgtgtattggcgcatctctctggcgacgagaatcttaaacgcgtgtttcgcgaaggcaaggatattcacactgaaaccgcagcctggatgttcggggtggacccagccttagtggaccccaagatgcgtcgtgccgccaagaccgtcaactttggcgtactctatggtatgtcagcagcacgtcttagtcaggaattgggcattgactacaaagaagctgaagcgtttatcgagcgctatttccaatcctttccgaaagttcgcgcgtggattgaacgtacgctcgaagaaggtcgcactcgcggctatgtggaaacgttattcgggcgtcgtcgctacgttccagatcttacgtctcgtgtccgctcagtgcgcgaagctgctgagcgtatggcctggaatatgcctgttcagggaacagcggcggacctcatgaagatcgccatggtgaaattgtttccgcgcttgaaacccttaggagcccaccttcttttacaggtgcatgatgaattggtcttggaagtacccgaggatcgcgcagaagaagccaaagcactcgtgaaagaggttatggaaaacgcgtatccgttagatgttccgttggaggtcgaagtgggtgtaggccgtgattggcttgaagcgaaacaagactaatga

SEQ ID NO: 718 - protein, 844 aa, synthetic construct
  REGION 1..844: note = DNA Polymerase Variant
MHHHHHHGGSGMLPLFDLEEPPKRVLLVDGHHLAYRTFYALSLTTSRGEPVQMVYGFARSLLKALKEDGQAVVVVFDAKAPSFRHEAYEAYKAGRAPTPEDFPRQLALVKRLVDLLGLVRLEAPGYEADDVLGTLAKKAEREGMEVCILTGDRDFFQLLSEKVSVLLPDGTLVTPKDVQEKYGVPPERWVDFRALTGDRSDNIPGVAGIGEKTALRLLAEWGSVENLLKNLDRVKPDSLRRKIEAHLEDLRLSLDLARIRTDLPLEVDFKALRRRTPDLEGLRAFLEELELGSLLHEFGLLGGEKPREEAPWPPPEGAFVGFLLSRKEPMWAELLALAAAAEGRVHRATSPVEALADLKEARGFLAKDLAVLALREGSALDPTDDPLLVAYLLDHANTNPERVARRYGGEFTEDAAERALLSERLFQTLFPRLSEKLLWLYQEVERPLSRVLAHMEARGVRLDVPLLEALSFELEKELERLEGEVFRLAGHPFNLNSRDQLEKVLFDELGLTPVTRTEKTGKRSTSAAALEALRGAHPIVELILQYRELSKLKSTYLDRLPRLVHPRTGRLHTRFNQTATATGRLSSSDPNLQNIPVRTPLGQHIRKAFVAEEGWLLLAADYSQIELRVLAHLSGDENLKRVFREGKDIHTETAAWMFGVDPALVDPKMRRAAKTVNFGVLYGMSAARLSQELGIDYKEAEAFIERYFQSFPKVRAWIERTLEEGRTRGYVETLFGRRRYVPDLTSRVRSVREAAERMAWNMPVQGTAADLMKIAMVKLFPRLKPLGAHLLLQVHDELVLEVPEDRAEEAKALVKEVMENAYPLDVPLEVEVGVGRDWLEAKQD

SEQ ID NO: 719 - DNA, 2538 bp, synthetic construct
  misc_feature 1..2538: note = DNA Polymerase Variant
  source 1..2538: mol_type = other DNA
atgcaccatcatcatcatcatggcggtagcggcatgttaccgctgtttgatttggaagaaccaccaaaacgcgtgctgcttgttgacggccatcatctggcgtatcgtaccttctacgcactgagccttacgacctcacgtggtgagcctgtccagatggtgtatgggtttgctcgctccctgctgaaagccctgaaggaagatggtcaagccgtagtagtggttttcgatgcgcgtgcaccgtcgtttcgtcacgaagcgtacgaggcctataaagctggccgcgcaccgaccccggaagactttccgcgtcagttagcgctcgtcaaacgcctcgtggatttgctgggattagttcgcttggaagctcctggctacgaggcggacgacgtgctcggtacactggccaagaaagcagaacgtgaaggcatggaggtctgcattcttaccggtgatcgcgatttcttccagctgctgtctgagaaagtgagcgttttgctgcccgatggcacgttagtaaccccgaaagatgtgcaagagaaatatggagttccgccagaacgttgggtggactttcgcgcactgactggtgatcgttcagacaacatcccgggcgttgccgggattggtgaaaagacggcgctgcgcctgctggcagaatggggctcggtggaaaatctgctcaagaaccttgatcgtgtgaaacctgatagcttacgccgcaagatcgaagcccacctggaagacttgcgtctgagtctggatcttgcacgtattcgcaccgatctgccgttggaagtagactttaaagctctgcgtcgtcgcacacccgatttagaggggttacgcgcgttcctcgaagaactggagctgggctccctgctgcatgaattcggtttgttgggcggagagaaaccgcgtgaagaagcaccatggccgccgcccgagggtgcctttgtcggctttcttctgtcacgcaaagagccaatgtgggcggaactgttagctcttgcagccgccgcggaagggcgtgttcaccgcgcgacctctcctgtcgaggccctcgctgacctcaaagaagcacgtggtttcttggcgaaagatttagccgtgcttgcattacgcgaaggcgttgcgctcgatccgacggacgacccgcttttggtggcttatttgctcgatagcgcgaataccaacccggaacgtgtcgcccgtcgttacggcggcgagtttactgaagatgcggcagaacgcgcgttgcttagcgaacgcctcttccagacgttatttccacgtctttcggagaaattactctggctctatcaggaagtcgaacgtccattgagtcgcgtgcttgcccatatggaggctcgcggtgtgcgcttagatgttccgttgttagaagcactcagcttcgagctggaaaaagaactggaacgtcttgaaggcgaagtctttcgtttagcggggcatcccttcaatctcaactctcgcgaccaattggagaaagtgctctttgatgaattaggtttaacccctgtcacgcgtacagagaagaccggcaaacgttccacttcggcagccgccttggaagcacttcgtggtgtgcacccgatcgtcgagttgattttgcagtatcgcgagctcagcaaactcaaatcaacctatcttgataggttacctcgtcttgttcatccacgtacgggtcgtttacacacccgcttcaatcaaacggcaacagccaccgggcgcttgtcgtcgagtgacccgaacctccagaatattccagtgcgcacgccgctgggccaacacattcgtaaagcgtttgttgcggaagaaggttggttattacttgcggccgattactcccagatcgaacttcgtgtattggcgcatctctctggcgacgagaatcttaaacgcgtgtttcgcgaaggcaaggatattcacactgaaaccgcagcctggatgttcggggtggacccggccttagtggaccccaagatgcgtcgtgccgccaagaccgtcaactttggcgtactctatggtatgtcagcagcacgtcttagtcaggaattgggcattgactacaaagtagctgaagcgtttatcgagcgctatttccaatcctttccgaaagttcgcgcgtggattgaacgtacgctcgaagaaggtcgcactcgcggctatgtggaaacgttattcgggcgtcgtcgctacgttccagatcttacgtctcgtgtccgctcagtgcgcgaagctgctgagcgtatggcctggaatatgcctgttcagggaacagcggcggacctcatgaagatcgccatggtgaaattgtttccgcgcttgaaacccttaggagcccaccttcttctgcaggtgcatgatgaattggtcttggaagtacccgaggatcgcgcagaagaagccaaagcactcgtgaaagaggttatggaaaacgcgtatccgttagatgttccgttggaggtcgaagtgggtgtaggccgtgattggcttgaagcgaaacaagactaatga

SEQ ID NO: 720 - protein, 844 aa, synthetic construct
  REGION 1..844: note = DNA Polymerase Variant
MHHHHHHGGSGMLPLFDLEEPPKRVLLVDGHHLAYRTFYALSLTTSRGEPVQMVYGFARSLLKALKEDGQAVVVVFDARAPSFRHEAYEAYKAGRAPTPEDFPRQLALVKRLVDLLGLVRLEAPGYEADDVLGTLAKKAEREGMEVCILTGDRDFFQLLSEKVSVLLPDGTLVTPKDVQEKYGVPPERWVDFRALTGDRSDNIPGVAGIGEKTALRLLAEWGSVENLLKNLDRVKPDSLRRKIEAHLEDLRLSLDLARIRTDLPLEVDFKALRRRTPDLEGLRAFLEELELGSLLHEFGLLGGEKPREEAPWPPPEGAFVGFLLSRKEPMWAELLALAAAAEGRVHRATSPVEALADLKEARGFLAKDLAVLALREGVALDPTDDPLLVAYLLDSANTNPERVARRYGGEFTEDAAERALLSERLFQTLFPRLSEKLLWLYQEVERPLSRVLAHMEARGVRLDVPLLEALSFELEKELERLEGEVFRLAGHPFNLNSRDQLEKVLFDELGLTPVTRTEKTGKRSTSAAALEALRGVHPIVELILQYRELSKLKSTYLDRLPRLVHPRTGRLHTRFNQTATATGRLSSSDPNLQNIPVRTPLGQHIRKAFVAEEGWLLLAADYSQIELRVLAHLSGDENLKRVFREGKDIHTETAAWMFGVDPALVDPKMRRAAKTVNFGVLYGMSAARLSQELGIDYKVAEAFIERYFQSFPKVRAWIERTLEEGRTRGYVETLFGRRRYVPDLTSRVRSVREAAERMAWNMPVQGTAADLMKIAMVKLFPRLKPLGAHLLLQVHDELVLEVPEDRAEEAKALVKEVMENAYPLDVPLEVEVGVGRDWLEAKQD

SEQ ID NO: 721 - DNA, 2538 bp, synthetic construct
  misc_feature 1..2538: note = DNA Polymerase Variant
  source 1..2538: mol_type = other DNA
atgcaccatcatcatcatcatggcggtagcggcatgttaccgctgtttgatttggaagaaccaccaaaacgcgtgctgcttgttgacggccatcatctggcgtatcgtaccttctacgcactgagccttacgacctcacgtggtgagcctgtccagatggtgtatgggtttgctcgctccctgctgaaagccctgaaggaagatggtcaagccgtagtagtggttttcgatgcgaaagcaccgtcgtttcgtcacgaagcgtacgaggcctataaagctggccgcgcaccgaccccggaagactttccgcgtcagttagcgctcgtcaaacgcctcgtggatttgctgggattagttcgcttggaagctcctggctacgaggcggacgacgtgctcggtacactggccaagaaagcagaacgtgaaggcatggaggtctgcattcttaccggtgatcgcgatttcttccagctgctgtctgagaaagtgagcgttttgctgcccgatggcacgttagtaaccccgaaagatgtgcaagagaaatatggagttccgccagaacgttgggtggactttcgcgcactgactggtgatcgttcagacaacatcccgggcgttgccgggattggtgaaaagacggcgctgcgcctgctggcagaatggggctcggtggaaaatctgctcaagaaccttgatcgtgtgaaacctgatagcttacgccgcaagatcgaagcccacctggaagacttgcgtctgagtctggatcttgcccgtattcgcaccgatctgccgttggaagtagactttaaagctctgcgtcgtcgcacacccgatttagaggggttacgcgcgttcctcgaagaactggagctgggctccctgctgcatgaattcggtttgttgggcggagagaaaccgcgtgaagaagcaccatggccgccgcccgaaggtgcctttgtcggctttcttctgtcacgcaaagagccaatgtgggcggaactgttagctcttgcagccgccgcggaagggcgtgttcaccgcgcgacctctcctgtcgaggccctcgctgacctcaaagaagcacgtggtttcttggcgaaagatttagccgtggttgcattacgcgaaggcgttgcgctcgatccgacggacgacccgcttttggtggcttatttgctcgatcatgcgaataccaacccggaacgtgtcgcccgtcgttacggcggcgagtttactgaagatgcggcagaacgcgcgttgcttagcgaacgcctcttccagacgttatttccacgtctttcggagaaattactctggctctatcaggaagtcgaacgtccattgagtcgcgtgcttgcccatatggaggctcgcggtgtgcgcttagatgttccgttgttagaagcactcagcttcgagttggagaaagaactggaacgtcttgaaggcgaagtctttcgtttagcggggcatcccttcaatctcaactctcgcgaccaattggagaaagtgctctttgatgaattaggtttaacccctgtcacgcgtacagagaagaccggcaaacgttccacttcggcagccgccttggaagcacttcgtggtgctcacccgatcgtcgagttgattttgcagtatcgcgagctcagcaaactcaaatcaacctatcttgataggttacctcgtcttgttcatccacgtacgggtcgtttacacacccgcttcaatcaaacggcaacagccaccgggcgcttgtcgtcgagtgacccgaacctccagaatattccagtgcgcacgccgctgggccaacacattcgtaaagcgtttgttgcggaagaaggttggttattacttgcggccgattactcccagatcgaacttcgtgtattggcgcatctctctggcgacgagaatcttaaacgcgtgtttcgcgaaggcaaggatattcacactgaaaccgcagcctggatgttcggggtggacccagccttagtggaccccaagatgcgtcgtgccgccaagaccgtcaactttggcgtactctatggtatgtcagcagcacgtcttagtcaggaattgggcattgactacaaagaagctgaagcgtttatcgagcgctatttccaatcctttccgaaagttcgcgcgtggattgaacgtacgctcgaagaaggtcgcactcgcggctatgtggaaacgttattcgggcgtcgtcgctacgttccagatcttacgtctcgtgtccgctcagtgcgcgaagctgctgagcgtatggcctggaatatgcctgttcagggaacagcggcggacctcatgaagatcgccatggtgaaattgtttccgcgcttgaaacccttaggagcccaccttcttttacaggtgcatgatgaattggtcttggaagtacccgaggatcgcgcagaagaagccaaagcactcgtgaaagaggttatggaaaacgcgtatccgttagatgttccgttggaggtcgaagtgggtgtaggccgtgattggcttgaagcgaaacaagactaatga

SEQ ID NO: 722 - protein, 844 aa, synthetic construct
  REGION 1..844: note = DNA Polymerase Variant
MHHHHHHGGSGMLPLFDLEEPPKRVLLVDGHHLAYRTFYALSLTTSRGEPVQMVYGFARSLLKALKEDGQAVVVVFDAKAPSFRHEAYEAYKAGRAPTPEDFPRQLALVKRLVDLLGLVRLEAPGYEADDVLGTLAKKAEREGMEVCILTGDRDFFQLLSEKVSVLLPDGTLVTPKDVQEKYGVPPERWVDFRALTGDRSDNIPGVAGIGEKTALRLLAEWGSVENLLKNLDRVKPDSLRRKIEAHLEDLRLSLDLARIRTDLPLEVDFKALRRRTPDLEGLRAFLEELELGSLLHEFGLLGGEKPREEAPWPPPEGAFVGFLLSRKEPMWAELLALAAAAEGRVHRATSPVEALADLKEARGFLAKDLAVVALREGVALDPTDDPLLVAYLLDHANTNPERVARRYGGEFTEDAAERALLSERLFQTLFPRLSEKLLWLYQEVERPLSRVLAHMEARGVRLDVPLLEALSFELEKELERLEGEVFRLAGHPFNLNSRDQLEKVLFDELGLTPVTRTEKTGKRSTSAAALEALRGAHPIVELILQYRELSKLKSTYLDRLPRLVHPRTGRLHTRFNQTATATGRLSSSDPNLQNIPVRTPLGQHIRKAFVAEEGWLLLAADYSQIELRVLAHLSGDENLKRVFREGKDIHTETAAWMFGVDPALVDPKMRRAAKTVNFGVLYGMSAARLSQELGIDYKEAEAFIERYFQSFPKVRAWIERTLEEGRTRGYVETLFGRRRYVPDLTSRVRSVREAAERMAWNMPVQGTAADLMKIAMVKLFPRLKPLGAHLLLQVHDELVLEVPEDRAEEAKALVKEVMENAYPLDVPLEVEVGVGRDWLEAKQD

SEQ ID NO: 723 - DNA, 2538 bp, synthetic construct
  misc_feature 1..2538: note = DNA Polymerase Variant
  source 1..2538: mol_type = other DNA
atgcaccatcatcatcatcatggcggtagcggcatgttaccgctgtttgatttggaagaaccaccaaaacgcgtgctgcttgttgacggccatcatctggcgtatcgtaccttctacgcactgagccttacgacctcacgtggtgagcctgtccagatggtgtatgggtttgctcgctccctgctgaaagccctgaaggaagatggtcaagccgtagtagtggttttcgatgcgaaggcaccgtcgtttcgtcacgaagcgtacgaggcctataaagctggccgcgcaccgaccccggaagactttccgcgtcagttagcgctcgtcaaacgcctcgtggatttgctgggattagttcgcttggaagctcctggctacgaggcggacgacgtgctcggtacactggccaagaaagcagaacgtgaaggcatggaggtctgcattcttaccggtgatcgcgatttcttccagctgctgtctgagaaagtgagcgttttgctgcccgatggcacgttagtaaccccgaaagatgtgcaagagaaatatggagttccgccagaacgttgggtggactttcgcgcactgactggtgatcgttcagacaacatcccgggcgttgccgggattggtgaaaagacggcgctgcgcctgctggcagaatggggctcggtggaaaatctgctcaagaaccttgatcgtgtgaaacctgatagcttacgccgcaagatcgaagcccacctggaagacttgcgtctgagtctggatcttgtacgtattcgcaccgatctgccgttggaagtagactttaaagctctgcgtcgtcgcacacccgatttagaggggttacgcgcgttcctcgaagaactggagctgggctccctgctgcatgaattcggtttgttgggcggagagaaaccgcgtgaagaagcaccatggccgccgcccgaaggtgcctttgtcggctttcttctgtcacgcaaagagccaatgtgggcggaactgttagctcttgcagccgccgcggaagggcgtgttcaccgcgcgacctctcctgtcgaggccctcgctgacctcaaagaagcacgtggtttcttggcgaaagatttagccgtgcttgcattacgcgaaggcgttgcgctcgatccgacggacgacccgcttttggtggcttatttgctcgatagcgcgaataccaacccggaacgtgtcgcccgtcgttacggcggcgagtttactgaagatgcggcagaacgcgcgttgcttagcgaacgcctcttccagacgttatttccacgtctttcggagaaattactctggctctatcaggaagtcgaacgtccattgagtcgcgtgcttgcccatatggaggctcgcggtgtgcgcttagatgttccgttgttagaagcactcagcttcgagctggaaaaagaactggaacgtcttgaaggcgaagtctttcgtttagcggggcatcccttcaatctcaactctcgcgaccaattggagaaagtgctctttgatgaattaggtttaacccctgtcacgcgtacagagaagaccggcaaacgttccacttcggcagccgccttggaagcacttcgtggtgcgcacccgatcgtcgagttgattttgcagtatcgcgagctcagcaaactcaaatcaacctatcttgataggttacctcgtcttgttcatccacgtacgggtcgtttacacacccgcttcaatcaaacggcaacagccaccgggcgcttgtcgtcgagtgacccgaacctccagaatattccagtgcgcacgccgctgggccaacacattcgtaaagcgtttgttgcggaagaaggttggttattacttgcggccgattactcccagatcgaacttcgtgtattggcgcatctctctggcgacgagaatcttaaacgcgtgtttcgcgaaggcaaggatattcacactgaaaccgcagcctggatgttcggggtggacccggccttagtggaccccaagatgcgtcgtgccgccaagaccgtcaactttggcgtactctatggtatgtcagcagcacgtcttagtcaggaattgggcattgactacaaagaagctgaagcgtttatcgagcgctatttccaatcctttccgaaagttcgcgcgtggattgaacgtacgctcgaagaaggtcgcactcgcggctatgtggaaacgttattcgggcgtcgtcgctacgttccagatcttacgtctcgtgtccgctcagtgcgcgaagctgctgagcgtatggcctggaatatgcctgttcagggaacagcggcggacctcatgaagatcgccatggtgaaattgtttccgcgcttgaaacccttaggagcccaccttcttttccaggtgcatgatgaattggtcttggaagtacccgaggatcgcgcagaagaagccaaagcactcgtgaaagaggttatggaaaacgcgtatccgttagatgttccgttggaggtcgaagtgggtgtaggccgtgattggcttgaagcgaaacaagactaatga

SEQ ID NO: 724 - protein, 844 aa, synthetic construct
  REGION 1..844: note = DNA Polymerase Variant
MHHHHHHGGSGMLPLFDLEEPPKRVLLVDGHHLAYRTFYALSLTTSRGEPVQMVYGFARSLLKALKEDGQAVVVVFDAKAPSFRHEAYEAYKAGRAPTPEDFPRQLALVKRLVDLLGLVRLEAPGYEADDVLGTLAKKAEREGMEVCILTGDRDFFQLLSEKVSVLLPDGTLVTPKDVQEKYGVPPERWVDFRALTGDRSDNIPGVAGIGEKTALRLLAEWGSVENLLKNLDRVKPDSLRRKIEAHLEDLRLSLDLVRIRTDLPLEVDFKALRRRTPDLEGLRAFLEELELGSLLHEFGLLGGEKPREEAPWPPPEGAFVGFLLSRKEPMWAELLALAAAAEGRVHRATSPVEALADLKEARGFLAKDLAVLALREGVALDPTDDPLLVAYLLDSANTNPERVARRYGGEFTEDAAERALLSERLFQTLFPRLSEKLLWLYQEVERPLSRVLAHMEARGVRLDVPLLEALSFELEKELERLEGEVFRLAGHPFNLNSRDQLEKVLFDELGLTPVTRTEKTGKRSTSAAALEALRGAHPIVELILQYRELSKLKSTYLDRLPRLVHPRTGRLHTRFNQTATATGRLSSSDPNLQNIPVRTPLGQHIRKAFVAEEGWLLLAADYSQIELRVLAHLSGDENLKRVFREGKDIHTETAAWMFGVDPALVDPKMRRAAKTVNFGVLYGMSAARLSQELGIDYKEAEAFIERYFQSFPKVRAWIERTLEEGRTRGYVETLFGRRRYVPDLTSRVRSVREAAERMAWNMPVQGTAADLMKIAMVKLFPRLKPLGAHLLFQVHDELVLEVPEDRAEEAKALVKEVMENAYPLDVPLEVEVGVGRDWLEAKQD

SEQ ID NO: 725 - DNA, 2538 bp, synthetic construct
  misc_feature 1..2538: note = DNA Polymerase Variant
  source 1..2538: mol_type = other DNA
atgcaccatcatcatcatcatggcggtagcggcatgttaccgctgtttgatttggaagaaccaccaaaacgcgtgctgcttgttgacggccatcatctggcgtatcgtaccttctacgcactgagccttacgacctcacgtggtgagcctgtccagatggtgtatgggtttgctcgctccctgctgaaagccctgaaggaagatggtcaagccgtagtagtggttttcgatgcgaaagcaccgtcgtttcgtcacgaagcgtacgaggcctataaagctggccgcgcaccgaccccggaagactttccgcgtcagttagcgctcgtcaaacgcctcgtggatttgctgggattagttcgcttggaagctcctggctacgaggcggacgacgtgctcggtacactggccaagaaagcagaacgtgaaggcatggaggtctgcattcttaccggtgatcgcgatttcttccagctgctgtctgagaaagtgagcgttttgctgcccgatggcacgttagtaaccccgaaagatgtgcaagagaaatatggagttccgccagaacgttgggtggactttcgcgcactgactggtgatcgttcagacaacatcccgggcgttgccgggattggtgaaaagacggcgctgcgcctgctggcagaatggggctcggtggaaaatctgctcaagaaccttgatcgtgtgaaacctgatagcttacgccgcaagatcgaagcccacctggaagacttgcgtctgagtctggatcttgcccgtattcgcaccgatctgccgttggaagtagactttaaagctctgcgtcgtcgcacacccgatttagaggggttacgcgcgttcctcgaagaactggagctgggctccctgctgcatgaattcggtttgttgggcggagagaaaccgcgtgaagaagcaccatggccgccgcccgaaggtgcctttgtcggctttcttctgtcacgcaaagagccaatgtgggcggaactgttagctcttgcagccgccgcggaagggcgtgttcaccgcgcgacctctcctgtcgaggccctcgctgacctcaaagaagcacgtggtttcttggcgaaagatttagccgtgcttgcattacgcgaaggcgttgcgctcgatccgacggacgacccgcttttggtgagttatttgctcgatcatgcgaataccaacccggaacgtgtcgcccgtcgttacggcggcgagtttactgaagatgcggcagaacgcgcgttgcttagcgaacgcctcttccagacgttatttccacgtctttcggagaaattactctggctctatcaggaagtcgaacgtccattgagtcgcgtgcttgcccatatggaggctcgcggtgtgcgcttagatgttccgttgttagaagcactcagcttcgagttggagaaagaactggaacgtcttgaaggcgaagtctttcgtttagcggggcatcccttcaatctcaactctcgcgaccaattggagaaagtgctctttgatgaattaggtttaacccctgtcacgcgtacagagaagaccggcaaacgttccacttcggcagccgccttggaagcacttcgtggtgctcacccgatcgtcgagttgattttgcagtatcgcgagctcagcaaactcaaatcaacctatcttgataggttacctcgtcttgttcatccacgtacgggtcgtttacacacccgcttcaatcaaacggcaacagccaccgggcgcttgtcgtcgagtgacccgaacctccagaatattccagtgcgcacgccgctgggccaacacattcgtaaagcgtttgttgcggaagaaggttggttattacttgcggccgattactcccagatcgaacttcgtgtattggcgcatctctctggcgacgagaatcttaaacgcgtgtttcgcgaaggcaaggatattcacactgaaaccgcagcctggatgttcggggtggacccagccttagtggaccccaagatgcgtcgtgccgccaagaccgtcaactttggcgtactctatggtatgtcagcagcacgtcttagtcaggaattgggcattgactacaaagaagctgaagcgtttatcgagcgctatttccaatcctttccgaaagttcgcgcgtggattgaacgtacgctcgaagaaggtcgcactcgcggctatgtggaaacgttattcgggcgtcgtcgctacgttccagatcttacgtctcgtgtccgctcagtgcgcgaagctgctgagcgtatggcctggaatatgcctgttcagggaacagcggcggacctcatgaagatcgccatggtgaaattgtttccgcgcttgaaacccttaggagcccaccttcttttacaggtgcatgatgaattggtcttggaagtacccgaggatcgcgcagaagaagccaaagcactcgtgaaagaggttatggaaaacgcgtatccgttagatgttccgttggaggtcgaagtgggtgtaggccgtgattggcttgaagcgaaacaagactaatga

SEQ ID NO: 726 - protein, 844 aa, synthetic construct
  REGION 1..844: note = DNA Polymerase Variant
MHHHHHHGGSGMLPLFDLEEPPKRVLLVDGHHLAYRTFYALSLTTSRGEPVQMVYGFARSLLKALKEDGQAVVVVFDAKAPSFRHEAYEAYKAGRAPTPEDFPRQLALVKRLVDLLGLVRLEAPGYEADDVLGTLAKKAEREGMEVCILTGDRDFFQLLSEKVSVLLPDGTLVTPKDVQEKYGVPPERWVDFRALTGDRSDNIPGVAGIGEKTALRLLAEWGSVENLLKNLDRVKPDSLRRKIEAHLEDLRLSLDLARIRTDLPLEVDFKALRRRTPDLEGLRAFLEELELGSLLHEFGLLGGEKPREEAPWPPPEGAFVGFLLSRKEPMWAELLALAAAAEGRVHRATSPVEALADLKEARGFLAKDLAVLALREGVALDPTDDPLLVSYLLDHANTNPERVARRYGGEFTEDAAERALLSERLFQTLFPRLSEKLLWLYQEVERPLSRVLAHMEARGVRLDVPLLEALSFELEKELERLEGEVFRLAGHPFNLNSRDQLEKVLFDELGLTPVTRTEKTGKRSTSAAALEALRGAHPIVELILQYRELSKLKSTYLDRLPRLVHPRTGRLHTRFNQTATATGRLSSSDPNLQNIPVRTPLGQHIRKAFVAEEGWLLLAADYSQIELRVLAHLSGDENLKRVFREGKDIHTETAAWMFGVDPALVDPKMRRAAKTVNFGVLYGMSAARLSQELGIDYKEAEAFIERYFQSFPKVRAWIERTLEEGRTRGYVETLFGRRRYVPDLTSRVRSVREAAERMAWNMPVQGTAADLMKIAMVKLFPRLKPLGAHLLLQVHDELVLEVPEDRAEEAKALVKEVMENAYPLDVPLEVEVGVGRDWLEAKQD

SEQ ID NO: 727 - DNA, 2538 bp, synthetic construct
  misc_feature 1..2538: note = DNA Polymerase Variant
  source 1..2538: mol_type = other DNA
atgcaccatcatcatcatcatggcggtagcggcatgttaccgctgtttgatttggaagaaccaccaaaacgcgtgctgcttgttgacggccatcatctggcgtatcgtaccttctacgcactgagccttacgacctcacgtggtgagcctgtccagatggtgtatgggtttgctcgctccctgctgaaagccctgaaggaagatggtcaagccgtagtagtggttttcgatgcgaaagcaccgtcgtttcgtcacgaagcgtacgaggcctataaagctggccgcgcaccgaccccggaagactttccgcgtcagttagcgctcgtcaaacgcctcgtggatttgctgggattagttcgcttggaagctcctggctacgaggcggacgacgtgctcggtacactggccaagaaagcagaacgtgaaggcatggaggtctgcattcttaccggtgatcgcgatttcttccagctgctgtctgagaaagtgagcgttttgctgcccgatggcacgttagtaaccccgaaagatgtgcaagagaaatatggagttccgccagaacgttgggtggactttcgcgcactgactggtgatcgttcagacaacatcccgggcgttgccgggattggtgaaaagacggcgctgcgcctgctggcagaatggggctcggtggaaaatctgctcaagaaccttgatcgtgtgaaacctgatagcttacgccgcaagatcgaagcccacctggaagacttgcgtctgagtctggatcttgcccgtattcgcaccgatctgccgttggaagtagactttaaagctctgcgtcgtcgcacacccgatttagaggggttacgcgcgttcctcgaagaactggagctgggctccctgctgcatgaattcggtttgttgggcggagagaaaccgcgtgaagaagcaccatggccgccgcccgaaggtgcctttgtcggctttcttctgtcacgcaaagagccaatgtgggcggaactgttagctcttgcagccgccgcggaagggcgtgttcaccgcgcgacctctcctgtcgaggccctcgctgacctcaaagaagcacgtggtttcttggcgaaagatttagccgtgcttgcattacgcgaaggcgttgcgctcgatccgacggacgacccgcttttggtggcttatttgctcgatcatgcgaataccaacccggaacgtgtcgcccgtcgttacggcggcgagtttactgaagatgcggcagaacgcgcgttgcttagcgaacgcctcttcttgacgttatttccacgtctttcggagaaattactctggctctatcaggaagtcgaacgtccattgagtcgcgtgcttgcccatatggaggctcgcggtgtgcgcttagatgttccgttgttagaagcactcagcttcgagttggagaaagaactggaacgtcttgaaggcgaagtctttcgtttagcggggcatcccttcaatctcaactctcgcgaccaattggagaaagtgctctttgatgaattaggtttaacccctgtcacgcgtacagagaagaccggcaaacgttccacttcggcagccgccttggaagcacttcgtggtgctcacccgatcgtcgagttgattttgcagtatcgcgagctcagcaaactcaaatcaacctatcttgataggttacctcgtcttgttcatccacgtacgggtcgtttacacacccgcttcaatcaaacggcaacagccaccgggcgcttgtcgtcgagtgacccgaacctccagaatattccagtgcgcacgccgctgggccaacacattcgtaaagcgtttgttgcggaagaaggttggttattacttgcggccgattactcccagatcgaacttcgtgtattggcgcatctctctggcgacgagaatcttaaacgcgtgtttcgcgaaggcaaggatattcacactgaaaccgcagcctggatgttcggggtggacccagccttagtggaccccaagatgcgtcgtgccgccaagaccgtcaactttggcgtactctatggtatgtcagcagcacgtcttagtcaggaattgggcattgactacaaagaagctgaagcgtttatcgagcgctatttccaatcctttccgaaagttcgcgcgtggattgaacgtacgctcgaagaaggtcgcactcgcggctatgtggaaacgttattcgggcgtcgtcgctacgttccagatcttacgtctcgtgtccgctcagtgcgcgaagctgctgagcgtatggcctggaatatgcctgttcagggaacagcggcggacctcatgaagatcgccatggtgaaattgtttccgcgcttgaaacccttaggagcccaccttcttttacaggtgcatgatgaattggtcttggaagtacccgaggatcgcgcagaagaagccaaagcactcgtgaaagaggttatggaaaacgcgtatccgttagatgttccgttggaggtcgaagtgggtgtaggccgtgattggcttgaagcgaaacaagactaatga

SEQ ID NO: 728 - protein, 844 aa, synthetic construct
  REGION 1..844: note = DNA Polymerase Variant
MHHHHHHGGSGMLPLFDLEEPPKRVLLVDGHHLAYRTFYALSLTTSRGEPVQMVYGFARSLLKALKEDGQAVVVVFDAKAPSFRHEAYEAYKAGRAPTPEDFPRQLALVKRLVDLLGLVRLEAPGYEADDVLGTLAKKAEREGMEVCILTGDRDFFQLLSEKVSVLLPDGTLVTPKDVQEKYGVPPERWVDFRALTGDRSDNIPGVAGIGEKTALRLLAEWGSVENLLKNLDRVKPDSLRRKIEAHLEDLRLSLDLARIRTDLPLEVDFKALRRRTPDLEGLRAFLEELELGSLLHEFGLLGGEKPREEAPWPPPEGAFVGFLLSRKEPMWAELLALAAAAEGRVHRATSPVEALADLKEARGFLAKDLAVLALREGVALDPTDDPLLVAYLLDHANTNPERVARRYGGEFTEDAAERALLSERLFLTLFPRLSEKLLWLYQEVERPLSRVLAHMEARGVRLDVPLLEALSFELEKELERLEGEVFRLAGHPFNLNSRDQLEKVLFDELGLTPVTRTEKTGKRSTSAAALEALRGAHPIVELILQYRELSKLKSTYLDRLPRLVHPRTGRLHTRFNQTATATGRLSSSDPNLQNIPVRTPLGQHIRKAFVAEEGWLLLAADYSQIELRVLAHLSGDENLKRVFREGKDIHTETAAWMFGVDPALVDPKMRRAAKTVNFGVLYGMSAARLSQELGIDYKEAEAFIERYFQSFPKVRAWIERTLEEGRTRGYVETLFGRRRYVPDLTSRVRSVREAAERMAWNMPVQGTAADLMKIAMVKLFPRLKPLGAHLLLQVHDELVLEVPEDRAEEAKALVKEVMENAYPLDVPLEVEVGVGRDWLEAKQD

SEQ ID NO: 729 - DNA, 2538 bp, synthetic construct
  misc_feature 1..2538: note = DNA Polymerase Variant
  source 1..2538: mol_type = other DNA
atgcaccatcatcatcatcatggcggtagcggcatgttaccgctgtttgatttggaagaaccaccaaaacgcgtgctgcttgttgacggccatcatctggcgtatcgtaccttctacgcactgagccttacgacctcacgtggtgagcctgtccagatggtgtatgggtttgctcgctccctgctgaaagccctgaaggaagatggtcaagccgtagtagtggttttcgatgcgcgtgcaccgtcgtttcgtcacgaagcgtacgaggcctataaagctggccgcgcaccgaccccggaagactttccgcgtcagttagcgctcgtcaaacgcctcgtggatttgctgggattagttcgcttggaagctcctggctacgaggcggacgacgtgctcggtacactggccaagaaagcagaacgtgaaggcatggaggtctgcattcttaccggtgatcgcgatttcttccagctgctgtctgagaaagtgagcgttttgctgcccgatggcacgttagtaaccccgaaagatgtgcaagagaaatatggagttccgccagaacgttgggtggactttcgcgcactgactggtgatcgttcagacaacatcccgggcgttgccgggattggtgaaaagacggcgctgcgcctgctggcagaatggggctcggtggaaaatctgctcaagaaccttgatcgtgtgaaacctgatagcttacgccgcaagatcgaagcccacctggaagacttgcgtctgagtctggatcttgcacgtattcgcaccgatctgccgttggaagtagactttaaagctctgcgtcgtcgcacacccgatttagaggggttacgcgcgttcctcgaagaactggagctgggctccctgctgcatgaattcggtttgttgggcggagagaaaccgcgtgaagaagcaccatggccgccgcccgagggtgcctttgtcggctttcttctgtcacgcaaagagccaatgtgggcggaactgttagctcttgcagccgccgcggaagggcgtgttcaccgcgcgacctctcctgtcgaggccctcgctgacctcaaagaagcacgtggtttcttggcgaaagatttagccgtgcttgcattacgcgaaggcgttgcgctcgatccgacggacgacccgcttttggtggcttatttgctcgatcatgcgaataccaacccggaacgtgtcgcccgtcgttacggcggcgagtttactgaagatgcggcagaacgcgcgttgcttagcgaacgcctcttccagacgttatttccacgtctttcggagaaattactctggctctatcaggaagtcgaacgtccattgagtcgcgtgcttgcccatatggaggctcgcggtgtgcgcttagatgttccgttgttagaagcactcagcttcgaggcggaaaaagaactggaacgtcttgaaggcgaagtctttcgtttagcggggcatcccttcaatctcaactctcgcgaccaattggagaaagtgctctttgatgaattaggtttaacccctgtcacgcgtacagagaagaccggcaaacgttccacttcggcagccgccttggaagcacttcgtggtgtgcacccgatcgtcgagttgattttgcagtatcgcgagctcagcaaactcaaatcaacctatcttgataggttacctcgtcttgttcatccacgtacgggtcgtttacacacccgcttcaatcaaacggcaacagccaccgggcgcttgtcgtcgagtgacccgaacctccagaatattccagtgcgcacgccgctgggccaacacattcgtaaagcgtttgttgcggaagaaggttggttattacttgcggccgattactcccagatcgaacttcgtgtattggcgcatctctctggcgacgagaatcttaaacgcgtgtttcgcgaaggcaaggatattcacactgaaaccgcagcctggatgttcggggtggacccggccttagtggaccccaagatgcgtcgtgccgccaagaccgtcaactttggcgtactctatggtatgtcagcagcacgtcttagtcaggaattgggcattgactacaaagtagctgaagcgtttatcgagcgctatttccaatcctttccgaaagttcgcgcgtggattgaacgtacgctcgaagaaggtcgcactcgcggctatgtggaaacgttattcgggcgtcgtcgctacgttccagatcttacgtctcgtgtccgctcagtgcgcgaagctgctgagcgtatggcctggaatatgcctgttcagggaacagcggcggacctcatgaagatcgccatggtgaaattgtttccgcgcttgaaacccttaggagcccaccttcttttccaggtgcatgatgaattggtcttggaagtacccgaggatcgcgcagaagaagccaaagcactcgtgaaagaggttatggaaaacgcgtatccgttagatgttccgttggaggtcgaagtgggtgtaggccgtgattggcttgaagcgaaacaagactaatga

SEQ ID NO: 730 - protein, 844 aa, synthetic construct
  REGION 1..844: note = DNA Polymerase Variant
MHHHHHHGGSGMLPLFDLEEPPKRVLLVDGHHLAYRTFYALSLTTSRGEPVQMVYGFARSLLKALKEDGQAVVVVFDARAPSFRHEAYEAYKAGRAPTPEDFPRQLALVKRLVDLLGLVRLEAPGYEADDVLGTLAKKAEREGMEVCILTGDRDFFQLLSEKVSVLLPDGTLVTPKDVQEKYGVPPERWVDFRALTGDRSDNIPGVAGIGEKTALRLLAEWGSVENLLKNLDRVKPDSLRRKIEAHLEDLRLSLDLARIRTDLPLEVDFKALRRRTPDLEGLRAFLEELELGSLLHEFGLLGGEKPREEAPWPPPEGAFVGFLLSRKEPMWAELLALAAAAEGRVHRATSPVEALADLKEARGFLAKDLAVLALREGVALDPTDDPLLVAYLLDHANTNPERVARRYGGEFTEDAAERALLSERLFQTLFPRLSEKLLWLYQEVERPLSRVLAHMEARGVRLDVPLLEALSFEAEKELERLEGEVFRLAGHPFNLNSRDQLEKVLFDELGLTPVTRTEKTGKRSTSAAALEALRGVHPIVELILQYRELSKLKSTYLDRLPRLVHPRTGRLHTRFNQTATATGRLSSSDPNLQNIPVRTPLGQHIRKAFVAEEGWLLLAADYSQIELRVLAHLSGDENLKRVFREGKDIHTETAAWMFGVDPALVDPKMRRAAKTVNFGVLYGMSAARLSQELGIDYKVAEAFIERYFQSFPKVRAWIERTLEEGRTRGYVETLFGRRRYVPDLTSRVRSVREAAERMAWNMPVQGTAADLMKIAMVKLFPRLKPLGAHLLFQVHDELVLEVPEDRAEEAKALVKEVMENAYPLDVPLEVEVGVGRDWLEAKQD

SEQ ID NO: 731 - DNA, 2538 bp, synthetic construct
  misc_feature 1..2538: note = DNA Polymerase Variant
  source 1..2538: mol_type = other DNA
atgcaccatcatcatcatcatggcggtagcggcatgttaccgctgtttgatttggaagaaccaccaaaacgcgtgctgcttgttgacggccatcatctggcgtatcgtaccttctacgcactgagccttacgacctcacgtggtgagcctgtccagatggtgtatgggtttgctcgctccctgctgaaagccctgaaggaagatggtcaagccgtagtagtggttttcgatgcgaaagcaccgtcgtttcgtcacgaagcgtacgaggcctataaagctggccgcgcaccgaccccggaagactttccgcgtcagttagcgctcgtcaaacgcctcgtggatttgctgggattagttcgcttggaagctcctggctacgaggcggacgacgtgctcggtacactggccaagaaagcagaacgtgaaggcatggaggtctgcattcttaccggtgatcgcgatttcttccagctgctgtctgagaaagtgagcgttttgctgcccgatggcacgttagtaaccccgaaagatgtgcaagagaaatatggagttccgccagaacgttgggtggactttcgcgcactgactggtgatcgttcagacaacatcccgggcgttgccgggattggtgaaaagacggcgctgcgcctgctggcagaatggggctcggtggaaaatctgctcaagaaccttgatcgtgtgaaacctgatagcttacgccgcaagatcgaagcccacctggaagacttgcgtctgagtctggatcttgcccgtattcgcaccgatctgccgttggaagtagactttaaagctctgcgtcgtcgcacacccgatttagaggggttacgcgcgttcctcgaagaactggagctgggctccctgctgcatgaattcggtttgttgggcggagagaaaccgcgtgaagaagcaccatggccgccgcccgaaggtgcctttgtcggctttcttctgtcacgcaaagagccaatgtgggcggaactgttagctcttgcagccgccgcggaagggcgtgttcaccgcgcgacctctcctgtcgaggccctcgctgacctcaaagaagcacgtggtttcttggcgaaagatttagccgtgcttgcattacgcgaaggcgttgcgctcgatccgacggacgacccgcttttggtggcttatttgctcgatcatgcgaataccaacccggaacgtgtcgcccgtcgttacggcagtgagtttactgaagatgcggcagaacgcgcgttgcttagcgaacgcctcttccagacgttatttccacgtctttcggagaaattactctggctctatcaggaagtcgaacgtccattgagtcgcgtgcttgcccatatggaggctcgcggtgtgcgcttagatgttccgttgttagaagcactcagcttcgagttggagaaagaactggaacgtcttgaaggcgaagtctttcgtttagcggggcatcccttcaatctcaactctcgcgaccaattggagaaagtgctctttgatgaattaggtttaacccctgtcacgcgtacagagaagaccggcaaacgttccacttcggcagccgccttggaagcacttcgtggtgctcacccgatcgtcgagttgattttgcagtatcgcgagctcagcaaactcaaatcaacctatcttgataggttacctcgtcttgttcatccacgtacgggtcgtttacacacccgcttcaatcaaacggcaacagccaccgggcgcttgtcgtcgagtgacccgaacctccagaatattccagtgcgcacgccgctgggccaacacattcgtaaagcgtttgttgcggaagaaggttggttattacttgcggccgattactcccagatcgaacttcgtgtattggcgcatctctctggcgacgagaatcttaaacgcgtgtttcgcgaaggcaaggatattcacactgaaaccgcagcctggatgttcggggtggacccagccttagtggaccccaagatgcgtcgtgccgccaagaccgtcaactttggcgtactctatggtatgtcagcagcacgtcttagtcaggaattgggcattgactacaaagaagctgaagcgtttatcgagcgctatttccaatcctttccgaaagttcgcgcgtggattgaacgtacgctcgaagaaggtcgcactcgcggctatgtggaaacgttattcgggcgtcgtcgctacgttccagatcttacgtctcgtgtccgctcagtgcgcgaagctgctgagcgtatggcctggaatatgcctgttcagggaacagcggcggacctcatgaagatcgccatggtgaaattgtttccgcgcttgaaacccttaggagcccaccttcttttacaggtgcatgatgaattggtcttggaagtacccgaggatcgcgcagaagaagccaaagcactcgtgaaagaggttatggaaaacgcgtatccgttagatgttccgttggaggtcgaagtgggtgtaggccgtgattggcttgaagcgaaacaagactaatga

SEQ ID NO: 732 - protein, 844 aa, synthetic construct
  REGION 1..844: note = DNA Polymerase Variant
MHHHHHHGGSGMLPLFDLEEPPKRVLLVDGHHLAYRTFYALSLTTSRGEPVQMVYGFARSLLKALKEDGQAVVVVFDAKAPSFRHEAYEAYKAGRAPTPEDFPRQLALVKRLVDLLGLVRLEAPGYEADDVLGTLAKKAEREGMEVCILTGDRDFFQLLSEKVSVLLPDGTLVTPKDVQEKYGVPPERWVDFRALTGDRSDNIPGVAGIGEKTALRLLAEWGSVENLLKNLDRVKPDSLRRKIEAHLEDLRLSLDLARIRTDLPLEVDFKALRRRTPDLEGLRAFLEELELGSLLHEFGLLGGEKPREEAPWPPPEGAFVGFLLSRKEPMWAELLALAAAAEGRVHRATSPVEALADLKEARGFLAKDLAVLALREGVALDPTDDPLLVAYLLDHANTNPERVARRYGSEFTEDAAERALLSERLFQTLFPRLSEKLLWLYQEVERPLSRVLAHMEARGVRLDVPLLEALSFELEKELERLEGEVFRLAGHPFNLNSRDQLEKVLFDELGLTPVTRTEKTGKRSTSAAALEALRGAHPIVELILQYRELSKLKSTYLDRLPRLVHPRTGRLHTRFNQTATATGRLSSSDPNLQNIPVRTPLGQHIRKAFVAEEGWLLLAADYSQIELRVLAHLSGDENLKRVFREGKDIHTETAAWMFGVDPALVDPKMRRAAKTVNFGVLYGMSAARLSQELGIDYKEAEAFIERYFQSFPKVRAWIERTLEEGRTRGYVETLFGRRRYVPDLTSRVRSVREAAERMAWNMPVQGTAADLMKIAMVKLFPRLKPLGAHLLLQVHDELVLEVPEDRAEEAKALVKEVMENAYPLDVPLEVEVGVGRDWLEAKQD

SEQ ID NO: 733 - DNA, 2538 bp, synthetic construct
  misc_feature 1..2538: note = DNA Polymerase Variant
  source 1..2538: mol_type = other DNA
atgcaccatcatcatcatcatggcggtagcggcatgttaccgctgtttgatttggaagaaccaccaaaacgcgtgctgcttgttgacggccatcatctggcgtatcgtaccttctacgcactgagccttacgacctcacgtggtgagcctgtccagatggtgtatgggtttgctcgctccctgctgaaagccctgaaggaagatggtcaagccgtagtagtggttttcgatgcgaaagcaccgtcgtttcgtcacgaagcgtacgaggcctataaagctggccgcgcaccgaccccggaagactttccgcgtcagttagcgctcgtcaaacgcctcgtggatttgctgggattagttcgcttggaagctcctggctacgaggcggacgacgtgctcggtacactggccaagaaagcagaacgtgaaggcatggaggtctgcattcttaccggtgatcgcgatttcttccagctgctgtctgagaaagtgagcgttttgctgcccgatggcacgttagtaaccccgaaagatgtgcaagagaaatatggagttccgccagaacgttgggtggactttcgcgcactgactggtgatcgttcagacaacatcccgggcgttgccgggattggtgaaaagacggcgctgcgcctgctggcagaatggggctcggtggaaaatctgctcaagaaccttgatcgtgtgaaacctgatagcttacgccgcaagatcgaagcccacctggaagacttgcgtctgagtctggatcttgcccgtattcgcaccgatctgccgttggaagtagactttaaagctctgcgtcgtcgcacacccgatttagaggggttacgcgcgttcctcgaagaactggagctgggctccctgctgcatgaattcggtttgttgggcggagagaaaccgcgtgaagaagcaccatggccgccgcccgaaggtgcctttgtcggctttcttctgtcacgcaaagagccaatgtgggcggaactgttagctcttgcagccgccgcggaagggcgtgttcaccgcgcgacctctcctgtcgaggccctcgctgacctcaaagaagcacgtggtttcttggcgaaagatttagccgtgcttgcattacgcgaaggcgttgcgctcgatccgacggacgacccgcttttggtggcttatttgctcgatcatgcgaataccaacccggaacgtgtcgcccgtcgttacggcggcgagtttactgaagatgcggcagaacgcgcgttgcttagcgaacgcctcttccagacgttatttccacgtctttcggagaaattactctggctctatcaggcggtcgaacgtccattgagtcgcgtgcttgcccatatggaggctcgcggtgtgcgcttagatgttccgttgttagaagcactcagcttcgagttggagaaagaactggaacgtcttgaaggcgaagtctttcgtttagcggggcatcccttcaatctcaactctcgcgaccaattggagaaagtgctctttgatgaattaggtttaacccctgtcacgcgtacagagaagaccggcaaacgttccacttcggcagccgccttggaagcacttcgtggtgctcacccgatcgtcgagttgattttgcagtatcgcgagctcagcaaactcaaatcaacctatcttgataggttacctcgtcttgttcatccacgtacgggtcgtttacacacccgcttcaatcaaacggcaacagccaccgggcgcttgtcgtcgagtgacccgaacctccagaatattccagtgcgcacgccgctgggccaacacattcgtaaagcgtttgttgcggaagaaggttggttattacttgcggccgattactcccagatcgaacttcgtgtattggcgcatctctctggcgacgagaatcttaaacgcgtgtttcgcgaaggcaaggatattcacactgaaaccgcagcctggatgttcggggtggacccagccttagtggaccccaagatgcgtcgtgccgccaagaccgtcaactttggcgtactctatggtatgtcagcagcacgtcttagtcaggaattgggcattgactacaaagaagctgaagcgtttatcgagcgctatttccaatcctttccgaaagttcgcgcgtggattgaacgtacgctcgaagaaggtcgcactcgcggctatgtggaaacgttattcgggcgtcgtcgctacgttccagatcttacgtctcgtgtccgctcagtgcgcgaagctgctgagcgtatggcctggaatatgcctgttcagggaacagcggcggacctcatgaagatcgccatggtgaaattgtttccgcgcttgaaacccttaggagcccaccttcttttacaggtgcatgatgaattggtcttggaagtacccgaggatcgcgcagaagaagccaaagcactcgtgaaagaggttatggaaaacgcgtatccgttagatgttccgttggaggtcgaagtgggtgtaggccgtgattggcttgaagcgaaacaagactaatga

SEQ ID NO: 734 - protein, 844 aa, synthetic construct
  REGION 1..844: note = DNA Polymerase Variant
MHHHHHHGGSGMLPLFDLEEPPKRVLLVDGHHLAYRTFYALSLTTSRGEPVQMVYGFARSLLKALKEDGQAVVVVFDAKAPSFRHEAYEAYKAGRAPTPEDFPRQLALVKRLVDLLGLVRLEAPGYEADDVLGTLAKKAEREGMEVCILTGDRDFFQLLSEKVSVLLPDGTLVTPKDVQEKYGVPPERWVDFRALTGDRSDNIPGVAGIGEKTALRLLAEWGSVENLLKNLDRVKPDSLRRKIEAHLEDLRLSLDLARIRTDLPLEVDFKALRRRTPDLEGLRAFLEELELGSLLHEFGLLGGEKPREEAPWPPPEGAFVGFLLSRKEPMWAELLALAAAAEGRVHRATSPVEALADLKEARGFLAKDLAVLALREGVALDPTDDPLLVAYLLDHANTNPERVARRYGGEFTEDAAERALLSERLFQTLFPRLSEKLLWLYQAVERPLSRVLAHMEARGVRLDVPLLEALSFELEKELERLEGEVFRLAGHPFNLNSRDQLEKVLFDELGLTPVTRTEKTGKRSTSAAALEALRGAHPIVELILQYRELSKLKSTYLDRLPRLVHPRTGRLHTRFNQTATATGRLSSSDPNLQNIPVRTPLGQHIRKAFVAEEGWLLLAADYSQIELRVLAHLSGDENLKRVFREGKDIHTETAAWMFGVDPALVDPKMRRAAKTVNFGVLYGMSAARLSQELGIDYKEAEAFIERYFQSFPKVRAWIERTLEEGRTRGYVETLFGRRRYVPDLTSRVRSVREAAERMAWNMPVQGTAADLMKIAMVKLFPRLKPLGAHLLLQVHDELVLEVPEDRAEEAKALVKEVMENAYPLDVPLEVEVGVGRDWLEAKQD

SEQ ID NO: 735 - DNA, 2538 bp, synthetic construct
  misc_feature 1..2538: note = DNA Polymerase Variant
  source 1..2538: mol_type = other DNA
atgcaccatcatcatcatcatggcggtagcggcatgttaccgctgtttgatttggaagaaccaccaaaacgcgtgctgcttgttgacggccatcatctggcgtatcgtaccttctacgcactgagccttacgacctcacgtggtgagcctgtccagatggtgtatgggtttgctcgctccctgctgaaagccctgaaggaagatggtcaagccgtagtagtggttttcgatgcgaaagcaccgtcgtttcgtcacgaagcgtacgaggcctataaagctggccgcgcaccgaccccggaagactttccgcgtcagttagcgctcgtcaaacgcctcgtggatttgctgggattagttcgcttggaagctcctggctacgaggcggacgacgtgctcggtacactggccaagaaagcagaacgtgaaggcatggaggtctgcattcttaccggtgatcgcgatttcttccagctgctgtctgagaaagtgagcgttttgctgcccgatggcacgttagtaaccccgaaagatgtgcaagagaaatatggagttccgccagaacgttgggtggactttcgcgcactgactggtgatcgttcagacaacatcccgggcgttgccgggattggtgaaaagacggcgctgcgcctgctggcagaatggggctcggtggaaaatctgctcaagaaccttgatcgtgtgaaacctgatagcttacgccgcaagatcgaagcccacctggaagacttgcgtctgagtctggatcttgcccgtattcgcaccgatctgccgttggaagtagactttaaagctctgcgtcgtcgcacacccgatttagaggggttacgcgcgttcctcgaagaactggagctgggctccctgctgcatgaattcggtttgttgggcggagagaaaccgcgtgaagaagcaccatggccgccgcccgaaggtgcctttgtcggctttcttctgtcacgcaaagagccaatgtgggcggaactgttagctcttgcagccgccgcggaagggcgtgttcaccgcgcgacctctcctgtcgaggccctcgctgacctcaaagaagcacgtggtttcttggcgaaagatttagccgtgcttgcattacgcgaaggcgttgcgctcgatccgacggacgacccgcttttggtggcttatttgctcgatcatgcgaataccaacccggaacgtgtcgcccgtcgttacggcggcgagtttactgaagatgcggcagaacgcgcgttgcttagcgaacgcctcttccagacgttatttccacgtctttcggagaaattactctggctctatcaggaagtcgaacgtccagttagtcgcgtgcttgcccatatggaggctcgcggtgtgcgcttagatgttccgttgttagaagcactcagcttcgagttggagaaagaactggaacgtcttgaaggcgaagtctttcgtttagcggggcatcccttcaatctcaactctcgcgaccaattggagaaagtgctctttgatgaattaggtttaacccctgtcacgcgtacagagaagaccggcaaacgttccacttcggcagccgccttggaagcacttcgtggtgctcacccgatcgtcgagttgattttgcagtatcgcgagctcagcaaactcaaatcaacctatcttgataggttacctcgtcttgttcatccacgtacgggtcgtttacacacccgcttcaatcaaacggcaacagccaccgggcgcttgtcgtcgagtgacccgaacctccagaatattccagtgcgcacgccgctgggccaacacattcgtaaagcgtttgttgcggaagaaggttggttattacttgcggccgattactcccagatcgaacttcgtgtattggcgcatctctctggcgacgagaatcttaaacgcgtgtttcgcgaaggcaaggatattcacactgaaaccgcagcctggatgttcggggtggacccagccttagtggaccccaagatgcgtcgtgccgccaagaccgtcaactttggcgtactctatggtatgtcagcagcacgtcttagtcaggaattgggcattgactacaaagaagctgaagcgtttatcgagcgctatttccaatcctttccgaaagttcgcgcgtggattgaacgtacgctcgaagaaggtcgcactcgcggctatgtggaaacgttattcgggcgtcgtcgctacgttccagatcttacgtcccgtgtccgctcagtgcgcgaagctgctgagcgtatggcctggaatatgcctgttcagggaacagcggcggacctcatgaagatcgccatggtgaaattgtttccgcgcttgaaacccttaggagcccaccttcttttacaggtgcatgatgaattggtcttggaagtacccgaggatcgcgcagaagaagccaaagcactcgtgaaagaggttatggaaaacgcgtatccgttagatgttccgttggaggtcgaagtgggtgtaggccgtgattggcttgaagcgaaacaagactaatga

SEQ ID NO: 736 - protein, 844 aa, synthetic construct
  REGION 1..844: note = DNA Polymerase Variant
MHHHHHHGGSGMLPLFDLEEPPKRVLLVDGHHLAYRTFYALSLTTSRGEPVQMVYGFARSLLKALKEDGQAVVVVFDAKAPSFRHEAYEAYKAGRAPTPEDFPRQLALVKRLVDLLGLVRLEAPGYEADDVLGTLAKKAEREGMEVCILTGDRDFFQLLSEKVSVLLPDGTLVTPKDVQEKYGVPPERWVDFRALTGDRSDNIPGVAGIGEKTALRLLAEWGSVENLLKNLDRVKPDSLRRKIEAHLEDLRLSLDLARIRTDLPLEVDFKALRRRTPDLEGLRAFLEELELGSLLHEFGLLGGEKPREEAPWPPPEGAFVGFLLSRKEPMWAELLALAAAAEGRVHRATSPVEALADLKEARGFLAKDLAVLALREGVALDPTDDPLLVAYLLDHANTNPERVARRYGGEFTEDAAERALLSERLFQTLFPRLSEKLLWLYQEVERPVSRVLAHMEARGVRLDVPLLEALSFELEKELERLEGEVFRLAGHPFNLNSRDQLEKVLFDELGLTPVTRTEKTGKRSTSAAALEALRGAHPIVELILQYRELSKLKSTYLDRLPRLVHPRTGRLHTRFNQTATATGRLSSSDPNLQNIPVRTPLGQHIRKAFVAEEGWLLLAADYSQIELRVLAHLSGDENLKRVFREGKDIHTETAAWMFGVDPALVDPKMRRAAKTVNFGVLYGMSAARLSQELGIDYKEAEAFIERYFQSFPKVRAWIERTLEEGRTRGYVETLFGRRRYVPDLTSRVRSVREAAERMAWNMPVQGTAADLMKIAMVKLFPRLKPLGAHLLLQVHDELVLEVPEDRAEEAKALVKEVMENAYPLDVPLEVEVGVGRDWLEAKQD

SEQ ID NO: 737 - DNA, 2538 bp, synthetic construct
  misc_feature 1..2538: note = DNA Polymerase Variant
  source 1..2538: mol_type = other DNA
atgcaccatcatcatcatcatggcggtagcggcatgttaccgctgtttgatttggaagaaccaccaaaacgcgtgctgcttgttgacggccatcatctggcgtatcgtaccttctacgcactgagccttacgacctcacgtggtgagcctgtccagatggtgtatgggtttgctcgctccctgctgaaagccctgaaggaagatggtcaagccgtagtagtggttttcgatgcgaaagcaccgtcgtttcgtcacgaagcgtacgaggcctataaagctggccgcgcaccgaccccggaagactttccgcgtcagttagcgctcgtcaaacgcctcgtggatttgctgggattagttcgcttggaagctcctggctacgaggcggacgacgtgctcggtacactggccaagaaagcagaacgtgaaggcatggaggtctgcattcttaccggtgatcgcgatttcttccagctgctgtctgagaaagtgagcgttttgctgcccgatggcacgttagtaaccccgaaagatgtgcaagagaaatatggagttccgccagaacgttgggtggactttcgcgcactgactggtgatcgttcagacaacatcccgggcgttgccgggattggtgaaaagacggcgctgcgcctgctggcagaatggggctcggtggaaaatctgctcaagaaccttgatcgtgtgaaacctgatagcttacgccgcaagatcgaagcccacctggaagacttgcgtctgagtctggatcttgcccgtattcgcaccgatctgccgttggaagtagactttaaagctctgcgtcgtcgcacacccgatttagaggggttacgcgcgttcctcgaagaactggagctgggctccctgctgcatgaattcggtttgttgggcggagagaaaccgcgtgaagaagcaccatggccgccgcccgaaggtgcctttgtcggctttcttctgtcacgcaaagagccaatgtgggcggaactgttagctcttgcagccgccgcggaagggcgtgttcaccgcgcgacctctcctgtcgaggccctcgctgacctcaaagaagcacgtggtttcttggcgaaagatttagccgtgcttgcattacgcgaaggcgttgcgctcgagccgacggacgacccgcttttggtggcttatttgctcgatcatgcgaataccaacccggaacgtgtcgcccgtcgttacggcggcgagtttactgaagatgcggcagaacgcgcgttgcttagcgaacgcctcttccagacgttatttccacgtctttcggagaaattactctggctctatcaggaagtcgaacgtccattgagtcgcgtgcttgcccatatggaggctcgcggtgtgcgcttagatgttccgttgttagaagcactcagcttcgagttggagaaagaactggaacgtcttgaaggcgaagtctttcgtttagcggggcatcccttcaatctcaactctcgcgaccaattggagaaagtgctctttgatgaattaggtttaacccctgtcacgcgtacagagaagaccggcaaacgttccacttcggcagccgccttggaagcacttcgtggtgctcacccgatcgtcgagttgattttgcagtatcgcgagctcagcaaactcaaatcaacctatcttgataggttacctcgtcttgttcatccacgtacgggtcgtttacacacccgcttcaatcaaacggcaacagccaccgggcgcttgtcgtcgagtgacccgaacctccagaatattccagtgcgcacgccgctgggccaacacattcgtaaagcgtttgttgcggaagaaggttggttattacttgcggccgattactcccagatcgaacttcgtgtattggcgcatctctctggcgacgagaatcttaaacgcgtgtttcgcgaaggcaaggatattcacactgaaaccgcagcctggatgttcggggtggacccagccttagtggaccccaagatgcgtcgtgccgccaagaccgtcaactttggcgtactctatggtatgtcagcagcacgtcttagtcaggaattgggcattgactacaaagaagctgaagcgtttatcgagcgctatttccaatcctttccgaaagttcgcgcgtggattgaacgtacgctcgaagaaggtcgcactcgcggctatgtggaaacgttattcgggcgtcgtcgctacgttccagatcttacgtctcgtgtccgctcagtgcgcgaagctgctgagcgtatggcctggaatatgcctgttcagggaacagcggcggacctcatgaagatcgccatggtgaaattgtttccgcgcttgaaacccttaggagcccaccttcttttacaggtgcatgatgaattggtcttggaagtacccgaggatcgcgcagaagaagccaaagcactcgtgaaagaggttatggaaaacgcgtatccgttagatgttccgttggaggtcgaagtgggtgtaggccgtgattggcttgaagcgaaacaagactaatga

SEQ ID NO: 738 - protein, 844 aa, synthetic construct
  REGION 1..844: note = DNA Polymerase Variant
MHHHHHHGGSGMLPLFDLEEPPKRVLLVDGHHLAYRTFYALSLTTSRGEPVQMVYGFARSLLKALKEDGQAVVVVFDAKAPSFRHEAYEAYKAGRAPTPEDFPRQLALVKRLVDLLGLVRLEAPGYEADDVLGTLAKKAEREGMEVCILTGDRDFFQLLSEKVSVLLPDGTLVTPKDVQEKYGVPPERWVDFRALTGDRSDNIPGVAGIGEKTALRLLAEWGSVENLLKNLDRVKPDSLRRKIEAHLEDLRLSLDLARIRTDLPLEVDFKALRRRTPDLEGLRAFLEELELGSLLHEFGLLGGEKPREEAPWPPPEGAFVGFLLSRKEPMWAELLALAAAAEGRVHRATSPVEALADLKEARGFLAKDLAVLALREGVALEPTDDPLLVAYLLDHANTNPERVARRYGGEFTEDAAERALLSERLFQTLFPRLSEKLLWLYQEVERPLSRVLAHMEARGVRLDVPLLEALSFELEKELERLEGEVFRLAGHPFNLNSRDQLEKVLFDELGLTPVTRTEKTGKRSTSAAALEALRGAHPIVELILQYRELSKLKSTYLDRLPRLVHPRTGRLHTRFNQTATATGRLSSSDPNLQNIPVRTPLGQHIRKAFVAEEGWLLLAADYSQIELRVLAHLSGDENLKRVFREGKDIHTETAAWMFGVDPALVDPKMRRAAKTVNFGVLYGMSAARLSQELGIDYKEAEAFIERYFQSFPKVRAWIERTLEEGRTRGYVETLFGRRRYVPDLTSRVRSVREAAERMAWNMPVQGTAADLMKIAMVKLFPRLKPLGAHLLLQVHDELVLEVPEDRAEEAKALVKEVMENAYPLDVPLEVEVGVGRDWLEAKQD

SEQ ID NO: 739 - DNA, 2538 bp, synthetic construct
  misc_feature 1..2538: note = DNA Polymerase Variant
  source 1..2538: mol_type = other DNA
atgcaccatcatcatcatcatggcggtagcggcatgttaccgctgtttgatttggaagaaccaccaaaacgcgtgctgcttgttgacggccatcatctggcgtatcgtaccttctacgcactgagccttacgacctcacgtggtgagcctgtccagatggtgtatgggtttgctcgctccctgctgaaagccctgaaggaagatggtcaagccgtagtagtggttttcgatgcgaaagcaccgtcgtttcgtcacgaagcgtacgaggcctataaagctggccgcgcaccgaccccggaagactttccgcgtcagttagcgctcgtcaaacgcctcgtggatttgctgggattagttcgcttggaagctcctggctacgaggcggacgacgtgctcggtacactggccaagaaagcagaacgtgaaggcatggaggtctgcattcttaccggtgatcgcgatttcttccagctgctgtctgagaaagtgagcgttttgctgcccgatggcacgttagtaaccccgaaagatgtgcaagagaaatatggagttccgccagaacgttgggtggactttcgcgcactgactggtgatcgttcagacaacatcccgggcgttgccgggattggtgaaaagacggcgctgcgcctgctggcagaatggggctcggtggaaaatctgctcaagaaccttgatcgtgtgaaacctgatagcttacgccgcaagatcgaagcccacctggaagacttgcgtctgagtctggatcttgcccgtattcgcaccgatctgccgttggaagtagactttaaagctctgcgtcgtcgcacacccgatttagaggggttacgcgcgttcctcgaagaactggagctgggctccctgctgcatgaattcggtttgttgggcggagagaaaccgcgtgaagaagcaccatggccgccgcccgaaggtgcctttgtcggctttcttctgtcacgcaaagagccaatgtgggcggaactgttagctcttgcagccgccgcggaagggcgtgttcaccgcgcgacctctcctgtcgaggccctcgctgacctcaaagaagcacgtggtttcttggcgaaagatttagccgtgcttgcattacgcgaaggcgttgcgctcgatccgacggacgacccgcttttggtggcttatttgctcgatcatgcgaataccaacccggaacgtgtcgcccgtcgttacggcggcgagtttactgaagatgcggcagaacgcgcgttgcttagcgaacgcctcttccagacgttatttccacgtctttcggagaaattactctggctctatcaggaagtcgaacgtccattgagtcgcgtgcttgcccatatggaggctcgcggtgtgcgcttagatgttccgttgttagaagcactcagcttcgagttggagaaagaactggaacgtcttgaaggcgaagtctttcgtttagcggggcatcccttcaatctcaactctcgcgaccaattggagaaagtgctctttgatgaattaggtttaacccctgtcacgcgtacagagaagaccggcaaacgttccacttcggcagccgccttggaagcacttcgcggtgctcacccgatcgtcgagttgattttgcagtatcgcgagctcagcaaactcaaatcaacctatcttgataggttacctcgtcttgttcatccacgtacgggtcgtttacacacccgcttcaatcaaacggcaacagccaccgggcgcttgtcgtcgagtgacccgaacctccagaatattccagtgcgcacgccgctgggccaacacattcgtaaagcgtttgttgcggaagaaggttggttattacttgcggccgattactcccagatcgaacttcgtgtattggcgcatctctctggcgacgagaatcttaaacgcgtgtttcgcgaaggcaaggatattcacactgaaaccgcagcctggatgttcggggtggacccagccttagtggaccccaagatgcgtcgtgccgccaagaccgtcaactttggcgtactctatggtatgtcagcagcacgtcttagtcaggaattgggcattgactacaaagaagctgaagcgtttatcgagcgctggttccaatcctttccgaaagttcgcgcgtggattgaacgtacgctcgaagaaggtcgcactcgcggctatgtggaaacgttattcgggcgtcgtcgctacgttccagatcttacgtctcgtgtccgctcagtgcgcgaagctgctgagcgtatggcctggaatatgcctgttcagggaacagcggcggacctcatgaagatcgccatggtgaaattgtttccgcgcttgaaacccttaggagcccaccttcttttacaggtgcatgatgaattggtcttggaagtacccgaggatcgcgcagaagaagccaaagcactcgtgaaagaggttatggaaaacgcgtatccgttagatgttccgttggaggtcgaagtgggtgtaggccgtgattggcttgaagcgaaacaagactaatga

SEQ ID NO: 740 - protein, 844 aa, synthetic construct
  REGION 1..844: note = DNA Polymerase Variant
MHHHHHHGGSGMLPLFDLEEPPKRVLLVDGHHLAYRTFYALSLTTSRGEPVQMVYGFARSLLKALKEDGQAVVVVFDAKAPSFRHEAYEAYKAGRAPTPEDFPRQLALVKRLVDLLGLVRLEAPGYEADDVLGTLAKKAEREGMEVCILTGDRDFFQLLSEKVSVLLPDGTLVTPKDVQEKYGVPPERWVDFRALTGDRSDNIPGVAGIGEKTALRLLAEWGSVENLLKNLDRVKPDSLRRKIEAHLEDLRLSLDLARIRTDLPLEVDFKALRRRTPDLEGLRAFLEELELGSLLHEFGLLGGEKPREEAPWPPPEGAFVGFLLSRKEPMWAELLALAAAAEGRVHRATSPVEALADLKEARGFLAKDLAVLALREGVALDPTDDPLLVAYLLDHANTNPERVARRYGGEFTEDAAERALLSERLFQTLFPRLSEKLLWLYQEVERPLSRVLAHMEARGVRLDVPLLEALSFELEKELERLEGEVFRLAGHPFNLNSRDQLEKVLFDELGLTPVTRTEKTGKRSTSAAALEALRGAHPIVELILQYRELSKLKSTYLDRLPRLVHPRTGRLHTRFNQTATATGRLSSSDPNLQNIPVRTPLGQHIRKAFVAEEGWLLLAADYSQIELRVLAHLSGDENLKRVFREGKDIHTETAAWMFGVDPALVDPKMRRAAKTVNFGVLYGMSAARLSQELGIDYKEAEAFIERWFQSFPKVRAWIERTLEEGRTRGYVETLFGRRRYVPDLTSRVRSVREAAERMAWNMPVQGTAADLMKIAMVKLFPRLKPLGAHLLLQVHDELVLEVPEDRAEEAKALVKEVMENAYPLDVPLEVEVGVGRDWLEAKQD

SEQ ID NO: 741 - DNA, 2538 bp, synthetic construct
  misc_feature 1..2538: note = DNA Polymerase Variant
  source 1..2538: mol_type = other DNA
atgcaccatcatcatcatcatggcggtagcggcatgttaccgctgtttgatttggaagaaccaccaaaacgcgtgctgcttgttgacggccatcatctggcgtatcgtaccttctacgcactgagccttacgacctcacgtggtgagcctgtccagatggtgtatgggtttgctcgctccctgctgaaagccctgaaggaagatggtcaagccgtagtagtggttttcgatgcgaaagcaccgtcgtttcgtcacgaagcgtacgaggcctataaagctggccgcgcaccgaccccggaagactttccgcgtcagttagcgctcgtcaaacgcctcgtggatttgctgggattagttcgcttggaagctcctggctacgaggcggacgacgtgctcggtacactggccaagaaagcagaacgtgaaggcatggaggtctgcattcttaccggtgatcgcgatttcttccagctgctgtctgagaaagtgagcgttttgctgcccgatggcacgttagtaaccccgaaagatgtgcaagagaaatatggagttccgccagaacgttgggtggactttcgcgcactgactggtgatcgttcagacaacatcccgggcgttgccgggattggtgaaaagacggcgctgcgcctgctggcagaatggggctcggtggaaaatctgctcaagaaccttgatcgtgtgaaacctgatagcttacgccgcaagatcgaagcccacctggaagacttgcgtctgagtctggatcttgcccgtattcgcaccgatctgccgttggaagtagactttaaagctctgcgtcgtcgcacacccgatttagaggggttacgcgcgttcctcgaagaactggagctgggctccctgctgcatgaattcggtttgttgggcggagagaaaccgcgtgaagaagcaccatggccgccgcccgaaggtgcctttgtcggctttcttctgtcacgcaaagagccaatgtgggcggaactgttagctcttgcagccgccgcggaagggcgtgttcaccgcgcgacctctcctgtcgaggccctcgctgacctcaaagaagcacgtggtttcttggcgaaagatttagccgtgcttgcattacgcgaaggcgttgcgctcaagccgacggacgacccgcttttggtggcttatttgctcgatcatgcgaataccaacccggaacgtgtcgcccgtcgttacggcggcgagtttactgaagatgcggcagaacgcgcgttgcttagcgaacgcctcttccagacgttatttccacgtctttcggagaaattactctggctctatcaggaagtcgaacgtccattgagtcgcgtgcttgcccatatggaggctcgcggtgtgcgcttagatgttccgttgttagaagcactcagcttcgagttggagaaagaactggaacgtcttgaaggcgaagtctttcgtttagcggggcatcccttcaatctcaactctcgcgaccaattggagaaagtgctctttgatgaattaggtttaacccctgtcacgcgtacagagaagaccggcaaacgttccacttcggcagccgccttggaagcacttcgtggtgctcacccgatcgtcgagttgattttgcagtatcgcgagctcagcaaactcaaatcaacctatcttgataggttacctcgtcttgttcatccacgtacgggtcgtttacacacccgcttcaatcaaacggcaacagccaccgggcgcttgtcgtcgagtgacccgaacctccagaatattccagtgcgcacgccgctgggccaacacattcgtaaagcgtttgttgcggaagaaggttggttattacttgcggccgattactcccagatcgaacttcgtgtattggcgcatctctctggcgacgagaatcttaaacgcgtgtttcgcgaaggcaaggatattcacactgaaaccgcagcctggatgttcggggtggacccagccttagtggaccccaagatgcgtcgtgccgccaagaccgtcaactttggcgtactctatggtatgtcagcagcacgtcttagtcaggaattgggcattgactacaaagaagctgaagcgtttatcgagcgctatttccaatcctttccgaaagttcgcgcgtggattgaacgtacgctcgaagaaggtcgcactcgcggctatgtggaaacgttattcgggcgtcgtcgctacgttccagatcttacgtctcgtgtccgctcagtgcgcgaagctgctgagcgtatggcctggaatatgcctgttcagggaacagcggcggacctcatgaagatcgccatggtgaaattgtttccgcgcttgaaacccttaggagcccaccttcttttacaggtgcatgatgaattggtcttggaagtacccgaggatcgcgcagaagaagccaaagcactcgtgaaagaggttatggaaaacgcgtatccgttagatgttccgttggaggtcgaagtgggtgtaggccgtgattggcttgaagcgaaacaagactaatga

SEQ ID NO: 742 - protein, 844 aa, synthetic construct
  REGION 1..844: note = DNA Polymerase Variant
MHHHHHHGGSGMLPLFDLEEPPKRVLLVDGHHLAYRTFYALSLTTSRGEPVQMVYGFARSLLKALKEDGQAVVVVFDAKAPSFRHEAYEAYKAGRAPTPEDFPRQLALVKRLVDLLGLVRLEAPGYEADDVLGTLAKKAEREGMEVCILTGDRDFFQLLSEKVSVLLPDGTLVTPKDVQEKYGVPPERWVDFRALTGDRSDNIPGVAGIGEKTALRLLAEWGSVENLLKNLDRVKPDSLRRKIEAHLEDLRLSLDLARIRTDLPLEVDFKALRRRTPDLEGLRAFLEELELGSLLHEFGLLGGEKPREEAPWPPPEGAFVGFLLSRKEPMWAELLALAAAAEGRVHRATSPVEALADLKEARGFLAKDLAVLALREGVALKPTDDPLLVAYLLDHANTNPERVARRYGGEFTEDAAERALLSERLFQTLFPRLSEKLLWLYQEVERPLSRVLAHMEARGVRLDVPLLEALSFELEKELERLEGEVFRLAGHPFNLNSRDQLEKVLFDELGLTPVTRTEKTGKRSTSAAALEALRGAHPIVELILQYRELSKLKSTYLDRLPRLVHPRTGRLHTRFNQTATATGRLSSSDPNLQNIPVRTPLGQHIRKAFVAEEGWLLLAADYSQIELRVLAHLSGDENLKRVFREGKDIHTETAAWMFGVDPALVDPKMRRAAKTVNFGVLYGMSAARLSQELGIDYKEAEAFIERYFQSFPKVRAWIERTLEEGRTRGYVETLFGRRRYVPDLTSRVRSVREAAERMAWNMPVQGTAADLMKIAMVKLFPRLKPLGAHLLLQVHDELVLEVPEDRAEEAKALVKEVMENAYPLDVPLEVEVGVGRDWLEAKQD

SEQ ID NO: 743 - DNA, 2538 bp, synthetic construct
  misc_feature 1..2538: note = DNA Polymerase Variant
  source 1..2538: mol_type = other DNA
atgcaccatcatcatcatcatggcggtagcggcatgttaccgctgtttgatttggaagaaccaccaaaacgcgtgctgcttgttgacggccatcatctggcgtatcgtaccttctacgcactgagccttacgacctcacgtggtgagcctgtccagatggtgtatgggtttgctcgctccctgctgaaagccctgaaggaagatggtcaagccgtagtagtggttttcgatgcgaaagcaccgtcgtttcgtcacgaagcgtacgaggcctataaagctggccgcgcaccgaccccggaagactttccgcgtcagttagcgctcgtcaaacgcctcgtggatttgctgggattagttcgcttggaagctcctggctacgaggcggacgacgtgctcggtacactggccaagaaagcagaacgtgaaggcatggaggtctgcattcttaccggtgatcgcgatttcttccagctgctgtctgagaaagtgagcgttttgctgcccgatggcacgttagtaaccccgaaagatgtgcaagagaaatatggagttccgccagaacgttgggtggactttcgcgcactgactggtgatcgttcagacaacatcccgggcgttgccgggattggtgaaaagacggcgctgcgcctgctggcagaatggggctcggtggaaaatctgctcaagaaccttgatcgtgtgaaacctgatagcttacgccgcaagatcgaagcccacctggaagacttgcgtctgagtctggatcttgcccgtattcgcaccgatctgccgttggaagtagactttaaagctctgcgtcgtcgcacacccgatttagaggggttacgcgcgttcctcgaagaactggagctgggctccctgctgcatgaattcggtttgttgggcggagagaaaccgcgtgaagaagcaccatggccgccgcccgaaggtgcctttgtcggctttcttctgtcacgcaaagagccaatgtgggcggaactgttagctcttgcagccgccgcggaagggcgtgttcaccgcgcgacctctcctgtcgaggccctcgctgacctcaaagaagcacgtggtttcttggcgaaagatttagccgtgcttgcattacgcgaaggcgttgcgctcgatccgacggacgacccgcttttggtggcttatttgctcgatcatgcgaataccaacccggaacgtgtcgcccgtcgttacggcggcgagtttactgaagatgcggcagaacgcgcgttgcttagcgaacgcctcttccagacgttatttccacgtctttcggagaaattactctggctctatcaggaagtcgaacgtccattgagtcgcgtgcttgcccatatggagtatcgcggtgtgcgcttagatgttccgttgttagaagcactcagcttcgagttggagaaagaactggaacgtcttgaaggcgaagtctttcgtttagcggggcatcccttcaatctcaactctcgcgaccaattggagaaagtgctctttgatgaattaggtttaacccctgtcacgcgtacagagaagaccggcaaacgttccacttcggcagccgccttggaagcacttcgtggtgctcacccgatcgtcgagttgattttgcagtatcgcgagctcagcaaactcaaatcaacctatcttgataggttacctcgtcttgttcatccacgtacgggtcgtttacacacccgcttcaatcaaacggcaacagccaccgggcgcttgtcgtcgagtgacccgaacctccagaatattccagtgcgcacgccgctgggccaacacattcgtaaagcgtttgttgcggaagaaggttggttattacttgcggccgattactcccagatcgaacttcgtgtattggcgcatctctctggcgacgagaatcttaaacgcgtgtttcgcgaaggcaaggatattcacactgaaaccgcagcctggatgttcggggtggacccagccttagtggaccccaagatgcgtcgtgccgccaagaccgtcaactttggcgtactctatggtatgtcagcagcacgtcttagtcaggaattgggcattgactacaaagaagctgaagcgtttatcgagcgctatttccaatcctttccgaaagttcgcgcgtggattgaacgtacgctcgaagaaggtcgcactcgcggctatgtggaaacgttattcgggcgtcgtcgctacgttccagatcttacgtctcgtgtccgctcagtgcgcgaagctgctgagcgtatggcctggaatatgcctgttcagggaacagcggcggacctcatgaagatcgccatggtgaaattgtttccgcgcttgaaacccttaggagcccaccttcttttacaggtgcatgatgaattggtcttggaagtacccgaggatcgcgcagaagaagccaaagcactcgtgaaagaggttatggaaaacgcgtatccgttagatgttccgttggaggtcgaagtgggtgtaggccgtgattggcttgaagcgaaacaagactaatga

SEQ ID NO: 744 - protein, 844 aa, synthetic construct
  REGION 1..844: note = DNA Polymerase Variant
MHHHHHHGGSGMLPLFDLEEPPKRVLLVDGHHLAYRTFYALSLTTSRGEPVQMVYGFARSLLKALKEDGQAVVVVFDAKAPSFRHEAYEAYKAGRAPTPEDFPRQLALVKRLVDLLGLVRLEAPGYEADDVLGTLAKKAEREGMEVCILTGDRDFFQLLSEKVSVLLPDGTLVTPKDVQEKYGVPPERWVDFRALTGDRSDNIPGVAGIGEKTALRLLAEWGSVENLLKNLDRVKPDSLRRKIEAHLEDLRLSLDLARIRTDLPLEVDFKALRRRTPDLEGLRAFLEELELGSLLHEFGLLGGEKPREEAPWPPPEGAFVGFLLSRKEPMWAELLALAAAAEGRVHRATSPVEALADLKEARGFLAKDLAVLALREGVALDPTDDPLLVAYLLDHANTNPERVARRYGGEFTEDAAERALLSERLFQTLFPRLSEKLLWLYQEVERPLSRVLAHMEYRGVRLDVPLLEALSFELEKELERLEGEVFRLAGHPFNLNSRDQLEKVLFDELGLTPVTRTEKTGKRSTSAAALEALRGAHPIVELILQYRELSKLKSTYLDRLPRLVHPRTGRLHTRFNQTATATGRLSSSDPNLQNIPVRTPLGQHIRKAFVAEEGWLLLAADYSQIELRVLAHLSGDENLKRVFREGKDIHTETAAWMFGVDPALVDPKMRRAAKTVNFGVLYGMSAARLSQELGIDYKEAEAFIERYFQSFPKVRAWIERTLEEGRTRGYVETLFGRRRYVPDLTSRVRSVREAAERMAWNMPVQGTAADLMKIAMVKLFPRLKPLGAHLLLQVHDELVLEVPEDRAEEAKALVKEVMENAYPLDVPLEVEVGVGRDWLEAKQD

SEQ ID NO: 745 - DNA, 2538 bp, synthetic construct
  misc_feature 1..2538: note = DNA Polymerase Variant
  source 1..2538: mol_type = other DNA
atgcaccatcatcatcatcatggcggtagcggcatgttaccgctgtttgatttggaagaaccaccaaaacgcgtgctgcttgttgacggccatcatctggcgtatcgtaccttctacgcactgagccttacgacctcacgtggtgagcctgtccagatggtgtatgggtttgctcgctccctgctgaaagccctgaaggaagatggtcaagccgtagtagtggttttcgatgcgaaagcaccgtcgtttcgtcacgaagcgtacgaggcctataaagctggccgcgcaccgaccccggaagactttccgcgtcagttagcgctcgtcaaacgcctcgtggatttgctgggattagttcgcttggaagctcctggctacgaggcggacgacgtgctcggtacactggccaagaaagcagaacgtgaaggcatggaggtctgcattcttaccggtgatcgcgatttcttccagctgctgtctgagaaagtgagcgttttgctgcccgatggcacgttagtaaccccgaaagatgtgcaagagaaatatggagttccgccagaacgttgggtggactttcgcgcactgactggtgatcgttcagacaacatcccgggcgttgccgggattggtgaaaagacggcgctgcgcctgctggcagaatggggctcggtggaaaatctgctcaagaaccttgatcgtgtgaaacctgatagcttacgccgcaagatcgaagcccacctggaagacttgcgtctgagtctggatcttgcccgtattcgcaccgatctgccgttggaagtagactttaaagctctgcgtcgtcgcacacccgatttagaggggttacgcgcgttcctcgaagaactggagctgggctccctgctgcatgaattcggtttgttgggcggagagaaaccgcgtgaagaagcaccatggccgccgcccgaaggtgcctttgtcggctttcttctgtcacgcaaagagccaatgtgggcggaactgttagctcttgcagccgccgcggaagggcgtgttcaccgcgcgacctctcctgtcgaggccctcgctgacctcaaagaagcacgtggtttcttggcgaaagatttagccgtgcttgcattacgcgaaggcgttgcgctcgatccgacggacgacccgcttttggtggcttatttgctcgatcatgcgaataccaacccggaacgtgtcgcccgtcgttacggcggcgagtttactgaagatgcgagtgaacgcgcgttgcttagcgaacgcctcttccagacgttatttccacgtctttcggagaaattactctggctctatcaggaagtcgaacgtccattgagtcgcgtgcttgcccatatggaggctcgcggtgtgcgcttagatgttccgttgttagaagcactcagcttcgagttggagaaagaactggaacgtcttgaaggcgaagtctttcgtttagcggggcatcccttcaatctcaactctcgcgaccaattggagaaagtgctctttgatgaattaggtttaacccctgtcacgcgtacagagaagaccggcaaacgttccacttcggcagccgccttggaagcacttcgtggtgctcacccgatcgtcgagttgattttgcagtatcgcgagctcagcaaactcaaatcaacctatcttgataggttacctcgtcttgttcatccacgtacgggtcgtttacacacccgcttcaatcaaacggcaacagccaccgggcgcttgtcgtcgagtgacccgaacctccagaatattccagtgcgcacgccgctgggccaacacattcgtaaagcgtttgttgcggaagaaggttggttattacttgcggccgattactcccagatcgaacttcgtgtattggcgcatctctctggcgacgagaatcttaaacgcgtgtttcgcgaaggcaaggatattcacactgaaaccgcagcctggatgttcggggtggacccagccttagtggaccccaagatgcgtcgtgccgccaagaccgtcaactttggcgtactctatggtatgtcagcagcacgtcttagtcaggaattgggcattgactacaaagaagctgaagcgtttatcgagcgctatttccaatcctttccgaaagttcgcgcgtggattgaacgtacgctcgaagaaggtcgcactcgcggctatgtggaaacgttattcgggcgtcgtcgctacgttccagatcttacgtctcgtgtccgctcagtgcgcgaagctgctgagcgtatggcctggaatatgcctgttcagggaacagcggcggacctcatgaagatcgccatggtgaaattgtttccgcgcttgaaacccttaggagcccaccttcttttacaggtgcatgatgaattggtcttggaagtacccgaggatcgcgcagaagaagccaaagcactcgtgaaagaggttatggaaaacgcgtatccgttagatgttccgttggaggtcgaagtgggtgtaggccgtgattggcttgaagcgaaacaagactaatga

SEQ ID NO: 746 - protein, 844 aa, synthetic construct
  REGION 1..844: note = DNA Polymerase Variant
MHHHHHHGGSGMLPLFDLEEPPKRVLLVDGHHLAYRTFYALSLTTSRGEPVQMVYGFARSLLKALKEDGQAVVVVFDAKAPSFRHEAYEAYKAGRAPTPEDFPRQLALVKRLVDLLGLVRLEAPGYEADDVLGTLAKKAEREGMEVCILTGDRDFFQLLSEKVSVLLPDGTLVTPKDVQEKYGVPPERWVDFRALTGDRSDNIPGVAGIGEKTALRLLAEWGSVENLLKNLDRVKPDSLRRKIEAHLEDLRLSLDLARIRTDLPLEVDFKALRRRTPDLEGLRAFLEELELGSLLHEFGLLGGEKPREEAPWPPPEGAFVGFLLSRKEPMWAELLALAAAAEGRVHRATSPVEALADLKEARGFLAKDLAVLALREGVALDPTDDPLLVAYLLDHANTNPERVARRYGGEFTEDASERALLSERLFQTLFPRLSEKLLWLYQEVERPLSRVLAHMEARGVRLDVPLLEALSFELEKELERLEGEVFRLAGHPFNLNSRDQLEKVLFDELGLTPVTRTEKTGKRSTSAAALEALRGAHPIVELILQYRELSKLKSTYLDRLPRLVHPRTGRLHTRFNQTATATGRLSSSDPNLQNIPVRTPLGQHIRKAFVAEEGWLLLAADYSQIELRVLAHLSGDENLKRVFREGKDIHTETAAWMFGVDPALVDPKMRRAAKTVNFGVLYGMSAARLSQELGIDYKEAEAFIERYFQSFPKVRAWIERTLEEGRTRGYVETLFGRRRYVPDLTSRVRSVREAAERMAWNMPVQGTAADLMKIAMVKLFPRLKPLGAHLLLQVHDELVLEVPEDRAEEAKALVKEVMENAYPLDVPLEVEVGVGRDWLEAKQD

SEQ ID NO: 747 - DNA, 2538 bp, synthetic construct
  misc_feature 1..2538: note = DNA Polymerase Variant
  source 1..2538: mol_type = other DNA
atgcaccatcatcatcatcatggcggtagcggcatgttaccgctgtttgatttggaagaaccaccaaaacgcgtgctgcttgttgacggccatcatctggcgtatcgtaccttctacgcactgagccttacgacctcacgtggtgagcctgtccagatggtgtatgggtttgctcgctccctgctgaaagccctgaaggaagatggtcaagccgtagtagtggttttcgatgcgaaggcaccgtcgtttcgtcacgaagcgtacgaggcctataaagctggccgcgcaccgaccccggaagactttccgcgtcagttagcgctcgtcaaacgcctcgtggatttgctgggattagttcgcttggaagctcctggctacgaggcggacgacgtgctcggtacactggccaagaaagcagaacgtgaaggcatggaggtctgcattcttaccggtgatcgcgatttcttccagctgctgtctgagaaagtgagcgttttgctgcccgatggcacgttagtaaccccgaaagatgtgcaagagaaatatggagttccgccagaacgttgggtggactttcgcgcactgactggtgatcgttcagacaacatcccgggcgttgccgggattggtgaaaagacggcgctgcgcctgctggcagaatggggctcggtggaaaatctgctcaagaaccttgatcgtgtgaaacctgatagcttacgccgcaagatcgaagcccacctggaagacttgcgtctgagtctggatcttgcccgtattcgcaccgatctgccgttggaagtagactttaaagctctgcgtcgtcgcacacccgatttagaggggttacgcgcgttcctcgaagaactggagctgggctccctgctgcatgaattcggtttgttgggcggagagaaaccgcgtgaagaagcaccatggccgccgcccgagggtgcctttgtcggctttcttctgtcacgcaaagagccaatgtgggcggaactgttagctcttgcagccgccgcggaagggcgtgttcaccgcgcgacctctcctgtcgaggccctcgctgacctcaaagaagcacgtggtttcttggcgaaagatttagccgtgcttgcattacgcgaaggcgttgcgctcgatccgacggacgacccgcttttggtggcttatttgctcgatcatgcgaataccaacccggaacgtgtcgcccgtcgttacggcggcgagtttactgaagatgcggcagaacgcgcgttgcttagcgaacgcctcttccagacgttatttccacgtctttcggagaaattactctggctctatcaggaagtcgaacgtccattgagtcgcgtgcttgcccatatggaggctcgcggtgtgcgcttagatgttccgttgttagaagcactcagcttcgaggcggcaaaagaactggaacgtcttgaaggcgaagtctttcgtttagcggggcatcccttcaatctcaactctcgcgaccaattggagaaagtgctctttgatgaattaggtttaacccctgtcacgcgtacagagaagaccggcaaacgttccacttcggcagccgccttggaagcacttcgtggtgcgcacccgatcgtcgagttgattttgcagtatcgcgagctcagcaaactcaaatcaacctatcttgataggttacctcgtcttgttcatccacgtacgggtcgtttacacacccgcttcaatcaaacggcaacagccaccgggcgcttgtcgtcgagtgacccgaacctccagaatattccagtgcgcacgccgctgggccaacacattcgtaaagcgtttgttgcggaagaaggttggttattacttgcggccgattactcccagatcgaacttcgtgtattggcgcatctctctggcgacgagaatcttaaacgcgtgtttcgcgaaggcaaggatattcacactgaaaccgcagcctggatgttcggggtggactcggccttagtggaccccaagatgcgtcgtgccgccaagaccgtcaactttggcgtactctatggtatgtcagcagcacgtcttagtcaggaattgggcattgactacaaagaagctgaagcgtttatcgagcgctatttccaatcctttccgaaagttcgcgcgtggattgaacgtacgctcgaagaaggtcgcactcgcggctatgtggaaacgttattcgggcgtcgtcgctacgttccagatcttacgtctcgtgtccgctcagtgcgcgaagctgctgagcgtatggcctggaatatgcctgttcagggaacagcggcggacctcatgaagatcgccatggtgaaattgtttccgcgcttgaaacccttaggagcccaccttcttctgcaggtgcatgatgaattggtcttggaagtacccgaggatcgcgcagaagaagccaaagcactcgtgaaagaggttatggaaaacgcgtatccgttagatgttccgttggaggtcgaagtgggtgtaggccgtgattggcttgaagcgaaacaagactaatga

SEQ ID NO: 748 - protein, 844 aa, synthetic construct
  REGION 1..844: note = DNA Polymerase Variant
MHHHHHHGGSGMLPLFDLEEPPKRVLLVDGHHLAYRTFYALSLTTSRGEPVQMVYGFARSLLKALKEDGQAVVVVFDAKAPSFRHEAYEAYKAGRAPTPEDFPRQLALVKRLVDLLGLVRLEAPGYEADDVLGTLAKKAEREGMEVCILTGDRDFFQLLSEKVSVLLPDGTLVTPKDVQEKYGVPPERWVDFRALTGDRSDNIPGVAGIGEKTALRLLAEWGSVENLLKNLDRVKPDSLRRKIEAHLEDLRLSLDLARIRTDLPLEVDFKALRRRTPDLEGLRAFLEELELGSLLHEFGLLGGEKPREEAPWPPPEGAFVGFLLSRKEPMWAELLALAAAAEGRVHRATSPVEALADLKEARGFLAKDLAVLALREGVALDPTDDPLLVAYLLDHANTNPERVARRYGGEFTEDAAERALLSERLFQTLFPRLSEKLLWLYQEVERPLSRVLAHMEARGVRLDVPLLEALSFEAAKELERLEGEVFRLAGHPFNLNSRDQLEKVLFDELGLTPVTRTEKTGKRSTSAAALEALRGAHPIVELILQYRELSKLKSTYLDRLPRLVHPRTGRLHTRFNQTATATGRLSSSDPNLQNIPVRTPLGQHIRKAFVAEEGWLLLAADYSQIELRVLAHLSGDENLKRVFREGKDIHTETAAWMFGVDSALVDPKMRRAAKTVNFGVLYGMSAARLSQELGIDYKEAEAFIERYFQSFPKVRAWIERTLEEGRTRGYVETLFGRRRYVPDLTSRVRSVREAAERMAWNMPVQGTAADLMKIAMVKLFPRLKPLGAHLLLQVHDELVLEVPEDRAEEAKALVKEVMENAYPLDVPLEVEVGVGRDWLEAKQD

SEQ ID NO: 749 - DNA, 2538 bp, synthetic construct
  misc_feature 1..2538: note = DNA Polymerase Variant
  source 1..2538: mol_type = other DNA
atgcaccatcatcatcatcatggcggtagcggcatgttaccgctgtttgatttggaagaaccaccaaaacgcgtgctgcttgttgacggccatcatctggcgtatcgtaccttctacgcactgagccttacgacctcacgtggtgagcctgtccagatggtgtatgggtttgctcgctccctgctgaaagccctgaaggaagatggtcaagccgtagtagtggttttcgatgcgcgtgcaccgtcgtttcgtcacgaagcgtacgaggcctataaagctggccgcgcaccgaccccggaagactttccgcgtcagttagcgctcgtcaaacgcctcgtggatttgctgggattagttcgcttggaagctcctggctacgaggcggacgacgtgctcggtacactggccaagaaagcagaacgtgaaggcatggaggtctgcattcttaccggtgatcgcgatttcttccagctgctgtctgagaaagtgagcgttttgctgcccgatggcacgttagtaaccccgaaagatgtgcaagagaaatatggagttccgccagaacgttgggtggactttcgcgcactgactggtgatcgttcagacaacatcccgggcgttgccgggattggtgaaaagacggcgctgcgcctgctggcagaatggggctcggtggaaaatctgctcaagaaccttgatcgtgtgaaacctgatagcttacgccgcaagatcgaagcccacctggaagacttgcgtctgagtctggatcttgcacgtattcgcaccgatctgccgttggaagtagactttaaagctctgcgtcgtcgcacacccgatttagaggggttacgcgcgttcctcgaagaactggagctgggctccctgctgcatgaattcggtttgttgggcggagagaaaccgcgtgaagaagcaccatggccgccgcccgagggtgcctttgtcggctttcttctgtcacgcaaagagccaatgtgggcggaactgttagctcttgcagccgccgcggaagggcgtgttcaccgcgcgacctctcctgtcgaggccctcgctgacctcaaagaagcacgtggtttcttggcgaaagatttagccgtgcttgcattacgcgaaggcgttgcgctcgatccgacggacgacccgcttttggtggcttatttgctcgatagcgcgaataccaacccggaacgtgtcgcccgtcgttacggcggcgagtttactgaagatgcggcagaacgcgcgttgcttagcgaacgcctcttccagacgttatttccacgtctttcggagaaattactctggctctatcaggaagtcgaacgtccattgagtcgcgtgcttgcccatatggaggctcgcggtgtgcgcttagatgttccgttgttagaagcactcagcttcgaggcggcaaaagaactggaacgtcttgaaggcgaagtctttcgtttagcggggcatcccttcaatctcaactctcgcgaccaattggagaaagtgctctttgatgaattaggtttaacccctgtcacgcgtacagagaagaccggcaaacgttccacttcggcagccgccttggaagcacttcgtggtgtgcacccgatcgtcgagttgattttgcagtatcgcgagctcagcaaactcaaatcaacctatcttgataggttacctcgtcttgttcatccacgtacgggtcgtttacacacccgcttcaatcaaacggcaacagccaccgggcgcttgtcgtcgagtgacccgaacctccagaatattccagtgcgcacgccgctgggccaacacattcgtaaagcgtttgttgcggaagaaggttggttattacttgcggccgattactcccagatcgaacttcgtgtattggcgcatctctctggcgacgagaatcttaaacgcgtgtttcgcgaaggcaaggatattcacactgaaaccgcagcctggatgttcggggtggacccggccttagtggaccccaagatgcgtcgtgccgccaagaccgtcaactttggcgtactctatggtatgtcagcagcacgtcttagtcaggaattgggcattgactacaaagaagctgaagcgtttatcgagcgctatttccaatcctttccgaaagttcgcgcgtggattgaacgtacgctcgaagaaggtcgcactcgcggctatgtggaaacgttattcgggcgtcgtcgctacgttccagatcttacgtctcgtgtccgctcagtgcgcgaagctgctgagcgtatggcctggaatatgcctgttcagggaacagcggcggacctcatgaagatcgccatggtgaaattgtttccgcgcttgaaacccttaggagcccaccttcttttccaggtgcatgatgaattggtcttggaagtacccgaggatcgcgcagaagaagccaaagcactcgtgaaagaggttatggaaaacgcgtatccgttagatgttccgttggaggtcgaagtgggtgtaggccgtgattggcttgaagcgaaacaagactaatga

SEQ ID NO: 750 - protein, 844 aa, synthetic construct
  REGION 1..844: note = DNA Polymerase Variant
MHHHHHHGGSGMLPLFDLEEPPKRVLLVDGHHLAYRTFYALSLTTSRGEPVQMVYGFARSLLKALKEDGQAVVVVFDARAPSFRHEAYEAYKAGRAPTPEDFPRQLALVKRLVDLLGLVRLEAPGYEADDVLGTLAKKAEREGMEVCILTGDRDFFQLLSEKVSVLLPDGTLVTPKDVQEKYGVPPERWVDFRALTGDRSDNIPGVAGIGEKTALRLLAEWGSVENLLKNLDRVKPDSLRRKIEAHLEDLRLSLDLARIRTDLPLEVDFKALRRRTPDLEGLRAFLEELELGSLLHEFGLLGGEKPREEAPWPPPEGAFVGFLLSRKEPMWAELLALAAAAEGRVHRATSPVEALADLKEARGFLAKDLAVLALREGVALDPTDDPLLVAYLLDSANTNPERVARRYGGEFTEDAAERALLSERLFQTLFPRLSEKLLWLYQEVERPLSRVLAHMEARGVRLDVPLLEALSFEAAKELERLEGEVFRLAGHPFNLNSRDQLEKVLFDELGLTPVTRTEKTGKRSTSAAALEALRGVHPIVELILQYRELSKLKSTYLDRLPRLVHPRTGRLHTRFNQTATATGRLSSSDPNLQNIPVRTPLGQHIRKAFVAEEGWLLLAADYSQIELRVLAHLSGDENLKRVFREGKDIHTETAAWMFGVDPALVDPKMRRAAKTVNFGVLYGMSAARLSQELGIDYKEAEAFIERYFQSFPKVRAWIERTLEEGRTRGYVETLFGRRRYVPDLTSRVRSVREAAERMAWNMPVQGTAADLMKIAMVKLFPRLKPLGAHLLFQVHDELVLEVPEDRAEEAKALVKEVMENAYPLDVPLEVEVGVGRDWLEAKQD

SEQ ID NO: 751 - DNA, 2538 bp, synthetic construct
  misc_feature 1..2538: note = DNA Polymerase Variant
  source 1..2538: mol_type = other DNA
atgcaccatcatcatcatcatggcggtagcggcatgttaccgctgtttgatttggaagaaccaccaaaacgcgtgctgcttgttgacggccatcatctggcgtatcgtaccttctacgcactgagccttacgacctcacgtggtgagcctgtccagatggtgtatgggtttgctcgctccctgctgaaagccctgaaggaagatggtcaagccgtagtagtggttttcgatgcgaaggcaccgtcgtttcgtcacgaagcgtacgaggcctataaagctggccgcgcaccgaccccggaagactttccgcgtcagttagcgctcgtcaaacgcctcgtggatttgctgggattagttcgcttggaagctcctggctacgaggcggacgacgtgctcggtacactggccaagaaagcagaacgtgaaggcatggaggtctgcattcttaccggtgatcgcgatttcttccagctgctgtctgagaaagtgagcgttttgctgcccgatggcacgttagtaaccccgaaagatgtgcaagagaaatatggagttccgccagaacgttgggtggactttcgcgcactgactggtgatcgttcagacaacatcccgggcgttgccgggattggtgaaaagacggcgctgcgcctgctggcagaatggggctcggtggaaaatctgctcaagaaccttgatcgtgtgaaacctgatagcttacgccgcaagatcgaagcccacctggaagacttgcgtctgagtctggatcttgcacgtattcgcaccgatctgccgttggaagtagactttaaagctctgcgtcgtcgcacacccgatttagaggggttacgcgcgttcctcgaagaactggagctgggctccctgctgcatgaattcggtttgttgggcggagagaaaccgcgtgaagaagcaccatggccgccgcccgagggtgcctttgtcggctttcttctgtcacgcaaagagccaatgtgggcggaactgttagctcttgcagccgccgcggaagggcgtgttcaccgcgcgacctctcctgtcgaggccctcgctgacctcaaagaagcacgtggtttcttggcgaaagatttagccgtgcttgcattacgcgaaggcgttgcgctcgatccgacggacgacccgcttttggtggcttatttgctcgatcatgcgaataccaacccggaacgtgtcgcccgtcgttacggcggcgagtttactgaagatgcggcagaacgcgcgttgcttagcgaacgcctcttccagacgttatttccacgtctttcggagaaattactctggctctatcaggaagtcgaacgtccattgagtcgcgtgcttgcccatatggaggctcgcggtgtgcgcttagatgttccgttgttagaagcactcagcttcgaggcggcaaaagaactggaacgtcttgaaggcgaagtctttcgtttagcggggcatcccttcaatctcaactctcgcgaccaattggagaaagtgctctttgatgaattaggtttaacccctgtcacgcgtacagagaagaccggcaaacgttccacttcggcagccgccttggaagcacttcgtggtgtgcacccgatcgtcgagttgattttgcagtatcgcgagctcagcaaactcaaatcaacctatcttgataggttacctcgtcttgttcatccacgtacgggtcgtttacacacccgcttcaatcaaacggcaacagccaccgggcgcttgtcgtcgagtgacccgaacctccagaatattccagtgcgcacgccgctgggccaacacattcgtaaagcgtttgttgcggaagaaggttggttattacttgcggccgattactcccagatcgaacttcgtgtattggcgcatctctctggcgacgagaatcttaaacgcgtgtttcgcgaaggcaaggatattcacactgaaaccgcagcctggatgttcggggtggactcggccttagtggaccccaagatgcgtcgtgccgccaagaccgtcaactttggcgtactctatggtatgtcagcagcacgtcttagtcaggaattgggcattgactacaaagaagctgaagcgtttatcgagcgctatttccaatcctttccgaaagttcgcgcgtggattgaacgtacgctcgaagaaggtcgcactcgcggctatgtggaaacgttattcgggcgtcgtcgctacgttccagatcttacgtctcgtgtccgctcagtgcgcgaagctgctgagcgtatggcctggaatatgcctgttcagggaacagcggcggacctcatgaagatcgccatggtgaaattgtttccgcgcttgaaacccttaggagcccaccttcttctgcaggtgcatgatgaattggtcttggaagtacccgaggatcgcgcagaagaagccaaagcactcgtgaaagaggttatggaaaacgcgtatccgttagatgttccgttggaggtcgaagtgggtgtaggccgtgattggcttgaagcgaaacaagactaatga

SEQ ID NO: 752 - protein, 844 aa, synthetic construct
  REGION 1..844: note = DNA Polymerase Variant
MHHHHHHGGSGMLPLFDLEEPPKRVLLVDGHHLAYRTFYALSLTTSRGEPVQMVYGFARSLLKALKEDGQAVVVVFDAKAPSFRHEAYEAYKAGRAPTPEDFPRQLALVKRLVDLLGLVRLEAPGYEADDVLGTLAKKAEREGMEVCILTGDRDFFQLLSEKVSVLLPDGTLVTPKDVQEKYGVPPERWVDFRALTGDRSDNIPGVAGIGEKTALRLLAEWGSVENLLKNLDRVKPDSLRRKIEAHLEDLRLSLDLARIRTDLPLEVDFKALRRRTPDLEGLRAFLEELELGSLLHEFGLLGGEKPREEAPWPPPEGAFVGFLLSRKEPMWAELLALAAAAEGRVHRATSPVEALADLKEARGFLAKDLAVLALREGVALDPTDDPLLVAYLLDHANTNPERVARRYGGEFTEDAAERALLSERLFQTLFPRLSEKLLWLYQEVERPLSRVLAHMEARGVRLDVPLLEALSFEAAKELERLEGEVFRLAGHPFNLNSRDQLEKVLFDELGLTPVTRTEKTGKRSTSAAALEALRGVHPIVELILQYRELSKLKSTYLDRLPRLVHPRTGRLHTRFNQTATATGRLSSSDPNLQNIPVRTPLGQHIRKAFVAEEGWLLLAADYSQIELRVLAHLSGDENLKRVFREGKDIHTETAAWMFGVDSALVDPKMRRAAKTVNFGVLYGMSAARLSQELGIDYKEAEAFIERYFQSFPKVRAWIERTLEEGRTRGYVETLFGRRRYVPDLTSRVRSVREAAERMAWNMPVQGTAADLMKIAMVKLFPRLKPLGAHLLLQVHDELVLEVPEDRAEEAKALVKEVMENAYPLDVPLEVEVGVGRDWLEAKQD

SEQ ID NO: 753 - DNA, 2538 bp, synthetic construct
  misc_feature 1..2538: note = DNA Polymerase Variant
  source 1..2538: mol_type = other DNA
atgcaccatcatcatcatcatggcggtagcggcatgttaccgctgtttgatttggaagaaccaccaaaacgcgtgctgcttgttgacggccatcatctggcgtatcgtaccttctacgcactgagccttacgacctcacgtggtgagcctgtccagatggtgtatgggtttgctcgctccctgctgaaagccctgaaggaagatggtcaagccgtagtagtggttttcgatgcgaaagcaccgtcgtttcgtcacgaagcgtacgaggcctataaagctggccgcgcaccgaccccggaagactttccgcgtcagttagcgctcgtcaaacgcctcgtggatttgctgggattagttcgcttggaagctcctggctacgaggcggacgacgtgctcggtacactggccaagaaagcagaacgtgaaggcatggaggtctgcattcttaccggtgatcgcgatttcttccagctgctgtctgagaaagtgagcgttttgctgcccgatggcacgttagtaaccccgaaagatgtgcaagagaaatatggagttccgccagaacgttgggtggactttcgcgcactgactggtgatcgttcagacaacatcccgggcgttgccgggattggtgaaaagacggcgctgcgcctgctggcagaatggggctcggtggaaaatctgctcaagaaccttgatcgtgtgaaacctgatagcttacgccgcaagatcgaagcccacctggaagacttgcgtctgagtctggatcttgcccgtattcgcaccgatctgccgttggaagtagactttaaagctctgcgtcgtcgcacacccgatttagaggggttacgcgcgttcctcgaagaactggagctgggctccctgctgcatgaattcggtttgttgggcggagagaaaccgcgtgaagaagcaccatggccgccgcccgaaggtgcctttgtcggctttcttctgtcacgcaaagagccaatgtgggcggaactgttagctcttgcagccgccgcggaagggcgtgttcaccgcgcgacctctcctgtcgaggccctcgctgacctcaaagaagcacgtggtttcttggcgaaagatttagccgtgcttgcattacgcgaaggcgttgcgctcgattgtacggacgacccgcttttggtggcttatttgctcgatcatgcgaataccaacccggaacgtgtcgcccgtcgttacggcggcgagtttactgaagatgcggcagaacgcgcgttgcttagcgaacgcctcttccagacgttatttccacgtctttcggagaaattactctggctctatcaggaagtcgaacgtccattgagtcgcgtgcttgcccatatggaggctcgcggtgtgcgcttagatgttccgttgttagaagcactcagcttcgagttggagaaagaactggaacgtcttgaaggcgaagtctttcgtttagcggggcatcccttcaatctcaactctcgcgaccaattggagaaagtgctctttgatgaattaggtttaacccctgtcacgcgtacagagaagaccggcaaacgttccacttcggcagccgccttggaagcacttcgtggtgctcacccgatcgtcgagttgattttgcagtatcgcgagctcagcaaactcaaatcaacctatcttgataggttacctcgtcttgttcatccacgtacgggtcgtttacacacccgcttcaatcaaacggcaacagccaccgggcgcttgtcgtcgagtgacccgaacctccagaatattccagtgcgcacgccgctgggccaacacattcgtaaagcgtttgttgcggaagaaggttggttattacttgcggccgattactcccagatcgaacttcgtgtattggcgcatctctctggcgacgagaatcttaaacgcgtgtttcgcgaaggcaaggatattcacactgaaaccgcagcctggatgttcggggtggacccagccttagtggaccccaagatgcgtcgtgccgccaagaccgtcaactttggcgtactctatggtatgtcagcagcacgtcttagtcaggaattgggcattgactacaaagaagctgaagcgtttatcgagcgctatttccaatcctttccgaaagttcgcgcgtggattgaacgtacgctcgaagaaggtcgcactcgcggctatgtggaaacgttattcgggcgtcgtcgctacgttccagatcttacgtctcgtgtccgctcagtgcgcgaagctgctgagcgtatggcctggaatatgcctgttcagggaacagcggcggacctcatgaagatcgccatggtgaaattgtttccgcgcttgaaacccttaggagcccaccttcttttacaggtgcatgatgaattggtcttggaagtacccgaggatcgcgcagaagaagccaaagcactcgtgaaagaggttatggaaaacgcgtatccgttagatgttccgttggaggtcgaagtgggtgtaggccgtgattggcttgaagcgaaacaagactaatga

SEQ ID NO: 754 - protein, 844 aa, synthetic construct
  REGION 1..844: note = DNA Polymerase Variant
MHHHHHHGGSGMLPLFDLEEPPKRVLLVDGHHLAYRTFYALSLTTSRGEPVQMVYGFARSLLKALKEDGQAVVVVFDAKAPSFRHEAYEAYKAGRAPTPEDFPRQLALVKRLVDLLGLVRLEAPGYEADDVLGTLAKKAEREGMEVCILTGDRDFFQLLSEKVSVLLPDGTLVTPKDVQEKYGVPPERWVDFRALTGDRSDNIPGVAGIGEKTALRLLAEWGSVENLLKNLDRVKPDSLRRKIEAHLEDLRLSLDLARIRTDLPLEVDFKALRRRTPDLEGLRAFLEELELGSLLHEFGLLGGEKPREEAPWPPPEGAFVGFLLSRKEPMWAELLALAAAAEGRVHRATSPVEALADLKEARGFLAKDLAVLALREGVALDCTDDPLLVAYLLDHANTNPERVARRYGGEFTEDAAERALLSERLFQTLFPRLSEKLLWLYQEVERPLSRVLAHMEARGVRLDVPLLEALSFELEKELERLEGEVFRLAGHPFNLNSRDQLEKVLFDELGLTPVTRTEKTGKRSTSAAALEALRGAHPIVELILQYRELSKLKSTYLDRLPRLVHPRTGRLHTRFNQTATATGRLSSSDPNLQNIPVRTPLGQHIRKAFVAEEGWLLLAADYSQIELRVLAHLSGDENLKRVFREGKDIHTETAAWMFGVDPALVDPKMRRAAKTVNFGVLYGMSAARLSQELGIDYKEAEAFIERYFQSFPKVRAWIERTLEEGRTRGYVETLFGRRRYVPDLTSRVRSVREAAERMAWNMPVQGTAADLMKIAMVKLFPRLKPLGAHLLLQVHDELVLEVPEDRAEEAKALVKEVMENAYPLDVPLEVEVGVGRDWLEAKQD

SEQ ID NO: 755 - DNA, 2538 bp, synthetic construct
  misc_feature 1..2538: note = DNA Polymerase Variant
  source 1..2538: mol_type = other DNA
atgcaccatcatcatcatcatggcggtagcggcatgttaccgctgtttgatttggaagaaccaccaaaacgcgtgctgcttgttgacggccatcatctggcgtatcgtaccttctacgcactgagccttacgacctcacgtggtgagcctgtccagatggtgtatgggtttgctcgctccctgctgaaagccctgaaggaagatggtcaagccgtagtagtggttttcgatgcgaaagcaccgtcgtttcgtcacgaagcgtacgaggcctataaagctggccgcgcaccgaccccggaagactttccgcgtcagttagcgctcgtcaaacgcctcgtggatttgctgggattagttcgcttggaagctcctggctacgaggcggacgacgtgctcggtacactggccaagaaagcagaacgtgaaggcatggaggtctgcattcttaccggtgatcgcgatttcttccagctgctgtctgagaaagtgagcgttttgctgcccgatggcacgttagtaaccccgaaagatgtgcaagagaaatatggagttccgccagaacgttgggtggactttcgcgcactgactggtgatcgttcagacaacatcccgggcgttgccgggattggtgaaaagacggcgctgcgcctgctggcagaatggggctcggtggaaaatctgctcaagaaccttgatcgtgtgaaacctgatagcttacgccgcaagatcgaagcccacctggaagacttgcgtctgagtctggatcttgtacgtattcgcaccgatctgccgttggaagtagactttaaagctctgcgtcgtcgcacacccgatttagaggggttacgcgcgttcctcgaagaactggagctgggctccctgctgcatgaattcggtttgttgggcggagagaaaccgcgtgaagaagcaccatggccgccgcccgaaggtgcctttgtcggctttcttctgtcacgcaaagagccaatgtgggcggaactgttagctcttgcagccgccgcggaagggcgtgttcaccgcgcgacctctcctgtcgaggccctcgctgacctcaaagaagcacgtggtttcttggcgaaagatttagccgtgcttgcattacgcgaaggcgttgcgctcgatccgacggacgacccgcttttggtggcttatttgctcgatcatgcgaataccaacccggaacgtgtcgcccgtcgttacggcggcgagtttactgaagatgcggcagaacgcgcgttgcttagcgaacgcctcttccagacgttatttccacgtctttcggagaaattactctggctctatcaggaagtcgaacgtccattgagtcgcgtgcttgcccatatggaggctcgcggtgtgcgcttagatgttccgttgttagaagcactcagcttcgaggcggaaaaagaactggaacgtcttgaaggcgaagtctttcgtttagcggggcatcccttcaatctcaactctcgcgaccaattggagaaagtgctctttgatgaattaggtttaacccctgtcacgcgtacagagaagaccggcaaacgttccacttcggcagccgccttggaagcacttcgtggtgtgcacccgatcgtcgagttgattttgcagtatcgcgagctcagcaaactcaaatcaacctatcttgataggttacctaagcttgttcatccacgtacgggtcgtttacacacccgcttcaatcaaacggcaacagccaccgggcgcttgtcgtcgagtgacccgaacctccagaatattccagtgcgcacgccgctgggccaacacattcgtaaagcgtttgttgcggaagaaggttggttattacttgcggccgattactcccagatcgaacttcgtgtattggcgcatctctctggcgacgagaatcttaaacgcgtgtttcgcgaaggcaaggatattcacactgaaaccgcagcctggatgttcggggtggactcggccttagtggaccccaagatgcgtcgtgccgccaagaccgtcaactttggcgtactctatggtatgtcagcagcacgtcttagtcaggaattgggcattgactacaaagaagctgaagcgtttatcgagcgctatttccaatcctttccgaaagttcgcgcgtggattgaacgtacgctcgaagaaggtcgcactcgcggctatgtggaaacgttattcgggcgtcgtcgctacgttccagatcttacgtctcgtgtccgctcagtgcgcgaagctgctgagcgtatggcctggaatatgcctgttcagggaacagcggcggacctcatgaagatcgccatggtgaaattgtttccgcgcttgaaacccttaggagcccaccttcttctgcaggtgcatgatgaattggtcttggaagtacccgaggatcgcgcagaagaagccaaagcactcgtgaaagaggttatggaaaacgcgtatccgttagatgttccgttggaggtcgaagtgggtgtaggccgtgattggcttgaagcgaaacaagactaatga

SEQ ID NO: 756 - protein, 844 aa, synthetic construct
  REGION 1..844: note = DNA Polymerase Variant
MHHHHHHGGSGMLPLFDLEEPPKRVLLVDGHHLAYRTFYALSLTTSRGEPVQMVYGFARSLLKALKEDGQAVVVVFDAKAPSFRHEAYEAYKAGRAPTPEDFPRQLALVKRLVDLLGLVRLEAPGYEADDVLGTLAKKAEREGMEVCILTGDRDFFQLLSEKVSVLLPDGTLVTPKDVQEKYGVPPERWVDFRALTGDRSDNIPGVAGIGEKTALRLLAEWGSVENLLKNLDRVKPDSLRRKIEAHLEDLRLSLDLVRIRTDLPLEVDFKALRRRTPDLEGLRAFLEELELGSLLHEFGLLGGEKPREEAPWPPPEGAFVGFLLSRKEPMWAELLALAAAAEGRVHRATSPVEALADLKEARGFLAKDLAVLALREGVALDPTDDPLLVAYLLDHANTNPERVARRYGGEFTEDAAERALLSERLFQTLFPRLSEKLLWLYQEVERPLSRVLAHMEARGVRLDVPLLEALSFEAEKELERLEGEVFRLAGHPFNLNSRDQLEKVLFDELGLTPVTRTEKTGKRSTSAAALEALRGVHPIVELILQYRELSKLKSTYLDRLPKLVHPRTGRLHTRFNQTATATGRLSSSDPNLQNIPVRTPLGQHIRKAFVAEEGWLLLAADYSQIELRVLAHLSGDENLKRVFREGKDIHTETAAWMFGVDSALVDPKMRRAAKTVNFGVLYGMSAARLSQELGIDYKEAEAFIERYFQSFPKVRAWIERTLEEGRTRGYVETLFGRRRYVPDLTSRVRSVREAAERMAWNMPVQGTAADLMKIAMVKLFPRLKPLGAHLLLQVHDELVLEVPEDRAEEAKALVKEVMENAYPLDVPLEVEVGVGRDWLEAKQD

SEQ ID NO: 757 - DNA, 2538 bp, synthetic construct
  misc_feature 1..2538: note = DNA Polymerase Variant
  source 1..2538: mol_type = other DNA
atgcaccatcatcatcatcatggcggtagcggcatgttaccgctgtttgatttggaagaaccaccaaaacgcgtgctgcttgttgacggccatcatctggcgtatcgtaccttctacgcactgagccttacgacctcacgtggtgagcctgtccagatggtgtatgggtttgctcgctccctgctgaaagccctgaaggaagatggtcaagccgtagtagtggttttcgatgcgaaggcaccgtcgtttcgtcacgaagcgtacgaggcctataaagctggccgcgcaccgaccccggaagactttccgcgtcagttagcgctcgtcaaacgcctcgtggatttgctgggattagttcgcttggaagctcctggctacgaggcggacgacgtgctcggtacactggccaagaaagcagaacgtgaaggcatggaggtctgcattcttaccggtgatcgcgatttcttccagctgctgtctgagaaagtgagcgttttgctgcccgatggcacgttagtaaccccgaaagatgtgcaagagaaatatggagttccgccagaacgttgggtggactttcgcgcactgactggtgatcgttcagacaacatcccgggcgttgccgggattggtgaaaagacggcgctgcgcctgctggcagaatggggctcggtggaaaatctgctcaagaaccttgatcgtgtgaaacctgatagcttacgccgcaagatcgaagcccacctggaagacttgcgtctgagtctggatcttgtacgtattcgcaccgatctgccgttggaagtagactttaaagctctgcgtcgtcgcacacccgatttagaggggttacgcgcgttcctcgaagaactggagctgggctccctgctgcatgaattcggtttgttgggcggagagaaaccgcgtgaagaagcaccatggccgccgcccgagggtgcctttgtcggctttcttctgtcacgcaaagagccaatgtgggcggaactgttagctcttgcagccgccgcggaagggcgtgttcaccgcgcgacctctcctgtcgaggccctcgctgacctcaaagaagcacgtggtttcttggcgaaagatttagccgtgcttgcattacgcgaaggcgttgcgctcgatccgacggacgacccgcttttggtggcttatttgctcgatagcgcgaataccaacccggaacgtgtcgcccgtcgttacggcggcgagtttactgaagatgcggcagaacgcgcgttgcttagcgaacgcctcttccagacgttatttccacgtctttcggagaaattactctggctctatcaggaagtcgaacgtccattgagtcgcgtgcttgcccatatggaggctcgcggtgtgcgcttagatgttccgttgttagaagcactcagcttcgaggcggcaaaagaactggaacgtcttgaaggcgaagtctttcgtttagcggggcatcccttcaatctcaactctcgcgaccaattggagaaagtgctctttgatgaattaggtttaacccctgtcacgcgtacagagaagaccggcaaacgttccacttcggcagccgccttggaagcacttcgtggtgcgcacccgatcgtcgagttgattttgcagtatcgcgagctcagcaaactcaaatcaacctatcttgataggttacctcgtcttgttcatccacgtacgggtcgtttacacacccgcttcaatcaaacggcaacagccaccgggcgcttgtcgtcgagtgacccgaacctccagaatattccagtgcgcacgccgctgggccaacacattcgtaaagcgtttgttgcggaagaaggttggttattacttgcggccgattactcccagatcgaacttcgtgtattggcgcatctctctggcgacgagaatcttaaacgcgtgtttcgcgaaggcaaggatattcacactgaaaccgcagcctggatgttcggggtggacccggccttagtggaccccaagatgcgtcgtgccgccaagaccgtcaactttggcgtactctatggtatgtcagcagcacgtcttagtcaggaattgggcattgactacaaagaagctgaagcgtttatcgagcgctatttccaatcctttccgaaagttcgcgcgtggattgaacgtacgctcgaagaaggtcgcactcgcggctatgtggaaacgttattcgggcgtcgtcgctacgttccagatcttacgtctcgtgtccgctcagtgcgcgaagctgctgagcgtatggcctggaatatgcctgttcagggaacagcggcggacctcatgaagatcgccatggtgaaattgtttccgcgcttgaaacccttaggagcccaccttcttttccaggtgcatgatgaattggtcttggaagtacccgaggatcgcgcagaagaagccaaagcactcgtgaaagaggttatggaaaacgcgtatccgttagatgttccgttggaggtcgaagtgggtgtaggccgtgattggcttgaagcgaaacaagactaatga

SEQ ID NO: 758 - protein, 844 aa, synthetic construct
  REGION 1..844: note = DNA Polymerase Variant
MHHHHHHGGSGMLPLFDLEEPPKRVLLVDGHHLAYRTFYALSLTTSRGEPVQMVYGFARSLLKALKEDGQAVVVVFDAKAPSFRHEAYEAYKAGRAPTPEDFPRQLALVKRLVDLLGLVRLEAPGYEADDVLGTLAKKAEREGMEVCILTGDRDFFQLLSEKVSVLLPDGTLVTPKDVQEKYGVPPERWVDFRALTGDRSDNIPGVAGIGEKTALRLLAEWGSVENLLKNLDRVKPDSLRRKIEAHLEDLRLSLDLVRIRTDLPLEVDFKALRRRTPDLEGLRAFLEELELGSLLHEFGLLGGEKPREEAPWPPPEGAFVGFLLSRKEPMWAELLALAAAAEGRVHRATSPVEALADLKEARGFLAKDLAVLALREGVALDPTDDPLLVAYLLDSANTNPERVARRYGGEFTEDAAERALLSERLFQTLFPRLSEKLLWLYQEVERPLSRVLAHMEARGVRLDVPLLEALSFEAAKELERLEGEVFRLAGHPFNLNSRDQLEKVLFDELGLTPVTRTEKTGKRSTSAAALEALRGAHPIVELILQYRELSKLKSTYLDRLPRLVHPRTGRLHTRFNQTATATGRLSSSDPNLQNIPVRTPLGQHIRKAFVAEEGWLLLAADYSQIELRVLAHLSGDENLKRVFREGKDIHTETAAWMFGVDPALVDPKMRRAAKTVNFGVLYGMSAARLSQELGIDYKEAEAFIERYFQSFPKVRAWIERTLEEGRTRGYVETLFGRRRYVPDLTSRVRSVREAAERMAWNMPVQGTAADLMKIAMVKLFPRLKPLGAHLLFQVHDELVLEVPEDRAEEAKALVKEVMENAYPLDVPLEVEVGVGRDWLEAKQD

SEQ ID NO: 759 - DNA, 2538 bp, synthetic construct
  misc_feature 1..2538: note = DNA Polymerase Variant
  source 1..2538: mol_type = other DNA
atgcaccatcatcatcatcatggcggtagcggcatgttaccgctgtttgatttggaagaaccaccaaaacgcgtgctgcttgttgacggccatcatctggcgtatcgtaccttctacgcactgagccttacgacctcacgtggtgagcctgtccagatggtgtatgggtttgctcgctccctgctgaaagccctgaaggaagatggtcaagccgtagtagtggttttcgatgcgcgtgcaccgtcgtttcgtcacgaagcgtacgaggcctataaagctggccgcgcaccgaccccggaagactttccgcgtcagttagcgctcgtcaaacgcctcgtggatttgctgggattagttcgcttggaagctcctggctacgaggcggacgacgtgctcggtacactggccaagaaagcagaacgtgaaggcatggaggtctgcattcttaccggtgatcgcgatttcttccagctgctgtctgagaaagtgagcgttttgctgcccgatggcacgttagtaaccccgaaagatgtgcaagagaaatatggagttccgccagaacgttgggtggactttcgcgcactgactggtgatcgttcagacaacatcccgggcgttgccgggattggtgaaaagacggcgctgcgcctgctggcagaatggggctcggtggaaaatctgctcaagaaccttgatcgtgtgaaacctgatagcttacgccgcaagatcgaagcccacctggaagacttgcgtctgagtctggatcttgcacgtattcgcaccgatctgccgttggaagtagactttaaagctctgcgtcgtcgcacacccgatttagaggggttacgcgcgttcctcgaagaactggagctgggctccctgctgcatgaattcggtttgttgggcggagagaaaccgcgtgaagaagcaccatggccgccgcccgagggtgcctttgtcggctttcttctgtcacgcaaagagccaatgtgggcggaactgttagctcttgcagccgccgcggaagggcgtgttcaccgcgcgacctctcctgtcgaggccctcgctgacctcaaagaagcacgtggtttcttggcgaaagatttagccgtgcttgcattacgcgaaggcgttgcgctcgatccgacggacgacccgcttttggtggcttatttgctcgatcatgcgaataccaacccggaacgtgtcgcccgtcgttacggcggcgagtttactgaagatgcggcagaacgcgcgttgcttagcgaacgcctcttccagacgttatttccacgtctttcggagaaattactctggctctatcaggaagtcgaacgtccattgagtcgcgtgcttgcccatatggaggctcgcggtgtgcgcttagatgttccgttgttagaagcactcagcttcgaggcggaaaaagaactggaacgtcttgaaggcgaagtctttcgtttagcggggcatcccttcaatctcaactctcgcgaccaattggagaaagtgctctttgatgaattaggtttaacccctgtcacgcgtacagagaagaccggcaaacgttccacttcggcagccgccttggaagcacttcgtggtgcgcacccgatcgtcgagttgattttgcagtatcgcgagctcagcaaactcaaatcaacctatcttgataggttacctcgtcttgttcatccacgtacgggtcgtttacacacccgcttcaatcaaacggcaacagccaccgggcgcttgtcgtcgagtgacccgaacctccagaatattccagtgcgcacgccgctgggccaacacattcgtaaagcgtttgttgcggaagaaggttggttattacttgcggccgattactcccagatcgaacttcgtgtattggcgcatctctctggcgacgagaatcttaaacgcgtgtttcgcgaaggcaaggatattcacactgaaaccgcagcctggatgttcggggtggactcggccttagtggaccccaagatgcgtcgtgccgccaagaccgtcaactttggcgtactctatggtatgtcagcagcacgtcttagtcaggaattgggcattgactacaaagtagctgaagcgtttatcgagcgctatttccaatcctttccgaaagttcgcgcgtggattgaacgtacgctcgaagaaggtcgcactcgcggctatgtggaaacgttattcgggcgtcgtcgctacgttccagatcttacgtctcgtgtccgctcagtgcgcgaagctgctgagcgtatggcctggaatatgcctgttcagggaacagcggcggacctcatgaagatcgccatggtgaaattgtttccgcgcttgaaacccttaggagcccaccttcttctgcaggtgcatgatgaattggtcttggaagtacccgaggatcgcgcagaagaagccaaagcactcgtgaaagaggttatggaaaacgcgtatccgttagatgttccgttggaggtcgaagtgggtgtaggccgtgattggcttgaagcgaaacaagactaatga

SEQ ID NO: 760 - protein, 844 aa, synthetic construct
  REGION 1..844: note = DNA Polymerase Variant
MHHHHHHGGSGMLPLFDLEEPPKRVLLVDGHHLAYRTFYALSLTTSRGEPVQMVYGFARSLLKALKEDGQAVVVVFDARAPSFRHEAYEAYKAGRAPTPEDFPRQLALVKRLVDLLGLVRLEAPGYEADDVLGTLAKKAEREGMEVCILTGDRDFFQLLSEKVSVLLPDGTLVTPKDVQEKYGVPPERWVDFRALTGDRSDNIPGVAGIGEKTALRLLAEWGSVENLLKNLDRVKPDSLRRKIEAHLEDLRLSLDLARIRTDLPLEVDFKALRRRTPDLEGLRAFLEELELGSLLHEFGLLGGEKPREEAPWPPPEGAFVGFLLSRKEPMWAELLALAAAAEGRVHRATSPVEALADLKEARGFLAKDLAVLALREGVALDPTDDPLLVAYLLDHANTNPERVARRYGGEFTEDAAERALLSERLFQTLFPRLSEKLLWLYQEVERPLSRVLAHMEARGVRLDVPLLEALSFEAEKELERLEGEVFRLAGHPFNLNSRDQLEKVLFDELGLTPVTRTEKTGKRSTSAAALEALRGAHPIVELILQYRELSKLKSTYLDRLPRLVHPRTGRLHTRFNQTATATGRLSSSDPNLQNIPVRTPLGQHIRKAFVAEEGWLLLAADYSQIELRVLAHLSGDENLKRVFREGKDIHTETAAWMFGVDSALVDPKMRRAAKTVNFGVLYGMSAARLSQELGIDYKVAEAFIERYFQSFPKVRAWIERTLEEGRTRGYVETLFGRRRYVPDLTSRVRSVREAAERMAWNMPVQGTAADLMKIAMVKLFPRLKPLGAHLLLQVHDELVLEVPEDRAEEAKALVKEVMENAYPLDVPLEVEVGVGRDWLEAKQD

SEQ ID NO: 761 - DNA, 2538 bp, synthetic construct
  misc_feature 1..2538: note = DNA Polymerase Variant
  source 1..2538: mol_type = other DNA
atgcaccatcatcatcatcatggcggtagcggcatgttaccgctgtttgatttggaagaaccaccaaaacgcgtgctgcttgttgacggccatcatctggcgtatcgtaccttctacgcactgagccttacgacctcacgtggtgagcctgtccagatggtgtatgggtttgctcgctccctgctgaaagccctgaaggaagatggtcaagccgtagtagtggttttcgatgcgaaagcaccgtcgtttcgtcacgaagcgtacgaggcctataaagctggccgcgcaccgaccccggaagactttccgcgtcagttagcgctcgtcaaacgcctcgtggatttgctgggattagttcgcttggaagctcctggctacgaggcggacgacgtgctcggtacactggccaagaaagcagaacgtgaaggcatggaggtctgcattcttaccggtgatcgcgatttcttccagctgctgtctgagaaagtgagcgttttgctgcccgatggcacgttagtaaccccgaaagatgtgcaagagaaatatggagttccgccagaacgttgggtggactttcgcgcactgactggtgatcgttcagacaacatcccgggcgttgccgggattggtgaaaagacggcgctgcgcctgctggcagaatggggctcggtggaaaatctgctcaagaaccttgatcgtgtgaaacctgatagcttacgccgcaagatcgaagcccacctggaagacttgcgtctgagtctggatcttgcccgtattcgcaccgatctgccgttggaagtagactttaaagctctgcgtcgtcgcacacccgatttagaggggttacgcgcgttcctcgaagaactggagctgggctccctgctgcatgaattcggtttgttgggcggagagaaaccgcgtgaagaagcaccatggccgccgcccgaaggtgcctttgtcggctttcttctgtcacgcaaagagccaatgtgggcggaactgttagctcttgcagccgccgcggaagggcgtgttcaccgcgcgacctctcctgtcgaggccctcgctgacctcaaagaagcacgtggtttcttggcgaaagatttagccgtgcttgcattacgcgaaggcgttgcgctcgatccgacggacgacccgcttttggtggcttatttgctcgatcatgcgaataccaacccggaacgtgtcgcccgtcgttacggcggcgagtttactgaagatgcggcagaacgcgcgttgcttagcgaacgcctcttccagacgttatttccacgtctttcggagaaattactctggctctatcaggaagtcgaacgtccattgagtcgcgtgcttgcccatatggaggctcgcggtgtgcgcttagatgttccgttgttagaagcactcagcttcgagttggagaaagaactggaacgtcttgaaggcgaagtctttcgtttagcggggcatcccttcaatctcaactctcgcgaccaattggagaaagtgctctttgatgaattaggtttaacccctgtcacgcgtacagagaagaccggcaaacgttccacttcggcagccgccttggaagcacttcgtggtgctcacccgatcgtcgagttgattttgcagtatcgcgagctcagcaaactcaaatcaacctatcttgataggttacctcgtcttgttcatccacgtacgggtcgtttacacacccgcttcaatcaaacggcaacagccaccgggcgcttgtcgtcgagtgacccgaacctccagaatattccagtgcgcacgccgctgggccaacacattcgtaaagcgtttgttgcggaagaaggttggttattacttgcggccgattactcccagatcgaacttcgtgtattggcgcatctctctggcgacgagaatcttaaacgcgtgtttcgcgaaggcaaggatattcacactgaaaccgcagcctggatgttcggggtggacccagccttagtggaccccaagatgcgtcgtgccgccaagaccgtcaactttggcgtactctatggtatgtcagcagcacgtcttagtcaggaattgggcattgactacaaagaagctgaagcgtttatcgagcgctatttccaatcctttccgaaagttcgcgcgtggattgaacgtacgctcgaagaagttcgcactcgcggctatgtggaaacgttattcgggcgtcgtcgctacgttccagatcttacgtctcgtgtccgctcagtgcgcgaagctgctgagcgtatggcctggaatatgcctgttcagggaacagcggcggacctcatgaagatcgccatggtgaaattgtttccgcgcttgaaacccttaggagcccaccttcttttacaggtgcatgatgaattggtcttggaagtacccgaggatcgcgcagaagaagccaaagcactcgtgaaagaggttatggaaaacgcgtatccgttagatgttccgttggaggtcgaagtgggtgtaggccgtgattggcttgaagcgaaacaagactaatga

SEQ ID NO: 762 - protein, 844 aa, synthetic construct
  REGION 1..844: note = DNA Polymerase Variant
MHHHHHHGGSGMLPLFDLEEPPKRVLLVDGHHLAYRTFYALSLTTSRGEPVQMVYGFARSLLKALKEDGQAVVVVFDAKAPSFRHEAYEAYKAGRAPTPEDFPRQLALVKRLVDLLGLVRLEAPGYEADDVLGTLAKKAEREGMEVCILTGDRDFFQLLSEKVSVLLPDGTLVTPKDVQEKYGVPPERWVDFRALTGDRSDNIPGVAGIGEKTALRLLAEWGSVENLLKNLDRVKPDSLRRKIEAHLEDLRLSLDLARIRTDLPLEVDFKALRRRTPDLEGLRAFLEELELGSLLHEFGLLGGEKPREEAPWPPPEGAFVGFLLSRKEPMWAELLALAAAAEGRVHRATSPVEALADLKEARGFLAKDLAVLALREGVALDPTDDPLLVAYLLDHANTNPERVARRYGGEFTEDAAERALLSERLFQTLFPRLSEKLLWLYQEVERPLSRVLAHMEARGVRLDVPLLEALSFELEKELERLEGEVFRLAGHPFNLNSRDQLEKVLFDELGLTPVTRTEKTGKRSTSAAALEALRGAHPIVELILQYRELSKLKSTYLDRLPRLVHPRTGRLHTRFNQTATATGRLSSSDPNLQNIPVRTPLGQHIRKAFVAEEGWLLLAADYSQIELRVLAHLSGDENLKRVFREGKDIHTETAAWMFGVDPALVDPKMRRAAKTVNFGVLYGMSAARLSQELGIDYKEAEAFIERYFQSFPKVRAWIERTLEEVRTRGYVETLFGRRRYVPDLTSRVRSVREAAERMAWNMPVQGTAADLMKIAMVKLFPRLKPLGAHLLLQVHDELVLEVPEDRAEEAKALVKEVMENAYPLDVPLEVEVGVGRDWLEAKQD

SEQ ID NO: 763 - DNA, 2538 bp, synthetic construct
  misc_feature 1..2538: note = DNA Polymerase Variant
  source 1..2538: mol_type = other DNA
atgcaccatcatcatcatcatggcggtagcggcatgttaccgctgtttgatttggaagaaccaccaaaacgcgtgctgcttgttgacggccatcatctggcgtatcgtaccttctacgcactgagccttacgacctcacgtggtgagcctgtccagatggtgtatgggtttgctcgctccctgctgaaagccctgaaggaagatggtcaagccgtagtagtggttttcgatgcgaaagcaccgtcgtttcgtcacgaagcgtacgaggcctataaagctggccgcgcaccgaccccggaagactttccgcgtcagttagcgctcgtcaaacgcctcgtggatttgctgggattagttcgcttggaagctcctggctacgaggcggacgacgtgctcggtacactggccaagaaagcagaacgtgaaggcatggaggtctgcattcttaccggtgatcgcgatttcttccagctgctgtctgagaaagtgagcgttttgctgcccgatggcacgttagtaaccccgaaagatgtgcaagagaaatatggagttccgccagaacgttgggtggactttcgcgcactgactggtgatcgttcagacaacatcccgggcgttgccgggattggtgaaaagacggcgctgcgcctgctggcagaatggggctcggtggaaaatctgctcaagaaccttgatcgtgtgaaacctgatagcttacgccgcaagatcgaagcccacctggaagacttgcgtctgagtctggatcttgcccgtattcgcaccgatctgccgttggaagtagactttaaagctctgcgtcgtcgcacacccgatttagaggggttacgcgcgttcctcgaagaactggagctgggctccctgctgcatgaattcggtttgttgggcggagagaaaccgcgtgaagaagcaccatggccgccgcccgaaggtgcctttgtcggctttcttctgtcacgcaaagagccaatgtgggcggaactgttagctcttgcagccgccgcggaagggcgtgttcaccgcgcgacctctcctgtcgaggccctcgctgacctcaaagaagcacgtggtttcttggcgaaagatttagccgtgcttgcattacgcgaaggcgttgcgctcgatccgacggacgacccgcttttggtggcttatttgctcgatcatgcgaataccaacccggaacgtgtcgcccgtcgttacggcggcgagtttactgaagatgcggcagaacgcgcgttgcttagcgaacgcctcttccagacgttatttccacgtctttcggagaaattactctggctctatcaggaagtcgaacgtccattgagtcgcgtgcttgcccatatggaggctcgcggtgtgcgcttagatgttccgttgttagaagcactcagcttcgagttggagaaagaactggaacgtcttgaaggcgaagtctttcgtttagcggggcatcccttcaatctcaactctcgcgaccaattggagaaagtgctctttgatgaattaggtttaacccctgtcacgcgtacagagaagaccggcaaacgttccacttcggcagccgccttggaagcacttcgtggtgctcacccgatcgtcgagttgattttgcagtatcgcgagctcagcaaactcaaatcaacctatcttgataggttacctcgtcttgttcatccacgtacgggtcgtttacacacccgcttcaatcaaacggcaacagccaccgggcgcttgtcgtcgagtgacccgaacctccagaatattccagtgcgcacgccgctgggccaacacattcgtaaagcgtttgttgcggaagaaggttggttattacttgcggccgattactcccagatcgaacttcgtgtattggcgcatctctctggcgacgagaatcttaaacgcgtgtttcgcgaaggcaaggatattcacactgaaaccgcagcctggatgttcggggtggacccagccttagtggaccccaagatgcgtcgtgccgccaagaccgtcaactttggcgtactctatggtatgtcagcagcacgtcttagtcaggaattgggcattgactacaaagaagctgaagcgtttatcgagatttatttccaatcctttccgaaagttcgcgcgtggattgaacgtacgctcgaagaaggtcgcactcgcggctatgtggaaacgttattcgggcgtcgtcgctacgttccagatcttacgtctcgtgtccgctcagtgcgcgaagctgctgagcgtatggcctggaatatgcctgttcagggaacagcggcggacctcatgaagatcgccatggtgaaattgtttccgcgcttgaaacccttaggagcccaccttcttttacaggtgcatgatgaattggtcttggaagtacccgaggatcgcgcagaagaagccaaagcactcgtgaaagaggttatggaaaacgcgtatccgttagatgttccgttggaggtcgaagtgggtgtaggccgtgattggcttgaagcgaaacaagactaatga

SEQ ID NO: 764 - protein, 844 aa, synthetic construct
  REGION 1..844: note = DNA Polymerase Variant
MHHHHHHGGSGMLPLFDLEEPPKRVLLVDGHHLAYRTFYALSLTTSRGEPVQMVYGFARSLLKALKEDGQAVVVVFDAKAPSFRHEAYEAYKAGRAPTPEDFPRQLALVKRLVDLLGLVRLEAPGYEADDVLGTLAKKAEREGMEVCILTGDRDFFQLLSEKVSVLLPDGTLVTPKDVQEKYGVPPERWVDFRALTGDRSDNIPGVAGIGEKTALRLLAEWGSVENLLKNLDRVKPDSLRRKIEAHLEDLRLSLDLARIRTDLPLEVDFKALRRRTPDLEGLRAFLEELELGSLLHEFGLLGGEKPREEAPWPPPEGAFVGFLLSRKEPMWAELLALAAAAEGRVHRATSPVEALADLKEARGFLAKDLAVLALREGVALDPTDDPLLVAYLLDHANTNPERVARRYGGEFTEDAAERALLSERLFQTLFPRLSEKLLWLYQEVERPLSRVLAHMEARGVRLDVPLLEALSFELEKELERLEGEVFRLAGHPFNLNSRDQLEKVLFDELGLTPVTRTEKTGKRSTSAAALEALRGAHPIVELILQYRELSKLKSTYLDRLPRLVHPRTGRLHTRFNQTATATGRLSSSDPNLQNIPVRTPLGQHIRKAFVAEEGWLLLAADYSQIELRVLAHLSGDENLKRVFREGKDIHTETAAWMFGVDPALVDPKMRRAAKTVNFGVLYGMSAARLSQELGIDYKEAEAFIEIYFQSFPKVRAWIERTLEEGRTRGYVETLFGRRRYVPDLTSRVRSVREAAERMAWNMPVQGTAADLMKIAMVKLFPRLKPLGAHLLLQVHDELVLEVPEDRAEEAKALVKEVMENAYPLDVPLEVEVGVGRDWLEAKQD

SEQ ID NO: 765 - DNA, 2538 bp, synthetic construct
  misc_feature 1..2538: note = DNA Polymerase Variant
  source 1..2538: mol_type = other DNA
atgcaccatcatcatcatcatggcggtagcggcatgttaccgctgtttgatttggaagaaccaccaaaacgcgtgctgcttgttgacggccatcatctggcgtatcgtaccttctacgcactgagccttacgacctcacgtggtgagcctgtccagatggtgtatgggtttgctcgctccctgctgaaagccctgaaggaagatggtcaagccgtagtagtggttttcgatgcgaaagcaccgtcgtttcgtcacgaagcgtacgaggcctataaagctggccgcgcaccgaccccggaagactttccgcgtcagttagcgctcgtcaaacgcctcgtggatttgctgggattagttcgcttggaagctcctggctacgaggcggacgacgtgctcggtacactggccaagaaagcagaacgtgaaggcatggaggtctgcattcttaccggtgatcgcgatttcttccagctgctgtctgagaaagtgagcgttttgctgcccgatggcacgttagtaaccccgaaagatgtgcaagagaaatatggagttccgccagaacgttgggtggactttcgcgcactgactggtgatcgttcagacaacatcccgggcgttgccgggattggtgaaaagacggcgctgcgcctgctggcagaatggggctcggtggaaaatctgctcaagaaccttgatcgtgtgaaacctgatagcttacgccgcaagatcgaagcccacctggaagacttgcgtctgagtctggatcttgcccgtattcgcaccgatctgccgttggaagtagactttaaagctctgcgtcgtcgcacacccgatttagaggggttacgcgcgttcctcgaagaactggagctgggctccctgctgcatgaattcggtttgttgggcggagagaaaccgcgtgaagaagcaccatggccgccgcccgaaggtgcctttgtcggctttcttctgtcacgcaaagagccaatgtgggcggaactgttagctcttgcagccgccgcggaagggcgtgttcaccgcgcgacctctcctgtcgaggccctcgctgacctcaaagaagcacgtggtttcttggcgaaagatttagccgtgcttgcattacgcgaaggcgttgcgctcgatccgacggacgacccgcttttggtggcttatttgctcgatcatgcgaataccaacccggaacgtgtcgcccgtcgttacggcggcgagtttactgaagatgcggcagaacgcgcgttgcttagcgaacgcctcttccagacgttatttccacgtctttcggagaaattactctggctctatcaggaagtcgaacgtcgtttgagtcgcgtgcttgcccatatggaggctcgcggtgtgcgcttagatgttccgttgttagaagcactcagcttcgagttggagaaagaactggaacgtcttgaaggcgaagtctttcgtttagcggggcatcccttcaatctcaactctcgcgaccaattggagaaagtgctctttgatgaattaggtttaacccctgtcacgcgtacagagaagaccggcaaacgttccacttcggcagccgccttggaagcacttcgtggtgctcacccgatcgtcgagttgattttgcagtatcgcgagctcagcaaactcaaatcaacctatcttgataggttacctcgtcttgttcatccacgtacgggtcgtttacacacccgcttcaatcaaacggcaacagccaccgggcgcttgtcgtcgagtgacccgaacctccagaatattccagtgcgcacgccgctgggccaacacattcgtaaagcgtttgttgcggaagaaggttggttattacttgcggccgattactcccagatcgaacttcgtgtattggcgcatctctctggcgacgagaatcttaaacgcgtgtttcgcgaaggcaaggatattcacactgaaaccgcagcctggatgttcggggtggacccagccttagtggaccccaagatgcgtcgtgccgccaagaccgtcaactttggcgtactctatggtatgtcagcagcacgtcttagtcaggaattgggcattgactacaaagaagctgaagcgtttatcgagcgctatttccaatcctttccgaaagttcgcgcgtggattgaacgtacgctcgaagaaggtcgcactcgcggctatgtggaaacgttattcgggcgtcgtcgctacgttccagatcttacgtctcgtgtccgctcagtgcgcgaagctgctgagcgtatggcctggaatatgcctgttcagggaacagcggcggacctcatgaagatcgccatggtgaaattgtttccgcgcttgaaacccttaggagcccaccttcttttacaggtgcatgatgaattggtcttggaagtacccgaggatcgcgcagaagaagccaaagcactcgtgaaagaggttatggaaaacgcgtatccgttagatgttccgttggaggtcgaagtgggtgtaggccgtgattggcttgaagcgaaacaagactaatga

SEQ ID NO: 766 - protein, 844 aa, synthetic construct
  REGION 1..844: note = DNA Polymerase Variant
MHHHHHHGGSGMLPLFDLEEPPKRVLLVDGHHLAYRTFYALSLTTSRGEPVQMVYGFARSLLKALKEDGQAVVVVFDAKAPSFRHEAYEAYKAGRAPTPEDFPRQLALVKRLVDLLGLVRLEAPGYEADDVLGTLAKKAEREGMEVCILTGDRDFFQLLSEKVSVLLPDGTLVTPKDVQEKYGVPPERWVDFRALTGDRSDNIPGVAGIGEKTALRLLAEWGSVENLLKNLDRVKPDSLRRKIEAHLEDLRLSLDLARIRTDLPLEVDFKALRRRTPDLEGLRAFLEELELGSLLHEFGLLGGEKPREEAPWPPPEGAFVGFLLSRKEPMWAELLALAAAAEGRVHRATSPVEALADLKEARGFLAKDLAVLALREGVALDPTDDPLLVAYLLDHANTNPERVARRYGGEFTEDAAERALLSERLFQTLFPRLSEKLLWLYQEVERRLSRVLAHMEARGVRLDVPLLEALSFELEKELERLEGEVFRLAGHPFNLNSRDQLEKVLFDELGLTPVTRTEKTGKRSTSAAALEALRGAHPIVELILQYRELSKLKSTYLDRLPRLVHPRTGRLHTRFNQTATATGRLSSSDPNLQNIPVRTPLGQHIRKAFVAEEGWLLLAADYSQIELRVLAHLSGDENLKRVFREGKDIHTETAAWMFGVDPALVDPKMRRAAKTVNFGVLYGMSAARLSQELGIDYKEAEAFIERYFQSFPKVRAWIERTLEEGRTRGYVETLFGRRRYVPDLTSRVRSVREAAERMAWNMPVQGTAADLMKIAMVKLFPRLKPLGAHLLLQVHDELVLEVPEDRAEEAKALVKEVMENAYPLDVPLEVEVGVGRDWLEAKQD

SEQ ID NO: 767 - DNA, 2538 bp, synthetic construct
  misc_feature 1..2538: note = DNA Polymerase Variant
  source 1..2538: mol_type = other DNA
atgcaccatcatcatcatcatggcggtagcggcatgttaccgctgtttgatttggaagaaccaccaaaacgcgtgctgcttgttgacggccatcatctggcgtatcgtaccttctacgcactgagccttacgacctcacgtggtgagcctgtccagatggtgtatgggtttgctcgctccctgctgaaagccctgaaggaagatggtcaagccgtagtagtggttttcgatgcgaaagcaccgtcgtttcgtcacgaagcgtacgaggcctataaagctggccgcgcaccgaccccggaagactttccgcgtcagttagcgctcgtcaaacgcctcgtggatttgctgggattagttcgcttggaagctcctggctacgaggcggacgacgtgctcggtacactggccaagaaagcagaacgtgaaggcatggaggtctgcattcttaccggtgatcgcgatttcttccagctgctgtctgagaaagtgagcgttttgctgcccgatggcacgttagtaaccccgaaagatgtgcaagagaaatatggagttccgccagaacgttgggtggactttcgcgcactgactggtgatcgttcagacaacatcccgggcgttgccgggattggtgaaaagacggcgctgcgcctgctggcagaatggggctcggtggaaaatctgctcaagaaccttgatcgtgtgaaacctgatagcttacgccgcaagatcgaagcccacctggaagacttgcgtctgagtctggatcttgcccgtattcgcaccgatctgccgttggaagtagactttaaagctctgcgtcgtcgcacacccgatttagaggggttacgcgcgttcctcgaagaactggagctgggctccctgctgcatgaattcggtttgttgggcggagagaaaccgcgtgaagaagcaccatggccgccgcccgaaggtgcctttgtcggctttcttctgtcacgcaaagagccaatgtgggcggaactgttagctcttgcagccgccgcggaagggcgtgttcaccgcgcgacctctcctgtcgaggccctcgctgacctcaaagaagcacgtggtttcttggcgaaagatttagccgtgcttgcattacgcgaaggcgttgcgctcgatccgacggacgacccgcttttggtggcttatttgctcgatcatgcgaataccaacccggaacgtgtcgcccgtcgttacggcggcgagtttactgaagatgcggcagaacgcgcgttgcttagcgaacgcctcttccagacgttatttccacgtctttcggagaaattactctggctctatcaggaagtcgaacgtccattgagtcgcgtgcttgcccatatggaggctcgcggtgtgcgcttagatgttccgttgttagaagcactcagcttcgagttggagaaagaactggaacgtcttgaaggcgaagtctttcgtttagcggggcatcccttcaatctcaactctcgcgaccaattggagaaagtgctctttgatgaattaggtttaacccctgtcacgcgtacagagaagaccggcaaacgttccacttcggcagccgccttggaagcacttcgtggtgctcacccgatcgtcgagttgattttgcagtatcgcgagctcagcaaactcaaatcaacctatcttgataggttacctcgtcttgttcatccacgtacgggtcgtttacacacccgcttcaatcaaacggcaacagccaccgggcgcttgtcgtcgagtgacccgaacctccagaatattccagtgcgcacgccgctgggccaacacattcgtaaagcgtttgttgcggaagaaggttggttattacttgcggccgattactcccagatcgaacttcgtgtattggcgcatctctctggcgacgagaatcttaaacgcgtgtttcgcgaaggcaaggatattcacactgaaaccgcagcctggatgttcggggtggacccagccttagtggaccccaagatgcgtcgtgccgccaagaccgtcaactttggcgtactctatggtatgtcagcagcacgtcttagtcaggaattgggcattgaccttaaagaagctgaagcgtttatcgagcgctatttccaatcctttccgaaagttcgcgcgtggattgaacgtacgctcgaagaaggtcgcactcgcggctatgtggaaacgttattcgggcgtcgtcgctacgttccagatcttacgtctcgtgtccgctcagtgcgcgaagctgctgagcgtatggcctggaatatgcctgttcagggaacagcggcggacctcatgaagatcgccatggtgaaattgtttccgcgcttgaaacccttaggagcccaccttcttttacaggtgcatgatgaattggtcttggaagtacccgaggatcgcgcagaagaagccaaagcactcgtgaaagaggttatggaaaacgcgtatccgttagatgttccgttggaggtcgaagtgggtgtaggccgtgattggcttgaagcgaaacaagactaatga

SEQ ID NO: 768 - protein, 844 aa, synthetic construct
  REGION 1..844: note = DNA Polymerase Variant
MHHHHHHGGSGMLPLFDLEEPPKRVLLVDGHHLAYRTFYALSLTTSRGEPVQMVYGFARSLLKALKEDGQAVVVVFDAKAPSFRHEAYEAYKAGRAPTPEDFPRQLALVKRLVDLLGLVRLEAPGYEADDVLGTLAKKAEREGMEVCILTGDRDFFQLLSEKVSVLLPDGTLVTPKDVQEKYGVPPERWVDFRALTGDRSDNIPGVAGIGEKTALRLLAEWGSVENLLKNLDRVKPDSLRRKIEAHLEDLRLSLDLARIRTDLPLEVDFKALRRRTPDLEGLRAFLEELELGSLLHEFGLLGGEKPREEAPWPPPEGAFVGFLLSRKEPMWAELLALAAAAEGRVHRATSPVEALADLKEARGFLAKDLAVLALREGVALDPTDDPLLVAYLLDHANTNPERVARRYGGEFTEDAAERALLSERLFQTLFPRLSEKLLWLYQEVERPLSRVLAHMEARGVRLDVPLLEALSFELEKELERLEGEVFRLAGHPFNLNSRDQLEKVLFDELGLTPVTRTEKTGKRSTSAAALEALRGAHPIVELILQYRELSKLKSTYLDRLPRLVHPRTGRLHTRFNQTATATGRLSSSDPNLQNIPVRTPLGQHIRKAFVAEEGWLLLAADYSQIELRVLAHLSGDENLKRVFREGKDIHTETAAWMFGVDPALVDPKMRRAAKTVNFGVLYGMSAARLSQELGIDLKEAEAFIERYFQSFPKVRAWIERTLEEGRTRGYVETLFGRRRYVPDLTSRVRSVREAAERMAWNMPVQGTAADLMKIAMVKLFPRLKPLGAHLLLQVHDELVLEVPEDRAEEAKALVKEVMENAYPLDVPLEVEVGVGRDWLEAKQD

SEQ ID NO: 769 - DNA, 2538 bp, synthetic construct
  misc_feature 1..2538: note = DNA Polymerase Variant
  source 1..2538: mol_type = other DNA
atgcaccatcatcatcatcatggcggtagcggcatgttaccgctgtttgatttggaagaaccaccaaaacgcgtgctgcttgttgacggccatcatctggcgtatcgtaccttctacgcactgagccttacgacctcacgtggtgagcctgtccagatggtgtatgggtttgctcgctccctgctgaaagccctgaaggaagatggtcaagccgtagtagtggttttcgatgcgcgtgcaccgtcgtttcgtcacgaagcgtacgaggcctataaagctggccgcgcaccgaccccggaagactttccgcgtcagttagcgctcgtcaaacgcctcgtggatttgctgggattagttcgcttggaagctcctggctacgaggcggacgacgtgctcggtacactggccaagaaagcagaacgtgaaggcatggaggtctgcattcttaccggtgatcgcgatttcttccagctgctgtctgagaaagtgagcgttttgctgcccgatggcacgttagtaaccccgaaagatgtgcaagagaaatatggagttccgccagaacgttgggtggactttcgcgcactgactggtgatcgttcagacaacatcccgggcgttgccgggattggtgaaaagacggcgctgcgcctgctggcagaatggggctcggtggaaaatctgctcaagaaccttgatcgtgtgaaacctgatagcttacgccgcaagatcgaagcccacctggaagacttgcgtctgagtctggatcttgtacgtattcgcaccgatctgccgttggaagtagactttaaagctctgcgtcgtcgcacacccgatttagaggggttacgcgcgttcctcgaagaactggagctgggctccctgctgcatgaattcggtttgttgggcggagagaaaccgcgtgaagaagcaccatggccgccgcccgaaggtgcctttgtcggctttcttctgtcacgcaaagagccaatgtgggcggaactgttagctcttgcagccgccgcggaagggcgtgttcaccgcgcgacctctcctgtcgaggccctcgctgacctcaaagaagcacgtggtttcttggcgaaagatttagccgtgcttgcattacgcgaaggcgttgcgctcgatccgacggacgacccgcttttggtggcttatttgctcgatcatgcgaataccaacccggaacgtgtcgcccgtcgttacggcggcgagtttactgaagatgcggcagaacgcgcgttgcttagcgaacgcctcttccagacgttatttccacgtctttcggagaaattactctggctctatcaggaagtcgaacgtccattgagtcgcgtgcttgcccatatggaggctcgcggtgtgcgcttagatgttccgttgttagaagcactcagcttcgagttggagaaagaactggaacgtcttgaaggcgaagtctttcgtttagcggggcatcccttcaatctcaactctcgcgaccaattggagaaagtgctctttgatgaattaggtttaacccctgtcacgcgtacagagaagaccggcaaacgttccacttcggcagccgccttggaagcacttcgtggtgctcacccgatcgtcgagttgattttgcagtatcgcgagctcagcaaactcaaatcaacctatcttgataggttacctcgtcttgttcatccacgtacgggtcgtttacacacccgcttcaatcaaacggcaacagccaccgggcgcttgtcgtcgagtgacccgaacctccagaatattccagtgcgcacgccgctgggccaacacattcgtaaagcgtttgttgcggaagaaggttggttattacttgcggccgattactcccagatcgaacttcgtgtattggcgcatctctctggcgacgagaatcttaaacgcgtgtttcgcgaaggcaaggatattcacactgaaaccgcagcctggatgttcggggtggacccagccttagtggaccccaagatgcgtcgtgccgccaagaccgtcaactttggcgtactctatggtatgtcagcagcacgtcttagtcaggaattgggcattgactacaaagtagctgaagcgtttatcgagcgctatttccaatcctttccgaaagttcgcgcgtggattgaacgtacgctcgaagaaggtcgcactcgcggctatgtggaaacgttattcgggcgtcgtcgctacgttccagatcttacgtctcgtgtccgctcagtgcgcgaagctgctgagcgtatggcctggaatatgcctgttcagggaacagcggcggacctcatgaagatcgccatggtgaaattgtttccgcgcttgaaacccttaggagcccaccttcttttacaggtgcatgatgaattggtcttggaagtacccgaggatcgcgcagaagaagccaaagcactcgtgaaagaggttatggaaaacgcgtatccgttagatgttccgttggaggtcgaagtgggtgtaggccgtgattggcttgaagcgaaacaagactaatga

SEQ ID NO: 770 - protein, 844 aa, synthetic construct
  REGION 1..844: note = DNA Polymerase Variant
MHHHHHHGGSGMLPLFDLEEPPKRVLLVDGHHLAYRTFYALSLTTSRGEPVQMVYGFARSLLKALKEDGQAVVVVFDARAPSFRHEAYEAYKAGRAPTPEDFPRQLALVKRLVDLLGLVRLEAPGYEADDVLGTLAKKAEREGMEVCILTGDRDFFQLLSEKVSVLLPDGTLVTPKDVQEKYGVPPERWVDFRALTGDRSDNIPGVAGIGEKTALRLLAEWGSVENLLKNLDRVKPDSLRRKIEAHLEDLRLSLDLVRIRTDLPLEVDFKALRRRTPDLEGLRAFLEELELGSLLHEFGLLGGEKPREEAPWPPPEGAFVGFLLSRKEPMWAELLALAAAAEGRVHRATSPVEALADLKEARGFLAKDLAVLALREGVALDPTDDPLLVAYLLDHANTNPERVARRYGGEFTEDAAERALLSERLFQTLFPRLSEKLLWLYQEVERPLSRVLAHMEARGVRLDVPLLEALSFELEKELERLEGEVFRLAGHPFNLNSRDQLEKVLFDELGLTPVTRTEKTGKRSTSAAALEALRGAHPIVELILQYRELSKLKSTYLDRLPRLVHPRTGRLHTRFNQTATATGRLSSSDPNLQNIPVRTPLGQHIRKAFVAEEGWLLLAADYSQIELRVLAHLSGDENLKRVFREGKDIHTETAAWMFGVDPALVDPKMRRAAKTVNFGVLYGMSAARLSQELGIDYKVAEAFIERYFQSFPKVRAWIERTLEEGRTRGYVETLFGRRRYVPDLTSRVRSVREAAERMAWNMPVQGTAADLMKIAMVKLFPRLKPLGAHLLLQVHDELVLEVPEDRAEEAKALVKEVMENAYPLDVPLEVEVGVGRDWLEAKQD

SEQ ID NO: 771 - DNA, 2538 bp, synthetic construct
  misc_feature 1..2538: note = DNA Polymerase Variant
  source 1..2538: mol_type = other DNA
atgcaccatcatcatcatcatggcggtagcggcatgttaccgctgtttgatttggaagaaccaccaaaacgcgtgctgcttgttgacggccatcatctggcgtatcgtaccttctacgcactgagccttacgacctcacgtggtgagcctgtccagatggtgtatgggtttgctcgctccctgctgaaagccctgaaggaagatggtcaagccgtagtagtggttttcgatgcgaaagcaccgtcgtttcgtcacgaagcgtacgaggcctataaagctggccgcgcaccgaccccggaagactttccgcgtcagttagcgctcgtcaaacgcctcgtggatttgctgggattagttcgcttggaagctcctggctacgaggcggacgacgtgctcggtacactggccaagaaagcagaacgtgaaggcatggaggtctgcattcttaccggtgatcgcgatttcttccagctgctgtctgagaaagtgagcgttttgctgcccgatggcacgttagtaaccccgaaagatgtgcaagagaaatatggagttccgccagaacgttgggtggactttcgcgcactgactggtgatcgttcagacaacatcccgggcgttgccgggattggtgaaaagacggcgctgcgcctgctggcagaatggggctcggtggaaaatctgctcaagaaccttgatcgtgtgaaacctgatagcttacgccgcaagatcgaagcccacctggaagacttgcgtctgagtctggatcttgcccgtattcgcaccgatctgccgttggaagtagactttaaagctctgcgtcgtcgcacacccgatttagaggggttacgcgcgttcctcgaagaactggagctgggctccctgctgcatgaattcggtttgttgggcggagagaaaccgcgtgaagaagcaccatggccgccgcccgaaggtgcctttgtcggctttcttctgtcacgcaaagagccaatgtgggcggaactgttagctcttgcagccgccgcggaagggcgtgttcaccgcgcgacctctcctgtcgaggccctcgctgacctcaaagaagcacgtggtttcttggcgaaagatttagccgtgcttgcattacgcgaaggcgttgcgctcgatccgacggacgacccgcttttggtggcttatttgctcgatcatgcgaataccaacccggaacgtgtcgcccgtcgttacggcggcgagtttactgaagatgcggcagaacgcgcgttgcttagcgaacgcctcttccagacgttatttccacgtctttcggagaaattactctggctctatcaggaagtcgaacgtccattgagtcgcgtgcttgcccatatggaggctcgcggtgtgcgcttagatgttccgttgttagaagcactcagcttcgagttggagaaagaactggaacgtcttgaaggcgaagtctttcgtttagcggggcatcccttcaatctcaactctcgcgaccaattggagaaagtgctctttgatgaattaggtttaacccctgtcacgcgtacagagaagaccggcaaacgttccacttcggcagccgccttggaagcacttcgtggtgctcacccgatcgtcgagttgattttgcagtatcgcgagctcagcaaactcaaatcaacctatcttgataggttacctcgtcttgttcatccacgtacgggtcgtttacacacccgcttcaatcaaacggcaacagccaccgggcgcttgtcgtcgagtgacccgaacctccagaatattccagtgcgcacgccgctgggccaacacattcgtaaagcgtttgttgcggaagaaggttggttattacttgcggccgattactcccagatcgaacttcgtgtattggcgcatctctctggcgacgagaatcttaaacgcgtgtttcgcgaaggcaaggatattcacactgaaaccgcagcctggatgttcggggtggacccagccttagtggaccccaagatgcgtcgtgccgccaagaccgtcaactttggcgtactctatggtatgtcagcagcacgtcttagtcaggaattgggcattgactacaaagaagctatggcgtttatcgagcgctatttccaatcctttccgaaagttcgcgcgtggattgaacgtacgctcgaagaaggtcgcactcgcggctatgtggaaacgttattcgggcgtcgtcgctacgttccagatcttacgtctcgtgtccgctcagtgcgcgaagctgctgagcgtatggcctggaatatgcctgttcagggaacagcggcggacctcatgaagatcgccatggtgaaattgtttccgcgcttgaaacccttaggagcccaccttcttttacaggtgcatgatgaattggtcttggaagtacccgaggatcgcgcagaagaagccaaagcactcgtgaaagaggttatggaaaacgcgtatccgttagatgttccgttggaggtcgaagtgggtgtaggccgtgattggcttgaagcgaaacaagactaatga

SEQ ID NO: 772 - protein, 844 aa, synthetic construct
  REGION 1..844: note = DNA Polymerase Variant
MHHHHHHGGSGMLPLFDLEEPPKRVLLVDGHHLAYRTFYALSLTTSRGEPVQMVYGFARSLLKALKEDGQAVVVVFDAKAPSFRHEAYEAYKAGRAPTPEDFPRQLALVKRLVDLLGLVRLEAPGYEADDVLGTLAKKAEREGMEVCILTGDRDFFQLLSEKVSVLLPDGTLVTPKDVQEKYGVPPERWVDFRALTGDRSDNIPGVAGIGEKTALRLLAEWGSVENLLKNLDRVKPDSLRRKIEAHLEDLRLSLDLARIRTDLPLEVDFKALRRRTPDLEGLRAFLEELELGSLLHEFGLLGGEKPREEAPWPPPEGAFVGFLLSRKEPMWAELLALAAAAEGRVHRATSPVEALADLKEARGFLAKDLAVLALREGVALDPTDDPLLVAYLLDHANTNPERVARRYGGEFTEDAAERALLSERLFQTLFPRLSEKLLWLYQEVERPLSRVLAHMEARGVRLDVPLLEALSFELEKELERLEGEVFRLAGHPFNLNSRDQLEKVLFDELGLTPVTRTEKTGKRSTSAAALEALRGAHPIVELILQYRELSKLKSTYLDRLPRLVHPRTGRLHTRFNQTATATGRLSSSDPNLQNIPVRTPLGQHIRKAFVAEEGWLLLAADYSQIELRVLAHLSGDENLKRVFREGKDIHTETAAWMFGVDPALVDPKMRRAAKTVNFGVLYGMSAARLSQELGIDYKEAMAFIERYFQSFPKVRAWIERTLEEGRTRGYVETLFGRRRYVPDLTSRVRSVREAAERMAWNMPVQGTAADLMKIAMVKLFPRLKPLGAHLLLQVHDELVLEVPEDRAEEAKALVKEVMENAYPLDVPLEVEVGVGRDWLEAKQD

SEQ ID NO: 773 - DNA, 2538 bp, synthetic construct
  misc_feature 1..2538: note = DNA Polymerase Variant
  source 1..2538: mol_type = other DNA
atgcaccatcatcatcatcatggcggtagcggcatgttaccgctgtttgatttggaagaaccaccaaaacgcgtgctgcttgttgacggccatcatctggcgtatcgtaccttctacgcactgagccttacgacctcacgtggtgagcctgtccagatggtgtatgggtttgctcgctccctgctgaaagccctgaaggaagatggtcaagccgtagtagtggttttcgatgcgaaggcaccgtcgtttcgtcacgaagcgtacgaggcctataaagctggccgcgcaccgaccccggaagactttccgcgtcagttagcgctcgtcaaacgcctcgtggatttgctgggattagttcgcttggaagctcctggctacgaggcggacgacgtgctcggtacactggccaagaaagcagaacgtgaaggcatggaggtctgcattcttaccggtgatcgcgatttcttccagctgctgtctgagaaagtgagcgttttgctgcccgatggcacgttagtaaccccgaaagatgtgcaagagaaatatggagttccgccagaacgttgggtggactttcgcgcactgactggtgatcgttcagacaacatcccgggcgttgccgggattggtgaaaagacggcgctgcgcctgctggcagaatggggctcggtggaaaatctgctcaagaaccttgatcgtgtgaaacctgatagcttacgccgcaagatcgaagcccacctggaagacttgcgtctgagtctggatcttgtacgtattcgcaccgatctgccgttggaagtagactttaaagctctgcgtcgtcgcacacccgatttagaggggttacgcgcgttcctcgaagaactggagctgggctccctgctgcatgaattcggtttgttgggcggagagaaaccgcgtgaagaagcaccatggccgccgcccgaaggtgcctttgtcggctttcttctgtcacgcaaagagccaatgtgggcggaactgttagctcttgcagccgccgcggaagggcgtgttcaccgcgcgacctctcctgtcgaggccctcgctgacctcaaagaagcacgtggtttcttggcgaaagatttagccgtgcttgcattacgcgaaggcgttgcgctcgatccgacggacgacccgcttttggtggcttatttgctcgatcatgcgaataccaacccggaacgtgtcgcccgtcgttacggcggcgagtttactgaagatgcggcagaacgcgcgttgcttagcgaacgcctcttccagacgttatttccacgtctttcggagaaattactctggctctatcaggaagtcgaacgtccattgagtcgcgtgcttgcccatatggaggctcgcggtgtgcgcttagatgttccgttgttagaagcactcagcttcgaggcggcaaaagaactggaacgtcttgaaggcgaagtctttcgtttagcggggcatcccttcaatctcaactctcgcgaccaattggagaaagtgctctttgatgaattaggtttaacccctgtcacgcgtacagagaagaccggcaaacgttccacttcggcagccgccttggaagcacttcgtggtgtgcacccgatcgtcgagttgattttgcagtatcgcgagctcagcaaactcaaatcaacctatcttgataggttacctaagcttgttcatccacgtacgggtcgtttacacacccgcttcaatcaaacggcaacagccaccgggcgcttgtcgtcgagtgacccgaacctccagaatattccagtgcgcacgccgctgggccaacacattcgtaaagcgtttgttgcggaagaaggttggttattacttgcggccgattactcccagatcgaacttcgtgtattggcgcatctctctggcgacgagaatcttaaacgcgtgtttcgcgaaggcaaggatattcacactgaaaccgcagcctggatgttcggggtggactcggccttagtggaccccaagatgcgtcgtgccgccaagaccgtcaactttggcgtactctatggtatgtcagcagcacgtcttagtcaggaattgggcattgactacaaagaagctgaagcgtttatcgagcgctatttccaatcctttccgaaagttcgcgcgtggattgaacgtacgctcgaagaaggtcgcactcgcggctatgtggaaacgttattcgggcgtcgtcgctacgttccagatcttacgtctcgtgtccgctcagtgcgcgaagctgctgagcgtatggcctggaatatgcctgttcagggaacagcggcggacctcatgaagatcgccatggtgaaattgtttccgcgcttgaaacccttaggagcccaccttcttctgcaggtgcatgatgaattggtcttggaagtacccgaggatcgcgcagaagaagccaaagcactcgtgaaagaggttatggaaaacgcgtatccgttagatgttccgttggaggtcgaagtgggtgtaggccgtgattggcttgaagcgaaacaagactaatga

SEQ ID NO: 774 - protein, 844 aa, synthetic construct
  REGION 1..844: note = DNA Polymerase Variant
MHHHHHHGGSGMLPLFDLEEPPKRVLLVDGHHLAYRTFYALSLTTSRGEPVQMVYGFARSLLKALKEDGQAVVVVFDAKAPSFRHEAYEAYKAGRAPTPEDFPRQLALVKRLVDLLGLVRLEAPGYEADDVLGTLAKKAEREGMEVCILTGDRDFFQLLSEKVSVLLPDGTLVTPKDVQEKYGVPPERWVDFRALTGDRSDNIPGVAGIGEKTALRLLAEWGSVENLLKNLDRVKPDSLRRKIEAHLEDLRLSLDLVRIRTDLPLEVDFKALRRRTPDLEGLRAFLEELELGSLLHEFGLLGGEKPREEAPWPPPEGAFVGFLLSRKEPMWAELLALAAAAEGRVHRATSPVEALADLKEARGFLAKDLAVLALREGVALDPTDDPLLVAYLLDHANTNPERVARRYGGEFTEDAAERALLSERLFQTLFPRLSEKLLWLYQEVERPLSRVLAHMEARGVRLDVPLLEALSFEAAKELERLEGEVFRLAGHPFNLNSRDQLEKVLFDELGLTPVTRTEKTGKRSTSAAALEALRGVHPIVELILQYRELSKLKSTYLDRLPKLVHPRTGRLHTRFNQTATATGRLSSSDPNLQNIPVRTPLGQHIRKAFVAEEGWLLLAADYSQIELRVLAHLSGDENLKRVFREGKDIHTETAAWMFGVDSALVDPKMRRAAKTVNFGVLYGMSAARLSQELGIDYKEAEAFIERYFQSFPKVRAWIERTLEEGRTRGYVETLFGRRRYVPDLTSRVRSVREAAERMAWNMPVQGTAADLMKIAMVKLFPRLKPLGAHLLLQVHDELVLEVPEDRAEEAKALVKEVMENAYPLDVPLEVEVGVGRDWLEAKQD

SEQ ID NO: 775 - DNA, 2538 bp, synthetic construct
  misc_feature 1..2538: note = DNA Polymerase Variant
  source 1..2538: mol_type = other DNA
atgcaccatcatcatcatcatggcggtagcggcatgttaccgctgtttgatttggaagaaccaccaaaacgcgtgctgcttgttgacggccatcatctggcgtatcgtaccttctacgcactgagccttacgacctcacgtggtgagcctgtccagatggtgtatgggtttgctcgctccctgctgaaagccctgaaggaagatggtcaagccgtagtagtggttttcgatgcgaaagcaccgtcgtttcgtcacgaagcgtacgaggcctataaagctggccgcgcaccgaccccggaagactttccgcgtcagttagcgctcgtcaaacgcctcgtggatttgctgggattagttcgcttggaagctcctggctacgaggcggacgacgtgctcggtacactggccaagaaagcagaacgtgaaggcatggaggtctgcattcttaccggtgatcgcgatttcttccagctgctgtctgagaaagtgagcgttttgctgcccgatggcacgttagtaaccccgaaagatgtgcaagagaaatatggagttccgccagaacgttgggtggactttcgcgcactgactggtgatcgttcagacaacatcccgggcgttgccgggattggtgaaaagacggcgctgcgcctgctggcagaatggggctcggtggaaaatctgctcaagaaccttgatcgtgtgaaacctgatagcttacgccgcaagatcgaagcccacctggaagacttgcgtctgagtctggatcttgcccgtattcgcaccgatctgccgttggaagtagactttaaagctctgcgtcgtcgcacacccgatttagaggggttacgcgcgttcctcgaagaactggagctgggctccctgctgcatgaattcggtttgttgggcggagagaaaccgcgtgaagaagcaccatggccgccgcccgaaggtgcctttgtcggctttcttctgtcacgcaaagagccaatgtgggcggaactgttagctcttgcagccgccgcggaagggcgtgttcaccgcgcgacctctcctgtcgaggccctcgctgacctcaaagaagcacgtggtttcttggcgaaagatttagccgtgcttgcattacgcgaaggcgttgcgctcgatccgacggacgacccgcttttggtggcttatttgctcgatcatgcgaataccaacccggaacgtgtcgcccgtcgttacggcggcgagtttactgaagatgcggcagaacgcgcgttgcttagcgaacgcctcttccagacgttatttccacgtctttcggagaaattactctggctctatcaggaagtcgaacgtccattgagtcgcgtgcttgcccatatggaggctcgcggtgtgcgcttagatgttccgttgttagaagcactcagcttcgagttggagaaagaactggaacgtcttgaaggcgaagtctttcgtttagcggggcatcccttcaatctcaactctcgcgaccaattggagaaagtgctctttgatgaattaggtttaacccctgtcacgcgtacagagaagaccggcaaacgttccacttcggcagccgccttggaagcacttcgtggtgctcacccgatcgtcgagttgattttgcagtatcgcgagctcagcaaactcaaatcaacctatcttgataggttacctcgtcttgttcatccacgtacgggtcgtttacacacccgcttcaatcaaacggcaacagccaccgggcgcttgtcgtcgagtgacccgaacctccagaatattccagtgcgcacgccgctgggccaacacattcgtaaagcgtttgttgcggaagaaggttggttattacttgcggccgattactcccagatcgaacttcgtgtattggcgcatctctctggcgacgagaatcttaaacgcgtgtttcgcgaaggcaaggatattcacactgaaaccgcagcctggatgttcggggtggacccagccttagtggaccccaagatgcgtcgtgccgccaagaccgtcaactttggcgtactctatggtatgtcagcagcacgtcttagtcaggaattgggcattgactacaaagaagctgaagtgtttatcgagcgctatttccaatcctttccgaaagttcgcgcgtggattgaacgtacgctcgaagaaggtcgcactcgcggctatgtggaaacgttattcgggcgtcgtcgctacgttccagatcttacgtctcgtgtccgctcagtgcgcgaagctgctgagcgtatggcctggaatatgcctgttcagggaacagcggcggacctcatgaagatcgccatggtgaaattgtttccgcgcttgaaacccttaggagcccaccttcttttacaggtgcatgatgaattggtcttggaagtacccgaggatcgcgcagaagaagccaaagcactcgtgaaagaggttatggaaaacgcgtatccgttagatgttccgttggaggtcgaagtgggtgtaggccgtgattggcttgaagcgaaacaagactaatga

SEQ ID NO: 776 - protein, 844 aa, synthetic construct
  REGION 1..844: note = DNA Polymerase Variant
MHHHHHHGGSGMLPLFDLEEPPKRVLLVDGHHLAYRTFYALSLTTSRGEPVQMVYGFARSLLKALKEDGQAVVVVFDAKAPSFRHEAYEAYKAGRAPTPEDFPRQLALVKRLVDLLGLVRLEAPGYEADDVLGTLAKKAEREGMEVCILTGDRDFFQLLSEKVSVLLPDGTLVTPKDVQEKYGVPPERWVDFRALTGDRSDNIPGVAGIGEKTALRLLAEWGSVENLLKNLDRVKPDSLRRKIEAHLEDLRLSLDLARIRTDLPLEVDFKALRRRTPDLEGLRAFLEELELGSLLHEFGLLGGEKPREEAPWPPPEGAFVGFLLSRKEPMWAELLALAAAAEGRVHRATSPVEALADLKEARGFLAKDLAVLALREGVALDPTDDPLLVAYLLDHANTNPERVARRYGGEFTEDAAERALLSERLFQTLFPRLSEKLLWLYQEVERPLSRVLAHMEARGVRLDVPLLEALSFELEKELERLEGEVFRLAGHPFNLNSRDQLEKVLFDELGLTPVTRTEKTGKRSTSAAALEALRGAHPIVELILQYRELSKLKSTYLDRLPRLVHPRTGRLHTRFNQTATATGRLSSSDPNLQNIPVRTPLGQHIRKAFVAEEGWLLLAADYSQIELRVLAHLSGDENLKRVFREGKDIHTETAAWMFGVDPALVDPKMRRAAKTVNFGVLYGMSAARLSQELGIDYKEAEVFIERYFQSFPKVRAWIERTLEEGRTRGYVETLFGRRRYVPDLTSRVRSVREAAERMAWNMPVQGTAADLMKIAMVKLFPRLKPLGAHLLLQVHDELVLEVPEDRAEEAKALVKEVMENAYPLDVPLEVEVGVGRDWLEAKQD

SEQ ID NO: 777 - DNA, 2538 bp, synthetic construct
  misc_feature 1..2538: note = DNA Polymerase Variant
  source 1..2538: mol_type = other DNA
atgcaccatcatcatcatcatggcggtagcggcatgttaccgctgtttgatttggaagaaccaccaaaacgcgtgctgcttgttgacggccatcatctggcgtatcgtaccttctacgcactgagccttacgacctcacgtggtgagcctgtccagatggtgtatgggtttgctcgctccctgctgaaagccctgaaggaagatggtcaagccgtagtagtggttttcgatgcgaaagcaccgtcgtttcgtcacgaagcgtacgaggcctataaagctggccgcgcaccgaccccggaagactttccgcgtcagttagcgctcgtcaaacgcctcgtggatttgctgggattagttcgcttggaagctcctggctacgaggcggacgacgtgctcggtacactggccaagaaagcagaacgtgaaggcatggaggtctgcattcttaccggtgatcgcgatttcttccagctgctgtctgagaaagtgagcgttttgctgcccgatggcacgttagtaaccccgaaagatgtgcaagagaaatatggagttccgccagaacgttgggtggactttcgcgcactgactggtgatcgttcagacaacatcccgggcgttgccgggattggtgaaaagacggcgctgcgcctgctggcagaatggggctcggtggaaaatctgctcaagaaccttgatcgtgtgaaacctgatagcttacgccgcaagatcgaagcccacctggaagacttgcgtctgagtctggatcttgcccgtattcgcaccgatctgccgttggaagtagactttaaagctctgcgtcgtcgcacacccgatttagaggggttacgcgcgttcctcgaagaactggagctgggctccctgctgcatgaattcggtttgttgggcggagagaaaccgcgtgaagaagcaccatggccgccgcccgaaggtgcctttgtcggctttcttctgtcacgcaaagagccaatgtgggcggaactgttagctcttgcagccgccgcgggagggcgtgttcaccgcgcgacctctcctgtcgaggccctcgctgacctcaaagaagcacgtggtttcttggcgaaagatttagccgtgcttgcattacgcgaaggcgttgcgctcgatccgacggacgacccgcttttggtggcttatttgctcgatcatgcgaataccaacccggaacgtgtcgcccgtcgttacggcggcgagtttactgaagatgcggcagaacgcgcgttgcttagcgaacgcctcttccagacgttatttccacgtctttcggagaaattactctggctctatcaggaagtcgaacgtccattgagtcgcgtgcttgcccatatggaggctcgcggtgtgcgcttagatgttccgttgttagaagcactcagcttcgagttggagaaagaactggaacgtcttgaaggcgaagtctttcgtttagcggggcatcccttcaatctcaactctcgcgaccaattggagaaagtgctctttgatgaattaggtttaacccctgtcacgcgtacagagaagaccggcaaacgttccacttcggcagccgccttggaagcacttcgtggtgctcacccgatcgtcgagttgattttgcagtatcgcgagctcagcaaactcaaatcaacctatcttgataggttacctcgtcttgttcatccacgtacgggtcgtttacacacccgcttcaatcaaacggcaacagccaccgggcgcttgtcgtcgagtgacccgaacctccagaatattccagtgcgcacgccgctgggccaacacattcgtaaagcgtttgttgcggaagaaggttggttattacttgcggccgattactcccagatcgaacttcgtgtattggcgcatctctctggcgacgagaatcttaaacgcgtgtttcgcgaaggcaaggatattcacactgaaaccgcagcctggatgttcggggtggacccagccttagtggaccccaagatgcgtcgtgccgccaagaccgtcaactttggcgtactctatggtatgtcagcagcacgtcttagtcaggaattgggcattgactacaaagaagctgaagcgtttatcgagcgctatttccaatcctttccgaaagttcgcttgtggattgaacgtacgctcgaagaaggtcgcactcgcggctatgtggaaacgttattcgggcgtcgtcgctacgttccagatcttacgtctcgtgtccgctcagtgcgcgaagctgctgagcgtatggcctggaatatgcctgttcagggaacagcggcggacctcatgaagatcgccatggtgaaattgtttccgcgcttgaaacccttaggagcccaccttcttttacaggtgcatgatgaattggtcttggaagtacccgaggatcgcgcagaagaagccaaagcactcgtgaaagaggttatggaaaacgcgtatccgttagatgttccgttggaggtcgaagtgggtgtaggccgtgattggcttgaagcgaaacaagactaatga

SEQ ID NO: 778 - protein, 844 aa, synthetic construct
  REGION 1..844: note = DNA Polymerase Variant
MHHHHHHGGSGMLPLFDLEEPPKRVLLVDGHHLAYRTFYALSLTTSRGEPVQMVYGFARSLLKALKEDGQAVVVVFDAKAPSFRHEAYEAYKAGRAPTPEDFPRQLALVKRLVDLLGLVRLEAPGYEADDVLGTLAKKAEREGMEVCILTGDRDFFQLLSEKVSVLLPDGTLVTPKDVQEKYGVPPERWVDFRALTGDRSDNIPGVAGIGEKTALRLLAEWGSVENLLKNLDRVKPDSLRRKIEAHLEDLRLSLDLARIRTDLPLEVDFKALRRRTPDLEGLRAFLEELELGSLLHEFGLLGGEKPREEAPWPPPEGAFVGFLLSRKEPMWAELLALAAAAGGRVHRATSPVEALADLKEARGFLAKDLAVLALREGVALDPTDDPLLVAYLLDHANTNPERVARRYGGEFTEDAAERALLSERLFQTLFPRLSEKLLWLYQEVERPLSRVLAHMEARGVRLDVPLLEALSFELEKELERLEGEVFRLAGHPFNLNSRDQLEKVLFDELGLTPVTRTEKTGKRSTSAAALEALRGAHPIVELILQYRELSKLKSTYLDRLPRLVHPRTGRLHTRFNQTATATGRLSSSDPNLQNIPVRTPLGQHIRKAFVAEEGWLLLAADYSQIELRVLAHLSGDENLKRVFREGKDIHTETAAWMFGVDPALVDPKMRRAAKTVNFGVLYGMSAARLSQELGIDYKEAEAFIERYFQSFPKVRLWIERTLEEGRTRGYVETLFGRRRYVPDLTSRVRSVREAAERMAWNMPVQGTAADLMKIAMVKLFPRLKPLGAHLLLQVHDELVLEVPEDRAEEAKALVKEVMENAYPLDVPLEVEVGVGRDWLEAKQD

SEQ ID NO: 779 - DNA, 2538 bp, synthetic construct
  misc_feature 1..2538: note = DNA Polymerase Variant
  source 1..2538: mol_type = other DNA
atgcaccatcatcatcatcatggcggtagcggcatgttaccgctgtttgatttggaagaaccaccaaaacgcgtgctgcttgttgacggccatcatctggcgtatcgtaccttctacgcactgagccttacgacctcacgtggtgagcctgtccagatggtgtatgggtttgctcgctccctgctgaaagccctgaaggaagatggtcaagccgtagtagtggttttcgatgcgaaagcaccgtcgtttcgtcacgaagcgtacgaggcctataaagctggccgcgcaccgaccccggaagactttccgcgtcagttagcgctcgtcaaacgcctcgtggatttgctgggattagttcgcttggaagctcctggctacgaggcggacgacgtgctcggtacactggccaagaaagcagaacgtgaaggcatggaggtctgcattcttaccggtgatcgcgatttcttccagctgctgtctgagaaagtgagcgttttgctgcccgatggcacgttagtaaccccgaaagatgtgcaagagaaatatggagttccgccagaacgttgggtggactttcgcgcactgactggtgatcgttcagacaacatcccgggcgttgccgggattggtgaaaagacggcgctgcgcctgctggcagaatggggctcggtggaaaatctgctcaagaaccttgataaagtgaaacctgatagcttacgccgcaagatcgaagcccacctggaagacttgcgtctgagtctggatcttgcccgtattcgcaccgatctgccgttggaagtagactttaaagctctgcgtcgtcgcacacccgatttagaggggttacgcgcgttcctcgaagaactggagctgggctccctgctgcatgaattcggtttgttgggcggagagaaaccgcgtgaagaagcaccatggccgccgcccgaaggtgcctttgtcggctttcttctgtcacgcaaagagccaatgtgggcggaactgttagctcttgcagccgccgcggaagggcgtgttcaccgcgcgacctctcctgtcgaggccctcgctgacctcaaagaagcacgtggtttcttggcgaaagatttagccgtgcttgcattacgcgaaggcgttgcgctcgatccgacggacgacccgcttttggtggcttatttgctcgatcatgcgaataccaacccggaacgtgtcgcccgtcgttacggcggcgagtttactgaagatgcggcagaacgcgcgttgcttagcgaacgcctcttccagacgttatttccacgtctttcggagaaattactctggctctatcaggaagtcgaacgtccattgagtcgcgtgcttgcccatatggaggctcgcggtgtgcgcttagatgttccgttgttagaagcactcagcttcgagttggagaaagaactggaacgtcttgaaggcgaagtctttcgtttagcggggcatcccttcaatctcaactctcgcgaccaattggagaaagtgctctttgatgaattaggtttaacccctgtcacgcgtacagagaagaccggcaaacgttccacttcggcagccgccttggaagcacttcgtggtgctcacccgatcgtcgagttgattttgcagtatcgcgagctcagcaaactcaaatcaacctatcttgataggttacctaagcttgttcatccacgtacgggtcgtttacacacccgcttcaatcaaacggcaacagccaccgggcgcttgtcgtcgagtgacccgaacctccagaatattccagtgcgcacgccgctgggccaacacattcgtaaagcgtttgttgcggaagagggttggttattacttgcggccgattactcccagatcgaacttcgtgtattggcgcatctctctggcgacgagaatcttaaacgcgtgtttcgcgaaggcaaggatattcacactgaaaccgcagcctggatgttcggggtggacccagccttagtggaccccaagatgcgtcgtgccgccaagaccgtcaactttggcgtactctatggtatgtcagcagcacgtcttagtcaggaattgggcattgactacaaagaagctgaagcgtttatcgagcgctatttccaatcctttccgggtgttcgcgcgtggattgaacgtacgctcgaagaaggtcgcactcgcggctatgtggaaacgttattcgggcgtcgtcgctacgttccagatcttacgtctcgtgtccgctcagtgcgcgaagctgctgagcgtatggcctggaatatgcctgttcagggaacagcggcggacctcatgaagatcgccatggtgaaattgtttccgcgcttgaaacccttaggagcccaccttcttttacaggtgcatgatgaattggtcttggaagtacccgaggatcgcgcagaagaagccaaagcactcgtgaaagaggttatggaaaacgcgtatccgttagatgttccgttggaggtcgaagtgggtgtaggccgtgattggcttgaagcgaaacaagactaatga

SEQ ID NO: 780 - protein, 844 aa, synthetic construct
  REGION 1..844: note = DNA Polymerase Variant
MHHHHHHGGSGMLPLFDLEEPPKRVLLVDGHHLAYRTFYALSLTTSRGEPVQMVYGFARSLLKALKEDGQAVVVVFDAKAPSFRHEAYEAYKAGRAPTPEDFPRQLALVKRLVDLLGLVRLEAPGYEADDVLGTLAKKAEREGMEVCILTGDRDFFQLLSEKVSVLLPDGTLVTPKDVQEKYGVPPERWVDFRALTGDRSDNIPGVAGIGEKTALRLLAEWGSVENLLKNLDKVKPDSLRRKIEAHLEDLRLSLDLARIRTDLPLEVDFKALRRRTPDLEGLRAFLEELELGSLLHEFGLLGGEKPREEAPWPPPEGAFVGFLLSRKEPMWAELLALAAAAEGRVHRATSPVEALADLKEARGFLAKDLAVLALREGVALDPTDDPLLVAYLLDHANTNPERVARRYGGEFTEDAAERALLSERLFQTLFPRLSEKLLWLYQEVERPLSRVLAHMEARGVRLDVPLLEALSFELEKELERLEGEVFRLAGHPFNLNSRDQLEKVLFDELGLTPVTRTEKTGKRSTSAAALEALRGAHPIVELILQYRELSKLKSTYLDRLPKLVHPRTGRLHTRFNQTATATGRLSSSDPNLQNIPVRTPLGQHIRKAFVAEEGWLLLAADYSQIELRVLAHLSGDENLKRVFREGKDIHTETAAWMFGVDPALVDPKMRRAAKTVNFGVLYGMSAARLSQELGIDYKEAEAFIERYFQSFPGVRAWIERTLEEGRTRGYVETLFGRRRYVPDLTSRVRSVREAAERMAWNMPVQGTAADLMKIAMVKLFPRLKPLGAHLLLQVHDELVLEVPEDRAEEAKALVKEVMENAYPLDVPLEVEVGVGRDWLEAKQD

SEQ ID NO: 781 - DNA, 2538 bp, synthetic construct
  misc_feature 1..2538: note = DNA Polymerase Variant
  source 1..2538: mol_type = other DNA
atgcaccatcatcatcatcatggcggtagcggcatgttaccgctgtttgatttggaagaaccaccaaaacgcgtgctgcttgttgacggccatcatctggcgtatcgtaccttctacgcactgagccttacgacctcacgtggtgagcctgtccagatggtgtatgggtttgctcgctccctgctgaaagccctgaaggaagatggtcaagccgtagtagtggttttcgatgcgaaagcaccgtcgtttcgtcacgaagcgtacgaggcctataaagctggccgcgcaccgaccccggaagactttccgcgtcagttagcgctcgtcaaacgcctcgtggatttgctgggattagttcgcttggaagctcctggctacgaggcggacgacgtgctcggtacactggccaagaaagcagaacgtgaaggcatggaggtctgcattcttaccggtgatcgcgatttcttccagctgctgtctgagaaagtgagcgttttgctgcccgatggcacgttagtaaccccgaaagatgtgcaagagaaatatggagttccgccagaacgttgggtggactttcgcgcactgactggtgatcgttcagacaacatcccgggcgttgccgggattggtgaaaagacggcgctgcgcctgctggcagaatggggctcggtggaaaatctgctcaagaaccttgatcgtgtgaaacctgatagcttacgccgcaagatcgaagcccacctggaagacttgcgtctgagtctggatcttgcccgtattcgcaccgatctgccgttggaagtagactttaaagctctgcgtcgtcgcacacccgatttagaggggttacgcgcgttcctcgaagaactggagctgggctccctgctgcatgaattcggtttgttgggcggagagaaaccgcgtgaagaagcaccatggccgccgcccgaaggtgcctttgtcggctttcttctgtcacgcaaagagccaatgtgggcggaactgttagctcttgcagccgccgcggaagggcgtgttcaccgcgcgacctctcctgtcgaggccctcgctgacctcaaagaagcacgtggtttcttggcgaaagatttagccgtgcttgcattacgcgaaggcgttgcgctcgatccgacggacgacccgcttttggtggcttatttgctcgatcatgcgaataccaacccggaacgtgtcgcccgtcgttacggcggcgagtttactgaagatgcggcagaacgcgcgttgcttagcgaacgcctcttccagacgttatttccacgtctttcggagaaattactctggctctatcaggaagtcgaacgtccattgagtcgcgtgcttgcccatatggaggctcgcggtgtgcgcttagatgttccgttgttagaagcactcagcttcgagttggagaaagaactggaacgtcttgaaggcgaagtctttcgtttagcggggcatcccttcaatctcaactctcgcgaccaattggagaaagtgctctttgatgaattaggtttaacccctgtcacgcgtacagagaagaccggcaaacgttccacttcggcagccgccttggaagcacttcgtggtgctcacccgatcgtcgagttgattttgcagtatcgcgagctcagcaaactcaaatcaacctatcttgataggttacctcgtcttgttcatccacgtacgggtcgtttacacacccgcttcaatcaaacggcaacagccaccgggcgcttgtcgtcgagtgacccgaacctccagaatattccagtgcgcacgccgctgggccaacacattcgtaaagcgtttgttgcggaagaaggttggttattacttgcggccgattactcccagatcgaacttcgtgtattggcgcatctctctggcgacgagaatcttaaacgcgtgtttcgcgaaggcaaggatattcacactgaaaccgcagcctggatgttcggggtggacccagccttagtggaccccaagatgcgtcgtgccgccaagaccgtcaactttggcgtactctatggtatgtcagcagcacgtcttagtcaggaattgggcattgactacaaagaagctgaagcgtttgtggagcgctatttccaatcctttccgaaagttcgcgcgtggattgaacgtacgctcgaagaaggtcgcactcgcggctatgtggaaacgttattcgggcgtcgtcgctacgttccagatcttacgtctcgtgtccgctcagtgcgcgaagctgctgagcgtatggcctggaatatgcctgttcagggaacagcggcggacctcatgaagatcgccatggtgaaattgtttccgcgcttgaaacccttaggagcccaccttcttttacaggtgcatgatgaattggtcttggaagtacccgaggatcgcgcagaagaagccaaagcactcgtgaaagaggttatggaaaacgcgtatccgttagatgttccgttggaggtcgaagtgggtgtaggccgtgattggcttgaagcgaaacaagactaatga

SEQ ID NO: 782 - protein, 844 aa, synthetic construct
  REGION 1..844: note = DNA Polymerase Variant
MHHHHHHGGSGMLPLFDLEEPPKRVLLVDGHHLAYRTFYALSLTTSRGEPVQMVYGFARSLLKALKEDGQAVVVVFDAKAPSFRHEAYEAYKAGRAPTPEDFPRQLALVKRLVDLLGLVRLEAPGYEADDVLGTLAKKAEREGMEVCILTGDRDFFQLLSEKVSVLLPDGTLVTPKDVQEKYGVPPERWVDFRALTGDRSDNIPGVAGIGEKTALRLLAEWGSVENLLKNLDRVKPDSLRRKIEAHLEDLRLSLDLARIRTDLPLEVDFKALRRRTPDLEGLRAFLEELELGSLLHEFGLLGGEKPREEAPWPPPEGAFVGFLLSRKEPMWAELLALAAAAEGRVHRATSPVEALADLKEARGFLAKDLAVLALREGVALDPTDDPLLVAYLLDHANTNPERVARRYGGEFTEDAAERALLSERLFQTLFPRLSEKLLWLYQEVERPLSRVLAHMEARGVRLDVPLLEALSFELEKELERLEGEVFRLAGHPFNLNSRDQLEKVLFDELGLTPVTRTEKTGKRSTSAAALEALRGAHPIVELILQYRELSKLKSTYLDRLPRLVHPRTGRLHTRFNQTATATGRLSSSDPNLQNIPVRTPLGQHIRKAFVAEEGWLLLAADYSQIELRVLAHLSGDENLKRVFREGKDIHTETAAWMFGVDPALVDPKMRRAAKTVNFGVLYGMSAARLSQELGIDYKEAEAFVERYFQSFPKVRAWIERTLEEGRTRGYVETLFGRRRYVPDLTSRVRSVREAAERMAWNMPVQGTAADLMKIAMVKLFPRLKPLGAHLLLQVHDELVLEVPEDRAEEAKALVKEVMENAYPLDVPLEVEVGVGRDWLEAKQD

SEQ ID NO: 783 - DNA, 2538 bp, synthetic construct
  misc_feature 1..2538: note = DNA Polymerase Variant
  source 1..2538: mol_type = other DNA
atgcaccatcatcatcatcatggcggtagcggcatgttaccgctgtttgatttggaagaaccaccaaaacgcgtgctgcttgttgacggccatcatctggcgtatcgtaccttctacgcactgagccttacgacctcacgtggtgagcctgtccagatggtgtatgggtttgctcgctccctgctgaaagccctgaaggaagatggtcaagccgtagtagtggttttcgatgcgaaggcaccgtcgtttcgtcacgaagcgtacgaggcctataaagctggccgcgcaccgaccccggaagactttccgcgtcagttagcgctcgtcaaacgcctcgtggatttgctgggattagttcgcttggaagctcctggctacgaggcggacgacgtgctcggtacactggccaagaaagcagaacgtgaaggcatggaggtctgcattcttaccggtgatcgcgatttcttccagctgctgtctgagaaagtgagcgttttgctgcccgatggcacgttagtaaccccgaaagatgtgcaagagaaatatggagttccgccagaacgttgggtggactttcgcgcactgactggtgatcgttcagacaacatcccgggcgttgccgggattggtgaaaagacggcgctgcgcctgctggcagaatggggctcggtggaaaatctgctcaagaaccttgatcgtgtgaaacctgatagcttacgccgcaagatcgaagcccacctggaagacttgcgtctgagtctggatcttgcccgtattcgcaccgatctgccgttggaagtagactttaaagctctgcgtcgtcgcacacccgatttagaggggttacgcgcgttcctcgaagaactggagctgggctccctgctgcatgaattcggtttgttgggcggagagaaaccgcgtgaagaagcaccatggccgccgcccgagggtgcctttgtcggctttcttctgtcacgcaaagagccaatgtgggcggaactgttagctcttgcagccgccgcggaagggcgtgttcaccgcgcgacctctcctgtcgaggccctcgctgacctcaaagaagcacgtggtttcttggcgaaagatttagccgtgcttgcattacgcgaaggcgttgcgctcgatccgacggacgacccgcttttggtggcttatttgctcgatcatgcgaataccaacccggaacgtgtcgcccgtcgttacggcggcgagtttactgaagatgcggcagaacgcgcgttgcttagcgaacgcctcttccagacgttatttccacgtctttcggagaaattactctggctctatcaggaagtcgaacgtccattgagtcgcgtgcttgcccatatggaggctcgcggtgtgcgcttagatgttccgttgttagaagcactcagcttcgaggcggcaaaagaactggaacgtcttgaaggcgaagtctttcgtttagcggggcatcccttcaatctcaactctcgcgaccaattggagaaagtgctctttgatgaattaggtttaacccctgtcacgcgtacagagaagaccggcaaacgttccacttcggcagccgccttggaagcacttcgtggtgtgcacccgatcgtcgagttgattttgcagtatcgcgagctcagcaaactcaaatcaacctatcttgataggttacctaagcttgttcatccacgtacgggtcgtttacacacccgcttcaatcaaacggcaacagccaccgggcgcttgtcgtcgagtgacccgaacctccagaatattccagtgcgcacgccgctgggccaacacattcgtaaagcgtttgttgcggaagaaggttggttattacttgcggccgattactcccagatcgaacttcgtgtattggcgcatctctctggcgacgagaatcttaaacgcgtgtttcgcgaaggcaaggatattcacactgaaaccgcagcctggatgttcggggtggactcggccttagtggaccccaagatgcgtcgtgccgccaagaccgtcaactttggcgtactctatggtatgtcagcagcacgtcttagtcaggaattgggcattgactacaaagaagctgaagcgtttatcgagcgctatttccaatcctttccgaaagttcgcgcgtggattgaacgtacgctcgaagaaggtcgcactcgcggctatgtggaaacgttattcgggcgtcgtcgctacgttccagatcttacgtctcgtgtccgctcagtgcgcgaagctgctgagcgtatggcctggaatatgcctgttcagggaacagcggcggacctcatgaagatcgccatggtgaaattgtttccgcgcttgaaacccttaggagcccaccttcttctgcaggtgcatgatgaattggtcttggaagtacccgaggatcgcgcagaagaagccaaagcactcgtgaaagaggttatggaaaacgcgtatccgttagatgttccgttggaggtcgaagtgggtgtaggccgtgattggcttgaagcgaaacaagactaatga

SEQ ID NO: 784 - protein, 844 aa, synthetic construct
  REGION 1..844: note = DNA Polymerase Variant
MHHHHHHGGSGMLPLFDLEEPPKRVLLVDGHHLAYRTFYALSLTTSRGEPVQMVYGFARSLLKALKEDGQAVVVVFDAKAPSFRHEAYEAYKAGRAPTPEDFPRQLALVKRLVDLLGLVRLEAPGYEADDVLGTLAKKAEREGMEVCILTGDRDFFQLLSEKVSVLLPDGTLVTPKDVQEKYGVPPERWVDFRALTGDRSDNIPGVAGIGEKTALRLLAEWGSVENLLKNLDRVKPDSLRRKIEAHLEDLRLSLDLARIRTDLPLEVDFKALRRRTPDLEGLRAFLEELELGSLLHEFGLLGGEKPREEAPWPPPEGAFVGFLLSRKEPMWAELLALAAAAEGRVHRATSPVEALADLKEARGFLAKDLAVLALREGVALDPTDDPLLVAYLLDHANTNPERVARRYGGEFTEDAAERALLSERLFQTLFPRLSEKLLWLYQEVERPLSRVLAHMEARGVRLDVPLLEALSFEAAKELERLEGEVFRLAGHPFNLNSRDQLEKVLFDELGLTPVTRTEKTGKRSTSAAALEALRGVHPIVELILQYRELSKLKSTYLDRLPKLVHPRTGRLHTRFNQTATATGRLSSSDPNLQNIPVRTPLGQHIRKAFVAEEGWLLLAADYSQIELRVLAHLSGDENLKRVFREGKDIHTETAAWMFGVDSALVDPKMRRAAKTVNFGVLYGMSAARLSQELGIDYKEAEAFIERYFQSFPKVRAWIERTLEEGRTRGYVETLFGRRRYVPDLTSRVRSVREAAERMAWNMPVQGTAADLMKIAMVKLFPRLKPLGAHLLLQVHDELVLEVPEDRAEEAKALVKEVMENAYPLDVPLEVEVGVGRDWLEAKQD

SEQ ID NO: 785 - DNA, 2538 bp, synthetic construct
  misc_feature 1..2538: note = DNA Polymerase Variant
  source 1..2538: mol_type = other DNA
atgcaccatcatcatcatcatggcggtagcggcatgttaccgctgtttgatttggaagaaccaccaaaacgcgtgctgcttgttgacggccatcatctggcgtatcgtaccttctacgcactgagccttacgacctcacgtggtgagcctgtccagatggtgtatgggtttgctcgctccctgctgaaagccctgaaggaagatggtcaagccgtagtagtggttttcgatgcgaaagcaccgtcgtttcgtcacgaagcgtacgaggcctataaagctggccgcgcaccgaccccggaagactttccgcgtcagttagcgctcgtcaaacgcctcgtggatttgctgggattagttcgcttggaagctcctggctacgaggcggacgacgtgctcggtacactggccaagaaagcagaacgtgaaggcatggaggtctgcattcttaccggtgatcgcgatttcttccagctgctgtctgagaaagtgagcgttttgctgcccgatggcacgttagtaaccccgaaagatgtgcaagagaaatatggagttccgccagaacgttgggtggactttcgcgcactgactggtgatcgttcagacaacatcccgggcgttgccgggattggtgaaaagacggcgctgcgcctgctggcagaatggggctcggtggaaaatctgctcaagaaccttgatcgtgtgaaacctgatagcttacgccgcaagatcgaagcccacctggaagacttgcgtctgagtctggatcttgcccgtattcgcaccgatctgccgttggaagtagactttaaagctctgcgtcgtcgcacacccgatttagaggggttacgcgcgttcctcgaagaactggagctgggctccctgctgcatgaattcggtttgttgggcggagagaaaccgcgtgaagaagcaccatggccgccgcccgaaggtgcctttgtcggctttcttctgtcacgcaaagagccaatgtgggcggaactgttagctcttgcagccgccgcggaagggcgtgttcaccgcgcgacctctcctgtcgaggccctcgctgacctcaaagaagcacgtggtttcttggcgaaagatttagccgtgcttgcattacgcgaaggcgttgcgctcgatccgacggacgacccgcttttggtggcttatttgctcgatcatgcgaataccaacccggaacgtgtcgcccgtcgttacggcggcgagtttactgaagatgcggcagaacgcgcgttgcttagcgaacgcctcttccagacgttatttccacgtctttcggagaaattactctggctctatcaggaagtcgaacgtccattgagtcgcgtgcttgcctttatggaggctcgcggtgtgcgcttagatgttccgttgttagaagcactcagcttcgagttggagaaagaactggaacgtcttgaaggcgaagtctttcgtttagcggggcatcccttcaatctcaactctcgcgaccaattggagaaagtgctctttgatgaattaggtttaacccctgtcacgcgtacagagaagaccggcaaacgttccacttcggcagccgccttggaagcacttcgtggtgctcacccgatcgtcgagttgattttgcagtatcgcgagctcagcaaactcaaatcaacctatcttgataggttacctcgtcttgttcatccacgtacgggtcgtttacacacccgcttcaatcaaacggcaacagccaccgggcgcttgtcgtcgagtgacccgaacctccagaatattccagtgcgcacgccgctgggccaacacattcgtaaagcgtttgttgcggaagaaggttggttattacttgcggccgattactcccagatcgaacttcgtgtattggcgcatctctctggcgacgagaatcttaaacgcgtgtttcgcgaaggcaaggatattcacactgaaaccgcagcctggatgttcggggtggacccagccttagtggaccccaagatgcgtcgtgccgccaagaccgtcaactttggcgtactctatggtatgtcagcagcacgtcttagtcaggaattgggcattgactacaaagaagctgaagcgtttatcgagcgctatttccaatcctttccgaaagttcgcgcgtggattgaacgtacgctcgaagaaggtcgcactcgcggctatgtggaaacgttattcgggcgtcgtcgctacgttccagatcttacgtctcgtgtccgctcagtgcgcgaagctgctgagcgtatggcctggaatatgcctgttcagggaacagcggcggacctcatgaagatcgccatggtgaaattgtttccgcgcttgaaacccttaggagcccaccttcttttacaggtgcatgatgaattggtcttggaagtacccgaggatcgcgcagaagaagccaaagcactcgtgaaagaggttatggaaaacgcgtatccgttagatgttccgttggaggtcgaagtgggtgtaggccgtgattggcttgaagcgaaacaagactaatga

SEQ ID NO: 786 - protein, 844 aa, synthetic construct
  REGION 1..844: note = DNA Polymerase Variant
MHHHHHHGGSGMLPLFDLEEPPKRVLLVDGHHLAYRTFYALSLTTSRGEPVQMVYGFARSLLKALKEDGQAVVVVFDAKAPSFRHEAYEAYKAGRAPTPEDFPRQLALVKRLVDLLGLVRLEAPGYEADDVLGTLAKKAEREGMEVCILTGDRDFFQLLSEKVSVLLPDGTLVTPKDVQEKYGVPPERWVDFRALTGDRSDNIPGVAGIGEKTALRLLAEWGSVENLLKNLDRVKPDSLRRKIEAHLEDLRLSLDLARIRTDLPLEVDFKALRRRTPDLEGLRAFLEELELGSLLHEFGLLGGEKPREEAPWPPPEGAFVGFLLSRKEPMWAELLALAAAAEGRVHRATSPVEALADLKEARGFLAKDLAVLALREGVALDPTDDPLLVAYLLDHANTNPERVARRYGGEFTEDAAERALLSERLFQTLFPRLSEKLLWLYQEVERPLSRVLAFMEARGVRLDVPLLEALSFELEKELERLEGEVFRLAGHPFNLNSRDQLEKVLFDELGLTPVTRTEKTGKRSTSAAALEALRGAHPIVELILQYRELSKLKSTYLDRLPRLVHPRTGRLHTRFNQTATATGRLSSSDPNLQNIPVRTPLGQHIRKAFVAEEGWLLLAADYSQIELRVLAHLSGDENLKRVFREGKDIHTETAAWMFGVDPALVDPKMRRAAKTVNFGVLYGMSAARLSQELGIDYKEAEAFIERYFQSFPKVRAWIERTLEEGRTRGYVETLFGRRRYVPDLTSRVRSVREAAERMAWNMPVQGTAADLMKIAMVKLFPRLKPLGAHLLLQVHDELVLEVPEDRAEEAKALVKEVMENAYPLDVPLEVEVGVGRDWLEAKQD

SEQ ID NO: 787 - DNA, 2538 bp, synthetic construct
  misc_feature 1..2538: note = DNA Polymerase Variant
  source 1..2538: mol_type = other DNA
atgcaccatcatcatcatcatggcggtagcggcatgttaccgctgtttgatttggaagaaccaccaaaacgcgtgctgcttgttgacggccatcatctggcgtatcgtaccttctacgcactgagccttacgacctcacgtggtgagcctgtccagatggtgtatgggtttgctcgctccctgctgaaagccctgaaggaagatggtcaagccgtagtagtggttttcgatgcgaaagcaccgtcgtttcgtcacgaagcgtacgaggcctataaagctggccgcgcaccgaccccggaagactttccgcgtcagttagcgctcgtcaaacgcctcgtggatttgctgggattagttcgcttggaagctcctggctacgaggcggacgacgtgctcggtacactggccaagaaagcagaacgtgaaggcatggaggtctgcattcttaccggtgatcgcgatttcttccagctgctgtctgagaaagtgagcgttttgctgcccgatggcacgttagtaaccccgaaagatgtgcaagagaaatatggagttccgccagaacgttgggtggactttcgcgcactgactggtgatcgttcagacaacatcccgggcgttgccgggattggtgaaaagacggcgctgcgcctgctggcagaatggggctcggtggaaaatctgctcaagaaccttgatcgtgtgaaacctgatagcttacgccgcaagatcgaagcccacctggaagacttgcgtctgagtctggatcttgcccgtattcgcaccgatctgccgttggaagtagactttaaagctctgcgtcgtcgcacacccgatttagaggggttacgcgcgttcctcgaagaactggagctgggctccctgctgcatgaattcggtttgttgggcggagagaaaccgcgtgaagaagcaccatggccgccgcccgaaggtgcctttgtcggctttcttctgtcacgcgaagagccaatgtgggcggaactgttagctcttgcagccgccgcggaagggcgtgttcaccgcgcgacctctcctgtcgaggccctcgctgacctcaaagaagcacgtggtttcttggcgaaagatttagccgtgcttgcattacgcgaaggcgttgcgctcgatccgacggacgacccgcttttggtggcttatttgctcgatcatgcgaataccaacccggaacgtgtcgcccgtcgttacggcggcgagtttactgaagatgcggcagaacgcgcgttgcttagcgaacgcctcttcactacgttatttccacgtctttcggagaaattactctggctctatcaggaagtcgaacgtccattgagtcgcgtgcttgcccatatggaggctcgcggtgtgcgcttagatgttccgttgttagaagcactcagcttcgagttggagaaagaactggaacgtcttgaaggcgaagtctttcgtttagcggggcatcccttcaatctcaactctcgcgaccaattggagaaagtgctctttgatgaattaggtttaacccctgtcacgcgtacagagaagaccggcaaacgttccacttcggcagccgccttggaagcacttcgtggtgctcacccgatcgtcgagttgattttgcagtatcgcgagctcagcaaactcaaatcaacctatcttgataggttacctcgtcttgttcatccacgtacgggtcgtttacacacccgcttcaatcaaacggcaacagccaccgggcgcttgtcgtcgagtgacccgaacctccagaatattccagtgcgcacgccgctgggccaacacattcgtaaagcgtttgttgcggaagaaggttggttattacttgcggccgattactcccagatcgaacttcgtgtattggcgcatctctctggcgacgagaatcttaaacgcgtgtttcgcgaaggcaaggatattcacactgaaaccgcagcctggatgttcggggtggacccagccttagtggaccccaagatgcgtcgtgccgccaagaccgtcaactttggcgtactctatggtatgtcagcagcacgtcttagtcaggaattgggcattgactacaaagaagctgaagcgtttatcgagcgctatttccaatcctttccgaaagttcgcgcgtggattgaacgtacgctcgaagaaggtcgcactcgcggctatgtggaaacgttattcgggcgtcgtcgctacgttccagatcttacgtctcgtgtccgctcagtgcgcgaagctgctgagcgtatggcctggaatatgcctgttcagggaacagcggcggacctcatgaagatcgccatggtgaaattgtttccgcgcttgaaacccttaggagcccaccttcttttacaggtgcatgatgaattggtcttggaagtacccgaggatcgcgcagaagaagccaaagcactcgtgaaagaggttatggaaaacgcgtatccgttagatgttccgttggaggtcgaagtgggtgtaggccgtgattggcttgaagcgaaacaagactaatga

SEQ ID NO: 788 - protein, 844 aa, synthetic construct
  REGION 1..844: note = DNA Polymerase Variant
MHHHHHHGGSGMLPLFDLEEPPKRVLLVDGHHLAYRTFYALSLTTSRGEPVQMVYGFARSLLKALKEDGQAVVVVFDAKAPSFRHEAYEAYKAGRAPTPEDFPRQLALVKRLVDLLGLVRLEAPGYEADDVLGTLAKKAEREGMEVCILTGDRDFFQLLSEKVSVLLPDGTLVTPKDVQEKYGVPPERWVDFRALTGDRSDNIPGVAGIGEKTALRLLAEWGSVENLLKNLDRVKPDSLRRKIEAHLEDLRLSLDLARIRTDLPLEVDFKALRRRTPDLEGLRAFLEELELGSLLHEFGLLGGEKPREEAPWPPPEGAFVGFLLSREEPMWAELLALAAAAEGRVHRATSPVEALADLKEARGFLAKDLAVLALREGVALDPTDDPLLVAYLLDHANTNPERVARRYGGEFTEDAAERALLSERLFTTLFPRLSEKLLWLYQEVERPLSRVLAHMEARGVRLDVPLLEALSFELEKELERLEGEVFRLAGHPFNLNSRDQLEKVLFDELGLTPVTRTEKTGKRSTSAAALEALRGAHPIVELILQYRELSKLKSTYLDRLPRLVHPRTGRLHTRFNQTATATGRLSSSDPNLQNIPVRTPLGQHIRKAFVAEEGWLLLAADYSQIELRVLAHLSGDENLKRVFREGKDIHTETAAWMFGVDPALVDPKMRRAAKTVNFGVLYGMSAARLSQELGIDYKEAEAFIERYFQSFPKVRAWIERTLEEGRTRGYVETLFGRRRYVPDLTSRVRSVREAAERMAWNMPVQGTAADLMKIAMVKLFPRLKPLGAHLLLQVHDELVLEVPEDRAEEAKALVKEVMENAYPLDVPLEVEVGVGRDWLEAKQD

SEQ ID NO: 789 - DNA, 2538 bp, synthetic construct
  misc_feature 1..2538: note = DNA Polymerase Variant
  source 1..2538: mol_type = other DNA
atgcaccatcatcatcatcatggcggtagcggcatgttaccgctgtttgatttggaagaaccaccaaaacgcgtgctgcttgttgacggccatcatctggcgtatcgtaccttctacgcactgagccttacgacctcacgtggtgagcctgtccagatggtgtatgggtttgctcgctccctgctgaaagccctgaaggaagatggtcaagccgtagtagtggttttcgatgcgaaggcaccgtcgtttcgtcacgaagcgtacgaggcctataaagctggccgcgcaccgaccccggaagactttccgcgtcagttagcgctcgtcaaacgcctcgtggatttgctgggattagttcgcttggaagctcctggctacgaggcggacgacgtgctcggtacactggccaagaaagcagaacgtgaaggcatggaggtctgcattcttaccggtgatcgcgatttcttccagctgctgtctgagaaagtgagcgttttgctgcccgatggcacgttagtaaccccgaaagatgtgcaagagaaatatggagttccgccagaacgttgggtggactttcgcgcactgactggtgatcgttcagacaacatcccgggcgttgccgggattggtgaaaagacggcgctgcgcctgctggcagaatggggctcggtggaaaatctgctcaagaaccttgatcgtgtgaaacctgatagcttacgccgcaagatcgaagcccacctggaagacttgcgtctgagtctggatcttgtacgtattcgcaccgatctgccgttggaagtagactttaaagctctgcgtcgtcgcacacccgatttagaggggttacgcgcgttcctcgaagaactggagctgggctccctgctgcatgaattcggtttgttgggcggagagaaaccgcgtgaagaagcaccatggccgccgcccgggggtgcctttgtcggctttcttctgtcacgcaaagagccaatgtgggcggaactgttagctcttgcagccgccgcggaagggcgtgttcaccgcgcgacctctcctgtcgaggccctcgctgacctcaaagaagcacgtggtttcttggcgaaagatttagccgtgcttgcattacgcgaaggcgttgcgctcgatccgacggacgacccgcttttggtggcttatttgctcgatcatgcgaataccaacccggaacgtgtcgcccgtcgttacggcggcgagtttactgaagatgcggcagaacgcgcgttgcttagcgaacgcctcttccagacgttatttccacgtctttcggagaaattactctggctctatcaggaagtcgaacgtccattgagtcgcgtgcttgcccatatggaggctcgcggtgtgcgcttagatgttccgttgttagaagcactcagcttcgaggcggaaaaagaactggaacgtcttgaaggcgaagtctttcgtttagcggggcatcccttcaatctcaactctcgcgaccaattggagaaagtgctctttgatgaattaggtttaacccctgtcacgcgtacagagaagaccggcaaacgttccacttcggcagccgccttggaagcacttcgtggtgtgcacccgatcgtcgagttgattttgcagtatcgcgagctcagcaaactcaaatcaacctatcttgataggttacctcgtcttgttcatccacgtacgggtcgtttacacacccgcttcaatcaaacggcaacagccaccgggcgcttgtcgtcgagtgacccgaacctccagaatattccagtgcgcacgccgctgggccaacacattcgtaaagcgtttgttgcggaagaaggttggttattacttgcggccgattactcccagatcgaacttcgtgtattggcgcatctctctggcgacgagaatcttaaacgcgtgtttcgcgaaggcaaggatattcacactgaaaccgcagcctggatgttcggggtggacccggccttagtggaccccaagatgcgtcgtgccgccaagaccgtcaactttggcgtactctatggtatgtcagcagcacgtcttagtcaggaattgggcattgactacaaagaagctgaagcgtttatcgagcgctatttccaatcctttccgaaagttcgcgcgtggattgaacgtacgctcgaagaaggtcgcactcgcggctatgtggaaacgttattcgggcgtcgtcgctacgttccagatcttacgtctcgtgtccgctcagtgcgcgaagctgctgagcgtatggcctggaatatgcctgttcagggaacagcggcggacctcatgaagatcgccatggtgaaattgtttccgcgcttgaaacccttaggagcccaccttcttttccaggtgcatgatgaattggtcttggaagtacccgaggatcgcgcagaagaagccaaagcactcgtgaaagaggttatggaaaacgcgtatccgttagatgttccgttggaggtcgaagtgggtgtaggccgtgattggcttgaagcgaaacaagactaatga

SEQ ID NO: 790 - protein, 844 aa, synthetic construct
  REGION 1..844: note = DNA Polymerase Variant
MHHHHHHGGSGMLPLFDLEEPPKRVLLVDGHHLAYRTFYALSLTTSRGEPVQMVYGFARSLLKALKEDGQAVVVVFDAKAPSFRHEAYEAYKAGRAPTPEDFPRQLALVKRLVDLLGLVRLEAPGYEADDVLGTLAKKAEREGMEVCILTGDRDFFQLLSEKVSVLLPDGTLVTPKDVQEKYGVPPERWVDFRALTGDRSDNIPGVAGIGEKTALRLLAEWGSVENLLKNLDRVKPDSLRRKIEAHLEDLRLSLDLVRIRTDLPLEVDFKALRRRTPDLEGLRAFLEELELGSLLHEFGLLGGEKPREEAPWPPPGGAFVGFLLSRKEPMWAELLALAAAAEGRVHRATSPVEALADLKEARGFLAKDLAVLALREGVALDPTDDPLLVAYLLDHANTNPERVARRYGGEFTEDAAERALLSERLFQTLFPRLSEKLLWLYQEVERPLSRVLAHMEARGVRLDVPLLEALSFEAEKELERLEGEVFRLAGHPFNLNSRDQLEKVLFDELGLTPVTRTEKTGKRSTSAAALEALRGVHPIVELILQYRELSKLKSTYLDRLPRLVHPRTGRLHTRFNQTATATGRLSSSDPNLQNIPVRTPLGQHIRKAFVAEEGWLLLAADYSQIELRVLAHLSGDENLKRVFREGKDIHTETAAWMFGVDPALVDPKMRRAAKTVNFGVLYGMSAARLSQELGIDYKEAEAFIERYFQSFPKVRAWIERTLEEGRTRGYVETLFGRRRYVPDLTSRVRSVREAAERMAWNMPVQGTAADLMKIAMVKLFPRLKPLGAHLLFQVHDELVLEVPEDRAEEAKALVKEVMENAYPLDVPLEVEVGVGRDWLEAKQD

SEQ ID NO: 791 - DNA, 2538 bp, synthetic construct
  misc_feature 1..2538: note = DNA Polymerase Variant
  source 1..2538: mol_type = other DNA
atgcaccatcatcatcatcatggcggtagcggcatgttaccgctgtttgatttggaagaaccaccaaaacgcgtgctgcttgttgacggccatcatctggcgtatcgtaccttctacgcactgagccttacgacctcacgtggtgagcctgtccagatggtgtatgggtttgctcgctccctgctgaaagccctgaaggaagatggtcaagccgtagtagtggttttcgatgcgaaagcaccgtcgtttcgtcacgaagcgtacgaggcctataaagctggccgcgcaccgaccccggaagactttccgcgtcagttagcgctcgtcaaacgcctcgtggatttgctgggattagttcgcttggaagctcctggctacgaggcggacgacgtgctcggtacactggccaagaaagcagaacgtgaaggcatggaggtctgcattcttaccggtgatcgcgatttcttccagctgctgtctgagaaagtgagcgttttgctgcccgatggcacgttagtaaccccgaaagatgtgcaagagaaatatggagttccgccagaacgttgggtggactttcgcgcactgactggtgatcgttcagacaacatcccgggcgttgccgggattggtgaaaagacggcgctgcgcctgctggcagaatggggctcggtggaaaatctgctcaagaaccttgatcgtgtgaaacctgatagcttacgccgcaagatcgaagcccacctggaagacttgcgtctgagtctggatcttgcccgtattcgcaccgatctgccgttggaagtagactttaaagctctgcgtcgtcgcacacccgatttagaggggttacgcgcgttcctcgaagaactggagctgggctccctgctgcatgaattcggtttgttgggcggagagaaaccgcgtgaagaagcaccatggccgccgcccgaaggtgcctttgtcggctttcttctgtcacgcaaagagccaatgtgggcggaactgttagctcttgcagccgccgcggaagggcgtgttcaccgcgcgacctctcctgtcgaggccctcgctgacctcaaagaagcacgtggtttcttggcgaaagatttagccgtgcttgcattacgcgaaggcgttgcgctcgatccgacggacgacccgcttttggtggcttatttgctcgatcatgcgaataccaacccggaacgtgtcgcccgtcgttacggcggcgagtttactgaagatgcggcagaacgcgcgttgcttagcgaacgcctcttcgatacgttatttccacgtctttcggagaaattactctggctctatcaggaagtcgaacgtccattgagtcgcgtgcttgcccatatggaggctcgcggtgtgcgcttagatgttccgttgttagaagcactcagcttcgagttggagaaagaactggaacgtcttgaaggcgaagtctttcgtttagcggggcatcccttcaatctcaactctcgcgaccaattggagaaagtgctctttgatgaattaggtttaacccctgtcacgcgtacagagaagaccggcaaacgttccacttcggcagccgccttggaagcacttcgtggtgctcacccgatcgtcgagttgattttgcagtatcgcgagctcagcaaactcaaatcaacctatcttgataggttacctcgtcttgttcatccacgtacgggtcgtttacacacccgcttcaatcaaacggcaacagccaccgggcgcttgtcgtcgagtgacccgaacctccagaatattccagtgcgcacgccgctgggccaacacattcgtaaagcgtttgttgcggaagaaggttggttattacttgcggccgattactcccagatcgaacttcgtgtattggcgcatctctctggcgacgagaatcttaaacgcgtgtttcgcgaaggcaaggatattcacactgaaaccgcagcctggatgttcggggtggacccagccttagtggaccccaagatgcgtcgtgccgccaagaccgtcaactttggcgtactctatggtatgtcagcagcacgtcttagtcaggaattgggcattgactacaaagaagctgaagcgtttatcgagcgctatttccaatcctttccgaaagttcgcgcgtggattgaacgtacgctcgaagaaggtcgcactcgcggctatgtggaaacgttattcgggcgtcgtcgctacgttccagatcttacgtctcgtgtccgctcagtgcgcgaagctgctgagcgtatggcctggaatatgcctgttcagggaacagcggcggacctcatgaagatcgccatggtgaaattgtttccgcgcttgaaacccttaggagcccaccttcttttacaggtgcatgatgaattggtcttggaagtacccgaggatcgcgcagaagaagccaaagcactcgtgaaagaggttatggaaaacgcgtatccgttagatgttccgttggaggtcgaagtgggtgtaggccgtgattggcttgaagcgaaacaagactaatga

SEQ ID NO: 792 - protein, 844 aa, synthetic construct
  REGION 1..844: note = DNA Polymerase Variant
MHHHHHHGGSGMLPLFDLEEPPKRVLLVDGHHLAYRTFYALSLTTSRGEPVQMVYGFARSLLKALKEDGQAVVVVFDAKAPSFRHEAYEAYKAGRAPTPEDFPRQLALVKRLVDLLGLVRLEAPGYEADDVLGTLAKKAEREGMEVCILTGDRDFFQLLSEKVSVLLPDGTLVTPKDVQEKYGVPPERWVDFRALTGDRSDNIPGVAGIGEKTALRLLAEWGSVENLLKNLDRVKPDSLRRKIEAHLEDLRLSLDLARIRTDLPLEVDFKALRRRTPDLEGLRAFLEELELGSLLHEFGLLGGEKPREEAPWPPPEGAFVGFLLSRKEPMWAELLALAAAAEGRVHRATSPVEALADLKEARGFLAKDLAVLALREGVALDPTDDPLLVAYLLDHANTNPERVARRYGGEFTEDAAERALLSERLFDTLFPRLSEKLLWLYQEVERPLSRVLAHMEARGVRLDVPLLEALSFELEKELERLEGEVFRLAGHPFNLNSRDQLEKVLFDELGLTPVTRTEKTGKRSTSAAALEALRGAHPIVELILQYRELSKLKSTYLDRLPRLVHPRTGRLHTRFNQTATATGRLSSSDPNLQNIPVRTPLGQHIRKAFVAEEGWLLLAADYSQIELRVLAHLSGDENLKRVFREGKDIHTETAAWMFGVDPALVDPKMRRAAKTVNFGVLYGMSAARLSQELGIDYKEAEAFIERYFQSFPKVRAWIERTLEEGRTRGYVETLFGRRRYVPDLTSRVRSVREAAERMAWNMPVQGTAADLMKIAMVKLFPRLKPLGAHLLLQVHDELVLEVPEDRAEEAKALVKEVMENAYPLDVPLEVEVGVGRDWLEAKQD

SEQ ID NO: 793 - DNA, 2538 bp, synthetic construct
  misc_feature 1..2538: note = DNA Polymerase Variant
  source 1..2538: mol_type = other DNA
atgcaccatcatcatcatcatggcggtagcggcatgttaccgctgtttgatttggaagaaccaccaaaacgcgtgctgcttgttgacggccatcatctggcgtatcgtaccttctacgcactgagccttacgacctcacgtggtgagcctgtccagatggtgtatgggtttgctcgctccctgctgaaagccctgaaggaagatggtcaagccgtagtagtggttttcgatgcgaaagcaccgtcgtttcgtcacgaagcgtacgaggcctataaagctggccgcgcaccgaccccggaagactttccgcgtcagttagcgctcgtcaaacgcctcgtggatttgctgggattagttcgcttggaagctcctggctacgaggcggacgacgtgctcggtacactggccaagaaagcagaacgtgaaggcatggaggtctgcattcttaccggtgatcgcgatttcttccagctgctgtctgagaaagtgagcgttttgctgcccgatggcacgttagtaaccccgaaagatgtgcaagagaaatatggagttccgccagaacgttgggtggactttcgcgcactgactggtgatcgttcagacaacatcccgggcgttgccgggattggtgaaaagacggcgctgcgcctgctggcagaatggggctcggtggaaaatctgctcaagaaccttgatcgtgtgaaacctgatagcttacgccgcaagatcgaagcccacctggaagacttgcgtctgagtctggatcttgcccgtattcgcaccgatctgccgttggaagtagactttaaagctctgcgtcgtcgcacacccgatttagaggggttacgcgcgttcctcgaagaactggagctgggctccctgctgcatgaattcggtttgttgggcggagagaaaccgcgtgaagaagcaccatggccgccgcccgaaggtgcctttgtcggctttcttctgtcacgcaaagagccaatgtgggcggaactgttagctcttgcagccgccgcggaagggcgtgttcaccgcgcgacctctcctgtcgaggccctcgctgacctcaaagaagcacgtggtttcttggcgaaagatttaggggtgcttgcattacgcgaaggcgttgcgctcgatccgacggacgacccgcttttggtggcttatttgctcgatcatgcgaataccaacccggaacgtgtcgcccgtcgttacggcggcgagtttactgaagatgcggcagaacgcgcgttgcttagcgaacgcctcttccagacgttatttccacgtctttcggagaaattactctggctctatcaggaagtcgaacgtccattgagtcgcgtgcttgcccatatggaggctcgcggtgtgcgcttagatgttccgttgttagaagcactcagcttcgagttggagaaagaactggaacgtcttgaaggcgaagtctttcgtttagcggggcatcccttcaatctcaactctcgcgaccaattggagaaagtgctctttgatgaattaggtttaacccctgtcacgcgtacagagaagaccggcaaacgttccacttcggcagccgccttggaagcacttcgtggtgctcacccgatcgtcgagttgattttgcagtatcgcgagctcagcaaactcaaatcaacctatcttgataggttacctcgtcttgttcatccacgtacgggtcgtttacacacccgcttcaatcaaacggcaacagccaccgggcgcttgtcgtcgagtgacccgaacctccagaatattccagtgcgcacgccgctgggccaacacattcgtaaagcgtttgttgcggaagaaggttggttattacttgcggccgattactcccagatcgaacttcgtgtattggcgcatctctctggcgacgagaatcttaaacgcgtgtttcgcgaaggcaaggatattcacactgaaaccgcagcctggatgttcggggtggacccagccttagtggaccccaagatgcgtcgtgccgccaagaccgtcaactttggcgtactctatggtatgtcagcagcacgtcttagtcaggaattgggcattgactacaaagaagctgaagcgtttatcgagcgctatttccaatcctttccgaaagttcgcgcgtggattgaacgtacgctcgaagaaggtcgcactcgcggctatgtggaaacgttattcgggcgtcgtcgctacgttccagatcttacgtctcgtgtccgctcagtgcgcgaagctgctgagcgtatggcctggaatatgcctgttcagggaacagcggcggacctcatgaagatcgccatggtgaaattgtttccgcgcttgaaacccttaggagcccaccttcttttacaggtgcatgatgaattggtcttggaagtacccgaggatcgcgcagaagaagccaaagcactcgtgaaagaggttatggaaaacgcgtatccgttagatgttccgttggaggtcgaagtgggtgtaggccgtgattggcttgaagcgaaacaagactaatga

SEQ ID NO: 794 - protein, 844 aa, synthetic construct
  REGION 1..844: note = DNA Polymerase Variant
MHHHHHHGGSGMLPLFDLEEPPKRVLLVDGHHLAYRTFYALSLTTSRGEPVQMVYGFARSLLKALKEDGQAVVVVFDAKAPSFRHEAYEAYKAGRAPTPEDFPRQLALVKRLVDLLGLVRLEAPGYEADDVLGTLAKKAEREGMEVCILTGDRDFFQLLSEKVSVLLPDGTLVTPKDVQEKYGVPPERWVDFRALTGDRSDNIPGVAGIGEKTALRLLAEWGSVENLLKNLDRVKPDSLRRKIEAHLEDLRLSLDLARIRTDLPLEVDFKALRRRTPDLEGLRAFLEELELGSLLHEFGLLGGEKPREEAPWPPPEGAFVGFLLSRKEPMWAELLALAAAAEGRVHRATSPVEALADLKEARGFLAKDLGVLALREGVALDPTDDPLLVAYLLDHANTNPERVARRYGGEFTEDAAERALLSERLFQTLFPRLSEKLLWLYQEVERPLSRVLAHMEARGVRLDVPLLEALSFELEKELERLEGEVFRLAGHPFNLNSRDQLEKVLFDELGLTPVTRTEKTGKRSTSAAALEALRGAHPIVELILQYRELSKLKSTYLDRLPRLVHPRTGRLHTRFNQTATATGRLSSSDPNLQNIPVRTPLGQHIRKAFVAEEGWLLLAADYSQIELRVLAHLSGDENLKRVFREGKDIHTETAAWMFGVDPALVDPKMRRAAKTVNFGVLYGMSAARLSQELGIDYKEAEAFIERYFQSFPKVRAWIERTLEEGRTRGYVETLFGRRRYVPDLTSRVRSVREAAERMAWNMPVQGTAADLMKIAMVKLFPRLKPLGAHLLLQVHDELVLEVPEDRAEEAKALVKEVMENAYPLDVPLEVEVGVGRDWLEAKQD

SEQ ID NO: 795 - DNA, 2538 bp, synthetic construct
  misc_feature 1..2538: note = DNA Polymerase Variant
  source 1..2538: mol_type = other DNA
atgcaccatcatcatcatcatggcggtagcggcatgttaccgctgtttgatttggaagaaccaccaaaacgcgtgctgcttgttgacggccatcatctggcgtatcgtaccttctacgcactgagccttacgacctcacgtggtgagcctgtccagatggtgtatgggtttgctcgctccctgctgaaagccctgaaggaagatggtcaagccgtagtagtggttttcgatgcgaaagcaccgtcgtttcgtcacgaagcgtacgaggcctataaagctggccgcgcaccgaccccggaagactttccgcgtcagttagcgctcgtcaaacgcctcgtggatttgctgggattagttcgcttggaagctcctggctacgaggcggacgacgtgctcggtacactggccaagaaagcagaacgtgaaggcatggaggtctgcattcttaccggtgatcgcgatttcttccagctgctgtctgagaaagtgagcgttttgctgcccgatggcacgttagtaaccccgaaagatgtgcaagagaaatatggagttccgccagaacgttgggtggactttcgcgcactgactggtgatcgttcagacaacatcccgggcgttgccgggattggtgaaaagacggcgctgcgcctgctggcagaatggggctcggtggaaaatctgctcaagaaccttgatcgtgtgaaacctgatagcttacgccgcaagatcgaagcccacctggaagacttgcgtctgagtctggatcttgcccgtattcgcaccgatctgccgttggaagtagactttaaagctctgcgtcgtcgcacacccgatttagaggggttacgcgcgttcctcgaagaactggagctgggctccctgctgcatgaattcggtttgttgggcggagagaaaccgcgtgaagaagcaccatggccgccgcccgaaggtgcctttgtcggctttcttctgtcacgcaaagagccaatgtgggcggaactgttagctcttgcagccgccgcggaagggcgtgttcaccgcgcgacctctcctgtcgaggccctcgctgacctcaaagaagcacgtggtttcttggcgaaagatttagccgtgcttgcattacgcgaaggcgttgcgctcgatccgacggacgacccgcttttggtggcttatttgctcgatcatgcgaataccaacccggaacgtgtcgcccgtcgttacggcggcgagtttactgaagatgcggcaaggcgcgcgttgcttagcgaacgcctcttccagacgttatttccacgtctttcggagaaattactctggctctatcaggaagtcgaacgtccattgagtcgcgtgcttgcccatatggaggctcgcggtgtgcgcttagatgttccgttgttagaagcactcagcttcgagttggagaaagaactggaacgtcttgaaggcgaagtctttcgtttagcggggcatcccttcaatctcaactctcgcgaccaattggagaaagtgctctttgatgaattaggtttaacccctgtcacgcgtacagagaagaccggcaaacgttccacttcggcagccgccttggaagcacttcgtggtgctcacccgatcgtcgagttgattttgcagtatcgcgagctcagcaaactcaaatcaacctatcttgataggttacctcgtcttgttcatccacgtacgggtcgtttacacacccgcttcaatcaaacggcaacagccaccgggcgcttgtcgtcgagtgacccgaacctccagaatattccagtgcgcacgccgctgggccaacacattcgtaaagcgtttgttgcggaagaaggttggttattacttgcggccgattactcccagatcgaacttcgtgtattggcgcatctctctggcgacgagaatcttaaacgcgtgtttcgcgaaggcaaggatattcacactgaaaccgcagcctggatgttcggggtggacccagccttagtggaccccaagatgcgtcgtgccgccaagaccgtcaactttggcgtactctatggtatgtcagcagcacgtcttagtcaggaattgggcattgactacaaagaagctgaagcgtttatcgagcgctatttccaatcctttccgaaagttcgcgcgtggattgaacgtacgctcgaagaaggtcgcactcgcggctatgtggaaacgttattcgggcgtcgtcgctacgttccagatcttacgtctcgtgtccgctcagtgcgcgaagctgctgagcgtatggcctggaatatgcctgttcagggaacagcggcggacctcatgaagatcgccatggtgaaattgtttccgcgcttgaaacccttaggagcccaccttcttttacaggtgcatgatgaattggtcttggaagtacccgaggatcgcgcagaagaagccaaagcactcgtgaaagaggttatggaaaacgcgtatccgttagatgttccgttggaggtcgaagtgggtgtaggccgtgattggcttgaagcgaaacaagactaatga

SEQ ID NO: 796 - protein, 844 aa, synthetic construct
  REGION 1..844: note = DNA Polymerase Variant
MHHHHHHGGSGMLPLFDLEEPPKRVLLVDGHHLAYRTFYALSLTTSRGEPVQMVYGFARSLLKALKEDGQAVVVVFDAKAPSFRHEAYEAYKAGRAPTPEDFPRQLALVKRLVDLLGLVRLEAPGYEADDVLGTLAKKAEREGMEVCILTGDRDFFQLLSEKVSVLLPDGTLVTPKDVQEKYGVPPERWVDFRALTGDRSDNIPGVAGIGEKTALRLLAEWGSVENLLKNLDRVKPDSLRRKIEAHLEDLRLSLDLARIRTDLPLEVDFKALRRRTPDLEGLRAFLEELELGSLLHEFGLLGGEKPREEAPWPPPEGAFVGFLLSRKEPMWAELLALAAAAEGRVHRATSPVEALADLKEARGFLAKDLAVLALREGVALDPTDDPLLVAYLLDHANTNPERVARRYGGEFTEDAARRALLSERLFQTLFPRLSEKLLWLYQEVERPLSRVLAHMEARGVRLDVPLLEALSFELEKELERLEGEVFRLAGHPFNLNSRDQLEKVLFDELGLTPVTRTEKTGKRSTSAAALEALRGAHPIVELILQYRELSKLKSTYLDRLPRLVHPRTGRLHTRFNQTATATGRLSSSDPNLQNIPVRTPLGQHIRKAFVAEEGWLLLAADYSQIELRVLAHLSGDENLKRVFREGKDIHTETAAWMFGVDPALVDPKMRRAAKTVNFGVLYGMSAARLSQELGIDYKEAEAFIERYFQSFPKVRAWIERTLEEGRTRGYVETLFGRRRYVPDLTSRVRSVREAAERMAWNMPVQGTAADLMKIAMVKLFPRLKPLGAHLLLQVHDELVLEVPEDRAEEAKALVKEVMENAYPLDVPLEVEVGVGRDWLEAKQD

SEQ ID NO: 797 - DNA, 2538 bp, synthetic construct
  misc_feature 1..2538: note = DNA Polymerase Variant
  source 1..2538: mol_type = other DNA
atgcaccatcatcatcatcatggcggtagcggcatgttaccgctgtttgatttggaagaaccaccaaaacgcgtgctgcttgttgacggccatcatctggcgtatcgtaccttctacgcactgagccttacgacctcacgtggtgagcctgtccagatggtgtatgggtttgctcgctccctgctgaaagccctgaaggaagatggtcaagccgtagtagtggttttcgatgcgaaagcaccgtcgtttcgtcacgaagcgtacgaggcctataaagctggccgcgcaccgaccccggaagactttccgcgtcagttagcgctcgtcaaacgcctcgtggatttgctgggattagttcgcttggaagctcctggctacgaggcggacgacgtgctcggtacactggccaagaaagcagaacgtgaaggcatggaggtctgcattcttaccggtgatcgcgatttcttccagctgctgtctgagaaagtgagcgttttgctgcccgatggcacgttagtaaccccgaaagatgtgcaagagaaatatggagttccgccagaacgttgggtggactttcgcgcactgactggtgatcgttcagacaacatcccgggcgttgccgggattggtgaaaagacggcgctgcgcctgctggcagaatggggctcggtggaaaatctgctcaagaaccttgatcgtgtgaaacctgatagcttacgccgcaagatcgaagcccacctggaagacttgcgtctgagtctggatcttgcccgtattcgcaccgatctgccgttggaagtagactttaaagctctgcgtcgtcgcacacccgatttagaggggttacgcgcgttcctcgaagaactggagctgggctccctgctgcatgaattcggtttgttgggcggagagaaaccgcgtgaagaagcaccatggccgccgcccgaaggtgcctttgtcggctttcttctgtcacgcaaagagccaatgtgggcggaactgttagctcttgcagccgccgcggaagggcgtgttcaccgcgcgacctctcctgtcgaggccctcgctgacctcaaagaagcacgtggtttcttggcgaaagatttagccgtgcttgcattacgcgaaggcgttgcgctcgatccgacggacgacccgcttttggtggcttatttgctcgatcatgcgaataccaacccggaacgtgtcgcccgtcgttacggcggcgagtttactgaagatgcggcagaacgcgcgttgcttagcgaacgcacgttccagacgttatttccacgtctttcggagaaattactctggctctatcaggaagtcgaacgtccattgagtcgcgtgcttgcccatatggaggctcgcggtgtgcgcttagatgttccgttgttagaagcactcagcttcgagttggagaaagaactggaacgtcttgaaggcgaagtctttcgtttagcggggcatcccttcaatctcaactctcgcgaccaattggagaaagtgctctttgatgaattaggtttaacccctgtcacgcgtacagagaagaccggcaaacgttccacttcggcagccgccttggaagcacttcgtggtgctcacccgatcgtcgagttgattttgcagtatcgcgagctcagcaaactcaaatcaacctatcttgataggttacctcgtcttgttcatccacgtacgggtcgtttacacacccgcttcaatcaaacggcaacagccaccgggcgcttgtcgtcgagtgacccgaacctccagaatattccagtgcgcacgccgctgggccaacacattcgtaaagcgtttgttgcggaagaaggttggttattacttgcggccgattactcccagatcgaacttcgtgtattggcgcatctctctggcgacgagaatcttaaacgcgtgtttcgcgaaggcaaggatattcacactgaaaccgcagcctggatgttcggggtggacccagccttagtggaccccaagatgcgtcgtgccgccaagaccgtcaactttggcgtactctatggtatgtcagcagcacgtcttagtcaggaattgggcattgactacaaagaagctgaagcgtttatcgagcgctatttccaatcctttccgaaagttcgcgcgtggattgaacgtacgctcgaagaaggtcgcactcgcggctatgtggaaacgttattcgggcgtcgtcgctacgttccagatcttacgtctcgtgtccgctcagtgcgcgaagctgctgagcgtatggcctggaatatgcctgttcagggaacagcggcggacctcatgaagatcgccatggtgaaattgtttccgcgcttgaaacccttaggagcccaccttcttttacaggtgcatgatgaattggtcttggaagtacccgaggatcgcgcagaagaagccaaagcactcgtgaaagaggttatggaaaacgcgtatccgttagatgttccgttggaggtcgaagtgggtgtaggccgtgattggcttgaagcgaaacaagactaatga

SEQ ID NO: 798 - protein, 844 aa, synthetic construct
  REGION 1..844: note = DNA Polymerase Variant
MHHHHHHGGSGMLPLFDLEEPPKRVLLVDGHHLAYRTFYALSLTTSRGEPVQMVYGFARSLLKALKEDGQAVVVVFDAKAPSFRHEAYEAYKAGRAPTPEDFPRQLALVKRLVDLLGLVRLEAPGYEADDVLGTLAKKAEREGMEVCILTGDRDFFQLLSEKVSVLLPDGTLVTPKDVQEKYGVPPERWVDFRALTGDRSDNIPGVAGIGEKTALRLLAEWGSVENLLKNLDRVKPDSLRRKIEAHLEDLRLSLDLARIRTDLPLEVDFKALRRRTPDLEGLRAFLEELELGSLLHEFGLLGGEKPREEAPWPPPEGAFVGFLLSRKEPMWAELLALAAAAEGRVHRATSPVEALADLKEARGFLAKDLAVLALREGVALDPTDDPLLVAYLLDHANTNPERVARRYGGEFTEDAAERALLSERTFQTLFPRLSEKLLWLYQEVERPLSRVLAHMEARGVRLDVPLLEALSFELEKELERLEGEVFRLAGHPFNLNSRDQLEKVLFDELGLTPVTRTEKTGKRSTSAAALEALRGAHPIVELILQYRELSKLKSTYLDRLPRLVHPRTGRLHTRFNQTATATGRLSSSDPNLQNIPVRTPLGQHIRKAFVAEEGWLLLAADYSQIELRVLAHLSGDENLKRVFREGKDIHTETAAWMFGVDPALVDPKMRRAAKTVNFGVLYGMSAARLSQELGIDYKEAEAFIERYFQSFPKVRAWIERTLEEGRTRGYVETLFGRRRYVPDLTSRVRSVREAAERMAWNMPVQGTAADLMKIAMVKLFPRLKPLGAHLLLQVHDELVLEVPEDRAEEAKALVKEVMENAYPLDVPLEVEVGVGRDWLEAKQD

SEQ ID NO: 799 - DNA, 2538 bp, synthetic construct
  misc_feature 1..2538: note = DNA Polymerase Variant
  source 1..2538: mol_type = other DNA
atgcaccatcatcatcatcatggcggtagcggcatgttaccgctgtttgatttggaagaaccaccaaaacgcgtgctgcttgttgacggccatcatctggcgtatcgtaccttctacgcactgagccttacgacctcacgtggtgagcctgtccagatggtgtatgggtttgctcgctccctgctgaaagccctgaaggaagatggtcaagccgtagtagtggttttcgatgcgaaggcaccgtcgtttcgtcacgaagcgtacgaggcctataaagctggccgcgcaccgaccccggaagactttccgcgtcagttagcgctcgtcaaacgcctcgtggatttgctgggattagttcgcttggaagctcctggctacgaggcggacgacgtgctcggtacactggccaagaaagcagaacgtgaaggcatggaggtctgcattcttaccggtgatcgcgatttcttccagctgctgtctgagaaagtgagcgttttgctgcccgatggcacgttagtaaccccgaaagatgtgcaagagaaatatggagttccgccagaacgttgggtggactttcgcgcactgactggtgatcgttcagacaacatcccgggcgttgccgggattggtgaaaagacggcgctgcgcctgctggcagaatggggctcggtggaaaatctgctcaagaaccttgatcgtgtgaaacctgatagcttacgccgcaagatcgaagcccacctggaagacttgcgtctgagtctggatcttgcacgtattcgcaccgatctgccgttggaagtagactttaaagctctgcgtcgtcgcacacccgatttagaggggttacgcgcgttcctcgaagaactggagctgggctccctgctgcatgaattcggtttgttgggcggagagaaaccgcgtgaagaagcaccatggccgccgcccgagggtgcctttgtcggctttcttctgtcacgcaaagagccaatgtgggcggaactgttagctcttgcagccgccgcggaagggcgtgttcaccgcgcgacctctcctgtcgaggccctcgctgacctcaaagaagcacgtggtttcttggcgaaagatttagccgtgcttgcattacgcgaaggcgttgcgctcgatccgacggacgacccgcttttggtggcttatttgctcgatcatgcgaataccaacccggaacgtgtcgcccgtcgttacggcggcgagtttactgaagatgcggcagaacgcgcgttgcttagcgaacgcctcttccagacgttatttccacgtctttcggagaaattactctggctctatcaggaagtcgaacgtccattgagtcgcgtgcttgcccatatggaggctcgcggtgtgcgcttagatgttccgttgttagaagcactcagcttcgagttggagaaagaactggaacgtcttgaaggcgaagtctttcgtttagcggggcatcccttcaatctcaactctcgcgaccaattggagaaagtgctctttgatgaattaggtttaacccctgtcacgcgtacagagaagaccggcaaacgttccacttcggcagccgccttggaagcacttcgtggtgtgcacccgatcgtcgagttgattttgcagtatcgcgagctcagcaaactcaaatcaacctatcttgataggttacctaagcttgttcatccacgtacgggtcgtttacacacccgcttcaatcaaacggcaacagccaccgggcgcttgtcgtcgagtgacccgaacctccagaatattccagtgcgcacgccgctgggccaacacattcgtaaagcgtttgttgcggaagaaggttggttattacttgcggccgattactcccagatcgaacttcgtgtattggcgcatctctctggcgacgagaatcttaaacgcgtgtttcgcgaaggcaaggatattcacactgaaaccgcagcctggatgttcggggtggacccggccttagtggaccccaagatgcgtcgtgccgccaagaccgtcaactttggcgtactctatggtatgtcagcagcacgtcttagtcaggaattgggcattgactacaaagaagctgaagcgtttatcgagcgctatttccaatcctttccgaaagttcgcgcgtggattgaacgtacgctcgaagaaggtcgcactcgcggctatgtggaaacgttattcgggcgtcgtcgctacgttccagatcttacgtctcgtgtccgctcagtgcgcgaagctgctgagcgtatggcctggaatatgcctgttcagggaacagcggcggacctcatgaagatcgccatggtgaaattgtttccgcgcttgaaacccttaggagcccaccttcttttacaggtgcatgatgaattggtcttggaagtacccgaggatcgcgcagaagaagccaaagcactcgtgaaagaggttatggaaaacgcgtatccgttagatgttccgttggaggtcgaagtgggtgtaggccgtgattggcttgaagcgaaacaagactaatga

SEQ ID NO: 800 - protein, 844 aa, synthetic construct
  REGION 1..844: note = DNA Polymerase Variant
MHHHHHHGGSGMLPLFDLEEPPKRVLLVDGHHLAYRTFYALSLTTSRGEPVQMVYGFARSLLKALKEDGQAVVVVFDAKAPSFRHEAYEAYKAGRAPTPEDFPRQLALVKRLVDLLGLVRLEAPGYEADDVLGTLAKKAEREGMEVCILTGDRDFFQLLSEKVSVLLPDGTLVTPKDVQEKYGVPPERWVDFRALTGDRSDNIPGVAGIGEKTALRLLAEWGSVENLLKNLDRVKPDSLRRKIEAHLEDLRLSLDLARIRTDLPLEVDFKALRRRTPDLEGLRAFLEELELGSLLHEFGLLGGEKPREEAPWPPPEGAFVGFLLSRKEPMWAELLALAAAAEGRVHRATSPVEALADLKEARGFLAKDLAVLALREGVALDPTDDPLLVAYLLDHANTNPERVARRYGGEFTEDAAERALLSERLFQTLFPRLSEKLLWLYQEVERPLSRVLAHMEARGVRLDVPLLEALSFELEKELERLEGEVFRLAGHPFNLNSRDQLEKVLFDELGLTPVTRTEKTGKRSTSAAALEALRGVHPIVELILQYRELSKLKSTYLDRLPKLVHPRTGRLHTRFNQTATATGRLSSSDPNLQNIPVRTPLGQHIRKAFVAEEGWLLLAADYSQIELRVLAHLSGDENLKRVFREGKDIHTETAAWMFGVDPALVDPKMRRAAKTVNFGVLYGMSAARLSQELGIDYKEAEAFIERYFQSFPKVRAWIERTLEEGRTRGYVETLFGRRRYVPDLTSRVRSVREAAERMAWNMPVQGTAADLMKIAMVKLFPRLKPLGAHLLLQVHDELVLEVPEDRAEEAKALVKEVMENAYPLDVPLEVEVGVGRDWLEAKQD

SEQ ID NO: 801 - DNA, 2538 bp, synthetic construct
  misc_feature 1..2538: note = DNA Polymerase Variant
  source 1..2538: mol_type = other DNA
atgcaccatcatcatcatcatggcggtagcggcatgttaccgctgtttgatttggaagaaccaccaaaacgcgtgctgcttgttgacggccatcatctggcgtatcgtaccttctacgcactgagccttacgacctcacgtggtgagcctgtccagatggtgtatgggtttgctcgctccctgctgaaagccctgaaggaagatggtcaagccgtagtagtggttttcgatgcgaaagcaccgtcgtttcgtcacgaagcgtacgaggcctataaagctggccgcgcaccgaccccggaagactttccgcgtcagttagcgctcgtcaaacgcctcgtggatttgctgggattagttcgcttggaagctcctggctacgaggcggacgacgtgctcggtacactggccaagaaagcagaacgtgaaggcatggaggtctgcattcttaccggtgatcgcgatttcttccagctgctgtctgagaaagtgagcgttttgctgcccgatggcacgttagtaaccccgaaagatgtgcaagagaaatatggagttccgccagaacgttgggtggactttcgcgcactgactggtgatcgttcagacaacatcccgggcgttgccgggattggtgaaaagacggcgctgcgcctgctggcagaatggggctcggtggaaaatctgctcaagaaccttgatcgtgtgaaacctgatagcttacgccgcaagatcgaagcccacctggaagacttgcgtctgagtctggatcttgcccgtattcgcaccgatctgccgttggaagtagactttaaagctctgcgtcgtcgcacacccgatttagaggggttacgcgcgttcctcgaagaactggagctgggctccctgctgcatgaattcggtttgttgggcggagagaaaccgcgtgaagaagcaccatggccgccgcccgaaggtgcctttgtcggctttcttctgtcacgcaaagagccaatgtgggcggaactgttagctcttgcagccgccgcggaagggcgtgttcaccgcgcgacctctcctgtcgaggccctcgctgacctcaaagaagcacgtggtttcttggcgaaagatttagccgtgcttgcattacgcgaaggcgttgcgctcgatccgacggacgacccgcttttggtggcttatttgctcgatcatgcgaataccaacccggaacgtgtcgcccgtcgttacggcggcgagtttactgaagatgcggcagaacgcgcgttgcttagcgaacgcctcttccagacgttatttccacgtctttcggagaaattactctggctctatcaggaagtcgaacgtccattgagtcgcgtgcttgcccatatggaggctcgcggtgtgcgcttagatgttccgttgttagaagcactcagcttcgagttggagaaagaactggaacgtcttgaaggcgaagtctttcgtttagcggggcatcccttcaatctcaactctcgcgaccaattggagaaagtgctctttgatgaattaggtttaacccctgtcacgcgtacagagaagaccggcaaacgttccacttcggcagccgccttggaagcacttcgtggtgctcacccgatcgtcgagttgattttgcagtatcgcgagctcagcaaactcaaatcaacctatcttgataggttacctcgtcttgttcatccacgtacgggtcgtttacacacccgcttcaatcaaacggcaacagccaccgggcgcttgtcgtcgagtgacccgaacctccagaatattccagtgcgcacgccgctgggccaacacattcgtaaagcgtttgttgcggaagaaggttggttattacttgcggccgattactcccagatcgaacttcgtgtattggcgcatctctctggcgacgagaatcttaaacgcgtgtttcgcgaaggcaaggatattcacactgaaaccgcagcctggatgttcggggtggacccagccttagtggaccccaagatgcgtcgtgccgccaagaccgtcaactttggcgtactctatggtatgtcagcagcacgtcttagtcaggaattgggcattgactacaaagaagctgaagcgtttatcgagcgctatttccaatcctttccgaaaattcgcgcgtggattgaacgtacgctcgaagaaggtcgcactcgcggctatgtggaaacgttattcgggcgtcgtcgctacgttccagatcttacgtctcgtgtccgctcagtgcgcgaagctgctgagcgtatggcctggaatatgcctgttcagggaacagcggcggacctcatgaagatcgccatggtgaaattgtttccgcgcttgaaacccttaggagcccaccttcttttacaggtgcatgatgaattggtcttggaagtacccgaggatcgcgcagaagaagccaaagcactcgtgaaagaggttatggaaaacgcgtatccgttagatgttccgttggaggtcgaagtgggtgtaggccgtgattggcttgaagcgaaacaagactaatga

SEQ ID NO: 802 - protein, 844 aa, synthetic construct
  REGION 1..844: note = DNA Polymerase Variant
MHHHHHHGGSGMLPLFDLEEPPKRVLLVDGHHLAYRTFYALSLTTSRGEPVQMVYGFARSLLKALKEDGQAVVVVFDAKAPSFRHEAYEAYKAGRAPTPEDFPRQLALVKRLVDLLGLVRLEAPGYEADDVLGTLAKKAEREGMEVCILTGDRDFFQLLSEKVSVLLPDGTLVTPKDVQEKYGVPPERWVDFRALTGDRSDNIPGVAGIGEKTALRLLAEWGSVENLLKNLDRVKPDSLRRKIEAHLEDLRLSLDLARIRTDLPLEVDFKALRRRTPDLEGLRAFLEELELGSLLHEFGLLGGEKPREEAPWPPPEGAFVGFLLSRKEPMWAELLALAAAAEGRVHRATSPVEALADLKEARGFLAKDLAVLALREGVALDPTDDPLLVAYLLDHANTNPERVARRYGGEFTEDAAERALLSERLFQTLFPRLSEKLLWLYQEVERPLSRVLAHMEARGVRLDVPLLEALSFELEKELERLEGEVFRLAGHPFNLNSRDQLEKVLFDELGLTPVTRTEKTGKRSTSAAALEALRGAHPIVELILQYRELSKLKSTYLDRLPRLVHPRTGRLHTRFNQTATATGRLSSSDPNLQNIPVRTPLGQHIRKAFVAEEGWLLLAADYSQIELRVLAHLSGDENLKRVFREGKDIHTETAAWMFGVDPALVDPKMRRAAKTVNFGVLYGMSAARLSQELGIDYKEAEAFIERYFQSFPKIRAWIERTLEEGRTRGYVETLFGRRRYVPDLTSRVRSVREAAERMAWNMPVQGTAADLMKIAMVKLFPRLKPLGAHLLLQVHDELVLEVPEDRAEEAKALVKEVMENAYPLDVPLEVEVGVGRDWLEAKQD

SEQ ID NO: 803 - DNA, 2538 bp, synthetic construct
  misc_feature 1..2538: note = DNA Polymerase Variant
  source 1..2538: mol_type = other DNA
atgcaccatcatcatcatcatggcggtagcggcatgttaccgctgtttgatttggaagaaccaccaaaacgcgtgctgcttgttgacggccatcatctggcgtatcgtaccttctacgcactgagccttacgacctcacgtggtgagcctgtccagatggtgtatgggtttgctcgctccctgctgaaagccctgaaggaagatggtcaagccgtagtagtggttttcgatgcgaaagcaccgtcgtttcgtcacgaagcgtacgaggcctataaagctggccgcgcaccgaccccggaagactttccgcgtcagttagcgctcgtcaaacgcctcgtggatttgctgggattagttcgcttggaagctcctggctacgaggcggacgacgtgctcggtacactggccaagaaagcagaacgtgaaggcatggaggtctgcattcttaccggtgatcgcgatttcttccagctgctgtctgagaaagtgagcgttttgctgcccgatggcacgttagtaaccccgaaagatgtgcaagagaaatatggagttccgccagaacgttgggtggactttcgcgcactgactggtgatcgttcagacaacatcccgggcgttgccgggattggtgaaaagacggcgctgcgcctgctggcagaatggggctcggtggaaaatctgctcaagaaccttgatcatgtgaaacctgatagcttacgccgcaagatcgaagcccacctggaagacttgcgtctgagtctggatcttgcccgtattcgcaccgatctgccgttggaagtagactttaaagctctgcgtcgtcgcacacccgatttagaggggttacgcgcgttcctcgaagaactggagctgggctccctgctgcatgaattcggtttgttgggcggagagaaaccgcgtgaagaagcaccatggccgccgcccgaaggtgcctttgtcggctttcttctgtcacgcaaagagccaatgtgggcggaactgttagctcttgcagccgccgcggaagggcgtgttcaccgcgcgacctctcctgtcgaggccctcgctgacctcaaagaagcacgtggtttcttggcgaaagatttagccgtgcttgcattacgcgaaggcgttgcgctcgatccgacggacgacccgcttttggtggcttatttgctcgatcatgcgaataccaacccggaacgtgtcgcccgtcgttacggcggcgagtttactgaagatgcggcagaacgcgcgttgcttagcgaacgcctcttccagacgttatttccacgtctttcggagaaattactctggctctatcaggaagtcgaacgtccattgagtcgcgtgcttgcccatatggaggctcgcggtgtgcgcttagatgttccgttgttagaagcactcagcttcgagttggagaaagaactggaacgtcttgaaggcgaagtctttcgtttagcggggcatcccttcaatctcaactctcgcgaccaattggagaaagtgctctttgatgaattaggtttaacccctgtcacgcgtacagagaagaccggcaaacgttccacttcggcagccgccttggaagcacttcgtggtgctcacccgatcgtcgagttgattttgcagtatcgcgagctcagcaaactcaaatcaacctatcttgataggttacctcgtcttgttcatccacgtacgggtcgtttacacacccgcttcaatcaaacggcaacagccaccgggcgcttgtcgtcgagtgacccgaacctccagaatattccagtgcgcacgccgctgggccaacacattcgtaaagcgtttgttgcggaagaaggttggttattacttgcggccgattactcccagatcgaacttcgtgtattggcgcatctctctggcgacgagaatcttaaacgcgtgtttcgcgaaggcaaggatattcacactgaaaccgcagcctggatgttcggggtggacccagccttagtggaccccaagatgcgtcgtgccgccaagaccgtcaactttggcgtactctatggtatgtcagcagcacgtcttagtcaggaattgggcattgactacaaagaagctgaagcgtttatcgagcgctatttccaatcctttccgaaagttcgcgcgtggattgaacgtacgctcgaagaaggtcgcactcgcggctatgtggaaacgttattcgggcgtcgtcgctacgttccagatcttacgtctcgtgtccgctcagtgcgcgaagctgctgagcgtatggcctggaatatgcctgttcagggaacagcggcggacctcatgaagatcgccatggtgaaattgtttccgcgcttgaaacccttaggagcccaccttcttttacaggtgcatgatgaattggtcttggaagtacccgaggatcgcgcagaagaagccaaagcactcgtgaaagaggttatggaaaacgcgtatccgttagatgttccgttggaggtcgaagtgggtgtaggccgtgattggcttgaagcgaaacaagactaatga

SEQ ID NO: 804 - protein, 844 aa, synthetic construct
  REGION 1..844: note = DNA Polymerase Variant
MHHHHHHGGSGMLPLFDLEEPPKRVLLVDGHHLAYRTFYALSLTTSRGEPVQMVYGFARSLLKALKEDGQAVVVVFDAKAPSFRHEAYEAYKAGRAPTPEDFPRQLALVKRLVDLLGLVRLEAPGYEADDVLGTLAKKAEREGMEVCILTGDRDFFQLLSEKVSVLLPDGTLVTPKDVQEKYGVPPERWVDFRALTGDRSDNIPGVAGIGEKTALRLLAEWGSVENLLKNLDHVKPDSLRRKIEAHLEDLRLSLDLARIRTDLPLEVDFKALRRRTPDLEGLRAFLEELELGSLLHEFGLLGGEKPREEAPWPPPEGAFVGFLLSRKEPMWAELLALAAAAEGRVHRATSPVEALADLKEARGFLAKDLAVLALREGVALDPTDDPLLVAYLLDHANTNPERVARRYGGEFTEDAAERALLSERLFQTLFPRLSEKLLWLYQEVERPLSRVLAHMEARGVRLDVPLLEALSFELEKELERLEGEVFRLAGHPFNLNSRDQLEKVLFDELGLTPVTRTEKTGKRSTSAAALEALRGAHPIVELILQYRELSKLKSTYLDRLPRLVHPRTGRLHTRFNQTATATGRLSSSDPNLQNIPVRTPLGQHIRKAFVAEEGWLLLAADYSQIELRVLAHLSGDENLKRVFREGKDIHTETAAWMFGVDPALVDPKMRRAAKTVNFGVLYGMSAARLSQELGIDYKEAEAFIERYFQSFPKVRAWIERTLEEGRTRGYVETLFGRRRYVPDLTSRVRSVREAAERMAWNMPVQGTAADLMKIAMVKLFPRLKPLGAHLLLQVHDELVLEVPEDRAEEAKALVKEVMENAYPLDVPLEVEVGVGRDWLEAKQD

SEQ ID NO: 805 - DNA, 2538 bp, synthetic construct
  misc_feature 1..2538: note = DNA Polymerase Variant
  source 1..2538: mol_type = other DNA
atgcaccatcatcatcatcatggcggtagcggcatgttaccgctgtttgatttggaagaaccaccaaaacgcgtgctgcttgttgacggccatcatctggcgtatcgtaccttctacgcactgagccttacgacctcacgtggtgagcctgtccagatggtgtatgggtttgctcgctccctgctgaaagccctgaaggaagatggtcaagccgtagtagtggttttcgatgcgaaagcaccgtcgtttcgtcacgaagcgtacgaggcctataaagctggccgcgcaccgaccccggaagactttccgcgtcagttagcgctcgtcaaacgcctcgtggatttgctgggattagttcgcttggaagctcctggctacgaggcggacgacgtgctcggtacactggccaagaaagcagaacgtgaaggcatggaggtctgcattcttaccggtgatcgcgatttcttccagctgctgtctgagaaagtgagcgttttgctgcccgatggcacgttagtaaccccgaaagatgtgcaagagaaatatggagttccgccagaacgttgggtggactttcgcgcactgactggtgatcgttcagacaacatcccgggcgttgccgggattggtgaaaagacggcgctgcgcctgctggcagaatggggctcggtggaaaatctgctcaagaaccttgatcgtgtgaaacctgatagcttacgccgcaagatcgaagcccacctggaagacttgcgtctgagtctggatcttgcccgtattcgcaccgatctgccgttggaagtagactttaaagctctgcgtcgtcgcacacccgatttagaggggttacgcgcgttcctcgaagaactggagctgggctccctgctgcatgaattcggtttgttgggcggagagaaaccgcgtgaagaagcaccatggccgccgcccgaaggtgcctttgtcggctttcttctgtcacgcaaagagccaatgtgggcggaactgttagctcttgcagccgccgcggaagggcgtgttcaccgcgcgacctctcctgtcgaggccctcgctgacctcaaagaagcacgtggtttcttggcgaaagatttagccgtgcttgcattacgcgaaggcgttgcgctcgatccgacggacgacccgcttttggtggcttatactctcgatcatgcgaataccaacccggaacgtgtcgcccgtcgttacggcggcgagtttactgaagatgcggcagaacgcgcgttgcttagcgaacgcctcttccagacgttatttccacgtctttcggagaaattactctggctctatcaggaagtcgaacgtccattgagtcgcgtgcttgcccatatggaggctcgcggtgtgcgcttagatgttccgttgttagaagcactcagcttcgagttggagaaagaactggaacgtcttgaaggcgaagtctttcgtttagcggggcatcccttcaatctcaactctcgcgaccaattggagaaagtgctctttgatgaattaggtttaacccctgtcacgcgtacagagaagaccggcaaacgttccacttcggcagccgccttggaagcacttcgtggtgctcacccgatcgtcgagttgattttgcagtatcgcgagctcagcaaactcaaatcaacctatcttgataggttacctcgtcttgttcatccacgtacgggtcgtttacacacccgcttcaatcaaacggcaacagccaccgggcgcttgtcgtcgagtgacccgaacctccagaatattccagtgcgcacgccgctgggccaacacattcgtaaagcgtttgttgcggaagaaggttggttattacttgcggccgattactcccagatcgaacttcgtgtattggcgcatctctctggcgacgagaatcttaaacgcgtgtttcgcgaaggcaaggatattcacactgaaaccgcagcctggatgttcggggtggacccagccttagtggaccccaagatgcgtcgtgccgccaagaccgtcaactttggcgtactctatggtatgtcagcagcacgtcttagtcaggaattgggcattgactacaaagaagctgaagcgtttatcgagcgctatttccaatcctttccgaaagttcgcgcgtggattgaacgtacgctcgaagaaggtcgcactcgcggctatgtggaaacgttattcgggcgtcgtcgctacgttccagatctcacgtctcgtgtccgctcagtgcgcgaagctgctgagcgtatggcctggaatatgcctgttcagggaacagcggcggacctcatgaagatcgccatggtgaaattgtttccgcgcttgaaacccttaggagcccaccttcttttacaggtgcatgatgaattggtcttggaagtacccgaggatcgcgcagaagaagccaaagcactcgtgaaagaggttatggaaaacgcgtatccgttagatgttccgttggaggtcgaagtgggtgtaggccgtgattggcttgaagcgaaacaagactaatga

SEQ ID NO: 806 - protein, 844 aa, synthetic construct
  REGION 1..844: note = DNA Polymerase Variant
MHHHHHHGGSGMLPLFDLEEPPKRVLLVDGHHLAYRTFYALSLTTSRGEPVQMVYGFARSLLKALKEDGQAVVVVFDAKAPSFRHEAYEAYKAGRAPTPEDFPRQLALVKRLVDLLGLVRLEAPGYEADDVLGTLAKKAEREGMEVCILTGDRDFFQLLSEKVSVLLPDGTLVTPKDVQEKYGVPPERWVDFRALTGDRSDNIPGVAGIGEKTALRLLAEWGSVENLLKNLDRVKPDSLRRKIEAHLEDLRLSLDLARIRTDLPLEVDFKALRRRTPDLEGLRAFLEELELGSLLHEFGLLGGEKPREEAPWPPPEGAFVGFLLSRKEPMWAELLALAAAAEGRVHRATSPVEALADLKEARGFLAKDLAVLALREGVALDPTDDPLLVAYTLDHANTNPERVARRYGGEFTEDAAERALLSERLFQTLFPRLSEKLLWLYQEVERPLSRVLAHMEARGVRLDVPLLEALSFELEKELERLEGEVFRLAGHPFNLNSRDQLEKVLFDELGLTPVTRTEKTGKRSTSAAALEALRGAHPIVELILQYRELSKLKSTYLDRLPRLVHPRTGRLHTRFNQTATATGRLSSSDPNLQNIPVRTPLGQHIRKAFVAEEGWLLLAADYSQIELRVLAHLSGDENLKRVFREGKDIHTETAAWMFGVDPALVDPKMRRAAKTVNFGVLYGMSAARLSQELGIDYKEAEAFIERYFQSFPKVRAWIERTLEEGRTRGYVETLFGRRRYVPDLTSRVRSVREAAERMAWNMPVQGTAADLMKIAMVKLFPRLKPLGAHLLLQVHDELVLEVPEDRAEEAKALVKEVMENAYPLDVPLEVEVGVGRDWLEAKQD

SEQ ID NO: 807 - DNA, 2538 bp, synthetic construct
  misc_feature 1..2538: note = DNA Polymerase Variant
  source 1..2538: mol_type = other DNA
atgcaccatcatcatcatcatggcggtagcggcatgttaccgctgtttgatttggaagaaccaccaaaacgcgtgctgcttgttgacggccatcatctggcgtatcgtaccttctacgcactgagccttacgacctcacgtggtgagcctgtccagatggtgtatgggtttgctcgctccctgctgaaagccctgaaggaagatggtcaagccgtagtagtggttttcgatgcgaaagcaccgtcgtttcgtcacgaagcgtacgaggcctataaagctggccgcgcaccgaccccggaagactttccgcgtcagttagcgctcgtcaaacgcctcgtggatttgctgggattagttcgcttggaagctcctggctacgaggcggacgacgtgctcggtacactggccaagaaagcagaacgtgaaggcatggaggtctgcattcttaccggtgatcgcgatttcttccagctgctgtctgagaaagtgagcgttttgctgcccgatggcacgttagtaaccccgaaagatgtgcaagagaaatatggagttccgccagaacgttgggtggactttcgcgcactgactggtgatcgttcagacaacatcccgggcgttgccgggattggtgaaaagacggcgctgcgcctgctggcagaatggggctcggtggaaaatctgctcaagaaccttgatcgtgtgaaacctgatagcttacgccgcaagatcgaagcccacctggaagacttgcgtctgagtctggatcttgcccgtattcgcaccgatctgccgttggaagtagactttaaagctctgcgtcgtcgcacacccgatttagaggggttacgcgcgttcctcgaagaactggagctgggctccctgctgcatgaattcggtttgttgggcaccgagaaaccgcgtgaagaagcaccatggccgccgcccgaaggtgcctttgtcggctttcttctgtcacgcaaagagccaatgtgggcggaactgttagctcttgcagccgccgcggaagggcgtgttcaccgcgcgacctctcctgtcgaggccctcgctgacctcaaagaagcacgtggtttcttggcgaaagatttagccgtgcttgcattacgcgaaggcgttgcgctcgatccgacggacgacccgcttttggtggcttatttgctcgatcatgcgaataccaacccggaacgtgtcgcccgtcgttacggcggcgagtttactgaagatgcggcagaacgcgcgttgcttagcgaacgcctcttccagacgttatttccacgtctttcggagaaattactctggctctatcaggaagtcgaacgtccattgagtcgcgtgcttgcccatatggaggctcgcggtgtgcgcttagatgttccgttgttagaagcactcagcttcgagttggagaaagaactggaacgtcttgaaggcgaagtctttcgtttagcggggcatcccttcaatctcaactctcgcgaccaattggagaaagtgctctttgatgaattaggtttaacccctgtcacgcgtacagagaagaccggcaaacgttccacttcggcagccgccttggaagcacttcgtggtgctcacccgatcgtcgagttgattttgcagtatcgcgagctcagcaaactcaaatcaacctatcttgataggttacctcgtcttgttcatccacgtacgggtcgtttacacacccgcttcaatcaaacggcaacagccaccgggcgcttgtcgtcgagtgacccgaacctccagaatattccagtgcgcacgccgctgggccaacacattcgtaaagcgtttgttgcggaacatggttggttattacttgcggccgattactcccagatcgaacttcgtgtattggcgcatctctctggcgacgagaatcttaaacgcgtgtttcgcgaaggcaaggatattcacactgaaaccgcagcctggatgttcggggtggacccagccttagtggaccccaagatgcgtcgtgccgccaagaccgtcaactttggcgtactctatggtatgtcagcagcacgtcttagtcaggaattgggcattgactacaaagaagctgaagcgtttatcgagcgctatttccaatcctttccgaaagttcgcgcgtggattgaacgtacgctcgaagaaggtcgcactcgcggctatgtggaaacgttattcgggcgtcgtcgctacgttccagatcttacgtctcgtgtccgctcagtgcgcgaagctgctgagcgtatggcctggaatatgcctgttcagggaacagcggcggacctcatgaagatcgccatggtgaaattgtttccgcgcttgaaacccttaggagcccaccttcttttacaggtgcatgatgaattggtcttggaagtacccgaggatcgcgcagaagaagccaaagcactcgtgaaagaggttatggaaaacgcgtatccgttagatgttccgttggaggtcgaagtgggtgtaggccgtgattggcttgaagcgaaacaagactaatga

SEQ ID NO: 808 - protein, 844 aa, synthetic construct
  REGION 1..844: note = DNA Polymerase Variant
MHHHHHHGGSGMLPLFDLEEPPKRVLLVDGHHLAYRTFYALSLTTSRGEPVQMVYGFARSLLKALKEDGQAVVVVFDAKAPSFRHEAYEAYKAGRAPTPEDFPRQLALVKRLVDLLGLVRLEAPGYEADDVLGTLAKKAEREGMEVCILTGDRDFFQLLSEKVSVLLPDGTLVTPKDVQEKYGVPPERWVDFRALTGDRSDNIPGVAGIGEKTALRLLAEWGSVENLLKNLDRVKPDSLRRKIEAHLEDLRLSLDLARIRTDLPLEVDFKALRRRTPDLEGLRAFLEELELGSLLHEFGLLGTEKPREEAPWPPPEGAFVGFLLSRKEPMWAELLALAAAAEGRVHRATSPVEALADLKEARGFLAKDLAVLALREGVALDPTDDPLLVAYLLDHANTNPERVARRYGGEFTEDAAERALLSERLFQTLFPRLSEKLLWLYQEVERPLSRVLAHMEARGVRLDVPLLEALSFELEKELERLEGEVFRLAGHPFNLNSRDQLEKVLFDELGLTPVTRTEKTGKRSTSAAALEALRGAHPIVELILQYRELSKLKSTYLDRLPRLVHPRTGRLHTRFNQTATATGRLSSSDPNLQNIPVRTPLGQHIRKAFVAEHGWLLLAADYSQIELRVLAHLSGDENLKRVFREGKDIHTETAAWMFGVDPALVDPKMRRAAKTVNFGVLYGMSAARLSQELGIDYKEAEAFIERYFQSFPKVRAWIERTLEEGRTRGYVETLFGRRRYVPDLTSRVRSVREAAERMAWNMPVQGTAADLMKIAMVKLFPRLKPLGAHLLLQVHDELVLEVPEDRAEEAKALVKEVMENAYPLDVPLEVEVGVGRDWLEAKQD

SEQ ID NO: 809 - DNA, 2538 bp, synthetic construct
  misc_feature 1..2538: note = DNA Polymerase Variant
  source 1..2538: mol_type = other DNA
atgcaccatcatcatcatcatggcggtagcggcatgttaccgctgtttgatttggaagaaccaccaaaacgcgtgctgcttgttgacggccatcatctggcgtatcgtaccttctacgcactgagccttacgacctcacgtggtgagcctgtccagatggtgtatgggtttgctcgctccctgctgaaagccctgaaggaagatggtcaagccgtagtagtggttttcgatgcgaaagcaccgtcgtttcgtcacgaagcgtacgaggcctataaagctggccgcgcaccgaccccggaagactttccgcgtcagttagcgctcgtcaaacgcctcgtggatttgctgggattagttcgcttggaagctcctggctacgaggcggacgacgtgctcggtacactggccaagaaagcagaacgtgaaggcatggaggtctgcattcttaccggtgatcgcgatttcttccagctgctgtctgagaaagtgagcgttttgctgcccgatggcacgttagtaaccccgaaagatgtgcaagagaaatatggagttccgccagaacgttgggtggactttcgcgcactgactggtgatcgttcagacaacatcccgggcgttgccgggattggtgaaaagacggcgctgcgcctgctggcagaatggggctcggtggaaaatctgctcaagaaccttgatcgtgtgaaacctgatagcttacgccgcaagatcgaagcccacctggaagacttgcgtctgagtctggatcttgcccgtattcgcaccgatctgccgttggaagtagactttaaagctctgcgtcgtcgcacacccgatttagaggggttacgcgcgttcctcgaagaactggagctgggctccctgctgcatgaattcggtttgttgggcggagagaaaccgcgtgaagaagcaccatggccgccgcccgaaggtgcctttgtcggctttcttctgtcacgcaaagagccaatgtgggcggaactgttagctcttgcagccgccgcggaagggcgtgttcaccgcgcgacctctcctgtcgaggccctcgctgacctcaaagaagcacgtggtttcttggcgaaagatttagccgtgcttgcattacgcgaaggcgttgcgctcgatccgacggacgacccgcttttggtggcttatttgctcgatcatgcgaataccaacccggaacgtgtcgcccgtcgttacggcggcgagtttactgaagatgcggcagaacgcgcgttgcttagcgaacgcctcttccagacgttatttccacgtctttcggagaaattactctggctctatcaggaagtcgaacgtccattgagtcgcgtgcttgcccatatggaggctcgcggtgtgcgcttagatgttccgttgttagaagcactcagcttcgagttggagaaagaactggaacgtcttgaaggcgaagtctttcgtttagcggggcatcccttcaatctcaactctcgcgaccaattggagaaagtgctctttgatgaattaggtttaacccctgtcacgcgtacagagaagaccggcaaacgttccacttcggcagccgccttggaagcacttcgtggtgctcacccgatcgtcgagttgattttgcagtatcgcgagctcagcaaactcaaatcaacctatcttgataggttacctcgtcttgttcatccacgtacgggtcgtttacacacccgcttcaatcaaacggcaacagccaccgggcgcttgtcgtcgagtgacccgaacctccagaatattccagtgcgcacgccgctgggccaacacattcgtaaagcgtttgttgcggaagaaggttggttattacttgcggccgattactcccagatcgaacttcgtgtattggcgcatctctctggcgacgagaatcttaaacgcgtgtttcgcgaaggcaaggatattcacactgaaaccgcagcctggatgttcggggtggacccagccttagtggaccccaagatgcgtcgtgccgccaagaccgtcaactttggcgtactctatggtatgtcagcagcacgtcttagtcaggaattgggcattgacgctaaagaagctgaagcgtttatcgagcgctatttccaatcctttccgaaagttcgcgcgtggattgaacgtacgctcgaagaaggtcgcactcgcggctatgtggaaacgttattcgggcgtcgtcgctacgttccagatcttacgtctcgtgtccgctcagtgcgcgaagctgctgagcgtatggcctggaatatgcctgttcagggaacagcggcggacctcatgaagatcgccatggtgaaattgtttccgcgcttgaaacccttaggagcccaccttcttttacaggtgcatgatgaattggtcttggaagtacccgaggatcgcgcagaagaagccaaagcactcgtgaaagaggttatggaaaacgcgtatccgttagatgttccgttggaggtcgaagtgggtgtaggccgtgattggcttgaagcgaaacaagactaatga

SEQ ID NO: 810 - protein, 844 aa, synthetic construct
  REGION 1..844: note = DNA Polymerase Variant
MHHHHHHGGSGMLPLFDLEEPPKRVLLVDGHHLAYRTFYALSLTTSRGEPVQMVYGFARSLLKALKEDGQAVVVVFDAKAPSFRHEAYEAYKAGRAPTPEDFPRQLALVKRLVDLLGLVRLEAPGYEADDVLGTLAKKAEREGMEVCILTGDRDFFQLLSEKVSVLLPDGTLVTPKDVQEKYGVPPERWVDFRALTGDRSDNIPGVAGIGEKTALRLLAEWGSVENLLKNLDRVKPDSLRRKIEAHLEDLRLSLDLARIRTDLPLEVDFKALRRRTPDLEGLRAFLEELELGSLLHEFGLLGGEKPREEAPWPPPEGAFVGFLLSRKEPMWAELLALAAAAEGRVHRATSPVEALADLKEARGFLAKDLAVLALREGVALDPTDDPLLVAYLLDHANTNPERVARRYGGEFTEDAAERALLSERLFQTLFPRLSEKLLWLYQEVERPLSRVLAHMEARGVRLDVPLLEALSFELEKELERLEGEVFRLAGHPFNLNSRDQLEKVLFDELGLTPVTRTEKTGKRSTSAAALEALRGAHPIVELILQYRELSKLKSTYLDRLPRLVHPRTGRLHTRFNQTATATGRLSSSDPNLQNIPVRTPLGQHIRKAFVAEEGWLLLAADYSQIELRVLAHLSGDENLKRVFREGKDIHTETAAWMFGVDPALVDPKMRRAAKTVNFGVLYGMSAARLSQELGIDAKEAEAFIERYFQSFPKVRAWIERTLEEGRTRGYVETLFGRRRYVPDLTSRVRSVREAAERMAWNMPVQGTAADLMKIAMVKLFPRLKPLGAHLLLQVHDELVLEVPEDRAEEAKALVKEVMENAYPLDVPLEVEVGVGRDWLEAKQD

SEQ ID NO: 811 - DNA, 2538 bp, synthetic construct
  misc_feature 1..2538: note = DNA Polymerase Variant
  source 1..2538: mol_type = other DNA
atgcaccatcatcatcatcatggcggtagcggcatgttaccgctgtttgatttggaagaaccaccaaaacgcgtgctgcttgttgacggccatcatctggcgtatcgtaccttctacgcactgagccttacgacctcacgtggtgagcctgtccagatggtgtatgggtttgctcgctccctgctgaaagccctgaaggaagatggtcaagccgtagtagtggttttcgatgcgaaagcaccgtcgtttcgtcacgaagcgtacgaggcctataaagctggccgcgcaccgaccccggaagactttccgcgtcagttagcgctcgtcaaacgcctcgtggatttgctgggattagttcgcttggaagctcctggctacgaggcggacgacgtgctcggtacactggccaagaaagcagaacgtgaaggcatggaggtctgcattcttaccggtgatcgcgatttcttccagctgctgtctgagaaagtgagcgttttgctgcccgatggcacgttagtaaccccgaaagatgtgcaagagaaatatggagttccgccagaacgttgggtggactttcgcgcactgactggtgatcgttcagacaacatcccgggcgttgccgggattggtgaaaagacggcgctgcgcctgctggcagaatggggctcggtggaaaatctgctcaagaaccttgatcgtgtgaaacctgatagcttacgccgcaagatcgaagcccacctggaagacttgcgtctgagtctggatcttgcccgtattcgcaccgatctgccgttggaagtagactttaaagctctgcgtcgtcgcacacccgatttagaggggttacgcgcgttcctcgaagaactggagctgggctccctgctgcatgaattcggtttgttgggcggagagaaaccgcgtgaagaagcaccatggccgccgcccgaaggtgcctttgtcggctttcttctgtcacgcaaagagccaatgtgggcggaactgttagctcttgcagccgccgcggaagggcgtgttcaccgcgcgacctctcctgtcgaggccctcgctgacctcaaagaagcacgtggtttcttggcgaaagatttagccgtgcttgcattacgcgaaggcttggcgctcgatccgacggacgacccgcttttggtggcttatttgctcgatcatgcgaataccaacccggaacgtgtcgcccgtcgttacggcggcgagtttactgaagatgcggcagaacgcgcgttgcttagcgaacgcctcttccagacgttatttccacgtctttcggagaaattactctggctctatcaggaagtcgaacgtccattgagtcgcgtgcttgcccatatggaggctcgcggtgtgcgcttagatgttccgttgttagaagcactcagcttcgagttggagaaagaactggaacgtcttgaaggcgaagtctttcgtttagcggggcatcccttcaatctcaactctcgcgaccaattggagaaagtgctctttgatgaattaggtttaacccctgtcacgcgtacagagaagaccggcaaacgttccacttcggcagccgccttggaagcacttcgtggtgctcacccgatcgtcgagttgattttgcagtatcgcgagctcagcaaactcaaatcaacctatcttgataggttacctcgtcttgttcatccacgtacgggtcgtttacacacccgcttcaatcaaacggcaacagccaccgggcgcttgtcgtcgagtgacccgaacctccagaatattccagtgcgcacgccgctgggccaacacattcgtaaagcgtttgttgcggaagaaggttggttattacttgcggccgattactcccagatcgaacttcgtgtattggcgcatctctctggcgacgagaatcttaaacgcgtgtttcgcgaaggcaaggatattcacactgaaaccgcagcctggatgttcggggtggacccagccttagtggaccccaagatgcgtcgtgccgccaagaccgtcaactttggcgtactctatggtatgtcagcagcacgtcttagtcaggaattgggcattgactacaaagaagctgaagcgtttatcgagcgctatttccaatcctttccgaaagttcgcgcgtggattgaacgtacgctcgaagaaggtcgcactcgcggctatgtggaaacgttattcgggcgtcgtcgctacgttccagatcttacgtctcgtgtccgctcagtgcgcgaagctgctgagcgtatggcctggaatatgcctgttcagggaacagcggcggacctcatgaagatcgccatggtgaaattgtttccgcgcttgaaacccttaggagcccaccttcttttacaggtgcatgatgaattggtcttggaagtacccgaggatcgcgcagaagaagccaaagcactcgtgaaagaggttatggaaaacgcgtatccgttagatgttccgttggaggtcgaagtgggtgtaggccgtgattggcttgaagcgaaacaagactaatga

SEQ ID NO: 812 - protein, 844 aa, synthetic construct
  REGION 1..844: note = DNA Polymerase Variant
MHHHHHHGGSGMLPLFDLEEPPKRVLLVDGHHLAYRTFYALSLTTSRGEPVQMVYGFARSLLKALKEDGQAVVVVFDAKAPSFRHEAYEAYKAGRAPTPEDFPRQLALVKRLVDLLGLVRLEAPGYEADDVLGTLAKKAEREGMEVCILTGDRDFFQLLSEKVSVLLPDGTLVTPKDVQEKYGVPPERWVDFRALTGDRSDNIPGVAGIGEKTALRLLAEWGSVENLLKNLDRVKPDSLRRKIEAHLEDLRLSLDLARIRTDLPLEVDFKALRRRTPDLEGLRAFLEELELGSLLHEFGLLGGEKPREEAPWPPPEGAFVGFLLSRKEPMWAELLALAAAAEGRVHRATSPVEALADLKEARGFLAKDLAVLALREGLALDPTDDPLLVAYLLDHANTNPERVARRYGGEFTEDAAERALLSERLFQTLFPRLSEKLLWLYQEVERPLSRVLAHMEARGVRLDVPLLEALSFELEKELERLEGEVFRLAGHPFNLNSRDQLEKVLFDELGLTPVTRTEKTGKRSTSAAALEALRGAHPIVELILQYRELSKLKSTYLDRLPRLVHPRTGRLHTRFNQTATATGRLSSSDPNLQNIPVRTPLGQHIRKAFVAEEGWLLLAADYSQIELRVLAHLSGDENLKRVFREGKDIHTETAAWMFGVDPALVDPKMRRAAKTVNFGVLYGMSAARLSQELGIDYKEAEAFIERYFQSFPKVRAWIERTLEEGRTRGYVETLFGRRRYVPDLTSRVRSVREAAERMAWNMPVQGTAADLMKIAMVKLFPRLKPLGAHLLLQVHDELVLEVPEDRAEEAKALVKEVMENAYPLDVPLEVEVGVGRDWLEAKQD

SEQ ID NO: 813 - DNA, 2538 bp, synthetic construct
  misc_feature 1..2538: note = DNA Polymerase Variant
  source 1..2538: mol_type = other DNA
atgcaccatcatcatcatcatggcggtagcggcatgttaccgctgtttgatttggaagaaccaccaaaacgcgtgctgcttgttgacggccatcatctggcgtatcgtaccttctacgcactgagccttacgacctcacgtggtgagcctgtccagatggtgtatgggtttgctcgctccctgctgaaagccctgaaggaagatggtcaagccgtagtagtggttttcgatgcgaaagcaccgtcgtttcgtcacgaagcgtacgaggcctataaagctggccgcgcaccgaccccggaagactttccgcgtcagttagcgctcgtcaaacgcctcgtggatttgctgggattagttcgcttggaagctcctggctacgaggcggacgacgtgctcggtacactggccaagaaagcagaacgtgaaggcatggaggtctgcattcttaccggtgatcgcgatttcttccagctgctgtctgagaaagtgagcgttttgctgcccgatggcacgttagtaaccccgaaagatgtgcaagagaaatatggagttccgccagaacgttgggtggactttcgcgcactgactggtgatcgttcagacaacatcccgggcgttgccgggattggtgaaaagacggcgctgcgcctgctggcagaatggggctcggtggaaaatctgctcaagaaccttgatcgtgtgaaacctgatagcttacgccgcaagatcgaagcccacctggaagacttgcgtctgagtctggatcttgcccgtattcgcaccgatctgccgttggaagtagactttaaagctctgcgtcgtcgcacacccgatttagaggggttacgcgcgttcctcgaagaactggagctgggctccctgctgcatgaattcggtttgttgggcggagagaaaccgcgtgaagaagcaccatggccgccgcccgaaggtgcctttgtcggctttcttctgtcacgcaaagagccaatgtgggcggaactgttagctcttgcagccgccgcggaagggcgtgttcaccgcgcgacctctcctgtcgaggccctcgctgacctcaaagaagcacgtggtttcttggcgaaagatttagccgtgcttgcattacgcgaaggcgttgcgctcgatccgacggacgacccgcttttggtggcttatttgctcgatcatgcgaataccaacccggaacgtgtcgcccgtcgttacggcggcgagtttactgaagatgcggcagaacgcgcgttgcttagcgaacgcctcttccatacgttatttccacgtctttcggagaaattactctggctctatcaggaagtcgaacgtccattgagtcgcgtgcttgcccatatggaggctcgcggtgtgcgcttagatgttccgttgttagaagcactcagcttcgagttggagaaagaactggaacgtcttgaaggcgaagtctttcgtttagcggggcatcccttcaatctcaactctcgcgaccaattggagaaagtgctctttgatgaattaggtttaacccctgtcacgcgtacagagaagaccggcaaacgttccacttcggcagccgccttggaagcacttcgtggtgctcacccgatcgtcgagttgattttgcagtatcgcgagctcagcaaactcaaatcaacctatcttgataggttacctcgtcttgttcatccacgtacgggtcgtttacacacccgcttcaatcaaacggcaacagccaccgggcgcttgtcgtcgagtgacccgaacctccagaatattccagtgcgcacgccgctgggccaacacattcgtaaagcgtttgttgcggaagaaggttggttattacttgcggccgattactcccagatcgaacttcgtgtattggcgcatctctctggcgacgagaatcttaaacgcgtgtttcgcgaaggcaaggatattcacactgaaaccgcagcctggatgttcggggtggacccagccttagtggaccccaagatgcgtcgtgccgccaagaccgtcaactttggcgtactctatggtatgtcagcagcacgtcttagtcaggaattgggcattgactacaaagaagctgaagcgtttatcgagcgctatttccaatcctttccgaaagttcgcgcgtggattgaacgtacgctcgaagaaggtcgcactcgcggctatgtggaaacgttattcgggcgtcgtcgctacgttccagatcttacgtctcgtgtccgctcagtgcgcgaagctgctgagcgtatggcctggaatatgcctgttcagggaacagcggcggacctcatgaagatcgccatggtgaaattgtttccgcgcttgaaacccttaggagcccaccttcttttacaggtgcatgatgaattggtcttggaagtacccgaggatcgcgcagaagaagccaaagcactcgtgaaagaggttatggaaaacgcgtatccgttagatgttccgttggaggtcgaagtgggtgtaggccgtgattggcttgaagcgaaacaagactaatga

SEQ ID NO: 814 - protein, 844 aa, synthetic construct
  REGION 1..844: note = DNA Polymerase Variant
MHHHHHHGGSGMLPLFDLEEPPKRVLLVDGHHLAYRTFYALSLTTSRGEPVQMVYGFARSLLKALKEDGQAVVVVFDAKAPSFRHEAYEAYKAGRAPTPEDFPRQLALVKRLVDLLGLVRLEAPGYEADDVLGTLAKKAEREGMEVCILTGDRDFFQLLSEKVSVLLPDGTLVTPKDVQEKYGVPPERWVDFRALTGDRSDNIPGVAGIGEKTALRLLAEWGSVENLLKNLDRVKPDSLRRKIEAHLEDLRLSLDLARIRTDLPLEVDFKALRRRTPDLEGLRAFLEELELGSLLHEFGLLGGEKPREEAPWPPPEGAFVGFLLSRKEPMWAELLALAAAAEGRVHRATSPVEALADLKEARGFLAKDLAVLALREGVALDPTDDPLLVAYLLDHANTNPERVARRYGGEFTEDAAERALLSERLFHTLFPRLSEKLLWLYQEVERPLSRVLAHMEARGVRLDVPLLEALSFELEKELERLEGEVFRLAGHPFNLNSRDQLEKVLFDELGLTPVTRTEKTGKRSTSAAALEALRGAHPIVELILQYRELSKLKSTYLDRLPRLVHPRTGRLHTRFNQTATATGRLSSSDPNLQNIPVRTPLGQHIRKAFVAEEGWLLLAADYSQIELRVLAHLSGDENLKRVFREGKDIHTETAAWMFGVDPALVDPKMRRAAKTVNFGVLYGMSAARLSQELGIDYKEAEAFIERYFQSFPKVRAWIERTLEEGRTRGYVETLFGRRRYVPDLTSRVRSVREAAERMAWNMPVQGTAADLMKIAMVKLFPRLKPLGAHLLLQVHDELVLEVPEDRAEEAKALVKEVMENAYPLDVPLEVEVGVGRDWLEAKQD

SEQ ID NO: 815 - DNA, 2538 bp, synthetic construct
  misc_feature 1..2538: note = DNA Polymerase Variant
  source 1..2538: mol_type = other DNA
atgcaccatcatcatcatcatggcggtagcggcatgttaccgctgtttgatttggaagaagcaccaaaacgcgtgctgcttgttgacggccatcatctggcgtatcgtaccttctacgcactgagccttacgacctcacgtggtgagcctgtccagatggtgtatgggtttgctcgctccctgctgaaagccctgaaggaagatggtcaagccgtagtagtggttttcgatgcggctgcaccgtcgtttcgtcacgaagcgtacgaggcctataaagctggccgcgcaccgaccccggaagactttccgcgtcagttagcgctcgtcaaacgcctcgtggatttgctgggattagttcgcttggaagctcctggctacgaggcggacgacgtgctcggtacactggccaagaaagcagaacgtgaaggcatggaggtctgcattcttaccggtgatcgcgatttcttccagctgctgtctgagaaagtgagcgttttgctgcccgatggcacgttagtaaccccgaaagatgtgcaagagaaatatggagttccgccagaacgttgggtggactttcgcgcactgactggtgatcgttcagacaacatcccgggcgttgccgggattggtgaaaagacggcgctgcgcctgctggcagaatggggctcggtggaaaatctgctcaagaaccttgatcgtgtgaaacctgatagcttacgccgcaagatcgaagcccacctggaagacttgcgtctgagtctggatcttgcccgtattcgcaccgatctgccgttggaagtagactttaaagctctgcgtcgtcgcacacccgatttagaggggttacgcgcgttcctcgaagaactggagctgggctccctgctgcatgaattcggtttgttgggcaccgagaaaccgcgtgaagaagcaccatggccgccgcccgaaggtgcctttgtcggctttcttctgtcacgcaaagagccaatgtgggcggaactgttagctcttgcagccgccgcggaagggcgtgttcaccgcgcgacctctcctgtcgaggccctcgctgacctcaaagaagcacgtggtttcttggcgaaagatttagccgtgcttgcattacgcgaaggcgttgcgctcgatccgacggacgacccgcttttggtggcttatttgctcgatcatgcgaataccaacccggaacgtgtcgcccgtcgttacggcggcgagtttactgaagatgcggcagaacgcgcgttgcttagcgaacgcctcttccagacgttatttccacgtctttcggagaaattactctggctctatcaggaagtcgaacgtccattgagtcgcgtgcttgcccatatggaggctcgcggtgtgcgcttagatgttccgttgttagaagcactcagcttcgagttggagaaagaactggaacgtcttgaaggcgaagtctttcgtttagcggggcatcccttcaatctcaactctcgcgaccaattggagaaagtgctctttgatgaattaggtttaacccctgtcacgcgtacagagaagaccggcaaacgttccacttcggcagccgccttggaagcacttcgtggtgctcacccgatcgtcgagttgattttgcagtatcgcgagctcagcaaactcaaatcaacctatcttgataggttacctaagcttgttcatccacgtacgggtcgtttacacacccgcttcaatcaaacggcaacagccaccgggcgcttgtcgtcgagtgacccgaacctccagaatattccagtgcgcacgccgctgggccaacacattcgtaaagcgtttgttgcggaacatggttggttattacttgcggccgattactcccagatcgaacttcgtgtattggcgcatctctctggcgacgagaatcttaaacgcgtgtttcgcgaaggcaaggatattcacactgaaaccgcagcctggatgttcggggtggacccagccttagtggaccccaagatgcgtcgtgccgccaagaccgtcaactttggcgtactctatggtatgtcagcagcacgtcttagtcaggaattgggcattgactacaaagaagctgaagcgtttatcgagcgctatttccaatcctttccgaaagttcgcgcgtggattgaacgtacgctcgaagaaggtcgcactcgcggctatgtggaaacgttattcgggcgtcgtcgctacgttccagatcttacgtctcgtgtccgctcagtgcgcgaagctgctgagcgtatggcctggaatatgcctgttcagggaacagcggcggacctcatgaagatcgccatggtgaaattgtttccgcgcttgaaacccttaggagcccaccttcttttacaggtgcatgatgaattggtcttggaagtacccgaggatcgcgcagaagaagccaaagcactcgtgaaagaggttatggaaaacgcgtatccgttagatgttccgttggaggtcgaagtgggtgtaggccgtgattggcttgaagcgaaacaagactaatga

SEQ ID NO: 816 - protein, 844 aa, synthetic construct
  REGION 1..844: note = DNA Polymerase Variant
MHHHHHHGGSGMLPLFDLEEAPKRVLLVDGHHLAYRTFYALSLTTSRGEPVQMVYGFARSLLKALKEDGQAVVVVFDAAAPSFRHEAYEAYKAGRAPTPEDFPRQLALVKRLVDLLGLVRLEAPGYEADDVLGTLAKKAEREGMEVCILTGDRDFFQLLSEKVSVLLPDGTLVTPKDVQEKYGVPPERWVDFRALTGDRSDNIPGVAGIGEKTALRLLAEWGSVENLLKNLDRVKPDSLRRKIEAHLEDLRLSLDLARIRTDLPLEVDFKALRRRTPDLEGLRAFLEELELGSLLHEFGLLGTEKPREEAPWPPPEGAFVGFLLSRKEPMWAELLALAAAAEGRVHRATSPVEALADLKEARGFLAKDLAVLALREGVALDPTDDPLLVAYLLDHANTNPERVARRYGGEFTEDAAERALLSERLFQTLFPRLSEKLLWLYQEVERPLSRVLAHMEARGVRLDVPLLEALSFELEKELERLEGEVFRLAGHPFNLNSRDQLEKVLFDELGLTPVTRTEKTGKRSTSAAALEALRGAHPIVELILQYRELSKLKSTYLDRLPKLVHPRTGRLHTRFNQTATATGRLSSSDPNLQNIPVRTPLGQHIRKAFVAEHGWLLLAADYSQIELRVLAHLSGDENLKRVFREGKDIHTETAAWMFGVDPALVDPKMRRAAKTVNFGVLYGMSAARLSQELGIDYKEAEAFIERYFQSFPKVRAWIERTLEEGRTRGYVETLFGRRRYVPDLTSRVRSVREAAERMAWNMPVQGTAADLMKIAMVKLFPRLKPLGAHLLLQVHDELVLEVPEDRAEEAKALVKEVMENAYPLDVPLEVEVGVGRDWLEAKQD

SEQ ID NO: 817 - DNA, 2538 bp, synthetic construct
  misc_feature 1..2538: note = DNA Polymerase Variant
  source 1..2538: mol_type = other DNA
atgcaccatcatcatcatcatggcggtagcggcatgttaccgctgtttgatttggaagaaccaccaaaacgcgtgctgcttgttgacggccatcatctggcgtatcgtaccttctacgcactgagccttacgacctcacgtggtgagcctgtccagatggtgtatgggtttgctcgctccctgctgaaagccctgaaggaagatggtcaagccgtagtagtggttttcgatgcgaaagcaccgtcgtttcgtcacgaagcgtacgaggcctataaagctggccgcgcaccgaccccggaagactttccgcgtcagttagcgctcgtcaaacgcctcgtggatttgctgggattagttcgcttggaagctcctggctacgaggcggacgacgtgctcggtacactggccaagaaagcagaacgtgaaggcatggaggtctgcattcttaccggtgatcgcgatttcttccagctgctgtctgagaaagtgagcgttttgctgcccgatggcacgttagtaaccccgaaagatgtgcaagagaaatatggagttccgccagaacgttgggtggactttcgcgcactgactggtgatcgttcagacaacatcccgggcgttgccgggattggtgaaaagacggcgctgcgcctgctggcagaatggggctcggtggaaaatctgctcaagaaccttgatcgtgtgaaacctgatagcttacgccgcaagatcgaagcccacctggaagacttgcgtctgagtctggatcttgcccgtattcgcaccgatctgccgttggaagtagactttaaagctctgcgtcgtcgcacacccgatttagaggggttacgcgcgttcctcgaagaactggagctgggctccctgctgcatgaattcggtttgttgggcggagagaaaccgcgtgaagaagcaccatggccgccgcccgaaggtgcctttgtcggctttcttctgtcacgcaaagagccaatgtgggcggaactgttagctcttgcagccgccgcggaagggcgtgttcaccgcgcgacctctcctgtcgaggccctcgctgacctcaaagaagcacgtggtttcttggcgaaagatttaagtgtgcttgcattacgcgaaggcgttgcgctcgatccgacggacgacccgcttttggtggcttatttgctcgatcatgcgaataccaacccggaacgtgtcgcccgtcgttacggcggcgagtttactgaagatgcggcagaacgcgcgttgcttagcgaacgcctcttccagacgttatttccacgtctttcggagaaattactctggctctatcaggaagtcgaacgtccattgagtcgcgtgcttgcccatatggaggctcgcggtgtgcgcttagatgttccgttgttagaagcactcagcttcgagttggagaaagaactggaacgtcttgaaggcgaagtctttcgtttagcggggcatcccttcaatctcaactctcgcgaccaattggagaaagtgctctttgatgaattaggtttaacccctgtcacgcgtacagagaagaccggcaaacgttccacttcggcagccgccttggaagcacttcgtggtgctcacccgatcgtcgagttgattttgcagtatcgcgagctcagcaaactcaaatcaacctatcttgataggttacctcgtcttgttcatccacgtacgggtcgtttacacacccgcttcaatcaaacggcaacagccaccgggcgcttgtcgtcgagtgacccgaacctccagaatattccagtgcgcacgccgctgggccaacacattcgtaaagcgtttgttgcggaagaaggttggttattacttgcggccgattactcccagatcgaacttcgtgtattggcgcatctctctggcgacgagaatcttaaacgcgtgtttcgcgaaggcaaggatattcacactgaaaccgcagcctggatgttcggggtggacccagccttagtggaccccaagatgcgtcgtgccgccaagaccgtcaactttggcgtactctatggtatgtcagcagcacgtcttagtcaggaattgggcattgactacaaagaagctgaagcgtttatcgagcgctatttccaatcctttccgaaagttcgcgcgtggattgaacgtacgctcgaagaaggtcgcactcgcggctatgtggaaacgttattcgggcgtcgtcgctacgttccagatcttacgtctcgtgtccgctcagtgcgcgaagctgctgagcgtatggcctggaatatgcctgttcagggaacagcggcggacctcatgaagatcgccatggtgaaattgtttccgcgcttgaaacccttaggagcccaccttcttttacaggtgcatgatgaattggtcttggaagtacccgaggatcgcgcagaagaagccaaagcactcgtgaaagaggttatggaaaacgcgtatccgttagatgttccgttggaggtcgaagtgggtgtaggccgtgattggcttgaagcgaaacaagactaatga

SEQ ID NO: 818 - protein, 844 aa, synthetic construct
  REGION 1..844: note = DNA Polymerase Variant
MHHHHHHGGSGMLPLFDLEEPPKRVLLVDGHHLAYRTFYALSLTTSRGEPVQMVYGFARSLLKALKEDGQAVVVVFDAKAPSFRHEAYEAYKAGRAPTPEDFPRQLALVKRLVDLLGLVRLEAPGYEADDVLGTLAKKAEREGMEVCILTGDRDFFQLLSEKVSVLLPDGTLVTPKDVQEKYGVPPERWVDFRALTGDRSDNIPGVAGIGEKTALRLLAEWGSVENLLKNLDRVKPDSLRRKIEAHLEDLRLSLDLARIRTDLPLEVDFKALRRRTPDLEGLRAFLEELELGSLLHEFGLLGGEKPREEAPWPPPEGAFVGFLLSRKEPMWAELLALAAAAEGRVHRATSPVEALADLKEARGFLAKDLSVLALREGVALDPTDDPLLVAYLLDHANTNPERVARRYGGEFTEDAAERALLSERLFQTLFPRLSEKLLWLYQEVERPLSRVLAHMEARGVRLDVPLLEALSFELEKELERLEGEVFRLAGHPFNLNSRDQLEKVLFDELGLTPVTRTEKTGKRSTSAAALEALRGAHPIVELILQYRELSKLKSTYLDRLPRLVHPRTGRLHTRFNQTATATGRLSSSDPNLQNIPVRTPLGQHIRKAFVAEEGWLLLAADYSQIELRVLAHLSGDENLKRVFREGKDIHTETAAWMFGVDPALVDPKMRRAAKTVNFGVLYGMSAARLSQELGIDYKEAEAFIERYFQSFPKVRAWIERTLEEGRTRGYVETLFGRRRYVPDLTSRVRSVREAAERMAWNMPVQGTAADLMKIAMVKLFPRLKPLGAHLLLQVHDELVLEVPEDRAEEAKALVKEVMENAYPLDVPLEVEVGVGRDWLEAKQD

SEQ ID NO: 819 - DNA, 2538 bp, synthetic construct
  misc_feature 1..2538: note = DNA Polymerase Variant
  source 1..2538: mol_type = other DNA
atgcaccatcatcatcatcatggcggtagcggcatgttaccgctgtttgatttggaagaaccaccaaaacgcgtgctgcttgttgacggccatcatctggcgtatcgtaccttctacgcactgagccttacgacctcacgtggtgagcctgtccagatggtgtatgggtttgctcgctccctgctgaaagccctgaaggaagatggtcaagccgtagtagtggttttcgatgcgaaagcaccgtcgtttcgtcacgaagcgtacgaggcctataaagctggccgcgcaccgaccccggaagactttccgcgtcagttagcgctcgtcaaacgcctcgtggatttgctgggattagttcgcttggaagctcctggctacgaggcggacgacgtgctcggtacactggccaagaaagcagaacgtgaaggcatggaggtctgcattcttaccggtgatcgcgatttcttccagctgctgtctgagaaagtgagcgttttgctgcccgatggcacgttagtaaccccgaaagatgtgcaagagaaatatggagttccgccagaacgttgggtggactttcgcgcactgactggtgatcgttcagacaacatcccgggcgttgccgggattggtgaaaagacggcgctgcgcctgctggcagaatggggctcggtggaaaatctgctcaagaaccttgatcgtgtgaaacctgatagcttacgccgcaagatcgaagcccacctggaagacttgcgtctgagtctggatcttgcccgtattcgcaccgatctgccgttggaagtagactttaaagctctgcgtcgtcgcacacccgatttagaggggttacgcgcgttcctcgaagaactggagctgggctccctgctgcatgaattcggtttgttgggcggagagaaaccgcgtgaagaagcaccatggccgccgcccgaaggtgcctttgtcggctttcttctgtcacgcaaagagccaatgtgggcggaactgttagctcttgcagccgccgcggaagggcgtgttcaccgcgcgacctctcctgtcgaggccctcgctgacctcaaagaagcacgtggtttcttggcgaaagatttagccgtgcttgcattacgcgaaggcgttgcgctcgatccgacggacgacccgcttttggtggcttatttgctcgatcatgcgaataccaacccggaacgtgtcgcccgtcgttacggcggcgagtttactgaagatgcggcagaacgcgcgttgcttagcgaacgcctcttccagacgttatttccacgtctttcggagaaattactctggctctatcaggaagtcgaacgtccattgagtcgcgtgcttgcccatatggagaatcgcggtgtgcgcttagatgttccgttgttagaagcactcagcttcgagttggagaaagaactggaacgtcttgaaggcgaagtctttcgtttagcggggcatcccttcaatctcaactctcgcgaccaattggagaaagtgctctttgatgaattaggtttaacccctgtcacgcgtacagagaagaccggcaaacgttccacttcggcagccgccttggaagcacttcgtggtgctcacccgatcgtcgagttgattttgcagtatcgcgagctcagcaaactcaaatcaacctatcttgataggttacctcgtcttgttcatccacgtacgggtcgtttacacacccgcttcaatcaaacggcaacagccaccgggcgcttgtcgtcgagtgacccgaacctccagaatattccagtgcgcacgccgctgggccaacacattcgtaaagcgtttgttgcggaagaaggttggttattacttgcggccgattactcccagatcgaacttcgtgtattggcgcatctctctggcgacgagaatcttaaacgcgtgtttcgcgaaggcaaggatattcacactgaaaccgcagcctggatgttcggggtggacccagccttagtggaccccaagatgcgtcgtgccgccaagaccgtcaactttggcgtactctatggtatgtcagcagcacgtcttagtcaggaattgggcattgactacaaagaagctgaagcgtttatcgagcgctatttccaatcctttccgaaagttcgcgcgtggattgaacgtacgctcgaagaaggtcgcactcgcggctatgtggaaacgttattcgggcgtcgtcgctacgttccagatcttacgtctcgtgtccgctcagtgcgcgaagctgctgagcgtatggcctggaatatgcctgttcagggaacagcggcggacctcatgaagatcgccatggtgaaattgtttccgcgcttgaaacccttaggagcccaccttcttttacaggtgcatgatgaattggtcttggaagtacccgaggatcgcgcagaagaagccaaagcactcgtgaaagaggttatggaaaacgcgtatccgttagatgttccgttggaggtcgaagtgggtgtaggccgtgattggcttgaagcgaaacaagactaatga

SEQ ID NO: 820 - protein, 844 aa, synthetic construct
  REGION 1..844: note = DNA Polymerase Variant
MHHHHHHGGSGMLPLFDLEEPPKRVLLVDGHHLAYRTFYALSLTTSRGEPVQMVYGFARSLLKALKEDGQAVVVVFDAKAPSFRHEAYEAYKAGRAPTPEDFPRQLALVKRLVDLLGLVRLEAPGYEADDVLGTLAKKAEREGMEVCILTGDRDFFQLLSEKVSVLLPDGTLVTPKDVQEKYGVPPERWVDFRALTGDRSDNIPGVAGIGEKTALRLLAEWGSVENLLKNLDRVKPDSLRRKIEAHLEDLRLSLDLARIRTDLPLEVDFKALRRRTPDLEGLRAFLEELELGSLLHEFGLLGGEKPREEAPWPPPEGAFVGFLLSRKEPMWAELLALAAAAEGRVHRATSPVEALADLKEARGFLAKDLAVLALREGVALDPTDDPLLVAYLLDHANTNPERVARRYGGEFTEDAAERALLSERLFQTLFPRLSEKLLWLYQEVERPLSRVLAHMENRGVRLDVPLLEALSFELEKELERLEGEVFRLAGHPFNLNSRDQLEKVLFDELGLTPVTRTEKTGKRSTSAAALEALRGAHPIVELILQYRELSKLKSTYLDRLPRLVHPRTGRLHTRFNQTATATGRLSSSDPNLQNIPVRTPLGQHIRKAFVAEEGWLLLAADYSQIELRVLAHLSGDENLKRVFREGKDIHTETAAWMFGVDPALVDPKMRRAAKTVNFGVLYGMSAARLSQELGIDYKEAEAFIERYFQSFPKVRAWIERTLEEGRTRGYVETLFGRRRYVPDLTSRVRSVREAAERMAWNMPVQGTAADLMKIAMVKLFPRLKPLGAHLLLQVHDELVLEVPEDRAEEAKALVKEVMENAYPLDVPLEVEVGVGRDWLEAKQD

SEQ ID NO: 821 - DNA, 2538 bp, synthetic construct
  misc_feature 1..2538: note = DNA Polymerase Variant
  source 1..2538: mol_type = other DNA
atgcaccatcatcatcatcatggcggtagcggcatgttaccgctgtttgatttggaagaaccaccaaaacgcgtgctgcttgttgacggccatcatctggcgtatcgtaccttctacgcactgagccttacgacctcacgtggtgagcctgtccagatggtgtatgggtttgctcgctccctgctgaaagccctgaaggaagatggtcaagccgtagtagtggttttcgatgcgcgtgcaccgtcgtttcgtcacgaagcgtacgaggcctataaagctggccgcgcaccgaccccggaagactttccgcgtcagttagcgctcgtcaaacgcctcgtggatttgctgggattagttcgcttggaagctcctggctacgaggcggacgacgtgctcggtacactggccaagaaagcagaacgtgaaggcatggaggtctgcattcttaccggtgatcgcgatttcttccagctgctgtctgagaaagtgagcgttttgctgcccgatggcacgttagtaaccccgaaagatgtgcaagagaaatatggagttccgccagaacgttgggtggactttcgcgcactgactggtgatcgttcagacaacatcccgggcgttgccgggattggtgaaaagacggcgctgcgcctgctggcagaatggggctcggtggaaaatctgctcaagaaccttgatcgtgtgaaacctgatagcttacgccgcaagatcgaagcccacctggaagacttgcgtctgagtctggatcttgcacgtattcgcaccgatctgccgttggaagtagactttaaagctctgcgtcgtcgcacacccgatttagaggggttacgcgcgttcctcgaagaactggagctgggctccctgctgcatgaattcggtttgttgggcggagagaaaccgcgtgaagaagcaccatggccgccgcccgagggtgcctttgtcggctttcttctgtcacgcaaagagccaatgtgggcggaactgttagctcttgcagccgccgcggaagggcgtgttcaccgcgcgacctctcctgtcgaggccctcgctgacctcaaagaagcacgtggtttcttggcgaaagatttagccgtgcttgcattacgcgaaggcgttgcgctcgatccgacggacgacccgcttttggtggcttatttgctcgatcatgcgaataccaacccggaacgtgtcgcccgtcgttacggcggcgagtttactgaagatgcggcagaacgcgcgttgcttagcgaacgcctcttccagacgttatttccacgtctttcggagaaattactctggctctatcaggaagtcgaacgtccattgagtcgcgtgcttgcccatatggaggctcgcggtgtgcgcttagatgttccgttgttagaagcactcagcttcgagttggagaaagaactggaacgtcttgaaggcgaagtctttcgtttagcggggcatcccttcaatctcaactctcgcgaccaattggagaaagtgctctttgatgaattaggtttaacccctgtcacgcgtacagagaagaccggcaaacgttccacttcggcagccgccttggaagcacttcgtggtgctcacccgatcgtcgagttgattttgcagtatcgcgagctcagcaaactcaaatcaacctatcttgataggttacctaagcttgttcatccacgtacgggtcgtttacacacccgcttcaatcaaacggcaacagccaccgggcgcttgtcgtcgagtgacccgaacctccagaatattccagtgcgcacgccgctgggccaacacattcgtaaagcgtttgttgcggaagaaggttggttattacttgcggccgattactcccagatcgaacttcgtgtattggcgcatctctctggcgacgagaatcttaaacgcgtgtttcgcgaaggcaaggatattcacactgaaaccgcagcctggatgttcggggtggacccggccttagtggaccccaagatgcgtcgtgccgccaagaccgtcaactttggcgtactctatggtatgtcagcagcacgtcttagtcaggaattgggcattgactacaaagaagctgaagcgtttatcgagcgctatttccaatcctttccgaaagttcgcgcgtggattgaacgtacgctcgaagaaggtcgcactcgcggctatgtggaaacgttattcgggcgtcgtcgctacgttccagatcttacgtctcgtgtccgctcagtgcgcgaagctgctgagcgtatggcctggaatatgcctgttcagggaacagcggcggacctcatgaagatcgccatggtgaaattgtttccgcgcttgaaacccttaggagcccaccttcttttacaggtgcatgatgaattggtcttggaagtacccgaggatcgcgcagaagaagccaaagcactcgtgaaagaggttatggaaaacgcgtatccgttagatgttccgttggaggtcgaagtgggtgtaggccgtgattggcttgaagcgaaacaagactaatga

SEQ ID NO: 822 - protein, 844 aa, synthetic construct
  REGION 1..844: note = DNA Polymerase Variant
MHHHHHHGGSGMLPLFDLEEPPKRVLLVDGHHLAYRTFYALSLTTSRGEPVQMVYGFARSLLKALKEDGQAVVVVFDARAPSFRHEAYEAYKAGRAPTPEDFPRQLALVKRLVDLLGLVRLEAPGYEADDVLGTLAKKAEREGMEVCILTGDRDFFQLLSEKVSVLLPDGTLVTPKDVQEKYGVPPERWVDFRALTGDRSDNIPGVAGIGEKTALRLLAEWGSVENLLKNLDRVKPDSLRRKIEAHLEDLRLSLDLARIRTDLPLEVDFKALRRRTPDLEGLRAFLEELELGSLLHEFGLLGGEKPREEAPWPPPEGAFVGFLLSRKEPMWAELLALAAAAEGRVHRATSPVEALADLKEARGFLAKDLAVLALREGVALDPTDDPLLVAYLLDHANTNPERVARRYGGEFTEDAAERALLSERLFQTLFPRLSEKLLWLYQEVERPLSRVLAHMEARGVRLDVPLLEALSFELEKELERLEGEVFRLAGHPFNLNSRDQLEKVLFDELGLTPVTRTEKTGKRSTSAAALEALRGAHPIVELILQYRELSKLKSTYLDRLPKLVHPRTGRLHTRFNQTATATGRLSSSDPNLQNIPVRTPLGQHIRKAFVAEEGWLLLAADYSQIELRVLAHLSGDENLKRVFREGKDIHTETAAWMFGVDPALVDPKMRRAAKTVNFGVLYGMSAARLSQELGIDYKEAEAFIERYFQSFPKVRAWIERTLEEGRTRGYVETLFGRRRYVPDLTSRVRSVREAAERMAWNMPVQGTAADLMKIAMVKLFPRLKPLGAHLLLQVHDELVLEVPEDRAEEAKALVKEVMENAYPLDVPLEVEVGVGRDWLEAKQD

SEQ ID NO: 823 - DNA, 2538 bp, synthetic construct
  misc_feature 1..2538: note = DNA Polymerase Variant
  source 1..2538: mol_type = other DNA
atgcaccatcatcatcatcatggcggtagcggcatgttaccgctgtttgatttggaagaaccaccaaaacgcgtgctgcttgttgacggccatcatctggcgtatcgtaccttctacgcactgagccttacgacctcacgtggtgagcctgtccagatggtgtatgggtttgctcgctccctgctgaaagccctgaaggaagatggtcaagccgtagtagtggttttcgatgcgaaagcaccgtcgtttcgtcacgaagcgtacgaggcctataaagctggccgcgcaccgaccccggaagactttccgcgtcagttagcgctcgtcaaacgcctcgtggatttgctgggattagttcgcttggaagctcctggctacgaggcggacgacgtgctcggtacactggccaagaaagcagaacgtgaaggcatggaggtctgcattcttaccggtgatcgcgatttcttccagctgctgtctgagaaagtgagcgttttgctgcccgatggcacgttagtaaccccgaaagatgtgcaagagaaatatggagttccgccagaacgttgggtggactttcgcgcactgactggtgatcgttcagacaacatcccgggcgttgccgggattggtgaaaagacggcgctgcgcctgctggcagaatggggctcggtggaaaatctgctcaagaaccttgatcgtgtgaaacctgatagcttacgccgcaagatcgaagcccacctggaagacttgcgtctgagtctggatcttgcccgtattcgcaccgatctgccgttggaagtagactttaaagctctgcgtcgtcgcacacccgatttagaggggttacgcgcgttcctcgaagaactggagctgggctccctgctgcatgaattcggtttgttgggcggagagaaaccgcgtgaagaagcaccatggccgccgcccgaaggtgcctttgtcggctttcttctgtcacgcaaagagccaatgtgggcggaactgttagctcttgcagccgccgcggaagggcgtgttcaccgcgcgacctctcctgtcgaggccctcgctgacctcaaagaagcacgtggtttcttggcgaaagatttagccgtgcttgcattacgcgaaggcgttgcgctcgatccgacggacgacccgcttttggtggcttatttgctcgatcatgcgaataccaacccggaacgtgtcgcccgtcgttacggcggcgagtttactgaagatgcggcagaacgcgcgttgcttagcgaacgcctcttccagacgttatttccacgtctttcgccgaaattactctggctctatcaggaagtcgaacgtccattgagtcgcgtgcttgcccatatggaggctcgcggtgtgcgcttagatgttccgttgttagaagcactcagcttcgagttggagaaagaactggaacgtcttgaaggcgaagtctttcgtttagcggggcatcccttcaatctcaactctcgcgaccaattggagaaagtgctctttgatgaattaggtttaacccctgtcacgcgtacagagaagaccggcaaacgttccacttcggcagccgccttggaagcacttcgtggtgctcacccgatcgtcgagttgattttgcagtatcgcgagctcagcaaactcaaatcaacctatcttgataggttacctcgtcttgttcatccacgtacgggtcgtttacacacccgcttcaatcaaacggcaacagccaccgggcgcttgtcgtcgagtgacccgaacctccagaatattccagtgcgcacgccgctgggccaacacattcgtaaagcgtttgttgcggaagaaggttggttattacttgcggccgattactcccagatcgaacttcgtgtattggcgcatctctctggcgacgagaatcttaaacgcgtgtttcgcgaaggcaaggatattcacactgaaaccgcagcctggatgttcggggtggacccagccttagtggaccccaagatgcgtcgtgccgccaagaccgtcaactttggcgtactctatggtatgtcagcagcacgtcttagtcaggaattgggcattgactacaaagaagctgaagcgtttatcgagcgctatttccaatcctttccgaaagttcgcgcgtggattgaacgtacgctcgaagaaggtcgcactcgcggctatgtggaaacgttattcgggcgtcgtcgctacgttccagatcttacgtctcgtgtccgctcagtgcgcgaagctgctgagcgtatggcctggaatatgcctgttcagggaacagcggcggacctcatgaagatcgccatggtgaaattgtttccgcgcttgaaacccttaggagcccaccttcttttacaggtgcatgatgaattggtcttggaagtacccgaggatcgcgcagaagaagccaaagcactcgtgaaagaggttatggaaaacgcgtatccgttagatgttccgttggaggtcgaagtgggtgtaggccgtgattggcttgaagcgaaacaagactaatga

SEQ ID NO: 824 - protein, 844 aa, synthetic construct
  REGION 1..844: note = DNA Polymerase Variant
MHHHHHHGGSGMLPLFDLEEPPKRVLLVDGHHLAYRTFYALSLTTSRGEPVQMVYGFARSLLKALKEDGQAVVVVFDAKAPSFRHEAYEAYKAGRAPTPEDFPRQLALVKRLVDLLGLVRLEAPGYEADDVLGTLAKKAEREGMEVCILTGDRDFFQLLSEKVSVLLPDGTLVTPKDVQEKYGVPPERWVDFRALTGDRSDNIPGVAGIGEKTALRLLAEWGSVENLLKNLDRVKPDSLRRKIEAHLEDLRLSLDLARIRTDLPLEVDFKALRRRTPDLEGLRAFLEELELGSLLHEFGLLGGEKPREEAPWPPPEGAFVGFLLSRKEPMWAELLALAAAAEGRVHRATSPVEALADLKEARGFLAKDLAVLALREGVALDPTDDPLLVAYLLDHANTNPERVARRYGGEFTEDAAERALLSERLFQTLFPRLSPKLLWLYQEVERPLSRVLAHMEARGVRLDVPLLEALSFELEKELERLEGEVFRLAGHPFNLNSRDQLEKVLFDELGLTPVTRTEKTGKRSTSAAALEALRGAHPIVELILQYRELSKLKSTYLDRLPRLVHPRTGRLHTRFNQTATATGRLSSSDPNLQNIPVRTPLGQHIRKAFVAEEGWLLLAADYSQIELRVLAHLSGDENLKRVFREGKDIHTETAAWMFGVDPALVDPKMRRAAKTVNFGVLYGMSAARLSQELGIDYKEAEAFIERYFQSFPKVRAWIERTLEEGRTRGYVETLFGRRRYVPDLTSRVRSVREAAERMAWNMPVQGTAADLMKIAMVKLFPRLKPLGAHLLLQVHDELVLEVPEDRAEEAKALVKEVMENAYPLDVPLEVEVGVGRDWLEAKQD

SEQ ID NO: 825 - DNA, 2538 bp, synthetic construct
  misc_feature 1..2538: note = DNA Polymerase Variant
  source 1..2538: mol_type = other DNA
atgcaccatcatcatcatcatggcggtagcggcatgttaccgctgtttgatttggaagaaccaccaaaacgcgtgctgcttgttgacggccatcatctggcgtatcgtaccttctacgcactgagccttacgacctcacgtggtgagcctgtccagatggtgtatgggtttgctcgctccctgctgaaagccctgaaggaagatggtcaagccgtagtagtggttttcgatgcgaaggcaccgtcgtttcgtcacgaagcgtacgaggcctataaagctggccgcgcaccgaccccggaagactttccgcgtcagttagcgctcgtcaaacgcctcgtggatttgctgggattagttcgcttggaagctcctggctacgaggcggacgacgtgctcggtacactggccaagaaagcagaacgtgaaggcatggaggtctgcattcttaccggtgatcgcgatttcttccagctgctgtctgagaaagtgagcgttttgctgcccgatggcacgttagtaaccccgaaagatgtgcaagagaaatatggagttccgccagaacgttgggtggactttcgcgcactgactggtgatcgttcagacaacatcccgggcgttgccgggattggtgaaaagacggcgctgcgcctgctggcagaatggggctcggtggaaaatctgctcaagaaccttgatcgtgtgaaacctgatagcttacgccgcaagatcgaagcccacctggaagacttgcgtctgagtctggatcttgtacgtattcgcaccgatctgccgttggaagtagactttaaagctctgcgtcgtcgcacacccgatttagaggggttacgcgcgttcctcgaagaactggagctgggctccctgctgcatgaattcggtttgttgggcggagagaaaccgcgtgaagaagcaccatggccgccgcccgagggtgcctttgtcggctttcttctgtcacgcaaagagccaatgtgggcggaactgttagctcttgcagccgccgcggaagggcgtgttcaccgcgcgacctctcctgtcgaggccctcgctgacctcaaagaagcacgtggtttcttggcgaaagatttagccgtgcttgcattacgcgaaggcgttgcgctcgatccgacggacgacccgcttttggtggcttatttgctcgatcatgcgaataccaacccggaacgtgtcgcccgtcgttacggcggcgagtttactgaagatgcggcagaacgcgcgttgcttagcgaacgcctcttccagacgttatttccacgtctttcggagaaattactctggctctatcaggaagtcgaacgtccattgagtcgcgtgcttgcccatatggaggctcgcggtgtgcgcttagatgttccgttgttagaagcactcagcttcgagctggaaaaagaactggaacgtcttgaaggcgaagtctttcgtttagcggggcatcccttcaatctcaactctcgcgaccaattggagaaagtgctctttgatgaattaggtttaacccctgtcacgcgtacagagaagaccggcaaacgttccacttcggcagccgccttggaagcacttcgtggtgtgcacccgatcgtcgagttgattttgcagtatcgcgagctcagcaaactcaaatcaacctatcttgataggttacctcgtcttgttcatccacgtacgggtcgtttacacacccgcttcaatcaaacggcaacagccaccgggcgcttgtcgtcgagtgacccgaacctccagaatattccagtgcgcacgccgctgggccaacacattcgtaaagcgtttgttgcggaagaaggttggttattacttgcggccgattactcccagatcgaacttcgtgtattggcgcatctctctggcgacgagaatcttaaacgcgtgtttcgcgaaggcaaggatattcacactgaaaccgcagcctggatgttcggggtggacccggccttagtggaccccaagatgcgtcgtgccgccaagaccgtcaactttggcgtactctatggtatgtcagcagcacgtcttagtcaggaattgggcattgactacaaagtagctgaagcgtttatcgagcgctatttccaatcctttccgaaagttcgcgcgtggattgaacgtacgctcgaagaaggtcgcactcgcggctatgtggaaacgttattcgggcgtcgtcgctacgttccagatcttacgtctcgtgtccgctcagtgcgcgaagctgctgagcgtatggcctggaatatgcctgttcagggaacagcggcggacctcatgaagatcgccatggtgaaattgtttccgcgcttgaaacccttaggagcccaccttcttttccaggtgcatgatgaattggtcttggaagtacccgaggatcgcgcagaagaagccaaagcactcgtgaaagaggttatggaaaacgcgtatccgttagatgttccgttggaggtcgaagtgggtgtaggccgtgattggcttgaagcgaaacaagactaatga

SEQ ID NO: 826 - protein, 844 aa, synthetic construct
  REGION 1..844: note = DNA Polymerase Variant
MHHHHHHGGSGMLPLFDLEEPPKRVLLVDGHHLAYRTFYALSLTTSRGEPVQMVYGFARSLLKALKEDGQAVVVVFDAKAPSFRHEAYEAYKAGRAPTPEDFPRQLALVKRLVDLLGLVRLEAPGYEADDVLGTLAKKAEREGMEVCILTGDRDFFQLLSEKVSVLLPDGTLVTPKDVQEKYGVPPERWVDFRALTGDRSDNIPGVAGIGEKTALRLLAEWGSVENLLKNLDRVKPDSLRRKIEAHLEDLRLSLDLVRIRTDLPLEVDFKALRRRTPDLEGLRAFLEELELGSLLHEFGLLGGEKPREEAPWPPPEGAFVGFLLSRKEPMWAELLALAAAAEGRVHRATSPVEALADLKEARGFLAKDLAVLALREGVALDPTDDPLLVAYLLDHANTNPERVARRYGGEFTEDAAERALLSERLFQTLFPRLSEKLLWLYQEVERPLSRVLAHMEARGVRLDVPLLEALSFELEKELERLEGEVFRLAGHPFNLNSRDQLEKVLFDELGLTPVTRTEKTGKRSTSAAALEALRGVHPIVELILQYRELSKLKSTYLDRLPRLVHPRTGRLHTRFNQTATATGRLSSSDPNLQNIPVRTPLGQHIRKAFVAEEGWLLLAADYSQIELRVLAHLSGDENLKRVFREGKDIHTETAAWMFGVDPALVDPKMRRAAKTVNFGVLYGMSAARLSQELGIDYKVAEAFIERYFQSFPKVRAWIERTLEEGRTRGYVETLFGRRRYVPDLTSRVRSVREAAERMAWNMPVQGTAADLMKIAMVKLFPRLKPLGAHLLFQVHDELVLEVPEDRAEEAKALVKEVMENAYPLDVPLEVEVGVGRDWLEAKQD

SEQ ID NO: 827 - DNA, 2538 bp, synthetic construct
  misc_feature 1..2538: note = DNA Polymerase Variant
  source 1..2538: mol_type = other DNA
atgcaccatcatcatcatcatggcggtagcggcatgttaccgctgtttgatttggaagaaccaccaaaacgcgtgctgcttgttgacggccatcatctggcgtatcgtaccttctacgcactgagccttacgacctcacgtggtgagcctgtccagatggtgtatgggtttgctcgctccctgctgaaagccctgaaggaagatggtcaagccgtagtagtggttttcgatgcgcgtgcaccgtcgtttcgtcacgaagcgtacgaggcctataaagctggccgcgcaccgaccccggaagactttccgcgtcagttagcgctcgtcaaacgcctcgtggatttgctgggattagttcgcttggaagctcctggctacgaggcggacgacgtgctcggtacactggccaagaaagcagaacgtgaaggcatggaggtctgcattcttaccggtgatcgcgatttcttccagctgctgtctgagaaagtgagcgttttgctgcccgatggcacgttagtaaccccgaaagatgtgcaagagaaatatggagttccgccagaacgttgggtggactttcgcgcactgactggtgatcgttcagacaacatcccgggcgttgccgggattggtgaaaagacggcgctgcgcctgctggcagaatggggctcggtggaaaatctgctcaagaaccttgatcgtgtgaaacctgatagcttacgccgcaagatcgaagcccacctggaagacttgcgtctgagtctggatcttgcacgtattcgcaccgatctgccgttggaagtagactttaaagctctgcgtcgtcgcacacccgatttagaggggttacgcgcgttcctcgaagaactggagctgggctccctgctgcatgaattcggtttgttgggcggagagaaaccgcgtgaagaagcaccatggccgccgcccgaaggtgcctttgtcggctttcttctgtcacgcaaagagccaatgtgggcggaactgttagctcttgcagccgccgcggaagggcgtgttcaccgcgcgacctctcctgtcgaggccctcgctgacctcaaagaagcacgtggtttcttggcgaaagatttagccgtgcttgcattacgcgaaggcgttgcgctcgatccgacggacgacccgcttttggtggcttatttgctcgatcatgcgaataccaacccggaacgtgtcgcccgtcgttacggcggcgagtttactgaagatgcggcagaacgcgcgttgcttagcgaacgcctcttccagacgttatttccacgtctttcggagaaattactctggctctatcaggaagtcgaacgtccattgagtcgcgtgcttgcccatatggaggctcgcggtgtgcgcttagatgttccgttgttagaagcactcagcttcgagttggagaaagaactggaacgtcttgaaggcgaagtctttcgtttagcggggcatcccttcaatctcaactctcgcgaccaattggagaaagtgctctttgatgaattaggtttaacccctgtcacgcgtacagagaagaccggcaaacgttccacttcggcagccgccttggaagcacttcgtggtgtgcacccgatcgtcgagttgattttgcagtatcgcgagctcagcaaactcaaatcaacctatcttgataggttacctcgtcttgttcatccacgtacgggtcgtttacacacccgcttcaatcaaacggcaacagccaccgggcgcttgtcgtcgagtgacccgaacctccagaatattccagtgcgcacgccgctgggccaacacattcgtaaagcgtttgttgcggaagaaggttggttattacttgcggccgattactcccagatcgaacttcgtgtattggcgcatctctctggcgacgagaatcttaaacgcgtgtttcgcgaaggcaaggatattcacactgaaaccgcagcctggatgttcggggtggacccggccttagtggaccccaagatgcgtcgtgccgccaagaccgtcaactttggcgtactctatggtatgtcagcagcacgtcttagtcaggaattgggcattgactacaaagaagctgaagcgtttatcgagcgctatttccaatcctttccgaaagttcgcgcgtggattgaacgtacgctcgaagaaggtcgcactcgcggctatgtggaaacgttattcgggcgtcgtcgctacgttccagatcttacgtctcgtgtccgctcagtgcgcgaagctgctgagcgtatggcctggaatatgcctgttcagggaacagcggcggacctcatgaagatcgccatggtgaaattgtttccgcgcttgaaacccttaggagcccaccttcttctgcaggtgcatgatgaattggtcttggaagtacccgaggatcgcgcagaagaagccaaagcactcgtgaaagaggttatggaaaacgcgtatccgttagatgttccgttggaggtcgaagtgggtgtaggccgtgattggcttgaagcgaaacaagactaatga

SEQ ID NO: 828 - protein, 844 aa, synthetic construct
  REGION 1..844: note = DNA Polymerase Variant
MHHHHHHGGSGMLPLFDLEEPPKRVLLVDGHHLAYRTFYALSLTTSRGEPVQMVYGFARSLLKALKEDGQAVVVVFDARAPSFRHEAYEAYKAGRAPTPEDFPRQLALVKRLVDLLGLVRLEAPGYEADDVLGTLAKKAEREGMEVCILTGDRDFFQLLSEKVSVLLPDGTLVTPKDVQEKYGVPPERWVDFRALTGDRSDNIPGVAGIGEKTALRLLAEWGSVENLLKNLDRVKPDSLRRKIEAHLEDLRLSLDLARIRTDLPLEVDFKALRRRTPDLEGLRAFLEELELGSLLHEFGLLGGEKPREEAPWPPPEGAFVGFLLSRKEPMWAELLALAAAAEGRVHRATSPVEALADLKEARGFLAKDLAVLALREGVALDPTDDPLLVAYLLDHANTNPERVARRYGGEFTEDAAERALLSERLFQTLFPRLSEKLLWLYQEVERPLSRVLAHMEARGVRLDVPLLEALSFELEKELERLEGEVFRLAGHPFNLNSRDQLEKVLFDELGLTPVTRTEKTGKRSTSAAALEALRGVHPIVELILQYRELSKLKSTYLDRLPRLVHPRTGRLHTRFNQTATATGRLSSSDPNLQNIPVRTPLGQHIRKAFVAEEGWLLLAADYSQIELRVLAHLSGDENLKRVFREGKDIHTETAAWMFGVDPALVDPKMRRAAKTVNFGVLYGMSAARLSQELGIDYKEAEAFIERYFQSFPKVRAWIERTLEEGRTRGYVETLFGRRRYVPDLTSRVRSVREAAERMAWNMPVQGTAADLMKIAMVKLFPRLKPLGAHLLLQVHDELVLEVPEDRAEEAKALVKEVMENAYPLDVPLEVEVGVGRDWLEAKQD

SEQ ID NO: 829 - DNA, 2538 bp, synthetic construct
  misc_feature 1..2538: note = DNA Polymerase Variant
  source 1..2538: mol_type = other DNA
atgcaccatcatcatcatcatggcggtagcggcatgttaccgctgtttgatttggaagaaccaccaaaacgcgtgctgcttgttgacggccatcatctggcgtatcgtaccttctacgcactgagccttacgacctcacgtggtgagcctgtccagatggtgtatgggtttgctcgctccctgctgaaagccctgaaggaagatggtcaagccgtagtagtggttttcgatgcgaaagcaccgtcgtttcgtcacgaagcgtacgaggcctataaagctggccgcgcaccgaccccggaagactttccgcgtcagttagcgctcgtcaaacgcctcgtggatttgctgggattagttcgcttggaagctcctggctacgaggcggacgacgtgctcggtacactggccaagaaagcagaacgtgaaggcatggaggtctgcattcttaccggtgatcgcgatttcttccagctgctgtctgagaaagtgagcgttttgctgcccgatggcacgttagtaaccccgaaagatgtgcaagagaaatatggagttccgccagaacgttgggtggactttcgcgcactgactggtgatcgttcagacaacatcccgggcgttgccgggattggtgaaaagacggcgctgcgcctgctggcagaatggggctcggtggaaaatctgctcaagaaccttgatcgtgtgaaacctgatagcttacgccgcaagatcgaagcccacctggaagacttgcgtctgagtctggatcttgcccgtattcgcaccgatctgccgttggaagtagactttaaagctctgcgtcgtcgcacacccgatttagaggggttacgcgcgttcctcgaagaactggagctgggctccctgctgcatgaattcggtttgttgggcggagagaaaccgcgtgaagaagcaccatggccgccgcccgaaggtgcctttgtcggctttcttctgtcacgcaaagagccaatgtgggcggaactgttagctcttgcagccgccgcggaagggcgtgttcaccgcgcgacctctcctgtcgaggccctcgctgacctcaaagaagcacgtggtttcttggcgaaagatttagccgtgcttgcattacgcgaaggcgttgcgctcgatccgacggacgacccgcttttggtggcttatttgctcgatcatgcgaataccaacccggaacgtgtcgcccgtcgttacggcggcgagtttactgaagatgcggcagaacgcgcgttgcttagcgaacgcctcttccagacgttatttccacgtctttcggagaaattactctggctctatcaggaagtcgaacgtccattgagtcgcgtgcttagtcatatggaggctcgcggtgtgcgcttagatgttccgttgttagaagcactcagcttcgagttggagaaagaactggaacgtcttgaaggcgaagtctttcgtttagcggggcatcccttcaatctcaactctcgcgaccaattggagaaagtgctctttgatgaattaggtttaacccctgtcacgcgtacagagaagaccggcaaacgttccacttcggcagccgccttggaagcacttcgtggtgctcacccgatcgtcgagttgattttgcagtatcgcgagctcagcaaactcaaatcaacctatcttgataggttacctcgtcttgttcatccacgtacgggtcgtttacacacccgcttcaatcaaacggcaacagccaccgggcgcttgtcgtcgagtgacccgaacctccagaatattccagtgcgcacgccgctgggccaacacattcgtaaagcgtttgttgcggaagaaggttggttattacttgcggccgattactcccagatcgaacttcgtgtattggcgcatctctctggcgacgagaatcttaaacgcgtgtttcgcgaaggcaaggatattcacactgaaaccgcagcctggatgttcggggtggacccagccttagtggacaccaagatgcgtcgtgccgccaagaccgtcaactttggcgtactctatggtatgtcagcagcacgtcttagtcaggaattgggcattgactacaaagaagctgaagcgtttatcgagcgctatttccaatcctttccgaaagttcgcgcgtggattgaacgtacgctcgaagaaggtcgcactcgcggctatgtggaaacgttattcgggcgtcgtcgctacgttccagatcttacgtctcgtgtccgctcagtgcgcgaagctgctgagcgtatggcctggaatatgcctgttcagggaacagcggcggacctcatgaagatcgccatggtgaaattgtttccgcgcttgaaacccttaggagcccaccttcttttacaggtgcatgatgaattggtcttggaagtacccgaggatcgcgcagaagaagccaaagcactcgtgaaagaggttatggaaaacgcgtatccgttagatgttccgttggaggtcgaagtgggtgtaggccgtgattggcttgaagcgaaacaagactaatga

SEQ ID NO: 830 - protein, 844 aa, synthetic construct
  REGION 1..844: note = DNA Polymerase Variant
MHHHHHHGGSGMLPLFDLEEPPKRVLLVDGHHLAYRTFYALSLTTSRGEPVQMVYGFARSLLKALKEDGQAVVVVFDAKAPSFRHEAYEAYKAGRAPTPEDFPRQLALVKRLVDLLGLVRLEAPGYEADDVLGTLAKKAEREGMEVCILTGDRDFFQLLSEKVSVLLPDGTLVTPKDVQEKYGVPPERWVDFRALTGDRSDNIPGVAGIGEKTALRLLAEWGSVENLLKNLDRVKPDSLRRKIEAHLEDLRLSLDLARIRTDLPLEVDFKALRRRTPDLEGLRAFLEELELGSLLHEFGLLGGEKPREEAPWPPPEGAFVGFLLSRKEPMWAELLALAAAAEGRVHRATSPVEALADLKEARGFLAKDLAVLALREGVALDPTDDPLLVAYLLDHANTNPERVARRYGGEFTEDAAERALLSERLFQTLFPRLSEKLLWLYQEVERPLSRVLSHMEARGVRLDVPLLEALSFELEKELERLEGEVFRLAGHPFNLNSRDQLEKVLFDELGLTPVTRTEKTGKRSTSAAALEALRGAHPIVELILQYRELSKLKSTYLDRLPRLVHPRTGRLHTRFNQTATATGRLSSSDPNLQNIPVRTPLGQHIRKAFVAEEGWLLLAADYSQIELRVLAHLSGDENLKRVFREGKDIHTETAAWMFGVDPALVDTKMRRAAKTVNFGVLYGMSAARLSQELGIDYKEAEAFIERYFQSFPKVRAWIERTLEEGRTRGYVETLFGRRRYVPDLTSRVRSVREAAERMAWNMPVQGTAADLMKIAMVKLFPRLKPLGAHLLLQVHDELVLEVPEDRAEEAKALVKEVMENAYPLDVPLEVEVGVGRDWLEAKQD

SEQ ID NO: 831 - DNA, 2538 bp, synthetic construct
  misc_feature 1..2538: note = DNA Polymerase Variant
  source 1..2538: mol_type = other DNA
atgcaccatcatcatcatcatggcggtagcggcatgttaccgctgtttgatttggaagaaccaccaaaacgcgtgctgcttgttgacggccatcatctggcgtatcgtaccttctacgcactgagccttacgacctcacgtggtgagcctgtccagatggtgtatgggtttgctcgctccctgctgaaagccctgaaggaagatggtcaagccgtagtagtggttttcgatgcggctgcaccgtcgtttcgtcacgaagcgtacgaggcctataaagctggccgcgcaccgaccccggaagactttccgcgtcagttagcgctcgtcaaacgcctcgtggatttgctgggattagttcgcttggaagctcctggctacgaggcggacgacgtgctcggtacactggccaagaaagcagaacgtgaaggcatggaggtctgcattcttaccggtgatcgcgatttcttccagctgctgtctgagaaagtgagcgttttgctgcccgatggcacgttagtaaccccgaaagatgtgcaagagaaatatggagttccgccagaacgttgggtggactttcgcgcactgactggtgatcgttcagacaacatcccgggcgttgccgggattggtgaaaagacggcgctgcgcctgctggcagaatggggctcggtggaaaatctgctcaagaaccttgatcgtgtgaaacctgatagcttacgccgcaagatcgaagcccacctggaagacttgcgtctgagtctggatcttgcccgtattcgcaccgatctgccgttggaagtagactttaaagctctgcgtcgtcgcacacccgatttagaggggttacgcgcgttcctcgaagaactggagctgggctccctgctgcatgaattcggtttgttgggcaccgagaaaccgcgtgaagaagcaccatggccgccgcccgaaggtgcctttgtcggctttcttctgtcacgcaaagagccaatgtgggcggaactgttagctcttgtagccgccgcggaagggcgtgttcaccgcgcgacctctcctgtcgaggccctcgctgacctcaaagaagcacgtggtttcttggcgaaagatttagccgtgcttgcattacgcgaaggcgttgcgctcgatccgacggacgacccgcttttggtggcttatttgctcgatcatgcgaataccaacccggaacgtgtcgcccgtcgttacggcggcgagtttactgaagatgcggcagaacgcgcgttgcttagcgaacgcctcttccagacgttatttccacgtctttcggagaaattactctggctctatcaggaagtcgaacgtccattgagtcgcgtgcttgcccatatggaggctcgcggtgtgcgcttagatgttccgttgttagaagcactcagcttcgagttggagaaagaactggaacgtcttgaaggcgaagtctttcgtttagcggggcatcccttcaatctcaactctcgcgaccaattggagaaagtgctctttgatgaattaggtttaacccctgtcacgcgtacagagaagaccggcaaacgttccacttcggcagccgccttggaagcacttcgtggtgctcacccgatcgtcgagttgattttgcagtatcgcgagctcagcaaactcaaatcaacctatcttgataggttacctcgtcttgttcatccacgtacgggtcgtttacacacccgcttcaatcaaacggcaacagccaccgggcgcttgtcgtcgagtgacccgaacctccagaatattccagtgcgcacgccgctgggccaacacattcgtaaagcgtttgttgcggaacatggttggttattacttgcggccgattactcccagatcgaacttcgtgtattggcgcatctctctggcgacgagaatcttaaacgcgtgtttcgcgaaggcaaggatattcacactgaaaccgcagcctggatgttcggggtggacccagccttagtggaccccaagatgcgtcgtgccgccaagaccgtcaactttggcgtactctatggtatgtcagcagcacgtcttagtcaggaattgggcattgactacaaagaagctgaagcgtttatcgagcgctatttccaatcctttccgaaagttcgcgcgtggattgaacgtacgctcgaagaaggtcgcactcgcggctatgtggaaacgttattcgggcgtcgtcgctacgttccagatcttacgtctcgtgtccgctcagtgcgcgaagctgctgagcgtatggcctggaatatgcctgttcagggaacagcggcggacctcatgaagatcgccatggtgaaattgtttccgcgcttgaaacccttaggagcccaccttcttttacaggtgcatgatgaattggtcttggaagtaccccgcgatcgcgcagaggaagccaaatcgctcgtgaaagaggttatggaaaacgcgtatccgttagatgttccgttggaggtcgaagtgggtgtaggccgtgattggcttgaagcgaaacaagactaatga

SEQ ID NO: 832 - protein, 844 aa, synthetic construct
  REGION 1..844: note = DNA Polymerase Variant
MHHHHHHGGSGMLPLFDLEEPPKRVLLVDGHHLAYRTFYALSLTTSRGEPVQMVYGFARSLLKALKEDGQAVVVVFDAAAPSFRHEAYEAYKAGRAPTPEDFPRQLALVKRLVDLLGLVRLEAPGYEADDVLGTLAKKAEREGMEVCILTGDRDFFQLLSEKVSVLLPDGTLVTPKDVQEKYGVPPERWVDFRALTGDRSDNIPGVAGIGEKTALRLLAEWGSVENLLKNLDRVKPDSLRRKIEAHLEDLRLSLDLARIRTDLPLEVDFKALRRRTPDLEGLRAFLEELELGSLLHEFGLLGTEKPREEAPWPPPEGAFVGFLLSRKEPMWAELLALVAAAEGRVHRATSPVEALADLKEARGFLAKDLAVLALREGVALDPTDDPLLVAYLLDHANTNPERVARRYGGEFTEDAAERALLSERLFQTLFPRLSEKLLWLYQEVERPLSRVLAHMEARGVRLDVPLLEALSFELEKELERLEGEVFRLAGHPFNLNSRDQLEKVLFDELGLTPVTRTEKTGKRSTSAAALEALRGAHPIVELILQYRELSKLKSTYLDRLPRLVHPRTGRLHTRFNQTATATGRLSSSDPNLQNIPVRTPLGQHIRKAFVAEHGWLLLAADYSQIELRVLAHLSGDENLKRVFREGKDIHTETAAWMFGVDPALVDPKMRRAAKTVNFGVLYGMSAARLSQELGIDYKEAEAFIERYFQSFPKVRAWIERTLEEGRTRGYVETLFGRRRYVPDLTSRVRSVREAAERMAWNMPVQGTAADLMKIAMVKLFPRLKPLGAHLLLQVHDELVLEVPRDRAEEAKSLVKEVMENAYPLDVPLEVEVGVGRDWLEAKQD

SEQ ID NO: 833 - DNA, 2538 bp, synthetic construct
  misc_feature 1..2538: note = DNA Polymerase Variant
  source 1..2538: mol_type = other DNA
atgcaccatcatcatcatcatggcggtagcggcatgttaccgctgtttgatttggaagaaccaccaaaacgcgtgctgcttgttgacggccatcatctggcgtatcgtaccttctacgcactgagccttacgacctcacgtggtgagcctgtccagatggtgtatgggtttgctcgctccctgctgaaagccctgaaggaagatggtcaagccgtagtagtggttttcgatgcgcgtgcaccgtcgtttcgtcacgaagcgtacgaggcctataaagctggccgcgcaccgaccccggaagactttccgcgtcagttagcgctcgtcaaacgcctcgtggatttgctgggattagttcgcttggaagctcctggctacgaggcggacgacgtgctcggtacactggccaagaaagcagaacgtgaaggcatggaggtctgcattcttaccggtgatcgcgatttcttccagctgctgtctgagaaagtgagcgttttgctgcccgatggcacgttagtaaccccgaaagatgtgcaagagaaatatggagttccgccagaacgttgggtggactttcgcgcactgactggtgatcgttcagacaacatcccgggcgttgccgggattggtgaaaagacggcgctgcgcctgctggcagaatggggctcggtggaaaatctgctcaagaaccttgatcgtgtgaaacctgatagcttacgccgcaagatcgaagcccacctggaagacttgcgtctgagtctggatcttgtacgtattcgcaccgatctgccgttggaagtagactttaaagctctgcgtcgtcgcacacccgatttagaggggttacgcgcgttcctcgaagaactggagctgggctccctgctgcatgaattcggtttgttgggcggagagaaaccgcgtgaagaagcaccatggccgccgcccgagggtgcctttgtcggctttcttctgtcacgcaaagagccaatgtgggcggaactgttagctcttgcagccgccgcggaagggcgtgttcaccgcgcgacctctcctgtcgaggccctcgctgacctcaaagaagcacgtggtttcttggcgaaagatttagccgtgcttgcattacgcgaaggcgttgcgctcgatccgacggacgacccgcttttggtggcttatttgctcgatagcgcgaataccaacccggaacgtgtcgcccgtcgttacggcggcgagtttactgaagatgcggcagaacgcgcgttgcttagcgaacgcctcttccagacgttatttccacgtctttcggagaaattactctggctctatcaggaagtcgaacgtccattgagtcgcgtgcttgcccatatggaggctcgcggtgtgcgcttagatgttccgttgttagaagcactcagcttcgagctggaaaaagaactggaacgtcttgaaggcgaagtctttcgtttagcggggcatcccttcaatctcaactctcgcgaccaattggagaaagtgctctttgatgaattaggtttaacccctgtcacgcgtacagagaagaccggcaaacgttccacttcggcagccgccttggaagcacttcgtggtgtgcacccgatcgtcgagttgattttgcagtatcgcgagctcagcaaactcaaatcaacctatcttgataggttacctcgtcttgttcatccacgtacgggtcgtttacacacccgcttcaatcaaacggcaacagccaccgggcgcttgtcgtcgagtgacccgaacctccagaatattccagtgcgcacgccgctgggccaacacattcgtaaagcgtttgttgcggaagaaggttggttattacttgcggccgattactcccagatcgaacttcgtgtattggcgcatctctctggcgacgagaatcttaaacgcgtgtttcgcgaaggcaaggatattcacactgaaaccgcagcctggatgttcggggtggactcggccttagtggaccccaagatgcgtcgtgccgccaagaccgtcaactttggcgtactctatggtatgtcagcagcacgtcttagtcaggaattgggcattgactacaaagaagctgaagcgtttatcgagcgctatttccaatcctttccgaaagttcgcgcgtggattgaacgtacgctcgaagaaggtcgcactcgcggctatgtggaaacgttattcgggcgtcgtcgctacgttccagatcttacgtctcgtgtccgctcagtgcgcgaagctgctgagcgtatggcctggaatatgcctgttcagggaacagcggcggacctcatgaagatcgccatggtgaaattgtttccgcgcttgaaacccttaggagcccaccttcttttccaggtgcatgatgaattggtcttggaagtacccgaggatcgcgcagaagaagccaaagcactcgtgaaagaggttatggaaaacgcgtatccgttagatgttccgttggaggtcgaagtgggtgtaggccgtgattggcttgaagcgaaacaagactaatga

SEQ ID NO: 834 - protein, 844 aa, synthetic construct
  REGION 1..844: note = DNA Polymerase Variant
MHHHHHHGGSGMLPLFDLEEPPKRVLLVDGHHLAYRTFYALSLTTSRGEPVQMVYGFARSLLKALKEDGQAVVVVFDARAPSFRHEAYEAYKAGRAPTPEDFPRQLALVKRLVDLLGLVRLEAPGYEADDVLGTLAKKAEREGMEVCILTGDRDFFQLLSEKVSVLLPDGTLVTPKDVQEKYGVPPERWVDFRALTGDRSDNIPGVAGIGEKTALRLLAEWGSVENLLKNLDRVKPDSLRRKIEAHLEDLRLSLDLVRIRTDLPLEVDFKALRRRTPDLEGLRAFLEELELGSLLHEFGLLGGEKPREEAPWPPPEGAFVGFLLSRKEPMWAELLALAAAAEGRVHRATSPVEALADLKEARGFLAKDLAVLALREGVALDPTDDPLLVAYLLDSANTNPERVARRYGGEFTEDAAERALLSERLFQTLFPRLSEKLLWLYQEVERPLSRVLAHMEARGVRLDVPLLEALSFELEKELERLEGEVFRLAGHPFNLNSRDQLEKVLFDELGLTPVTRTEKTGKRSTSAAALEALRGVHPIVELILQYRELSKLKSTYLDRLPRLVHPRTGRLHTRFNQTATATGRLSSSDPNLQNIPVRTPLGQHIRKAFVAEEGWLLLAADYSQIELRVLAHLSGDENLKRVFREGKDIHTETAAWMFGVDSALVDPKMRRAAKTVNFGVLYGMSAARLSQELGIDYKEAEAFIERYFQSFPKVRAWIERTLEEGRTRGYVETLFGRRRYVPDLTSRVRSVREAAERMAWNMPVQGTAADLMKIAMVKLFPRLKPLGAHLLFQVHDELVLEVPEDRAEEAKALVKEVMENAYPLDVPLEVEVGVGRDWLEAKQD

SEQ ID NO: 835 - DNA, 2538 bp, synthetic construct
  misc_feature 1..2538: note = DNA Polymerase Variant
  source 1..2538: mol_type = other DNA
atgcaccatcatcatcatcatggcggtagcggcatgttaccgctgtttgatttggaagaaccaccaaaacgcgtgctgcttgttgacggccatcatctggcgtatcgtaccttctacgcactgagccttacgacctcacgtggtgagcctgtccagatggtgtatgggtttgctcgctccctgctgaaagccctgaaggaagatggtcaagccgtagtagtggttttcgatgcggctgcaccgtcgtttcgtcacgaagcgtacgaggcctataaagctggccgcgcaccgaccccggaagactttccgcgtcagttagcgctcgtcaaacgcctcgtggatttgctgggattagttcgcttggaagctcctggctacgaggcggacgacgtgctcggtacactggccaagaaagcagaacgtgaaggcatggaggtctgcattcttaccggtgatcgcgatttcttccagctgctgtctgagaaagtgagcgttttgctgcccgatggcacgttagtaaccccgaaagatgtgcaagagaaatatggagttccgccagaacgttgggtggactttcgcgcactgactggtgatcgttcagacaacatcccgggcgttgccgggattggtgaaaagacggcgctgcgcctgctggcagaatggggctcggtggaaaatctgctcaagaaccttgatcgtgtgaaacctgatagcttacgccgcaagatcgaagcccacctggaagacttgcgtctgagtctggatcttgcccgtattcgcaccgatctgccgttggaagtagactttaaagctctgcgtcgtcgcacacccgatttagaggggttacgcgcgttcctcgaagaactggagctgggctccctgctgcatgaattcggtttgttgggcggagagaaaccgcgtgaagaagcaccatggccgccgcccgaaggtgcctttgtcggctttcttctgtcacgcaaagagccaatgtgggcggaactgttagctcttgtagccgccgcggaagggcgtgttcaccgcgcgacctctcctgtcgaggccctcgctgacctcaaagaagcacgtggtttcttggcgaaagatttagccgtgcttgcattacgcgaaggcgttgcgctcgatccgacggacgacccgcttttggtggcttatttgctcgatcatgcgaataccaacccggaacgtgtcgcccgtcgttacggcggcgagtttactgaagatgcggcagaacgcgcgttgcttagcgaacgcctcttccagacgttatttccacgtctttcggagaaattactctggctctatcaggaagtcgaacgtccattgagtcgcgtgcttgcccatatggaggctcgcggtgtgcgcttagatgttccgttgttagaagcactcagcttcgagttggagaaagaactggaacgtcttgaaggcgaagtctttcgtttagcggggcatcccttcaatctcaactctcgcgaccaattggagaaagtgctctttgatgaattaggtttaacccctgtcacgcgtacagagaagaccggcaaacgttccacttcggcagccgccttggaagcacttcgtggtgctcacccgatcgtcgagttgattttgcagtatcgcgagctcagcaaactcaaatcaacctatcttgataggttacctaagcttgttcatccacgtacgggtcgtttacacacccgcttcaatcaaacggcaacagccaccgggcgcttgtcgtcgagtgacccgaacctccagaatattccagtgcgcacgccgctgggccaacacattcgtaaagcgtttgttgcggaagagggttggttattacttgcggccgattactcccagatcgaacttcgtgtattggcgcatctctctggcgacgagaatcttaaacgcgtgtttcgcgaaggcaaggatattcacactgaaaccgcagcctggatgttcggggtggacccagccttagtggaccccaagatgcgtcgtgccgccaagaccgtcaactttggcgtactctatggtatgtcagcagcacgtcttagtcaggaattgggcattgactacaaagaagctgaagcgtttatcgagcgctatttccaatcctttccgaaagttcgcgcgtggattgaacgtacgctcgaagaaggtcgcactcgcggctatgtggaaacgttattcgggcgtcgtcgctacgttccagatcttacgtctcgtgtccgctcagtgcgcgaagctgctgagcgtatggcctggaatatgcctgttcagggaacagcggcggacctcatgaagatcgccatggtgaaattgtttccgcgcttgaaacccttaggagcccaccttcttttacaggtgcatgatgaattggtcttggaagtacccgaggatcgcgcagaagaagccaaagcactcgtgaaagaggttatggaaaacgcgtatccgttagatgttccgttggaggtcgaagtgggtgtaggccgtgattggcttgaagcgaaacaagactaatga

SEQ ID NO: 836 - protein, 844 aa, synthetic construct
  REGION 1..844: note = DNA Polymerase Variant
MHHHHHHGGSGMLPLFDLEEPPKRVLLVDGHHLAYRTFYALSLTTSRGEPVQMVYGFARSLLKALKEDGQAVVVVFDAAAPSFRHEAYEAYKAGRAPTPEDFPRQLALVKRLVDLLGLVRLEAPGYEADDVLGTLAKKAEREGMEVCILTGDRDFFQLLSEKVSVLLPDGTLVTPKDVQEKYGVPPERWVDFRALTGDRSDNIPGVAGIGEKTALRLLAEWGSVENLLKNLDRVKPDSLRRKIEAHLEDLRLSLDLARIRTDLPLEVDFKALRRRTPDLEGLRAFLEELELGSLLHEFGLLGGEKPREEAPWPPPEGAFVGFLLSRKEPMWAELLALVAAAEGRVHRATSPVEALADLKEARGFLAKDLAVLALREGVALDPTDDPLLVAYLLDHANTNPERVARRYGGEFTEDAAERALLSERLFQTLFPRLSEKLLWLYQEVERPLSRVLAHMEARGVRLDVPLLEALSFELEKELERLEGEVFRLAGHPFNLNSRDQLEKVLFDELGLTPVTRTEKTGKRSTSAAALEALRGAHPIVELILQYRELSKLKSTYLDRLPKLVHPRTGRLHTRFNQTATATGRLSSSDPNLQNIPVRTPLGQHIRKAFVAEEGWLLLAADYSQIELRVLAHLSGDENLKRVFREGKDIHTETAAWMFGVDPALVDPKMRRAAKTVNFGVLYGMSAARLSQELGIDYKEAEAFIERYFQSFPKVRAWIERTLEEGRTRGYVETLFGRRRYVPDLTSRVRSVREAAERMAWNMPVQGTAADLMKIAMVKLFPRLKPLGAHLLLQVHDELVLEVPEDRAEEAKALVKEVMENAYPLDVPLEVEVGVGRDWLEAKQD

SEQ ID NO: 837 - DNA, 2538 bp, synthetic construct
  misc_feature 1..2538: note = DNA Polymerase Variant
  source 1..2538: mol_type = other DNA
atgcaccatcatcatcatcatggcggtagcggcatgttaccgctgtttgatttggaagaaccaccaaaacgcgtgctgcttgttgacggccatcatctggcgtatcgtaccttctacgcactgagccttacgacctcacgtggtgagcctgtccagatggtgtatgggtttgctcgctccctgctgaaagccctgaaggaagatggtcaagccgtagtagtggttttcgatgcgcgtgcaccgtcgtttcgtcacgaagcgtacgaggcctataaagctggccgcgcaccgaccccggaagactttccgcgtcagttagcgctcgtcaaacgcctcgtggatttgctgggattagttcgcttggaagctcctggctacgaggcggacgacgtgctcggtacactggccaagaaagcagaacgtgaaggcatggaggtctgcattcttaccggtgatcgcgatttcttccagctgctgtctgagaaagtgagcgttttgctgcccgatggcacgttagtaaccccgaaagatgtgcaagagaaatatggagttccgccagaacgttgggtggactttcgcgcactgactggtgatcgttcagacaacatcccgggcgttgccgggattggtgaaaagacggcgctgcgcctgctggcagaatggggctcggtggaaaatctgctcaagaaccttgatcgtgtgaaacctgatagcttacgccgcaagatcgaagcccacctggaagacttgcgtctgagtctggatcttgtacgtattcgcaccgatctgccgttggaagtagactttaaagctctgcgtcgtcgcacacccgatttagaggggttacgcgcgttcctcgaagaactggagctgggctccctgctgcatgaattcggtttgttgggcggagagaaaccgcgtgaagaagcaccatggccgccgcccgagggtgcctttgtcggctttcttctgtcacgcaaagagccaatgtgggcggaactgttagctcttgcagccgccgcggaagggcgtgttcaccgcgcgacctctcctgtcgaggccctcgctgacctcaaagaagcacgtggtttcttggcgaaagatttagccgtgcttgcattacgcgaaggcgttgcgctcgatccgacggacgacccgcttttggtggcttatttgctcgatcatgcgaataccaacccggaacgtgtcgcccgtcgttacggcggcgagtttactgaagatgcggcagaacgcgcgttgcttagcgaacgcctcttccagacgttatttccacgtctttcggagaaattactctggctctatcaggaagtcgaacgtccattgagtcgcgtgcttgcccatatggaggctcgcggtgtgcgcttagatgttccgttgttagaagcactcagcttcgagctggaaaaagaactggaacgtcttgaaggcgaagtctttcgtttagcggggcatcccttcaatctcaactctcgcgaccaattggagaaagtgctctttgatgaattaggtttaacccctgtcacgcgtacagagaagaccggcaaacgttccacttcggcagccgccttggaagcacttcgtggtgcgcacccgatcgtcgagttgattttgcagtatcgcgagctcagcaaactcaaatcaacctatcttgataggttacctcgtcttgttcatccacgtacgggtcgtttacacacccgcttcaatcaaacggcaacagccaccgggcgcttgtcgtcgagtgacccgaacctccagaatattccagtgcgcacgccgctgggccaacacattcgtaaagcgtttgttgcggaagaaggttggttattacttgcggccgattactcccagatcgaacttcgtgtattggcgcatctctctggcgacgagaatcttaaacgcgtgtttcgcgaaggcaaggatattcacactgaaaccgcagcctggatgttcggggtggacccggccttagtggaccccaagatgcgtcgtgccgccaagaccgtcaactttggcgtactctatggtatgtcagcagcacgtcttagtcaggaattgggcattgactacaaagtagctgaagcgtttatcgagcgctatttccaatcctttccgaaagttcgcgcgtggattgaacgtacgctcgaagaaggtcgcactcgcggctatgtggaaacgttattcgggcgtcgtcgctacgttccagatcttacgtctcgtgtccgctcagtgcgcgaagctgctgagcgtatggcctggaatatgcctgttcagggaacagcggcggacctcatgaagatcgccatggtgaaattgtttccgcgcttgaaacccttaggagcccaccttcttctgcaggtgcatgatgaattggtcttggaagtacccgaggatcgcgcagaagaagccaaagcactcgtgaaagaggttatggaaaacgcgtatccgttagatgttccgttggaggtcgaagtgggtgtaggccgtgattggcttgaagcgaaacaagactaatga

SEQ ID NO: 838 - protein, 844 aa, synthetic construct; identical to SEQ ID NO: 770
  REGION 1..844: note = DNA Polymerase Variant

SEQ ID NO: 839 - DNA, 2538 bp, synthetic construct
  misc_feature 1..2538: note = DNA Polymerase Variant
  source 1..2538: mol_type = other DNA
atgcaccatcatcatcatcatggcggtagcggcatgttaccgctgtttgatttggaagaaccaccaaaacgcgtgctgcttgttgacggccatcatctggcgtatcgtaccttctacgcactgagccttacgacctcacgtggtgagcctgtccagatggtgtatgggtttgctcgctccctgctgaaagccctgaaggaagatggtcaagccgtagtagtggttttcgatgcgcgcgcaccgtcgtttcgtcacgaagcgtacgaggcctataaagctggccgcgcaccgaccccggaagactttccgcgtcagttagcgctcgtcaaacgcctcgtggatttgctgggattagttcgcttggaagctcctggctacgaggcggacgacgtgctcggtacactggccaagaaagcagaacgtgaaggcatggaggtctgcattcttaccggtgatcgcgatttcttccagctgctgtctgagaaagtgagcgttttgctgcccgatggcacgttagtaaccccgaaagatgtgcaagagaaatatggagttccgccagaacgttgggtggactttcgcgcactgactggtgatcgttcagacaacatcccgggcgttgccgggattggtgaaaagacggcgctgcgcctgctggcagaatggggctcggtggaaaatctgctcaagaaccttgataaagtgaaacctgatagcttacgccgcaagatcgaagcccacctggaagacttgcgtctgagtctggatcttgcccgtattcgcaccgatctgccgttggaagtagactttaaagctctgcgtcgtcgcacacccgatttagaggggttacgcgcgttcctcgaagaactggagctgggctccctgctgcatgaattcggtttgttgggcaccgagaaaccgcgtgaagaagcaccatggccgccgcccgaaggtgcctttgtcggctttcttctgtcacgcaaagagccaatgtgggcggaactgttagctcttgcagccgccgcggaagggcgtgttcaccgcgcgacctctcctgtcgaggccctcgctgacctcaaagaagcacgtggtttcttggcgaaagatttagccgtgcttgcattacgcgaaggcgttgcgctcgatccgacggacgacccgcttttggtggcttatttgctcgatcatgcgaataccaacccggaacgtgtcgcccgtcgttacggcggcgagtttactgaagatgcggcagaacgcgcgttgcttagcgaacgcctcttccagacgttatttccacgtctttcggagaaattactctggctctatcaagaagtcgaacgtccattgagtcgcgtgcttgcccatatggaggctcgcggtgtgcgcttagatgttccgttgttagaagcactcagcttcgagttggagaaagaactggaacgtcttgaaggcgaagtctttcgtttagcggggcatcccttcaatctcaactctcgcgaccaattggagaaagtgctctttgatgaattaggtttaacccctgtcacgcgtacagagaagaccggcaaacgttccacttcggcagccgccttggaagcacttcgtggtgctcacccgatcgtcgagttgattttgcagtatcgcgagctcagcaaactcaaatcaacctatcttgataggttacctcgtcttgttcatccacgtacgggtcgtttacacacccgcttcaatcaaacggcaacagccaccgggcgcttgtcgtcgagtgacccgaacctccagaatattccagtgcgcacgccgctgggccaacacattcgtaaagcgtttgttgcggaagagggttggttattacttgcggccgattactcccagatcgaacttcgtgtattggcgcatctctctggcgacgagaatcttaaacgcgtgtttcgcgaaggcaaggatattcacactgaaaccgcagcctggatgttcggggtggactcggccttagtggaccccaagatgcgtcgtgccgccaagaccgtcaactttggcgtactctatggtatgtcagcagcacgtcttagtcaggaattgggcattgactacaaagaagctgaagcgtttatcgagcgctatttccaatcctttccgaaagttcgcgcgtggattgaacgtacgctcgaagaaggtcgcactcgcggctatgtggaaacgttattcgggcgtcgtcgctacgttccagatcttacgtctcgtgtccgctcagtgcgcgaagctgctgagcgtatggcctggaatatgcctgttcagggaacagcggcggacctcatgaagatcgccatggtgaaattgtttccgcgcttgaaacccttaggagcccaccttcttttacaggtgcatgatgaattggtcttggaagtacccgaggatcgcgcagaggaagccaaagcgctcgtgaaagaggttatggaaaacgcgtatccgttagatgttccgttggaggtcgaagtgggtgtaggccgtgattggcttgaagcgaaacaagactaatga

SEQ ID NO: 840 - protein, 844 aa, synthetic construct
  REGION 1..844: note = DNA Polymerase Variant
MHHHHHHGGSGMLPLFDLEEPPKRVLLVDGHHLAYRTFYALSLTTSRGEPVQMVYGFARSLLKALKEDGQAVVVVFDARAPSFRHEAYEAYKAGRAPTPEDFPRQLALVKRLVDLLGLVRLEAPGYEADDVLGTLAKKAEREGMEVCILTGDRDFFQLLSEKVSVLLPDGTLVTPKDVQEKYGVPPERWVDFRALTGDRSDNIPGVAGIGEKTALRLLAEWGSVENLLKNLDKVKPDSLRRKIEAHLEDLRLSLDLARIRTDLPLEVDFKALRRRTPDLEGLRAFLEELELGSLLHEFGLLGTEKPREEAPWPPPEGAFVGFLLSRKEPMWAELLALAAAAEGRVHRATSPVEALADLKEARGFLAKDLAVLALREGVALDPTDDPLLVAYLLDHANTNPERVARRYGGEFTEDAAERALLSERLFQTLFPRLSEKLLWLYQEVERPLSRVLAHMEARGVRLDVPLLEALSFELEKELERLEGEVFRLAGHPFNLNSRDQLEKVLFDELGLTPVTRTEKTGKRSTSAAALEALRGAHPIVELILQYRELSKLKSTYLDRLPRLVHPRTGRLHTRFNQTATATGRLSSSDPNLQNIPVRTPLGQHIRKAFVAEEGWLLLAADYSQIELRVLAHLSGDENLKRVFREGKDIHTETAAWMFGVDSALVDPKMRRAAKTVNFGVLYGMSAARLSQELGIDYKEAEAFIERYFQSFPKVRAWIERTLEEGRTRGYVETLFGRRRYVPDLTSRVRSVREAAERMAWNMPVQGTAADLMKIAMVKLFPRLKPLGAHLLLQVHDELVLEVPEDRAEEAKALVKEVMENAYPLDVPLEVEVGVGRDWLEAKQD

SEQ ID NO: 841 - DNA, 2538 bp, synthetic construct
  misc_feature 1..2538: note = DNA Polymerase Variant
  source 1..2538: mol_type = other DNA
atgcaccatcatcatcatcatggcggtagcggcatgttaccgctgtttgatttggaagaaccaccaaaacgcgtgctgcttgttgacggccatcatctggcgtatcgtaccttctacgcactgagccttacgacctcacgtggtgagcctgtccagatggtgtatgggtttgctcgctccctgctgaaagccctgaaggaagatggtcaagccgtagtagtggttttcgatgcgcgtgcaccgtcgtttcgtcacgaagcgtacgaggcctataaagctggccgcgcaccgaccccggaagactttccgcgtcagttagcgctcgtcaaacgcctcgtggatttgctgggattagttcgcttggaagctcctggctacgaggcggacgacgtgctcggtacactggccaagaaagcagaacgtgaaggcatggaggtctgcattcttaccggtgatcgcgatttcttccagctgctgtctgagaaagtgagcgttttgctgcccgatggcacgttagtaaccccgaaagatgtgcaagagaaatatggagttccgccagaacgttgggtggactttcgcgcactgactggtgatcgttcagacaacatcccgggcgttgccgggattggtgaaaagacggcgctgcgcctgctggcagaatggggctcggtggaaaatctgctcaagaaccttgatcgtgtgaaacctgatagcttacgccgcaagatcgaagcccacctggaagacttgcgtctgagtctggatcttgcccgtattcgcaccgatctgccgttggaagtagactttaaagctctgcgtcgtcgcacacccgatttagaggggttacgcgcgttcctcgaagaactggagctgggctccctgctgcatgaattcggtttgttgggcggagagaaaccgcgtgaagaagcaccatggccgccgcccgaaggtgcctttgtcggctttcttctgtcacgcaaagagccaatgtgggcggaactgttagctcttgcagccgccgcggaagggcgtgttcaccgcgcgacctctcctgtcgaggccctcgctgacctcaaagaagcacgtggtttcttggcgaaagatttagccgtgcttgcattacgcgaaggcgttgcgctcgatccgacggacgacccgcttttggtggcttatttgctcgatcatgcgaataccaacccggaacgtgtcgcccgtcgttacggcggcgagtttactgaagatgcggcagaacgcgcgttgcttagcgaacgcctcttccagacgttatttccacgtctttcggagaaattactctggctctatcaggaagtcgaacgtccattgagtcgcgtgcttgcccatatggaggctcgcggtgtgcgcttagatgttccgttgttagaagcactcagcttcgagttggagaaagaactggaacgtcttgaaggcgaagtctttcgtttagcggggcatcccttcaatctcaactctcgcgaccaattggagaaagtgctctttgatgaattaggtttaacccctgtcacgcgtacagagaagaccggcaaacgttccacttcggcagccgccttggaagcacttcgtggtgctcacccgatcgtcgagttgattttgcagtatcgcgagctcagcaaactcaaatcaacctatcttgataggttacctcgtcttgttcatccacgtacgggtcgtttacacacccgcttcaatcaaacggcaacagccaccgggcgcttgtcgtcgagtgacccgaacctccagaatattccagtgcgcacgccgctgggccaacacattcgtaaagcgtttgttgcggaagaaggttggttattacttgcggccgattactcccagatcgaacttcgtgtattggcgcatctctctggcgacgagaatcttaaacgcgtgtttcgcgaaggcaaggatattcacactgaaaccgcagcctggatgttcggggtggactcggccttagtggaccccaagatgcgtcgtgccgccaagaccgtcaactttggcgtactctatggtatgtcagcagcacgtcttagtcaggaattgggcattgactacaaagtagctgaagcgtttatcgagcgctatttccaatcctttccgaaagttcgcgcgtggattgaacgtacgctcgaagaaggtcgcactcgcggctatgtggaaacgttattcgggcgtcgtcgctacgttccagatcttacgtctcgtgtccgctcagtgcgcgaagctgctgagcgtatggcctggaatatgcctgttcagggaacagcggcggacctcatgaagatcgccatggtgaaattgtttccgcgcttgaaacccttaggagcccaccttcttctgcaggtgcatgatgaattggtcttggaagtacccgaggatcgcgcagaagaagccaaagcactcgtgaaagaggttatggaaaacgcgtatccgttagatgttccgttggaggtcgaagtgggtgtaggccgtgattggcttgaagcgaaacaagactaatga

SEQ ID NO: 842 - protein, 844 aa, synthetic construct
  REGION 1..844: note = DNA Polymerase Variant
MHHHHHHGGSGMLPLFDLEEPPKRVLLVDGHHLAYRTFYALSLTTSRGEPVQMVYGFARSLLKALKEDGQAVVVVFDARAPSFRHEAYEAYKAGRAPTPEDFPRQLALVKRLVDLLGLVRLEAPGYEADDVLGTLAKKAEREGMEVCILTGDRDFFQLLSEKVSVLLPDGTLVTPKDVQEKYGVPPERWVDFRALTGDRSDNIPGVAGIGEKTALRLLAEWGSVENLLKNLDRVKPDSLRRKIEAHLEDLRLSLDLARIRTDLPLEVDFKALRRRTPDLEGLRAFLEELELGSLLHEFGLLGGEKPREEAPWPPPEGAFVGFLLSRKEPMWAELLALAAAAEGRVHRATSPVEALADLKEARGFLAKDLAVLALREGVALDPTDDPLLVAYLLDHANTNPERVARRYGGEFTEDAAERALLSERLFQTLFPRLSEKLLWLYQEVERPLSRVLAHMEARGVRLDVPLLEALSFELEKELERLEGEVFRLAGHPFNLNSRDQLEKVLFDELGLTPVTRTEKTGKRSTSAAALEALRGAHPIVELILQYRELSKLKSTYLDRLPRLVHPRTGRLHTRFNQTATATGRLSSSDPNLQNIPVRTPLGQHIRKAFVAEEGWLLLAADYSQIELRVLAHLSGDENLKRVFREGKDIHTETAAWMFGVDSALVDPKMRRAAKTVNFGVLYGMSAARLSQELGIDYKVAEAFIERYFQSFPKVRAWIERTLEEGRTRGYVETLFGRRRYVPDLTSRVRSVREAAERMAWNMPVQGTAADLMKIAMVKLFPRLKPLGAHLLLQVHDELVLEVPEDRAEEAKALVKEVMENAYPLDVPLEVEVGVGRDWLEAKQD

SEQ ID NO: 843 - DNA, 2538 bp, synthetic construct
  misc_feature 1..2538: note = DNA Polymerase Variant
  source 1..2538: mol_type = other DNA
atgcaccatcatcatcatcatggcggtagcggcatgttaccgctgtttgatttggaagaaccaccaaaacgcgtgctgcttgttgacggccatcatctggcgtatcgtaccttctacgcactgagccttacgacctcacgtggtgagcctgtccagatggtgtatgggtttgctcgctccctgctgaaagccctgaaggaagatggtcaagccgtagtagtggttttcgatgcgcgtgcaccgtcgtttcgtcacgaagcgtacgaggcctataaagctggccgcgcaccgaccccggaagactttccgcgtcagttagcgctcgtcaaacgcctcgtggatttgctgggattagttcgcttggaagctcctggctacgaggcggacgacgtgctcggtacactggccaagaaagcagaacgtgaaggcatggaggtctgcattcttaccggtgatcgcgatttcttccagctgctgtctgagaaagtgagcgttttgctgcccgatggcacgttagtaaccccgaaagatgtgcaagagaaatatggagttccgccagaacgttgggtggactttcgcgcactgactggtgatcgttcagacaacatcccgggcgttgccgggattggtgaaaagacggcgctgcgcctgctggcagaatggggctcggtggaaaatctgctcaagaaccttgatcgtgtgaaacctgatagcttacgccgcaagatcgaagcccacctggaagacttgcgtctgagtctggatcttgcccgtattcgcaccgatctgccgttggaagtagactttaaagctctgcgtcgtcgcacacccgatttagaggggttacgcgcgttcctcgaagaactggagctgggctccctgctgcatgaattcggtttgttgggcggagagaaaccgcgtgaagaagcaccatggccgccgcccgaaggtgcctttgtcggctttcttctgtcacgcaaagagccaatgtgggcggaactgttagctcttgcagccgccgcggaagggcgtgttcaccgcgcgacctctcctgtcgaggccctcgctgacctcaaagaagcacgtggtttcttggcgaaagatttagccgtgcttgcattacgcgaaggcgttgcgctcgatccgacggacgacccgcttttggtggcttatttgctcgatagcgcgaataccaacccggaacgtgtcgcccgtcgttacggcggcgagtttactgaagatgcggcagaacgcgcgttgcttagcgaacgcctcttccagacgttatttccacgtctttcggagaaattactctggctctatcaggaagtcgaacgtccattgagtcgcgtgcttgcccatatggaggctcgcggtgtgcgcttagatgttccgttgttagaagcactcagcttcgagctggcaaaagaactggaacgtcttgaaggcgaagtctttcgtttagcggggcatcccttcaatctcaactctcgcgaccaattggagaaagtgctctttgatgaattaggtttaacccctgtcacgcgtacagagaagaccggcaaacgttccacttcggcagccgccttggaagcacttcgtggtgctcacccgatcgtcgagttgattttgcagtatcgcgagctcagcaaactcaaatcaacctatcttgataggttacctcgtcttgttcatccacgtacgggtcgtttacacacccgcttcaatcaaacggcaacagccaccgggcgcttgtcgtcgagtgacccgaacctccagaatattccagtgcgcacgccgctgggccaacacattcgtaaagcgtttgttgcggaagaaggttggttattacttgcggccgattactcccagatcgaacttcgtgtattggcgcatctctctggcgacgagaatcttaaacgcgtgtttcgcgaaggcaaggatattcacactgaaaccgcagcctggatgttcggggtggactcggccttagtggaccccaagatgcgtcgtgccgccaagaccgtcaactttggcgtactctatggtatgtcagcagcacgtcttagtcaggaattgggcattgactacaaagaagctgaagcgtttatcgagcgctatttccaatcctttccgaaagttcgcgcgtggattgaacgtacgctcgaagaaggtcgcactcgcggctatgtggaaacgttattcgggcgtcgtcgctacgttccagatcttacgtctcgtgtccgctcagtgcgcgaagctgctgagcgtatggcctggaatatgcctgttcagggaacagcggcggacctcatgaagatcgccatggtgaaattgtttccgcgcttgaaacccttaggagcccaccttcttctgcaggtgcatgatgaattggtcttggaagtacccgaggatcgcgcagaagaagccaaagcactcgtgaaagaggttatggaaaacgcgtatccgttagatgttccgttggaggtcgaagtgggtgtaggccgtgattggcttgaagcgaaacaagactaatga

SEQ ID NO: 844 - protein, 844 aa, synthetic construct
  REGION 1..844: note = DNA Polymerase Variant
MHHHHHHGGSGMLPLFDLEEPPKRVLLVDGHHLAYRTFYALSLTTSRGEPVQMVYGFARSLLKALKEDGQAVVVVFDARAPSFRHEAYEAYKAGRAPTPEDFPRQLALVKRLVDLLGLVRLEAPGYEADDVLGTLAKKAEREGMEVCILTGDRDFFQLLSEKVSVLLPDGTLVTPKDVQEKYGVPPERWVDFRALTGDRSDNIPGVAGIGEKTALRLLAEWGSVENLLKNLDRVKPDSLRRKIEAHLEDLRLSLDLARIRTDLPLEVDFKALRRRTPDLEGLRAFLEELELGSLLHEFGLLGGEKPREEAPWPPPEGAFVGFLLSRKEPMWAELLALAAAAEGRVHRATSPVEALADLKEARGFLAKDLAVLALREGVALDPTDDPLLVAYLLDSANTNPERVARRYGGEFTEDAAERALLSERLFQTLFPRLSEKLLWLYQEVERPLSRVLAHMEARGVRLDVPLLEALSFELAKELERLEGEVFRLAGHPFNLNSRDQLEKVLFDELGLTPVTRTEKTGKRSTSAAALEALRGAHPIVELILQYRELSKLKSTYLDRLPRLVHPRTGRLHTRFNQTATATGRLSSSDPNLQNIPVRTPLGQHIRKAFVAEEGWLLLAADYSQIELRVLAHLSGDENLKRVFREGKDIHTETAAWMFGVDSALVDPKMRRAAKTVNFGVLYGMSAARLSQELGIDYKEAEAFIERYFQSFPKVRAWIERTLEEGRTRGYVETLFGRRRYVPDLTSRVRSVREAAERMAWNMPVQGTAADLMKIAMVKLFPRLKPLGAHLLLQVHDELVLEVPEDRAEEAKALVKEVMENAYPLDVPLEVEVGVGRDWLEAKQD

SEQ ID NO: 845 - DNA, 2538 bp, synthetic construct
  misc_feature 1..2538: note = DNA Polymerase Variant
  source 1..2538: mol_type = other DNA
atgcaccatcatcatcatcatggcggtagcggcatgttaccgctgtttgatttggaagaaccaccaaaacgcgtgctgcttgttgacggccatcatctggcgtatcgtaccttctacgcactgagccttacgacctcacgtggtgagcctgtccagatggtgtatgggtttgctcgctccctgctgaaagccctgaaggaagatggtcaagccgtagtagtggttttcgatgcgaaagcaccgtcgtttcgtcacgaagcgtacgaggcctataaagctggccgcgcaccgaccccggaagactttccgcgtcagttagcgctcgtcaaacgcctcgtggatttgctgggattagttcgcttggaagctcctggctacgaggcggacgacgtgctcggtacactggccaagaaagcagaacgtgaaggcatggaggtctgcattcttaccggtgatcgcgatttcttccagctgctgtctgagaaagtgagcgttttgctgcccgatggcacgttagtaaccccgaaagatgtgcaagagaaatatggagttccgccagaacgttgggtggactttcgcgcactgactggtgatcgttcagacaacatcccgggcgttgccgggattggtgaaaagacggcgctgcgcctgctggcagaatggggctcggtggaaaatctgctcaagaaccttgatcgtgtgaaacctgatagcttacgccgcaagatcgaagcccacctggaagacttgcgtctgagtctggatcttgcccgtattcgcaccgatctgccgttggaagtagactttaaagctctgcgtcgtcgcacacccgatttagaggggttacgcgcgttcctcgaagaactggagctgggctccctgctgcatgaattcggtttgttgggcggagagaaaccgcgtgaagaagcaccatggccgccgcccgaaggtgcctttgtcggctttcttctgtcacgcaaagagccaatgtgggcggaactgttagctcttgcagccgccgcggaagggcgtgttcaccgcgcgacctctcctgtcgaggccctcgctgacctcaaagaagcacgtggtttcttggcgaaagatttagccgtgcttgcattacgcgaaggcgttgcgctcgatccgacggacgacccgcttttggtggcttatttgctcgatcatgcgaataccaacccggaacgtgtcgcccgtcgttacggcggcgagtttactgaagatgcggcagaacgcgcgttgcttagcgaacgcctcttccagacgttatttccacgtctttcggagaaattactctggctctatcaggaagtcgaacgtccattgagtcgcgtgcttgcccatatggaggctcgcggtgtgcgcttagatgttccgttgttagaagcactcagcttcgagttggagaaagaactggaacgtcttgaaggcgaagtctttcgtttagcggggcatcccttcaatctcaactctcgcgaccaattggagaaagtgctctttgatgaattaggtttaacccctgtcacgcgtacagagaagaccggcaaacgttccacttcggcagccgccttggaagcacttcgtggtgctcacccgatcgtcgagttgattttgcagtatcgcgagctcagcaaactcaaatcaacctatcttgataggttacctcgtcttgttcatccacgtacgggtcgtttacacacccgcttcaatcaaacggcaacagccaccgggcgcttgtcgtcgagtgacccgaacctccagaatattccagtgcgcacgccgctgggccaacacattcgtaaagcgtttgttgcggaagaaggttggttattacttgcggccgattactcccagatcgaacttcgtgtattggcgcatctctctggcgacgagaatcttaaacgcgtgtttcgcgaaggcaaggatattcacactgaaaccgcagcctggatgttcggggtggacccagccttagtggaccccaagatgcgtcgtgccgccaagaccgtcaactttggcgtactctatggtatgtcagcagcacgtcttagtcaggaattgggcattgactacaaagaagctgaagcgtttgttgagcgctatttccaatcctttccgaaagttcgcgcgtggattgaacgtacgctcgaagaaggtcgcactcgcggctatgtggaaacgttattcgggcgtcgtcgctacgttccagatcttacgtctcgtgtccgctcagtgcgcgaagctgctgagcgtatggcctggaatatgcctgttcagggaacagcggcggacctcatgaagatcgccatggtgaaattgtttccgcgcttgaaacccttaggagcccaccttcttttacaggtgcatgatgaattggtcttggaagtacccgaggatcgcgcagaagaagccaaagcactcgtgaaagaggttatggaaaacgcgtatccgttagatgttccgttggaggtcgaagtgggtgtaggccgtgattggcttgaagcgaaacaagactaatga

SEQ ID NO: 846 - protein, 844 aa, synthetic construct; identical to SEQ ID NO: 782
  REGION 1..844: note = DNA Polymerase Variant

SEQ ID NO: 847 - DNA, 2538 bp, synthetic construct
  misc_feature 1..2538: note = DNA Polymerase Variant
  source 1..2538: mol_type = other DNA
atgcaccatcatcatcatcatggcggtagcggcatgttaccgctgtttgatttggaagaaccaccaaaacgcgtgctgcttgttgacggccatcatctggcgtatcgtaccttctacgcactgagccttacgacctcacgtggtgagcctgtccagatggtgtatgggtttgctcgctccctgctgaaagccctgaaggaagatggtcaagccgtagtagtggttttcgatgcgcgtgcaccgtcgtttcgtcacgaagcgtacgaggcctataaagctggccgcgcaccgaccccggaagactttccgcgtcagttagcgctcgtcaaacgcctcgtggatttgctgggattagttcgcttggaagctcctggctacgaggcggacgacgtgctcggtacactggccaagaaagcagaacgtgaaggcatggaggtctgcattcttaccggtgatcgcgatttcttccagctgctgtctgagaaagtgagcgttttgctgcccgatggcacgttagtaaccccgaaagatgtgcaagagaaatatggagttccgccagaacgttgggtggactttcgcgcactgactggtgatcgttcagacaacatcccgggcgttgccgggattggtgaaaagacggcgctgcgcctgctggcagaatggggctcggtggaaaatctgctcaagaaccttgatcgtgtgaaacctgatagcttacgccgcaagatcgaagcccacctggaagacttgcgtctgagtctggatcttgcacgtattcgcaccgatctgccgttggaagtagactttaaagctctgcgtcgtcgcacacccgatttagaggggttacgcgcgttcctcgaagaactggagctgggctccctgctgcatgaattcggtttgttgggcggagagaaaccgcgtgaagaagcaccatggccgccgcccgagggtgcctttgtcggctttcttctgtcacgcaaagagccaatgtgggcggaactgttagctcttgcagccgccgcggaagggcgtgttcaccgcgcgacctctcctgtcgaggccctcgctgacctcaaagaagcacgtggtttcttggcgaaagatttagccgtgcttgcattacgcgaaggcgttgcgctcgatccgacggacgacccgcttttggtggcttatttgctcgatcatgcgaataccaacccggaacgtgtcgcccgtcgttacggcggcgagtttactgaagatgcggcagaacgcgcgttgcttagcgaacgcctcttccagacgttatttccacgtctttcggagaaattactctggctctatcaggaagtcgaacgtccattgagtcgcgtgcttgcccatatggaggctcgcggtgtgcgcttagatgttccgttgttagaagcactcagcttcgagttggagaaagaactggaacgtcttgaaggcgaagtctttcgtttagcggggcatcccttcaatctcaactctcgcgaccaattggagaaagtgctctttgatgaattaggtttaacccctgtcacgcgtacagagaagaccggcaaacgttccacttcggcagccgccttggaagcacttcgtggtgtgcacccgatcgtcgagttgattttgcagtatcgcgagctcagcaaactcaaatcaacctatcttgataggttacctaagcttgttcatccacgtacgggtcgtttacacacccgcttcaatcaaacggcaacagccaccgggcgcttgtcgtcgagtgacccgaacctccagaatattccagtgcgcacgccgctgggccaacacattcgtaaagcgtttgttgcggaagaaggttggttattacttgcggccgattactcccagatcgaacttcgtgtattggcgcatctctctggcgacgagaatcttaaacgcgtgtttcgcgaaggcaaggatattcacactgaaaccgcagcctggatgttcggggtggacccggccttagtggaccccaagatgcgtcgtgccgccaagaccgtcaactttggcgtactctatggtatgtcagcagcacgtcttagtcaggaattgggcattgactacaaagtagctgaagcgtttatcgagcgctatttccaatcctttccgaaagttcgcgcgtggattgaacgtacgctcgaagaaggtcgcactcgcggctatgtggaaacgttattcgggcgtcgtcgctacgttccagatcttacgtctcgtgtccgctcagtgcgcgaagctgctgagcgtatggcctggaatatgcctgttcagggaacagcggcggacctcatgaagatcgccatggtgaaattgtttccgcgcttgaaacccttaggagcccaccttcttctgcaggtgcatgatgaattggtcttggaagtacccgaggatcgcgcagaagaagccaaagcactcgtgaaagaggttatggaaaacgcgtatccgttagatgttccgttggaggtcgaagtgggtgtaggccgtgattggcttgaagcgaaacaagactaatga

SEQ ID NO: 848 - protein, 844 aa, synthetic construct
  REGION 1..844: note = DNA Polymerase Variant
MHHHHHHGGSGMLPLFDLEEPPKRVLLVDGHHLAYRTFYALSLTTSRGEPVQMVYGFARSLLKALKEDGQAVVVVFDARAPSFRHEAYEAYKAGRAPTPEDFPRQLALVKRLVDLLGLVRLEAPGYEADDVLGTLAKKAEREGMEVCILTGDRDFFQLLSEKVSVLLPDGTLVTPKDVQEKYGVPPERWVDFRALTGDRSDNIPGVAGIGEKTALRLLAEWGSVENLLKNLDRVKPDSLRRKIEAHLEDLRLSLDLARIRTDLPLEVDFKALRRRTPDLEGLRAFLEELELGSLLHEFGLLGGEKPREEAPWPPPEGAFVGFLLSRKEPMWAELLALAAAAEGRVHRATSPVEALADLKEARGFLAKDLAVLALREGVALDPTDDPLLVAYLLDHANTNPERVARRYGGEFTEDAAERALLSERLFQTLFPRLSEKLLWLYQEVERPLSRVLAHMEARGVRLDVPLLEALSFELEKELERLEGEVFRLAGHPFNLNSRDQLEKVLFDELGLTPVTRTEKTGKRSTSAAALEALRGVHPIVELILQYRELSKLKSTYLDRLPKLVHPRTGRLHTRFNQTATATGRLSSSDPNLQNIPVRTPLGQHIRKAFVAEEGWLLLAADYSQIELRVLAHLSGDENLKRVFREGKDIHTETAAWMFGVDPALVDPKMRRAAKTVNFGVLYGMSAARLSQELGIDYKVAEAFIERYFQSFPKVRAWIERTLEEGRTRGYVETLFGRRRYVPDLTSRVRSVREAAERMAWNMPVQGTAADLMKIAMVKLFPRLKPLGAHLLLQVHDELVLEVPEDRAEEAKALVKEVMENAYPLDVPLEVEVGVGRDWLEAKQD

SEQ ID NO: 849 - DNA, 2538 bp, synthetic construct
  misc_feature 1..2538: note = DNA Polymerase Variant
  source 1..2538: mol_type = other DNA
atgcaccatcatcatcatcatggcggtagcggcatgttaccgctgtttgatttggaagaaccaccaaaacgcgtgctgcttgttgacggccatcatctggcgtatcgtaccttctacgcactgagccttacgacctcacgtggtgagcctgtccagatggtgtatgggtttgctcgctccctgctgaaagccctgaaggaagatggtcaagccgtagtagtggttttcgatgcgaaagcaccgtcgtttcgtcacgaagcgtacgaggcctataaagctggccgcgcaccgaccccggaagactttccgcgtcagttagcgctcgtcaaacgcctcgtggatttgctgggattagttcgcttggaagctcctggctacgaggcggacgacgtgctcggtacactggccaagaaagcagaacgtgaaggcatggaggtctgcattcttaccggtgatcgcgatttcttccagctgctgtctgagaaagtgagcgttttgctgcccgatggcacgttagtaaccccgaaagatgtgcaagagaaatatggagttccgccagaacgttgggtggactttcgcgcactgactggtgatcgttcagacaacatcccgggcgttgccgggattggtgaaaagacggcgctgcgcctgctggcagaatggggctcggtggaaaatctgctcaagaaccttgatcgtgtgaaacctgatagcttacgccgcaagatcgaagcccacctggaagacttgcgtctgagtctggatcttgcccgtattcgcaccgatctgccgttggaagtagactttaaagctctgcgtcgtcgcacacccgatttagaggggttacgcgcgttcctcgaagaactggagctgggctccctgctgcatgaattcggtttgttgggcggagagaaaccgcgtgaagaagcaccatggccgccgcccgaaggtgcctttgtcggctttcttctgtcacgcaaagagccaatgtgggcggaactgttagctcttgcagccgccgcggaagggcgtgttcaccgcgcgacctctcctgtcgaggccctcgctgacctcaaagaagcacgtggtttcttggcgaaagatttagccgtgcttgcattacgcgaaggcgttgcgctcgatccgacggacgacccgcttttggtggcttatttgctcgatcatgcgaataccaacccggaacgtgtcgcccgtcgttacggcggcgagtttactgaagatgcggcagaacgcgcgttgcttagcgaacgcctcttccagacgttatttccacgtctttcggagaaattactctggctctatcaggaagtcgaacgtccattgagtcgcgtgcttgcccatatggaggctcgcggtgtgcgcttagatgttccgttgttagaagcactcagcttcgagctggaaaaagaactggaacgtcttgaaggcgaagtctttcgtttagcggggcatcccttcaatctcaactctcgcgaccaattggagaaagtgctctttgatgaattaggtttaacccctgtcacgcgtacagagaagaccggcaaacgttccacttcggcagccgccttggaagcacttcgtggtgtgcacccgatcgtcgagttgattttgcagtatcgcgagctcagcaaactcaaatcaacctatcttgataggttacctcgtcttgttcatccacgtacgggtcgtttacacacccgcttcaatcaaacggcaacagccaccgggcgcttgtcgtcgagtgacccgaacctccagaatattccagtgcgcacgccgctgggccaacacattcgtaaagcgtttgttgcggaagaaggttggttattacttgcggccgattactcccagatcgaacttcgtgtattggcgcatctctctggcgacgagaatcttaaacgcgtgtttcgcgaaggcaaggatattcacactgaaaccgcagcctggatgttcggggtggactcggccttagtggaccccaagatgcgtcgtgccgccaagaccgtcaactttggcgtactctatggtatgtcagcagcacgtcttagtcaggaattgggcattgactacaaagaagctgaagcgtttatcgagcgctatttccaatcctttccgaaagttcgcgcgtggattgaacgtacgctcgaagaaggtcgcactcgcggctatgtggaaacgttattcgggcgtcgtcgctacgttccagatcttacgtctcgtgtccgctcagtgcgcgaagctgctgagcgtatggcctggaatatgcctgttcagggaacagcggcggacctcatgaagatcgccatggtgaaattgtttccgcgcttgaaacccttaggagcccaccttcttctgcaggtgcatgatgaattggtcttggaagtacccgaggatcgcgcagaagaagccaaagcactcgtgaaagaggttatggaaaacgcgtatccgttagatgttccgttggaggtcgaagtgggtgtaggccgtgattggcttgaagcgaaacaagactaatga

SEQ ID NO: 850 - protein, 844 aa, synthetic construct
  REGION 1..844: note = DNA Polymerase Variant
MHHHHHHGGSGMLPLFDLEEPPKRVLLVDGHHLAYRTFYALSLTTSRGEPVQMVYGFARSLLKALKEDGQAVVVVFDAKAPSFRHEAYEAYKAGRAPTPEDFPRQLALVKRLVDLLGLVRLEAPGYEADDVLGTLAKKAEREGMEVCILTGDRDFFQLLSEKVSVLLPDGTLVTPKDVQEKYGVPPERWVDFRALTGDRSDNIPGVAGIGEKTALRLLAEWGSVENLLKNLDRVKPDSLRRKIEAHLEDLRLSLDLARIRTDLPLEVDFKALRRRTPDLEGLRAFLEELELGSLLHEFGLLGGEKPREEAPWPPPEGAFVGFLLSRKEPMWAELLALAAAAEGRVHRATSPVEALADLKEARGFLAKDLAVLALREGVALDPTDDPLLVAYLLDHANTNPERVARRYGGEFTEDAAERALLSERLFQTLFPRLSEKLLWLYQEVERPLSRVLAHMEARGVRLDVPLLEALSFELEKELERLEGEVFRLAGHPFNLNSRDQLEKVLFDELGLTPVTRTEKTGKRSTSAAALEALRGVHPIVELILQYRELSKLKSTYLDRLPRLVHPRTGRLHTRFNQTATATGRLSSSDPNLQNIPVRTPLGQHIRKAFVAEEGWLLLAADYSQIELRVLAHLSGDENLKRVFREGKDIHTETAAWMFGVDSALVDPKMRRAAKTVNFGVLYGMSAARLSQELGIDYKEAEAFIERYFQSFPKVRAWIERTLEEGRTRGYVETLFGRRRYVPDLTSRVRSVREAAERMAWNMPVQGTAADLMKIAMVKLFPRLKPLGAHLLLQVHDELVLEVPEDRAEEAKALVKEVMENAYPLDVPLEVEVGVGRDWLEAKQD

SEQ ID NO: 851 - DNA, 2538 bp, synthetic construct
  misc_feature 1..2538: note = DNA Polymerase Variant
  source 1..2538: mol_type = other DNA
atgcaccatcatcatcatcatggcggtagcggcatgttaccgctgtttgatttggaagaagcaccaaaacgcgtgctgcttgttgacggccatcatctggcgtatcgtaccttctacgcactgagccttacgacctcacgtggtgagcctgtccagatggtgtatgggtttgctcgctccctgctgaaagccctgaaggaagatggtcaagccgtagtagtggttttcgatgcggctgcaccgtcgtttcgtcacgaagcgtacgaggcctataaagctggccgcgcaccgaccccggaagactttccgcgtcagttagcgctcgtcaaacgcctcgtggatttgctgggattagttcgcttggaagctcctggctacgaggcggacgacgtgctcggtacactggccaagaaagcagaacgtgaaggcatggaggtctgcattcttaccggtgatcgcgatttcttccagctgctgtctgagaaagtgagcgttttgctgcccgatggcacgttagtaaccccgaaagatgtgcaagagaaatatggagttccgccagaacgttgggtggactttcgcgcactgactggtgatcgttcagacaacatcccgggcgttgccgggattggtgaaaagacggcgctgcgcctgctggcagaatggggctcggtggaaaatctgctcaagaaccttgatcgtgtgaaacctgatagcttacgccgcaagatcgaagcccacctggaagacttgcgtctgagtctggatcttgcccgtattcgcaccgatctgccgttggaagtagactttaaagctctgcgtcgtcgcacacccgatttagaggggttacgcgcgttcctcgaagaactggagctgggctccctgctgcatgaattcggtttgttgggcggagagaaaccgcgtgaagaagcaccatggccgccgcccgaaggtgcctttgtcggctttcttctgtcacgcaaagagccaatgtgggcggaactgttagctcttgtagccgccgcggaagggcgtgttcaccgcgcgacctctcctgtcgaggccctcgctgacctcaaagaagcacgtggtttcttggcgaaagatttagccgtgcttgcattacgcgaaggcgttgcgctcgatccgacggacgacccgcttttggtggcttatttgctcgatcatgcgaataccaacccggaacgtgtcgcccgtcgttacggcggcgagtttactgaagatgcggcagaacgcgcgttgcttagcgaacgcctcttccagacgttatttccacgtctttcggagaaattactctggctctatcaggaagtcgaacgtccattgagtcgcgtgcttgcccatatggaggctcgcggtgtgcgcttagatgttccgttgttagaagcactcagcttcgagttggagaaagaactggaacgtcttgaaggcgaagtctttcgtttagcggggcatcccttcaatctcaactctcgcgaccaattggagaaagtgctctttgatgaattaggtttaacccctgtcacgcgtacagagaagaccggcaaacgttccacttcggcagccgccttggaagcacttcgtggtgctcacccgatcgtcgagttgattttgcagtatcgcgagctcagcaaactcaaatcaacctatcttgataggttacctcgtcttgttcatccacgtacgggtcgtttacacacccgcttcaatcaaacggcaacagccaccgggcgcttgtcgtcgagtgacccgaacctccagaatattccagtgcgcacgccgctgggccaacacattcgtaaagcgtttgttgcggaagagggttggttattacttgcggccgattactcccagatcgaacttcgtgtattggcgcatctctctggcgacgagaatcttaaagctgtgtttcgcgaaggcaaggatattcacactgaaaccgcagcctggatgttcggggtggacccagccttagtggaccccaagatgcgtcgtgccgccaagaccgtcaactttggcgtactctatggtatgtcagcagcacgtcttagtcaggaattgggcattgactacaaagtggctgaagcgtttatcgagcgctatttccaatcctttccgaaagttcgcgcgtggattgaacgtacgctcgaagaaggtcgcactcgcggctatgtggaaacgttattcgggcgtcgtcgctacgttccagatcttacgtctcgtgtccgctcagtgcgcgaagctgctgagcgtatggcctggaatatgcctgttcagggaacagcggcggacctcatgaagatcgccatggtgaaattgtttccgcgcttgaaacccttaggagcccaccttcttttacaggtgcatgatgaattggtcttggaagtacccgaggatcgcgcagaagaagccaaagcactcgtgaaagaggttatggaaaacgcgtatccgttagatgttccgttggaggtcgaagtgggtgtaggccgtgattggcttgaagcgaaacaagactaatga

SEQ ID NO: 852 - protein, 844 aa, synthetic construct
  REGION 1..844: note = DNA Polymerase Variant
MHHHHHHGGSGMLPLFDLEEAPKRVLLVDGHHLAYRTFYALSLTTSRGEPVQMVYGFARSLLKALKEDGQAVVVVFDAAAPSFRHEAYEAYKAGRAPTPEDFPRQLALVKRLVDLLGLVRLEAPGYEADDVLGTLAKKAEREGMEVCILTGDRDFFQLLSEKVSVLLPDGTLVTPKDVQEKYGVPPERWVDFRALTGDRSDNIPGVAGIGEKTALRLLAEWGSVENLLKNLDRVKPDSLRRKIEAHLEDLRLSLDLARIRTDLPLEVDFKALRRRTPDLEGLRAFLEELELGSLLHEFGLLGGEKPREEAPWPPPEGAFVGFLLSRKEPMWAELLALVAAAEGRVHRATSPVEALADLKEARGFLAKDLAVLALREGVALDPTDDPLLVAYLLDHANTNPERVARRYGGEFTEDAAERALLSERLFQTLFPRLSEKLLWLYQEVERPLSRVLAHMEARGVRLDVPLLEALSFELEKELERLEGEVFRLAGHPFNLNSRDQLEKVLFDELGLTPVTRTEKTGKRSTSAAALEALRGAHPIVELILQYRELSKLKSTYLDRLPRLVHPRTGRLHTRFNQTATATGRLSSSDPNLQNIPVRTPLGQHIRKAFVAEEGWLLLAADYSQIELRVLAHLSGDENLKAVFREGKDIHTETAAWMFGVDPALVDPKMRRAAKTVNFGVLYGMSAARLSQELGIDYKVAEAFIERYFQSFPKVRAWIERTLEEGRTRGYVETLFGRRRYVPDLTSRVRSVREAAERMAWNMPVQGTAADLMKIAMVKLFPRLKPLGAHLLLQVHDELVLEVPEDRAEEAKALVKEVMENAYPLDVPLEVEVGVGRDWLEAKQD

SEQ ID NO: 853 - DNA, 2538 bp, synthetic construct
  misc_feature 1..2538: note = DNA Polymerase Variant
  source 1..2538: mol_type = other DNA
atgcaccatcatcatcatcatggcggtagcggcatgttaccgctgtttgatttggaagaaccaccaaaacgcgtgctgcttgttgacggccatcatctggcgtatcgtaccttctacgcactgagccttacgacctcacgtggtgagcctgtccagatggtgtatgggtttgctcgctccctgctgaaagccctgaaggaagatggtcaagccgtagtagtggttttcgatgcgaaagcaccgtcgtttcgtcacgaagcgtacgaggcctataaagctggccgcgcaccgaccccggaagactttccgcgtcagttagcgctcgtcaaacgcctcgtggatttgctgggattagttcgcttggaagctcctggctacgaggcggacgacgtgctcggtacactggccaagaaagcagaacgtgaaggcatggaggtctgcattcttaccggtgatcgcgatttcttccagctgctgtctgagaaagtgagcgttttgctgcccgatggcacgttagtaaccccgaaagatgtgcaagagaaatatggagttccgccagaacgttgggtggactttcgcgcactgactggtgatcgttcagacaacatcccgggcgttgccgggattggtgaaaagacggcgctgcgcctgctggcagaatggggctcggtggaaaatctgctcaagaaccttgatcgtgtgaaacctgatagcttacgccgcaagatcgaagcccacctggaagacttgcgtctgagtctggatcttgcccgtattcgcaccgatctgccgttggaagtagactttaaagctctgcgtcgtcgcacacccgatttagaggggttacgcgcgttcctcgaagaactggagctgggctccctgctgcatgaattcggtttgttgggcggagagaaaccgcgtgaagaagcaccatggccgccgcccgaaggtgcctttgtcggctttcttctgtcacgcaaagagccaatgtgggcggaactgttagctcttgcagccgccgcggaagggcgtgttcaccgcgcgacctctcctgtcgaggccctcgctgacctcaaagaagcacgtggtttcttggcgaaagatttagccgtgcttgcattacgcgaaggcgttgccctcgatccgacggacgacccgcttttggtggcttatttgctcgatcatgcgaataccaacccggaacgtgtcgcccgtcgttacggcggcgagtttactgaagatgcggcagaacgcgcgttgcttagcgaacgcctcttccagacgttatttccacgtctttcggagaaattactctggctctatcaagaagtcgaacgtccattgagtcgcgtgcttgcccatatggaggctcgcggtgtgcgcttagatgttccgttgttagaagcactcagcttcgagttggagaaagaactggaacgtcttgaaggcgaagtctttcgtttagcggggcatcccttcaatctcaactctcgcgaccaattggagaaagtgctctttgatgaattaggtttaacccctgtcacgcgtacagagaagaccggcaaacgttccacttcggcagccgccttggaagcacttcgtggtgctcacccgatcgtcgagttgattttgcagtatcgcgagctcagcaaactcaaatcaacctatcttgataggttacctcgtcttgttcatccacgtacgggtcgtttacacacccgcttcaatcaaacggcaacagccaccgggcgcttgtcgtcgagtgacccgaacctccagaatattccagtgcgcacgccgctgggccaacacattcgtaaagcgtttgttgcggaagagggttggttattacttgcggccgattactcccagatcgaacttcgtgtattggcgcatctctctggcgacgagaatcttaaacgcgtgtttcgcgaaggcaaggatattcacactgaaaccgcagcctggatgttcggggtggactcggccttagtggaccccaagatgcgtcgtgccgccaagaccgtcaactttggcgtactctatggtatgtcagcagcacgtcttagtcaggaattgggcattgactacaaagaggctgaagcgtttatcgagcgctatttccaatcctttccgaaagttcgcgcgtggattgaacgtacgctcgaagaaggtcgcactcgcggctatgtggaaacgttattcgggcgtcgtcgctacgttccagatcttacgtctcgtgtccgctcagtgcgcgaagctgctgagcgtatggcctggaatatgcctgttcagggaacagcggcggacctcatgaagatcgccatggtgaaattgtttccgcgcttgaaacccttaggagcccaccttcttttacaggtgcatgatgaattggtcttggaagtacccgaggatcgcgcagaggaagccaaagcgctcgtgaaagaggttatggaaaacgcgtatccgttagatgttccgttggaggtcgaagtgggtgtaggccgtgattggcttgaagcgaaacaagactaatga

SEQ ID NO: 854 - protein, 844 aa, synthetic construct
  REGION 1..844: note = DNA Polymerase Variant
MHHHHHHGGSGMLPLFDLEEPPKRVLLVDGHHLAYRTFYALSLTTSRGEPVQMVYGFARSLLKALKEDGQAVVVVFDAKAPSFRHEAYEAYKAGRAPTPEDFPRQLALVKRLVDLLGLVRLEAPGYEADDVLGTLAKKAEREGMEVCILTGDRDFFQLLSEKVSVLLPDGTLVTPKDVQEKYGVPPERWVDFRALTGDRSDNIPGVAGIGEKTALRLLAEWGSVENLLKNLDRVKPDSLRRKIEAHLEDLRLSLDLARIRTDLPLEVDFKALRRRTPDLEGLRAFLEELELGSLLHEFGLLGGEKPREEAPWPPPEGAFVGFLLSRKEPMWAELLALAAAAEGRVHRATSPVEALADLKEARGFLAKDLAVLALREGVALDPTDDPLLVAYLLDHANTNPERVARRYGGEFTEDAAERALLSERLFQTLFPRLSEKLLWLYQEVERPLSRVLAHMEARGVRLDVPLLEALSFELEKELERLEGEVFRLAGHPFNLNSRDQLEKVLFDELGLTPVTRTEKTGKRSTSAAALEALRGAHPIVELILQYRELSKLKSTYLDRLPRLVHPRTGRLHTRFNQTATATGRLSSSDPNLQNIPVRTPLGQHIRKAFVAEEGWLLLAADYSQIELRVLAHLSGDENLKRVFREGKDIHTETAAWMFGVDSALVDPKMRRAAKTVNFGVLYGMSAARLSQELGIDYKEAEAFIERYFQSFPKVRAWIERTLEEGRTRGYVETLFGRRRYVPDLTSRVRSVREAAERMAWNMPVQGTAADLMKIAMVKLFPRLKPLGAHLLLQVHDELVLEVPEDRAEEAKALVKEVMENAYPLDVPLEVEVGVGRDWLEAKQD

SEQ ID NO: 855 - DNA, 2538 bp, synthetic construct
  misc_feature 1..2538: note = DNA Polymerase Variant
  source 1..2538: mol_type = other DNA
atgcaccatcatcatcatcatggcggtagcggcatgttaccgctgtttgatttggaagaagcaccaaaacgcgtgctgcttgttgacggccatcatctggcgtatcgtaccttctacgcactgagccttacgacctcacgtggtgagcctgtccagatggtgtatgggtttgctcgctccctgctgaaagccctgaaggaagatggtcaagccgtagtagtggttttcgatgcggctgcaccgtcgtttcgtcacgaagcgtacgaggcctataaagctggccgcgcaccgaccccggaagactttccgcgtcagttagcgctcgtcaaacgcctcgtggatttgctgggattagttcgcttggaagctcctggctacgaggcggacgacgtgctcggtacactggccaagaaagcagaacgtgaaggcatggaggtctgcattcttaccggtgatcgcgatttcttccagctgctgtctgagaaagtgagcgttttgctgcccgatggcacgttagtaaccccgaaagatgtgcaagagaaatatggagttccgccagaacgttgggtggactttcgcgcactgactggtgatcgttcagacaacatcccgggcgttgccgggattggtgaaaagacggcgctgcgcctgctggcagaatggggctcggtggaaaatctgctcaagaaccttgatcgcgtgaaacctgatagcttacgccgcaagatcgaagcccacctggaagacttgcgtctgagtctggatcttgcccgtattcgcaccgatctgccgttggaagtagactttaaagctctgcgtcgtcgcacacccgatttagaggggttacgcgcgttcctcgaagaactggagctgggctccctgctgcatgaattcggtttgttgggcggggagaaaccgcgtgaagaagcaccatggccgccgcccgaaggtgcctttgtcggctttcttctgtcacgcaaagagccaatgtgggcggaactgttagctcttgcagccgccgcggaagggcgtgttcaccgcgcgacctctcctgtcgaggccctcgctgacctcaaagaagcacgtggtttcttggcgaaagatttagccgtgcttgcattacgcgaaggcgttgccctcgatccgacggacgacccgcttttggtggcttatttgctcgatcatgcgaataccaacccggaacgtgtcgcccgtcgttacggcggcgagtttactgaagatgcggcagaacgcgcgttgcttagcgaacgcctcttccagacgttatttccacgtctttcggagaaattactctggctctatggtgaagtcgaacgtccattgagtcgcgtgcttgcccatatggaggctcgcggtgtgcgcttagatgttccgttgttagaagcactcagcttcgagttggagaaagaactggaacgtcttgaaggcgaagtctttcgtttagcggggcatcccttcaatctcaactctcgcgaccaattggagaaagtgctctttgatgaattaggtttaacccctgtcacgcgtacagagaagaccggcaaacgttccacttcggcagccgccttggaagcacttcgtggtgctcacccgatcgtcgagttgattttgcagtatcgcgagctcagcaaactcaaatcaacctatcttgataggttacctcgtcttgttcatccacgtacgggtcgtttacacacccgcttcaatcaaacggcaacagccaccgggcgcttgtcgtcgagtgacccgaacctccagaatattccagtgcgcacgccgctgggccaacacattcgtaaagcgtttgttgcggaagagggttggttattacttgcggccgattactcccagatcgaacttcgtgtattggcgcatctctctggcgacgagaatcttaaacgtgtgtttcgcgaaggcaaggatattcacactgaaaccgcagcctggatgttcggggtggacccagccttagtggaccccaagatgcgtcgtgccgccaagaccgtcaactttggcgtactctatggtatgtcagcagcacgtcttagtcaggaattgggcattgactacaaagtggctgaagcgtttatcgagcgctatttccaatcctttccgaaagttcgcgcgtggattgaacgtacgctcgaagaaggtcgcactcgcggctatgtggaaacgttattcgggcgtcgtcgctacgttccagatcttacgtctcgtgtccgctcagtgcgcgaagctgctgagcgtatggcctggaatatgcctgttcagggaacagcggcggacctcatgaagatcgccatggtgaaattgtttccgcgcttgaaacccttaggagcccaccttcttttacaggtgcatgatgaattggtcttggaagtacccgaggatcgcgcagaagaagccaaagcactcgtgaaagaggttatggaaaacgcgtatccgttagatgttccgttggaggtcgaagtgggtgtaggccgtgattggcttgaagcgaaacaagactaatga

SEQ ID NO: 856 - protein, 844 aa, synthetic construct
  REGION 1..844: note = DNA Polymerase Variant
MHHHHHHGGSGMLPLFDLEEAPKRVLLVDGHHLAYRTFYALSLTTSRGEPVQMVYGFARSLLKALKEDGQAVVVVFDAAAPSFRHEAYEAYKAGRAPTPEDFPRQLALVKRLVDLLGLVRLEAPGYEADDVLGTLAKKAEREGMEVCILTGDRDFFQLLSEKVSVLLPDGTLVTPKDVQEKYGVPPERWVDFRALTGDRSDNIPGVAGIGEKTALRLLAEWGSVENLLKNLDRVKPDSLRRKIEAHLEDLRLSLDLARIRTDLPLEVDFKALRRRTPDLEGLRAFLEELELGSLLHEFGLLGGEKPREEAPWPPPEGAFVGFLLSRKEPMWAELLALAAAAEGRVHRATSPVEALADLKEARGFLAKDLAVLALREGVALDPTDDPLLVAYLLDHANTNPERVARRYGGEFTEDAAERALLSERLFQTLFPRLSEKLLWLYGEVERPLSRVLAHMEARGVRLDVPLLEALSFELEKELERLEGEVFRLAGHPFNLNSRDQLEKVLFDELGLTPVTRTEKTGKRSTSAAALEALRGAHPIVELILQYRELSKLKSTYLDRLPRLVHPRTGRLHTRFNQTATATGRLSSSDPNLQNIPVRTPLGQHIRKAFVAEEGWLLLAADYSQIELRVLAHLSGDENLKRVFREGKDIHTETAAWMFGVDPALVDPKMRRAAKTVNFGVLYGMSAARLSQELGIDYKVAEAFIERYFQSFPKVRAWIERTLEEGRTRGYVETLFGRRRYVPDLTSRVRSVREAAERMAWNMPVQGTAADLMKIAMVKLFPRLKPLGAHLLLQVHDELVLEVPEDRAEEAKALVKEVMENAYPLDVPLEVEVGVGRDWLEAKQD

SEQ ID NO: 857 - DNA, 2538 bp, synthetic construct
  misc_feature 1..2538: note = DNA Polymerase Variant
  source 1..2538: mol_type = other DNA
atgcaccatcatcatcatcatggcggtagcggcatgttaccgctgtttgatttggaagaaccaccaaaacgcgtgctgcttgttgacggccatcatctggcgtatcgtaccttctacgcactgagccttacgacctcacgtggtgagcctgtccagatggtgtatgggtttgctcgctccctgctgaaagccctgaaggaagatggtcaagccgtagtagtggttttcgatgcggctgcaccgtcgtttcgtcacgaagcgtacgaggcctataaagctggccgcgcaccgaccccggaagactttccgcgtcagttagcgctcgtcaaacgcctcgtggatttgctgggattagttcgcttggaagctcctggctacgaggcggacgacgtgctcggtacactggccaagaaagcagaacgtgaaggcatggaggtctgcattcttaccggtgatcgcgatttcttccagctgctgtctgagaaagtgagcgttttgctgcccgatggcacgttagtaaccccgaaagatgtgcaagagaaatatggagttccgccagaacgttgggtggactttcgcgcactgactggtgatcgttcagacaacatcccgggcgttgccgggattggtgaaaagacggcgctgcgcctgctggcagaatggggctcggtggaaaatctgctcaagaaccttgatcgtgtgaaacctgatagcttacgccgcaagatcgaagcccacctggaagacttgcgtctgagtctggatcttgcccgtattcgcaccgatctgccgttggaagtagactttaaagctctgcgtcgtcgcacacccgatttagaggggttacgcgcgttcctcgaagaactggagctgggctccctgctgcatgaattcggtttgttgggcaccgagaaaccgcgtgaagaagcaccatggccgccgcccgaaggtgcctttgtcggctttcttctgtcacgcaaagagccaatgtgggcggaactgttagctcttgcagccgccgcggaagggcgtgttcaccgcgcgacctctcctgtcgaggccctcgctgacctcaaagaagcacgtggtttcttggcgaaagatttagccgtgcttgcattacgcgaaggcgttgcgctcgatccgacggacgacccgcttttggtggcttatttgctcgatcatgcgaataccaacccggaacgtgtcgcccgtcgttacggcggcgagtttactgaagatgcggcagaacgcgcgttgcttagcgaacgcctcttccagacgttatttccacgtctttcggagaaattactctggctctatcaggaagtcgaacgtccattgagtcgcgtgcttgcccatatggaggctcgcggtgtgcgcttagatgttccgttgttagaagcactcagcttcgagttggagaaagaactggaacgtcttgaaggcgaagtctttcgtttagcggggcatcccttcaatctcaactctcgcgaccaattggagaaagtgctctttgatgaattaggtttaacccctgtcacgcgtacagagaagaccggcaaacgttccacttcggcagccgccttggaagcacttcgtggtgctcacccgatcgtcgagttgattttgcagtatcgcgagctcagcaaactcaaatcaacctatcttgataggttacctcgtcttgttcatccacgtacgggtcgtttacacacccgcttcaatcaaacggcaacagccaccgggcgcttgtcgtcgagtgacccgaacctccagaatattccagtgcgcacgccgctgggccaacacattcgtaaagcgtttgttgcggaagagggttggttattacttgcggccgattactcccagatcgaacttcgtgtattggcgcatctctctggcgacgagaatcttaaacgcgtgtttcgcgaaggcaaggatattcacactgaaaccgcagcctggatgttcggggtggactcggccttagtggaccccaagatgcgtcgtgccgccaagaccgtcaactttggcgtactctatggtatgtcagcagcacgtcttagtcaggaattgggcattgactacaaagaagctgaagcgtttatcgagcgctatttccaatcctttccgaaagttcgcgcgtggattgaacgtacgctcgaagaaggtcgcactcgcggctatgtggaaacgttattcgggcgtcgtcgctacgttccagatcttacgtctcgtgtccgctcagtgcgcgaagctgctgagcgtatggcctggaatatgcctgttcagggaacagcggcggacctcatgaagatcgccatggtgaaattgtttccgcgcttgaaacccttaggagcccaccttcttttacaggtgcatgatgaattggtcttggaagtacccgaggatcgcgcagaagaagccaaagcactcgtgaaagaggttatggaaaacgcgtatccgttagatgttccgttggaggtcgaagtgggtgtaggccgtgattggcttgaagcgaaacaagactaatga

SEQ ID NO: 858 - protein, 844 aa, synthetic construct
  REGION 1..844: note = DNA Polymerase Variant
MHHHHHHGGSGMLPLFDLEEPPKRVLLVDGHHLAYRTFYALSLTTSRGEPVQMVYGFARSLLKALKEDGQAVVVVFDAAAPSFRHEAYEAYKAGRAPTPEDFPRQLALVKRLVDLLGLVRLEAPGYEADDVLGTLAKKAEREGMEVCILTGDRDFFQLLSEKVSVLLPDGTLVTPKDVQEKYGVPPERWVDFRALTGDRSDNIPGVAGIGEKTALRLLAEWGSVENLLKNLDRVKPDSLRRKIEAHLEDLRLSLDLARIRTDLPLEVDFKALRRRTPDLEGLRAFLEELELGSLLHEFGLLGTEKPREEAPWPPPEGAFVGFLLSRKEPMWAELLALAAAAEGRVHRATSPVEALADLKEARGFLAKDLAVLALREGVALDPTDDPLLVAYLLDHANTNPERVARRYGGEFTEDAAERALLSERLFQTLFPRLSEKLLWLYQEVERPLSRVLAHMEARGVRLDVPLLEALSFELEKELERLEGEVFRLAGHPFNLNSRDQLEKVLFDELGLTPVTRTEKTGKRSTSAAALEALRGAHPIVELILQYRELSKLKSTYLDRLPRLVHPRTGRLHTRFNQTATATGRLSSSDPNLQNIPVRTPLGQHIRKAFVAEEGWLLLAADYSQIELRVLAHLSGDENLKRVFREGKDIHTETAAWMFGVDSALVDPKMRRAAKTVNFGVLYGMSAARLSQELGIDYKEAEAFIERYFQSFPKVRAWIERTLEEGRTRGYVETLFGRRRYVPDLTSRVRSVREAAERMAWNMPVQGTAADLMKIAMVKLFPRLKPLGAHLLLQVHDELVLEVPEDRAEEAKALVKEVMENAYPLDVPLEVEVGVGRDWLEAKQD

SEQ ID NO: 859 - DNA, 2538 bp, synthetic construct
  misc_feature 1..2538: note = DNA Polymerase Variant
  source 1..2538: mol_type = other DNA
atgcaccatcatcatcatcatggcggtagcggcatgttaccgctgtttgatttggaagaaccaccaaaacgcgtgctgcttgttgacggccatcatctggcgtatcgtaccttctacgcactgagccttacgacctcacgtggtgagcctgtccagatggtgtatgggtttgctcgctccctgctgaaagccctgaaggaagatggtcaagccgtagtagtggttttcgatgcgcgtgcaccgtcgtttcgtcacgaagcgtacgaggcctataaagctggccgcgcaccgaccccggaagactttccgcgtcagttagcgctcgtcaaacgcctcgtggatttgctgggattagttcgcttggaagctcctggctacgaggcggacgacgtgctcggtacactggccaagaaagcagaacgtgaaggcatggaggtctgcattcttaccggtgatcgcgatttcttccagctgctgtctgagaaagtgagcgttttgctgcccgatggcacgttagtaaccccgaaagatctgcaagagaaatatggagttccgccagaacgttgggtggactttcgcgcactgactggtgatcgttcagacaacatcccgggcgttgccgggattggtgaaaagacggcgctgcgcctgctggcagaatggggctcggtggaaaatctgctcaagaaccttgatcgtgtgaaacctgatagcttacgccgcaagatcgaagcccacctggaagacttgcgtctgagtctggatcttgtacgtattcgcaccgatctgccgttggaagtagactttaaagctctgcgtcgtcgcacacccgatttagaggggttacgcgcgttcctcgaagaactggagctgggctccctgctgcatgaattcggtttgttgggcggagagaaaccgcgtgaagaagcaccatggccgccgcccgagggtgcctttgtcggctttcttctgtcacgcaaagagccaatgtgggcggaactgttagctcttgcagccgccgcggaagggcgtgttcaccgcgcgacctctcctgtcgaggccctcgctgacctcaaagaagcacgtggtttcttggcgaaagatttagccgtgcttgcattacgcgaaggcgttgcgctcgatccgacggacgacccgcttttggtggcttatttgctcgatcatgcgaataccaacccggaacgtgtcgcccgtcgttacggcggcgagtttactgaagatgcggcagaacgcgcgttgcttagcgaacgcctcttccagacgttatttccacgtctttcggagaaattactctggctctatcaggaagtcgaacgtccattgagtcgcgtgcttgcccatatggaggctcgcggtgtgcgcttagatgttccgttgttagaagcactcagcttcgagttggagaaagaactggaacgtcttgaaggcgaagtctttcgtttagcggggcatcccttcaatctcaactctcgcgaccaattggagaaagtgctctttgatgaattaggtttaacccctgtcacgcgtacagagaagaccggcaaacgttccacttcggcagccgccttggaagcacttcgtggtgctcacccgatcgtcgagttgattttgcagtatcgcgagctcagcaaactcaaatcaacctatcttgataggttacctcgtcttgttcatccacgtacgggtcgtttacacacccgcttcaatcaaacggcaacagccaccgggcgcttgtcgtcgagtgacccgaacctccagaatattccagtgcgcacgccgctgggccaacacattcgtaaagcgtttgttgcggaagaaggttggttattacttgcggccgattactcccagatcgaacttcgtgtattggcgcatctctctggcgacgagaatcttaaacgcgtgtttcgcgaaggcaaggatattcacactgaaaccgcagcctggatgttcggggtggactcggccttagtggaccccaagatgcgtcgtgccgccaagaccgtcaactttggcgtactctatggtatgtcagcagcacgtcttagtcaggaattgggcattgactacaaagtagctgaagcgtttatcgagcgctatttccaatcctttccgaaagttcgcgcgtggattgaacgtacgctcgaagaaggtcgcactcgcggctatgtggaaacgttattcgggcgtcgtcgctacgttccagatcttacgtctcgtgtccgctcagtgcgcgaagctgctgagcgtatggcctggaatatgcctgttcagggaacagcggcggacctcatgaagatcgccatggtgaaattgtttccgcgcttgaaacccttaggagcccaccttcttctgcaggtgcatgatgaattggtcttggaagtacccgaggatcgcgcagaagaagccaaagcactcgtgaaagaggttatggaaaacgcgtatccgttagatgttccgttggaggtcgaagtgggtgtaggccgtgattggcttgaagcgaaacaagactaatga

SEQ ID NO: 860 - protein, 844 aa, synthetic construct
  REGION 1..844: note = DNA Polymerase Variant
MHHHHHHGGSGMLPLFDLEEPPKRVLLVDGHHLAYRTFYALSLTTSRGEPVQMVYGFARSLLKALKEDGQAVVVVFDARAPSFRHEAYEAYKAGRAPTPEDFPRQLALVKRLVDLLGLVRLEAPGYEADDVLGTLAKKAEREGMEVCILTGDRDFFQLLSEKVSVLLPDGTLVTPKDLQEKYGVPPERWVDFRALTGDRSDNIPGVAGIGEKTALRLLAEWGSVENLLKNLDRVKPDSLRRKIEAHLEDLRLSLDLVRIRTDLPLEVDFKALRRRTPDLEGLRAFLEELELGSLLHEFGLLGGEKPREEAPWPPPEGAFVGFLLSRKEPMWAELLALAAAAEGRVHRATSPVEALADLKEARGFLAKDLAVLALREGVALDPTDDPLLVAYLLDHANTNPERVARRYGGEFTEDAAERALLSERLFQTLFPRLSEKLLWLYQEVERPLSRVLAHMEARGVRLDVPLLEALSFELEKELERLEGEVFRLAGHPFNLNSRDQLEKVLFDELGLTPVTRTEKTGKRSTSAAALEALRGAHPIVELILQYRELSKLKSTYLDRLPRLVHPRTGRLHTRFNQTATATGRLSSSDPNLQNIPVRTPLGQHIRKAFVAEEGWLLLAADYSQIELRVLAHLSGDENLKRVFREGKDIHTETAAWMFGVDSALVDPKMRRAAKTVNFGVLYGMSAARLSQELGIDYKVAEAFIERYFQSFPKVRAWIERTLEEGRTRGYVETLFGRRRYVPDLTSRVRSVREAAERMAWNMPVQGTAADLMKIAMVKLFPRLKPLGAHLLLQVHDELVLEVPEDRAEEAKALVKEVMENAYPLDVPLEVEVGVGRDWLEAKQD

SEQ ID NO: 861 - DNA, 2538 bp, synthetic construct
  misc_feature 1..2538: note = DNA Polymerase Variant
  source 1..2538: mol_type = other DNA
atgcaccatcatcatcatcatggcggtagcggcatgttaccgctgtttgatttggaagaaccaccaaaacgcgtgctgcttgttgacggccatcatctggcgtatcgtaccttctacgcactgagccttacgacctcacgtggtgagcctgtccagatggtgtatgggtttgctcgctccctgctgaaagccctgaaggaagatggtcaagccgtagtagtggttttcgatgcgcgtgcaccgtcgtttcgtcacgaagcgtacgaggcctataaagctggccgcgcaccgaccccggaagactttccgcgtcagttagcgctcgtcaaacgcctcgtggatttgctgggattagttcgcttggaagctcctggctacgaggcggacgacgtgctcggtacactggccaagaaagcagaacgtgaaggcatggaggtctgcattcttaccggtgatcgcgatttcttccagctgctgtctgagaaagtgagcgttttgctgcccgatggcacgttagtaaccccgaaagatgtgcaagagaaatatggagttccgccagaacgttgggtggactttcgcgcactgactggtgatcgttcagacaacatcccgggcgttgccgggattggtgaaaagacggcgctgcgcctgctggcagaatggggctcggtggaaaatctgctcaagaaccttgatcgtgtgaaacctgatagcttacgccgcaagatcgaagcccacctggaagacttgcgtctgagtctggatcttgtacgtattcgcaccgatctgccgttggaagtagactttaaagctctgcgtcgtcgcacacccgatttagaggggttacgcgcgttcctcgaagaactggagctgggctccctgctgcatgaattcggtttgttgggcggagagaaaccgcgtgaagaagcaccatggccgccgcccgagggtgcctttgtcggctttcttctgtcacgcaaagagccaatgtgggcggaactgttagctcttgcagccgccgcggaagggcgtgttcaccgcgcgacctctcctgtcgaggccctcgctgacctcaaagaagcacgtggtttcttggcgaaagatttagccgtgcttgcattacgcgaaggcgttgcgctcgatccgacggacgacccgcttttggtggcttatttgctcgatcatgcgaataccaacccggaacgtgtcgcccgtcgttacggcggcgagtttactgaagatgcggcagaacgcgcgttgcttagcgaacgcctcttccagacgttatttccacgtctttcggagaaattactctggctctatcaggaagtcgaacgtccattgagtcgcgtgcttgcccatatggaggctcgcggtgtgcgcttagatgttccgttgttagaagcactcagcttcgagctggaaaaagaactggaacgtcttgaaggcgaagtctttcgtttagcggggcatcccttcaatctcaactctcgcgaccaattggagaaagtgctctttgatgaattaggtttaacccctgtcacgcgtacagagaagaccggcaaacgttccacttcggcagccgccttggaagcacttcgtggtgtgcacccgatcgtcgagttgattttgcagtatcgcgagctcagcaaactcaaatcaacctatcttgataggttacctaagcttgttcatccacgtacgggtcgtttacacacccgcttcaatcaaacggcaacagccaccgggcgcttgtcgtcgagtgacccgaacctccagaatattccagtgcgcacgccgctgggccaacacattcgtaaagcgtttgttgcggaagaaggttggttattacttgcggccgattactcccagatcgaacttcgtgtattggcgcatctctctggcgacgagaatcttaaacgcgtgtttcgcgaaggcaaggatattcacactgaaaccgcagcctggatgttcggggtggactcggccttagtggaccccaagatgcgtcgtgccgccaagaccgtcaactttggcgtactctatggtatgtcagcagcacgtcttagtcaggaattgggcattgactacaaagaagctgaagcgtttatcgagcgctatttccaatcctttccgaaagttcgcgcgtggattgaacgtacgctcgaagaaggtcgcactcgcggctatgtggaaacgttattcgggcgtcgtcgctacgttccagatcttacgtctcgtgtccgctcagtgcgcgaagctgctgagcgtatggcctggaatatgcctgttcagggaacagcggcggacctcatgaagatcgccatggtgaaattgtttccgcgcttgaaacccttaggagcccaccttcttctgcaggtgcatgatgaattggtcttggaagtacccgaggatcgcgcagaagaagccaaagcactcgtgaaagaggttatggaaaacgcgtatccgttagatgttccgttggaggtcgaagtgggtgtaggccgtgattggcttgaagcgaaacaagactaatga

SEQ ID NO: 862 - protein, 844 aa, synthetic construct
  REGION 1..844: note = DNA Polymerase Variant
MHHHHHHGGSGMLPLFDLEEPPKRVLLVDGHHLAYRTFYALSLTTSRGEPVQMVYGFARSLLKALKEDGQAVVVVFDARAPSFRHEAYEAYKAGRAPTPEDFPRQLALVKRLVDLLGLVRLEAPGYEADDVLGTLAKKAEREGMEVCILTGDRDFFQLLSEKVSVLLPDGTLVTPKDVQEKYGVPPERWVDFRALTGDRSDNIPGVAGIGEKTALRLLAEWGSVENLLKNLDRVKPDSLRRKIEAHLEDLRLSLDLVRIRTDLPLEVDFKALRRRTPDLEGLRAFLEELELGSLLHEFGLLGGEKPREEAPWPPPEGAFVGFLLSRKEPMWAELLALAAAAEGRVHRATSPVEALADLKEARGFLAKDLAVLALREGVALDPTDDPLLVAYLLDHANTNPERVARRYGGEFTEDAAERALLSERLFQTLFPRLSEKLLWLYQEVERPLSRVLAHMEARGVRLDVPLLEALSFELEKELERLEGEVFRLAGHPFNLNSRDQLEKVLFDELGLTPVTRTEKTGKRSTSAAALEALRGVHPIVELILQYRELSKLKSTYLDRLPKLVHPRTGRLHTRFNQTATATGRLSSSDPNLQNIPVRTPLGQHIRKAFVAEEGWLLLAADYSQIELRVLAHLSGDENLKRVFREGKDIHTETAAWMFGVDSALVDPKMRRAAKTVNFGVLYGMSAARLSQELGIDYKEAEAFIERYFQSFPKVRAWIERTLEEGRTRGYVETLFGRRRYVPDLTSRVRSVREAAERMAWNMPVQGTAADLMKIAMVKLFPRLKPLGAHLLLQVHDELVLEVPEDRAEEAKALVKEVMENAYPLDVPLEVEVGVGRDWLEAKQD

SEQ ID NO: 863 - DNA, 2538 bp, synthetic construct
  misc_feature 1..2538: note = DNA Polymerase Variant
  source 1..2538: mol_type = other DNA
atgcaccatcatcatcatcatggcggtagcggcatgttaccgctgtttgatttggaagaaccaccaaaacgcgtgctgcttgttgacggccatcatctggcgtatcgtaccttctacgcactgagccttacgacctcacgtggtgagcctgtccagatggtgtatgggtttgctcgctccctgctgaaagccctgaaggaagatggtcaagccgtagtagtggttttcgatgcgaaagcaccgtcgtttcgtcacgaagcgtacgaggcctataaagctggccgcgcaccgaccccggaagactttccgcgtcagttagcgctcgtcaaacgcctcgtggatttgctgggattagttcgcttggaagctcctggctacgaggcggacgacgtgctcggtacactggccaagaaagcagaacgtgaaggcatggaggtctgcattcttaccggtgatcgcgatttcttccagctgctgtctgagaaagtgagcgttttgctgcccgatggcacgttagtaaccccgaaagatgtgcaagagaaatatggagttccgccagaacgttgggtggactttcgcgcactgactggtgatcgttcagacaacatcccgggcgttgccgggattggtgaaaagacggcgctgcgcctgctggcagaatggggctcggtggaaaatctgctcaagaaccttgatcgtgtgaaacctgatagcttacgccgcaagatcgaagcccacctggaagacttgcgtctgagtctggatcttgcccgtattcgcaccgatctgccgttggaagtagactttaaagctctgcgtcgtcgcacacccgatttagaggggttacgcgcgttcctcgaagaactggagctgggctccctgctgcatgaattcggtttgttgggcggagagaaaccgcgtgaagaagcaccatggccgccgcccgaaggtgcctttgtcggctttcttctgtcacgcaaagagccaatgtgggcggaactgttagctcttgcagccgccgcggaagggcgtgttcaccgcgcgacctctcctgtcgaggccctcgctgacctcaaagaagcacgtggtttcttggcgaaagatttagccgtgcttgcattacgcgaaggcgttgcgctcgatccgacggacgacccgcttttggtggcttatttgctcgatcatgcgaataccaacccggaacgtgtcgcccgtcgttacggcggcgagtttactgaagatgcggcagaacgcgcgttgcttagcgaacgcctcttccagacgttatttccacgtctttcggagaaattactctggctctatcaggaagtcgaacgtccattgagtcgcgtgcttgcccatatggaggctcgcggtgtgcgcttagatgttccgttgttagaagcactcagcttcgagttggagaaagaactggaacgtcttgaaggcgaagtctttcgtttagcggggcatcccttcaatctcaactctcgcgaccaattggagaaagtgctctttgatgaattaggtttaacccctgtcacgcgtacagagaagaccggcaaacgttccacttcggcagccgccttggaagcacttcgtggtgcgcacccgatcgtcgagttgattttgcagtatcgcgagctcagcaaactcaaatcaacctatcttgataggttacctaagcttgttcatccacgtacgggtcgtttacacacccgcttcaatcaaacggcaacagccaccgggcgcttgtcgtcgagtgacccgaacctccagaatattccagtgcgcacgccgctgggccaacacattcgtaaagcgtttgttgcggaagaaggttggttattacttgcggccgattactcccagatcgaacttcgtgtattggcgcatctctctggcgacgagaatcttaaacgcgtgtttcgcgaaggcaaggatattcacactgaaaccgcagcctggatgttcggggtggacccggccttagtggaccccaagatgcgtcgtgccgccaagaccgtcaactttggcgtactctatggtatgtcagcagcacgtcttagtcaggaattgggcattgactacaaagtagctgaagcgtttatcgagcgctatttccaatcctttccgaaagttcgcgcgtggattgaacgtacgctcgaagaaggtcgcactcgcggctatgtggaaacgttattcgggcgtcgtcgctacgttccagatcttacgtctcgtgtccgctcagtgcgcgaagctgctgagcgtatggcctggaatatgcctgttcagggaacagcggcggacctcatgaagatcgccatggtgaaattgtttccgcgcttgaaacccttaggagcccaccttcttctgcaggtgcatgatgaattggtcttggaagtacccgaggatcgcgcagaagaagccaaagcactcgtgaaagaggttatggaaaacgcgtatccgttagatgttccgttggaggtcgaagtgggtgtaggccgtgattggcttgaagcgaaacaagactaatga

SEQ ID NO: 864 - protein, 844 aa, synthetic construct
  REGION 1..844: note = DNA Polymerase Variant
MHHHHHHGGSGMLPLFDLEEPPKRVLLVDGHHLAYRTFYALSLTTSRGEPVQMVYGFARSLLKALKEDGQAVVVVFDAKAPSFRHEAYEAYKAGRAPTPEDFPRQLALVKRLVDLLGLVRLEAPGYEADDVLGTLAKKAEREGMEVCILTGDRDFFQLLSEKVSVLLPDGTLVTPKDVQEKYGVPPERWVDFRALTGDRSDNIPGVAGIGEKTALRLLAEWGSVENLLKNLDRVKPDSLRRKIEAHLEDLRLSLDLARIRTDLPLEVDFKALRRRTPDLEGLRAFLEELELGSLLHEFGLLGGEKPREEAPWPPPEGAFVGFLLSRKEPMWAELLALAAAAEGRVHRATSPVEALADLKEARGFLAKDLAVLALREGVALDPTDDPLLVAYLLDHANTNPERVARRYGGEFTEDAAERALLSERLFQTLFPRLSEKLLWLYQEVERPLSRVLAHMEARGVRLDVPLLEALSFELEKELERLEGEVFRLAGHPFNLNSRDQLEKVLFDELGLTPVTRTEKTGKRSTSAAALEALRGAHPIVELILQYRELSKLKSTYLDRLPKLVHPRTGRLHTRFNQTATATGRLSSSDPNLQNIPVRTPLGQHIRKAFVAEEGWLLLAADYSQIELRVLAHLSGDENLKRVFREGKDIHTETAAWMFGVDPALVDPKMRRAAKTVNFGVLYGMSAARLSQELGIDYKVAEAFIERYFQSFPKVRAWIERTLEEGRTRGYVETLFGRRRYVPDLTSRVRSVREAAERMAWNMPVQGTAADLMKIAMVKLFPRLKPLGAHLLLQVHDELVLEVPEDRAEEAKALVKEVMENAYPLDVPLEVEVGVGRDWLEAKQD

SEQ ID NO: 865 - DNA, 2538 bp, synthetic construct
  misc_feature 1..2538: note = DNA Polymerase Variant
  source 1..2538: mol_type = other DNA
atgcaccatcatcatcatcatggcggtagcggcatgttaccgctgtttgatttggaagaaccaccaaaacgcgtgctgcttgttgacggccatcatctggcgtatcgtaccttctacgcactgagccttacgacctcacgtggtgagcctgtccagatggtgtatgggtttgctcgctccctgctgaaagccctgaaggaagatggtcaagccgtagtagtggttttcgatgcgaaagcaccgtcgtttcgtcacgaagcgtacgaggcctataaagctggccgcgcaccgaccccggaagactttccgcgtcagttagcgctcgtcaaacgcctcgtggatttgctgggattagttcgcttggaagctcctggctacgaggcggacgacgtgctcggtacactggccaagaaagcagaacgtgaaggcatggaggtctgcattcttaccggtgatcgcgatttcttccagctgctgtctgagaaagtgagcgttttgctgcccgatggcacgttagtaaccccgaaagatgtgcaagagaaatatggagttccgccagaacgttgggtggactttcgcgcactgactggtgatcgttcagacaacatcccgggcgttgccgggattggtgaaaagacggcgctgcgcctgctggcagaatggggctcggtggaaaatctgctcaagaaccttgatcgtgtgaaacctgatagcttacgccgcaagatcgaagcccacctggaagacttgcgtctgagtctggatcttgcccgtattcgcaccgatctgccgttggaagtagactttaaagctctgcgtcgtcgcacacccgatttagaggggttacgcgcgttcctcgaagaactggagctgggctccctgctgcatgaattcggtttgttgggcggggagaaaccgcgtgaagaagcaccatggccgccgcccgaaggtgcctttgtcggctttcttctgtcacgcaaagagccaatgtgggcggaactgttagctcttgcagccgccgcggaagggcgtgttcaccgcgcgacctctcctgtcgaggccctcgctgacctcggggaagcacgtggtttcttggcgaaagatttagccgtgcttgcattacgcgaaggcgttgcgctcgatccgacggacgacccgcttttggtggcttatttgctcgatcatgcgaataccaacccggaacgtgtcgcccgtcgttacggcggcgagtttactgaagatgcggcagaacgcgcgttgcttagcgaacgcctcttccagacgttatttccacgtctttcggagaaattactctggctctatcaggaagtcgaacgtccattgagtcgcgtgcttgcccatatggaggctcgcggtgtgcgcttagatgttccgttgttagaagcactcagcttcgagttggagaaagaactggaacgtcttgaaggcgaagtctttcgtttagcggggcatcccttcaatctcaactctcgcgaccaattggagaaagtgctctttgatgaattaggtttaacccctgtcacgcgtacagagaagaccggcaaacgttccacttcggcagccgccttggaagcacttcgtggtgctcacccgatcgtcgagttgattttgcagtatcgcgagctcagcaaactcaaatcaacctatcttgataggttacctcgtcttgttcatccacgtacgggtcgtttacacacccgcttcaatcaaacggcaacagccaccgggcgcttgtcgtcgagtgacccgaacctccagaatattccagtgcgcacgccgctgggccaacacattcgtaaagcgtttgttgcggaacatggttggttattacttgcggccgattactcccagatcgaacttcgtgtattggcgcatctctctggcgacgagaatcttaaacgtgtgtttcgcgaaggcaaggatattcacactgaaaccgcagcctggatgttcggggtggacccagccttagtggaccccaagatgcgtcgtgccgccaagaccgtcaactttggcgtactctatggtatgtcagcagcacgtcttagtcaggaattgggcattgactacaaagaggctgaagcgtttatcgagcgctatttccaatcctttccgaaagttcgcgcgtggattgaacgtacgctcgaagaaggtcgcactcgcggctatgtggaaacgttattcgggcgtcgtcgctacgttaaggatcttacgtctcgtgtccgctcagtgcgcgaagctgctgagcgtatggcctggaatatgcctgttcagggaacagcggcggacctcatgaagatcgccatggtgaaattgtttccgcgcttgaaacccttaggagcccaccttcttttacaggtgcatgatgaattggtcttggaagtacccgaggatcgcgcatacgaagccaaatcgctcgtgaaagaggttatggaaaacgcgtatccgttagatgttccgttggaggtcgaagtgggtgtaggccgtgattggcttgaagcgaaacaagactaatga

SEQ ID NO: 866 - protein, 844 aa, synthetic construct
  REGION 1..844: note = DNA Polymerase Variant
MHHHHHHGGSGMLPLFDLEEPPKRVLLVDGHHLAYRTFYALSLTTSRGEPVQMVYGFARSLLKALKEDGQAVVVVFDAKAPSFRHEAYEAYKAGRAPTPEDFPRQLALVKRLVDLLGLVRLEAPGYEADDVLGTLAKKAEREGMEVCILTGDRDFFQLLSEKVSVLLPDGTLVTPKDVQEKYGVPPERWVDFRALTGDRSDNIPGVAGIGEKTALRLLAEWGSVENLLKNLDRVKPDSLRRKIEAHLEDLRLSLDLARIRTDLPLEVDFKALRRRTPDLEGLRAFLEELELGSLLHEFGLLGGEKPREEAPWPPPEGAFVGFLLSRKEPMWAELLALAAAAEGRVHRATSPVEALADLGEARGFLAKDLAVLALREGVALDPTDDPLLVAYLLDHANTNPERVARRYGGEFTEDAAERALLSERLFQTLFPRLSEKLLWLYQEVERPLSRVLAHMEARGVRLDVPLLEALSFELEKELERLEGEVFRLAGHPFNLNSRDQLEKVLFDELGLTPVTRTEKTGKRSTSAAALEALRGAHPIVELILQYRELSKLKSTYLDRLPRLVHPRTGRLHTRFNQTATATGRLSSSDPNLQNIPVRTPLGQHIRKAFVAEHGWLLLAADYSQIELRVLAHLSGDENLKRVFREGKDIHTETAAWMFGVDPALVDPKMRRAAKTVNFGVLYGMSAARLSQELGIDYKEAEAFIERYFQSFPKVRAWIERTLEEGRTRGYVETLFGRRRYVKDLTSRVRSVREAAERMAWNMPVQGTAADLMKIAMVKLFPRLKPLGAHLLLQVHDELVLEVPEDRAYEAKSLVKEVMENAYPLDVPLEVEVGVGRDWLEAKQD

SEQ ID NO: 867 - DNA, 2538 bp, synthetic construct
  misc_feature 1..2538: note = DNA Polymerase Variant
  source 1..2538: mol_type = other DNA
atgcaccatcatcatcatcatggcggtagcggcatgttaccgctgtttgatttggaagaaaacccaaaacgcgtgctgcttgttgacggccatcatctggcgtatcgtaccttctacgcactgagccttacgacctcacgtggtgagcctgtccagatggtgtatgggtttgctcgctccctgctgaaagccctgaaggaagatggtcaagccgtagtagtggttttcgatgcggctgcaccgtcgtttcgtcacgaagcgtacgaggcctataaagctggccgcgcaccgaccccggaagactttccgcgtcagttagcgctcgtcaaacgcctcgtggatttgctgggattagttcgcttggaagctcctggctacgaggcggacgacgtgctcggtacactggccaagaaagcagaacgtgaaggcatggaggtctgcattcttaccggtgatcgcgatttcttccagctgctgtctgagaaagtgagcgttttgctgcccgatggcacgttagtaaccccgaaagatgtgcaagagaaatatggagttccgccagaacgttgggtggactttcgcgcactgactggtgatcgttcagacaacatcccgggcgttgccgggattggtgaaaagacggcgctgcgcctgctggcagaatggggctcggtggaaaatctgctcaagaaccttgatcgcgtgaaacctgatagcttacgccgcaagatcgaagcccacctggaagacttgcgtctgagtctggatcttgcccgtattcgcaccgatctgccgttggaagtagactttaaagctctgcgtcgtcgcacacccgatttagaggggttacgcgcgttcctcgaagaactggagctgggctccctgctgcatgaattcggtttgttgggcggggagaaaccgcgtgaagaagcaccatggccgccgcccgaaggtgcctttgtcggctttcttctgtcacgcaaagagccaatgtgggcggaactgttagctcttgtagccgccgcggaagggcgtgttcaccgcgcgacctctcctgtcgaggccctcgctgacctcaaagaagcacgcggtttcttggcgaaagatttagccgtgcttgcattacgcgaaggcgttggcctcgatccgacggacgacccgcttttggtggcttatttgctcgatcatgcgaataccaacccggaacgtgtcgcccgtcgttacggcggcgagtttactgaagatgcggcagaacgcgcgttgcttagcgaacgcctcttccagacgttatttccacgtctttcggagaaattactctggctctatcaagaagtcgaacgtccattgagtcgcgtgcttgcccatatggaggctcgcggtgtgcgcttagatgttccgttgttagaagcactcagcttcgagttggagaaagaactggaacgtcttgaaggcgaagtctttcgtttagcggggcatcccttcaatctcaactctcgcgaccaattggagaaagtgctctttgatgaattaggtttaacccctgtcacgcgtacagagaagaccggcaaacgttccacttcggcagccgccttggaagcacttcgtggtgctcacccgatcgtcgagttgattttgcagtatcgcgagctcagcaaactcaaatcaacctatcttgataggttacctaagcttgttcatccacgtacgggtcgtttacacacccgcttcaatcaaacggcaacagccaccgggcgcttgtcgtcgagtgacccgaacctccagaatattccagtgcgcacgccgctgggccaacacattcgtaaagcgtttgttgcggaagagggttggttattacttgcggccgattactcccagatcgaacttcgtgtattggcgcatctctctggcgacgagaatcttaaacgtgtgtttcgcgaaggcaaggatattcacactgaaaccgcagcctggatgttcggggtggactcggccttagtggaccccaagatgcgtcgtgccgccaagaccgtcaactttggcgtactctatggtatgtcagcagcacgtcttagtcaggaattgggcattgactacaaagaggctgaagcgtttatcgagcgctatttccaatcctttccgaaagttcgcgcgtggattgaacgtacgctcgaagaaggtcgcactcgcggctatgtggaaacgttattcgggcgtcgtcgctacgttccagatcttacgtctcgtgtccgctcagtgcgcgaagctgctgagcgtatggcctggaatatgcctgttcagggaacagcggcggacctcatgaagatcgccatggtgaaattgtttccgcgcttgaaacccttaggagcccaccttcttttacaggtgcatgatgaattggtcttggaagtaccccgcgatcgcgcagaggaagccaaatcgctcgtgaaagaggttatggaaaacgcgtatccgttagatgttccgttggaggtcgaagtgggtgtaggccgtgattggcttgaagcgaaacaagactaatga

SEQ ID NO: 868 - protein, 844 aa, synthetic construct
  REGION 1..844: note = DNA Polymerase Variant
MHHHHHHGGSGMLPLFDLEENPKRVLLVDGHHLAYRTFYALSLTTSRGEPVQMVYGFARSLLKALKEDGQAVVVVFDAAAPSFRHEAYEAYKAGRAPTPEDFPRQLALVKRLVDLLGLVRLEAPGYEADDVLGTLAKKAEREGMEVCILTGDRDFFQLLSEKVSVLLPDGTLVTPKDVQEKYGVPPERWVDFRALTGDRSDNIPGVAGIGEKTALRLLAEWGSVENLLKNLDRVKPDSLRRKIEAHLEDLRLSLDLARIRTDLPLEVDFKALRRRTPDLEGLRAFLEELELGSLLHEFGLLGGEKPREEAPWPPPEGAFVGFLLSRKEPMWAELLALVAAAEGRVHRATSPVEALADLKEARGFLAKDLAVLALREGVGLDPTDDPLLVAYLLDHANTNPERVARRYGGEFTEDAAERALLSERLFQTLFPRLSEKLLWLYQEVERPLSRVLAHMEARGVRLDVPLLEALSFELEKELERLEGEVFRLAGHPFNLNSRDQLEKVLFDELGLTPVTRTEKTGKRSTSAAALEALRGAHPIVELILQYRELSKLKSTYLDRLPKLVHPRTGRLHTRFNQTATATGRLSSSDPNLQNIPVRTPLGQHIRKAFVAEEGWLLLAADYSQIELRVLAHLSGDENLKRVFREGKDIHTETAAWMFGVDSALVDPKMRRAAKTVNFGVLYGMSAARLSQELGIDYKEAEAFIERYFQSFPKVRAWIERTLEEGRTRGYVETLFGRRRYVPDLTSRVRSVREAAERMAWNMPVQGTAADLMKIAMVKLFPRLKPLGAHLLLQVHDELVLEVPRDRAEEAKSLVKEVMENAYPLDVPLEVEVGVGRDWLEAKQD

SEQ ID NO: 869 - DNA, 2538 bp, synthetic construct
  misc_feature 1..2538: note = DNA Polymerase Variant
  source 1..2538: mol_type = other DNA
atgcaccatcatcatcatcatggcggtagcggcatgttaccgctgtttgatttggaagaaccaccaaaacgcgtgctgcttgttgacggccatcatctggcgtatcgtaccttctacgcactgagccttacgacctcacgtggtgagcctgtccagatggtgtatgggtttgctcgctccctgctgaaagccctgaaggaagatggtcaagccgtagtagtggttttcgatgcgaaagcaccgtcgtttcgtcacgaagcgtacgaggcctataaagctggccgcgcaccgaccccggaagactttccgcgtcagttagcgctcgtcaaacgcctcgtggatttgctgggattagttcgcttggaagctcctggctacgaggcggacgacgtgctcggtacactggccaagaaagcagaacgtgaaggcatggaggtctgcattcttaccggtgatcgcgatttcttccagctgctgtctgagaaagtgagcgttttgctgcccgatggcacgttagtaaccccgaaagatgtgcaagagaaatatggagttccgccagaacgttgggtggactttcgcgcactgactggtgatcgttcagacaacatcccgggcgttgccgggattggtgaaaagacggcgctgcgcctgctggcagaatggggctcggtggaaaatctgctcaagaaccttgatcgtgtgaaacctgatagcttacgccgcaagatcgaagcccacctggaagacttgcgtctgagtctggatcttgcccgtattcgcaccgatctgccgttggaagtagactttaaagctctgcgtcgtcgcacacccgatttagaggggttacgcgcgttcctcgaagaactggagctgggctccctgctgcatgaattcggtttgttgggcggagagaaaccgcgtgaagaagcaccatggccgccgcccgaaggtgcctttgtcggctttcttctgtcacgcaaagagccaatgtgggcggaactgttagctcttgcagccgccgcggaagggcgtgttcaccgcgcgacctctcctgtcgaggccctcgctgacctcaaagaagcacgtggtttcttggcgaaagatttagccgtgcttgcattacgcgaaggcgttgcgctcgatccgacggacgacccgcttttggtggcttatttgctcgatcatgcgaataccaacccggaacgtgtcgcccgtcgttacggcggcgagtttactgaagatgcggcagaacgcgcgttgcttagcgaacgcctcttccagacgttatttccacgtctttcggagaaattactctggctctatcaggaagtcgaacgtccagtgagtcgcgtgcttgcccatatggaggctcgcggtgtgcgcttagatgttccgttgttagaagcactcagcttcgagttggagaaagaactggaacgtcttgaaggcgaagtctttcgtttagcggggcatcccttcaatctcaactctcgcgaccaattggagaaagtgctctttgatgaattaggtttaacccctgtcacgcgtacagagaagaccggcaaacgttccacttcggcagccgccttggaagcacttcgtggtgctcacccgatcgtcgagttgattttgcagtatcgcgagctcagcaaactcaaatcaacctatcttgataggttacctcgtcttgttcatccacgtacgggtcgtttacacacccgcttcaatcaaacggcaacagccaccgggcgcttgtcgtcgagtgacccgaacctccagaatattccagtgcgcacgccgctgggccaacacattcgtaaagcgtttgttgcggaagaaggttggttattacttgcggccgattactcccagatcgaacttcgtgtattggcgcatctctctggcgacgagaatcttaaacgcgtgtttcgcgaaggcaaggatattcacactgaaaccgcagcctggatgttcggggtggacccagccttagtggaccccaagatgcgtcgtgccgccaagaccgtcaactttggcgtactctatggtatgtcagcagcacgtcttagtcaggaattgggcattgactacaaagaagctgaagcgtttatcgagcgctatttccaatcctttccgaaagttcgcgcgtggattgaacgtacgctcgaagaaggtcgcactcgcggctatgtggaaacgttattcgggcgtcgtcgctacgttccagatcttacgtctcgtgtccgctcagtgcgcgaagctgctgagcgtatggcctggaatatgcctgttcagggaacagcggcggacctcatgaagatcgccatggtgaaattgtttccgcgcttgaaacccttaggagcccaccttcttttacaggtgcatgatgaattggtcttggaagtacccgaggatcgcgcagaagaagccaaagcactcgtgaaagaggttatggaaaacgcgtatccgttagatgttccgttggaggtcgaagtgggtgtaggccgtgattggcttgaagcgaaacaagactaatga

SEQ ID NO: 870 - protein, 844 aa, synthetic construct; identical to SEQ ID NO: 736
  REGION 1..844: note = DNA Polymerase Variant

SEQ ID NO: 871 - DNA, 2538 bp, synthetic construct
  misc_feature 1..2538: note = DNA Polymerase Variant
  source 1..2538: mol_type = other DNA
atgcaccatcatcatcatcatggcggtagcggcatgttaccgctgtttgatttggaagaaccaccaaaacgcgtgctgcttgttgacggccatcatctggcgtatcgtaccttctacgcactgagccttacgacctcacgtggtgagcctgtccagatggtgtatgggtttgctcgctccctgctgaaagccctgaaggaagatggtcaagccgtagtagtggttttcgatgcgaaagcaccgtcgtttcgtcacgaagcgtacgaggcctataaagctggccgcgcaccgaccccggaagactttccgcgtcagttagcgctcgtcaaacgcctcgtggatttgctgggattagttcgcttggaagctcctggctacgaggcggacgacgtgctcggtacactggccaagaaagcagaacgtgaaggcatggaggtctgcattcttaccggtgatcgcgatttcttccagctgctgtctgagaaagtgagcgttttgctgcccgatggcacgttagtaaccccgaaagatgtgcaagagaaatatggagttccgccagaacgttgggtggactttcgcgcactgactggtgatcgttcagacaacatcccgggcgttgccgggattggtgaaaagacggcgctgcgcctgctggcagaatggggctcggtggaaaatctgctcaagaaccttgatcgtgtgaaacctgatagcttacgccgcaagatcgaagcccacctggaagacttgcgtctgagtctggatcttgcccgtattcgcaccgatctgccgttggaagtagactttaaagctctgcgtcgtcgcacacccgatttagaggggttacgcgcgttcctcgaagaactggagctgggctccctgctgcatgaattcggtttgttgggcggagagaaaccgcgtgaagaagcaccatggccgccgcccgaaggtgcctttgtcggctttcttctgtcacgcaaagagccaatgtgggcggaactgttagctcttgcagccgccgcggaagggcgtgttcaccgcgcgacctctcctgtcgaggccctcgctgacctcaaagaagcacgtggtttcttggcgaaagatttagccgtgcttgcattacgcgaaggcgttgcgctcgatccgacggacgacccgcttttggtggcttatttgctcgatcatgcgaataccaacccggaacgtgtcgcccgtcgttacggcggcgagtttactgaagatgcggcagaacgcgcgttgcttagcgaacgcctcttccagacgttatttccacgtctttcggagaaattactctggctctatcaggaagtcgaacgtccattgagtcgcgtgcttgcccatatggaggctcgcggtgtgcgcttagatgttccgttgttagaagcactcagcttcgagttggagaaagaactggaacgtcttgaaggcgaagtctttcgtttagcggggcatcccttcaatctcaactctcgcgaccaattggagaaagtgctctttgatgaattaggtttaacccctgtcacgcgtacagagaagaccggcaaacgttccacttcggcagccgccttggaagcacttcgtggtgctcacccgatcgtcgagttgattttgcagtatcgcgagctcagcaaactcaaatcaacctatcttgataggttacctcgtcttgttcatccacgtacgggtcgtttacacacccgcttcaatcaaacggcaacagccaccgggcgcttgtcgtcgagtgacccgaacctccagaatattccagtgcgcacgccgctgggccaacacattcgtaaagcgtttgttgcggaagaaggttggttattacttgcggccgattactcccagatcgaacttcgtgtattggcgcatctctctggcgacgagaatcttaaacgcgtgtttcgcgaaggcaaggatattcacactgaaaccgcagcctggatgttcggggtggacccagccttagtggaccccaagatgcgtcgtgccgccaagaccgtcaactttggcgtactctatggtatgtcagcagcacgtcttagtcaggaattgggcattgactacaaagaagctgaagcgtttatcgagcgctatttccaatcctttccgaaagttcgcgcgtggattgaacgtacgctcgaagaaggtcgcactcgcggctatattgaaacgttattcgggcgtcgtcgctacgttccagatcttacgtctcgtgtccgctcagtgcgcgaagctgctgagcgtatggcctggaatatgcctgttcagggaacagcggcggacctcatgaagatcgccatggtgaaattgtttccgcgcttgaaacccttaggagcccaccttcttttacaggtgcatgatgaattggtcttggaagtacccgaggatcgcgcagaagaagccaaagcactcgtgaaagaggttatggaaaacgcgtatccgttagatgttccgttggaggtcgaagtgggtgtaggccgtgattggcttgaagcgaaacaagactaatga

SEQ ID NO: 872 - protein, 844 aa, synthetic construct
  REGION 1..844: note = DNA Polymerase Variant
MHHHHHHGGSGMLPLFDLEEPPKRVLLVDGHHLAYRTFYALSLTTSRGEPVQMVYGFARSLLKALKEDGQAVVVVFDAKAPSFRHEAYEAYKAGRAPTPEDFPRQLALVKRLVDLLGLVRLEAPGYEADDVLGTLAKKAEREGMEVCILTGDRDFFQLLSEKVSVLLPDGTLVTPKDVQEKYGVPPERWVDFRALTGDRSDNIPGVAGIGEKTALRLLAEWGSVENLLKNLDRVKPDSLRRKIEAHLEDLRLSLDLARIRTDLPLEVDFKALRRRTPDLEGLRAFLEELELGSLLHEFGLLGGEKPREEAPWPPPEGAFVGFLLSRKEPMWAELLALAAAAEGRVHRATSPVEALADLKEARGFLAKDLAVLALREGVALDPTDDPLLVAYLLDHANTNPERVARRYGGEFTEDAAERALLSERLFQTLFPRLSEKLLWLYQEVERPLSRVLAHMEARGVRLDVPLLEALSFELEKELERLEGEVFRLAGHPFNLNSRDQLEKVLFDELGLTPVTRTEKTGKRSTSAAALEALRGAHPIVELILQYRELSKLKSTYLDRLPRLVHPRTGRLHTRFNQTATATGRLSSSDPNLQNIPVRTPLGQHIRKAFVAEEGWLLLAADYSQIELRVLAHLSGDENLKRVFREGKDIHTETAAWMFGVDPALVDPKMRRAAKTVNFGVLYGMSAARLSQELGIDYKEAEAFIERYFQSFPKVRAWIERTLEEGRTRGYIETLFGRRRYVPDLTSRVRSVREAAERMAWNMPVQGTAADLMKIAMVKLFPRLKPLGAHLLLQVHDELVLEVPEDRAEEAKALVKEVMENAYPLDVPLEVEVGVGRDWLEAKQD

SEQ ID NO: 873 - DNA, 2538 bp, synthetic construct
  misc_feature 1..2538: note = DNA Polymerase Variant
  source 1..2538: mol_type = other DNA
atgcaccatcatcatcatcatggcggtagcggcatgttaccgctgtttgatttggaagaaaacccaaaacgcgtgctgcttgttgacggccatcatctggcgtatcgtaccttctacgcactgagccttacgacctcacgtggtgagcctgtccagatggtgtatgggtttgctcgctccctgctgaaagccctgaaggaagatggtcaagccgtagtagtggttttcgatgcgcgcgcaccgtcgtttcgtcacgaagcgtacgaggcctataaagctggccgcgcaccgaccccggaagactttccgcgtcagttagcgctcgtcaaacgcctcgtggatttgctgggattagttcgcttggaagctcctggctacgaggcggacgacgtgctcggtacactggccaagaaagcagaacgtgaaggcatggaggtctgcattcttaccggtgatcgcgatttcttccagctgctgtctgagaaagtgagcgttttgctgcccgatggcacgttagtaaccccgaaagatgtgcaagagaaatatggagttccgccagaacgttgggtggactttcgcgcactgactggtgatcgttcagacaacatcccgggcgttgccgggattggtgaaaagacggcgctgcgcctgctggcagaatggggctcggtggaaaatctgctcaagaaccttgatcgtgtgaaacctgatagcttacgccgcaagatcgaagcccacctggaagacttgcgtctgagtctggatcttgcccgtattcgcaccgatctgccgttggaagtagactttaaagctctgcgtcgtcgcacacccgatttagaggggttacgcgcgttcctcgaagaactggagctgggctccctgctgcatgaattcggtttgttgggcggggagaaaccgcgtgaagaagcaccatggccgccgcccgaaggtgcctttgtcggctttcttctgtcacgcaaagagccaatgtgggcggaactgttagctcttgcagccgccgcggaagggcgtgttcaccgcgcgacctctcctgtcgaggccctcgctgacctcggggaagcacgtggtttcttggcgaaagatttagccgtgcttgcattacgcgaaggcgttgccctcgatccgacggacgacccgcttttggtggcttatttgctcgatcatgcgaataccaacccggaacgtgtcgcccgtcgttacggcggcgagtttactgaagatgcggcagaacgcgcgttgcttagcgaacgcctcttccagacgttatttccacgtctttcggagaaattactctggctctatggtgaagtcgaacgtccattgagtcgcgtgcttgcccatatggaggctcgcggtgtgcgcttagatgttccgttgttagaagcactcagcttcgagttggagaaagaactggaacgtcttgaaggcgaagtctttcgtttagcggggcatcccttcaatctcaactctcgcgaccaattggagaaagtgctctttgatgaattaggtttaacccctgtcacgcgtacagagaagaccggcaaacgttccacttcggcagccgccttggaagcacttcgtggtgctcacccgatcgtcgagttgattttgcagtatcgcgagctcagcaaactcaaatcaacctatcttgataggttacctcgtcttgttcatccacgtacgggtcgtttacacacccgcttcaatcaaacggcaacagccaccgggcgcttgtcgtcgagtgacccgaacctccagaatattccagtgcgcacgccgctgggccaacacattcgtaaagcgtttgttgcggaagaaggttggttattacttgcggccgattactcccagatcgaacttcgtgtattggcgcatctctctggcgacgagaatcttaaacgcgtgtttcgcgaaggcaaggatattcacactgaaaccgcagcctggatgttcggggtggactcggccttagtggaccccaagatgcgtcgtgccgccaagaccgtcaactttggcgtactctatggtatgtcagcagcacgtcttagtcaggaattgggcattgactacaaagaggctgaagcgtttatcgagcgctatttccaatcctttccgaaagttcgcgcgtggattgaacgtacgctcgaagaaggtcgcactcgcggctatgtggaaacgttattcgggcgtcgtcgctacgttccagatcttacgtctcgtgtccgctcagtgcgcgaagctgctgagcgtatggcctggaatatgcctgttcagggaacagcggcggacctcatgaagatcgccatggtgaaattgtttccgcgcttgaaacccttaggagcccaccttcttttacaggtgcatgatgaattggtcttggaagtacccgaggatcgcgcagaagaagccaaagcactcgtgaaagaggttatggaaaacgcgtatccgttagatgttccgttggaggtcgaagtgggtgtaggccgtgattggcttgaagcgaaacaagactaatga

SEQ ID NO: 874 - protein, 844 aa, synthetic construct
  REGION 1..844: note = DNA Polymerase Variant
MHHHHHHGGSGMLPLFDLEENPKRVLLVDGHHLAYRTFYALSLTTSRGEPVQMVYGFARSLLKALKEDGQAVVVVFDARAPSFRHEAYEAYKAGRAPTPEDFPRQLALVKRLVDLLGLVRLEAPGYEADDVLGTLAKKAEREGMEVCILTGDRDFFQLLSEKVSVLLPDGTLVTPKDVQEKYGVPPERWVDFRALTGDRSDNIPGVAGIGEKTALRLLAEWGSVENLLKNLDRVKPDSLRRKIEAHLEDLRLSLDLARIRTDLPLEVDFKALRRRTPDLEGLRAFLEELELGSLLHEFGLLGGEKPREEAPWPPPEGAFVGFLLSRKEPMWAELLALAAAAEGRVHRATSPVEALADLGEARGFLAKDLAVLALREGVALDPTDDPLLVAYLLDHANTNPERVARRYGGEFTEDAAERALLSERLFQTLFPRLSEKLLWLYGEVERPLSRVLAHMEARGVRLDVPLLEALSFELEKELERLEGEVFRLAGHPFNLNSRDQLEKVLFDELGLTPVTRTEKTGKRSTSAAALEALRGAHPIVELILQYRELSKLKSTYLDRLPRLVHPRTGRLHTRFNQTATATGRLSSSDPNLQNIPVRTPLGQHIRKAFVAEEGWLLLAADYSQIELRVLAHLSGDENLKRVFREGKDIHTETAAWMFGVDSALVDPKMRRAAKTVNFGVLYGMSAARLSQELGIDYKEAEAFIERYFQSFPKVRAWIERTLEEGRTRGYVETLFGRRRYVPDLTSRVRSVREAAERMAWNMPVQGTAADLMKIAMVKLFPRLKPLGAHLLLQVHDELVLEVPEDRAEEAKALVKEVMENAYPLDVPLEVEVGVGRDWLEAKQD

SEQ ID NO: 875 - DNA, 2538 bp, synthetic construct
  misc_feature 1..2538: note = DNA Polymerase Variant
  source 1..2538: mol_type = other DNA
atgcaccatcatcatcatcatggcggtagcggcatgttaccgctgtttgatttggaagaaccaccaaaacgcgtgctgcttgttgacggccatcatctggcgtatcgtaccttctacgcactgagccttacgacctcacgtggtgagcctgtccagatggtgtatgggtttgctcgctccctgctgaaagccctgaaggaagatggtcaagccgtagtagtggttttcgatgcggctgcaccgtcgtttcgtcacgaagcgtacgaggcctataaagctggccgcgcaccgaccccggaagactttccgcgtcagttagcgctcgtcaaacgcctcgtggatttgctgggattagttcgcttggaagctcctggctacgaggcggacgacgtgctcggtacactggccaagaaagcagaacgtgaaggcatggaggtctgcattcttaccggtgatcgcgatttcttccagctgctgtctgagaaagtgagcgttttgctgcccgatggcacgttagtaaccccgaaagatgtgcaagagaaatatggagttccgccagaacgttgggtggactttcgcgcactgactggtgatcgttcagacaacatcccgggcgttgccgggattggtgaaaagacggcgctgcgcctgctggcagaatggggctcggtggaaaatctgctcaagaaccttgatcgtgtgaaacctgatagcttacgccgcaagatcgaagcccacctggaagacttgcgtctgagtctggatcttgcccgtattcgcaccgatctgccgttggaagtagactttaaagctctgcgtcgtcgcacacccgatttagaggggttacgcgcgttcctcgaagaactggagctgggctccctgctgcatgaattcggtttgttgggcggagagaaaccgcgtgaagaagcaccatggccgccgcccgaaggtgcctttgtcggctttcttctgtcacgcaaagagccaatgtgggcggaactgttagctcttgtagccgccgcggaagggcgtgttcaccgcgcgacctctcctgtcgaggccctcgctgacctcgtggaagcacgcggtttcttggcgaaagatttagccgtgcttgcattacgcgaaggcgttgcgctcgatccgacggacgacccgcttttggtggcttatttgctcgatcatgcgaataccaacccggaacgtgtcgcccgtcgttacggcggcgagtttactgaagatgcggcagaacgcgcgttgcttagcgaacgcctcttccagacgttatttccacgtctttcggagaaattactctggctctatcaggaagtcgaacgtccattgagtcgcgtgcttgcccatatggaggctcgcggtgtgcgcttagatgttccgttgttagaagcactcagcttcgagttggagaaagaactggaacgtcttgaaggcgaagtctttcgtttagcggggcatcccttcaatctcaactctcgcgaccaattggagaaagtgctctttgatgaattaggtttaacccctgtcacgcgtacagagaagaccggcaaacgttccacttcggcagccgccttggaagcacttcgtggtgctcacccgatcgtcgagttgattttgcagtatcgcgagctcagcaaactcaaatcaacctatcttgataggttacctaagcttgttcatccacgtacgggtcgtttacacacccgcttcaatcaaacggcaacagccaccgggcgcttgtcgtcgagtgacccgaacctccagaatattccagtgcgcacgccgctgggccaacacattcgtaaagcgtttgttgcggaagagggttggttattacttgcggccgattactcccagatcgaacttcgtgtattggcgcatctctctggcgacgagaatcttaaacgtgtgtttcgcgaaggcaaggatattcacactgaaaccgcagcctggatgttcggggtggacccagccttagtggaccccaagatgcgtcgtgccgccaagaccgtcaactttggcgtactctatggtatgtcagcagcacgtcttagtcaggaattgggcattgactacaaagaggctgaagcgtttatcgagcgctatttccaatcctttccgaaagttcgcgcgtggattgaacgtacgctcgaagaaggtcgcactcgcggctatgtggaaacgttattcgggcgtcgtcgctacgttccagatcttacgtctcgtgtccgctcagtgcgcgaagctgctgagcgtatggcctggaatatgcctgttcagggaacagcggcggacctcatgaagatcgccatggtgaaattgtttccgcgcttgaaacccttaggagcccaccttcttttacaggtgcatgatgaattggtcttggaagtacccgaggatcgcgcagaagaagccaaagcactcgtgaaagaggttatggaaaacgcgtatccgttagatgttccgttggaggtcgaagtgggtgtaggccgtgattggcttgaagcgaaacaagactaatga

SEQ ID NO: 876 - protein, 844 aa, synthetic construct
  REGION 1..844: note = DNA Polymerase Variant
MHHHHHHGGSGMLPLFDLEEPPKRVLLVDGHHLAYRTFYALSLTTSRGEPVQMVYGFARSLLKALKEDGQAVVVVFDAAAPSFRHEAYEAYKAGRAPTPEDFPRQLALVKRLVDLLGLVRLEAPGYEADDVLGTLAKKAEREGMEVCILTGDRDFFQLLSEKVSVLLPDGTLVTPKDVQEKYGVPPERWVDFRALTGDRSDNIPGVAGIGEKTALRLLAEWGSVENLLKNLDRVKPDSLRRKIEAHLEDLRLSLDLARIRTDLPLEVDFKALRRRTPDLEGLRAFLEELELGSLLHEFGLLGGEKPREEAPWPPPEGAFVGFLLSRKEPMWAELLALVAAAEGRVHRATSPVEALADLVEARGFLAKDLAVLALREGVALDPTDDPLLVAYLLDHANTNPERVARRYGGEFTEDAAERALLSERLFQTLFPRLSEKLLWLYQEVERPLSRVLAHMEARGVRLDVPLLEALSFELEKELERLEGEVFRLAGHPFNLNSRDQLEKVLFDELGLTPVTRTEKTGKRSTSAAALEALRGAHPIVELILQYRELSKLKSTYLDRLPKLVHPRTGRLHTRFNQTATATGRLSSSDPNLQNIPVRTPLGQHIRKAFVAEEGWLLLAADYSQIELRVLAHLSGDENLKRVFREGKDIHTETAAWMFGVDPALVDPKMRRAAKTVNFGVLYGMSAARLSQELGIDYKEAEAFIERYFQSFPKVRAWIERTLEEGRTRGYVETLFGRRRYVPDLTSRVRSVREAAERMAWNMPVQGTAADLMKIAMVKLFPRLKPLGAHLLLQVHDELVLEVPEDRAEEAKALVKEVMENAYPLDVPLEVEVGVGRDWLEAKQD

SEQ ID NO: 877 - DNA, 2538 bp, synthetic construct
  misc_feature 1..2538: note = DNA Polymerase Variant
  source 1..2538: mol_type = other DNA
atgcaccatcatcatcatcatggcggtagcggcatgttaccgctgtttgatttggaagaaaacccaaaacgcgtgctgcttgttgacggccatcatctggcgtatcgtaccttctacgcactgagccttacgacctcacgtggtgagcctgtccagatggtgtatgggtttgctcgctccctgctgaaagccctgaaggaagatggtcaagccgtagtagtggttttcgatgcgaaagcaccgtcgtttcgtcacgaagcgtacgaggcctataaagctggccgcgcaccgaccccggaagactttccgcgtcagttagcgctcgtcaaacgcctcgtggatttgctgggattagttcgcttggaagctcctggctacgaggcggacgacgtgctcggtacactggccaagaaagcagaacgtgaaggcatggaggtctgcattcttaccggtgatcgcgatttcttccagctgctgtctgagaaagtgagcgttttgctgcccgatggcacgttagtaaccccgaaagatgtgcaagagaaatatggagttccgccagaacgttgggtggactttcgcgcactgactggtgatcgttcagacaacatcccgggcgttgccgggattggtgaaaagacggcgctgcgcctgctggcagaatggggctcggtggaaaatctgctcaagaaccttgatcgtgtgaaacctgatagcttacgccgcaagatcgaagcccacctggaagacttgcgtctgagtctggatcttgcccgtattcgcaccgatctgccgttggaagtagactttaaagctctgcgtcgtcgcacacccgatttagaggggttacgcgcgttcctcgaagaactggagctgggctccctgctgcatgaattcggtttgttgggcggggagaaaccgcgtgaagaagcaccatggccgccgcccgaaggtgcctttgtcggctttcttctgtcacgcaaagagccaatgtgggcggaactgttagctcttgcagccgccgcggaagggcgtgttcaccgcgcgacctctcctgtcgaggccctcgctgacctcaaagaagcacgtggtttcttggcgaaagatttagccgtgcttgcattacgcgaaggcgttgcgctcgatccgacggacgacccgcttttggtggcttatttgctcgatcatgcgaataccaacccggaacgtgtcgcccgtcgttacggcggcgagtttactgaagatgcggcagaacgcgcgttgcttagcgaacgcctcttccagacgttatttccacgtctttcggagaaattactctggctctatcaggaagtcgaacgtccattgagtcgcgtgcttgcccatatggaggctcgcggtgtgcgcttagatgttccgttgttagaagcactcagcttcgagttggagaaagaactggaacgtcttgaaggcgaagtctttcgtttagcggggcatcccttcaatctcaactctcgcgaccaattggagaaagtgctctttgatgaattaggtttaacccctgtcacgcgtacagagaagaccggcaaacgttccacttcggcagccgccttggaagcacttcgtggtgctcacccgatcgtcgagttgattttgcagtatcgcgagctcagcaaactcaaatcaacctatcttgataggttacctcgtcttgttcatccacgtacgggtcgtttacacacccgcttcaatcaaacggcaacagccaccgggcgcttgtcgtcgagtgacccgaacctccagaatattccagtgcgcacgccgctgggccaacacattcgtaaagcgtttgttgcggaacatggttggttattacttgcggccgattactcccagatcgaacttcgtgtattggcgcatctctctggcgacgagaatcttaaacgcgtgtttcgcgaaggcaaggatattcacactgaaaccgcagcctggatgttcggggtggactcggccttagtggaccccaagatgcgtcgtgccgccaagaccgtcaactttggcgtactctatggtatgtcagcagcacgtcttagtcaggaattgggcattgactacaaagaagctgaagcgtttatcgagcgctatttccaatcctttccgaaagttcgcgcgtggattgaacgtacgctcgaagaaggtcgcactcgcggctatgtggaaacgttattcgggcgtcgtcgctacgttaaggatcttacgtctcgtgtccgctcagtgcgcgaagctgctgagcgtatggcctggaatatgcctgttcagggaacagcggcggacctcatgaagatcgccatggtgaaattgtttccgcgcttgaaacccttaggagcccaccttcttttacaggtgcatgatgaattggtcttggaagtacccgaggatcgcgcagaagaagccaaagcactcgtgaaagaggttatggaaaacgcgtatccgttagatgttccgttggaggtcgaagtgggtgtaggccgtgattggcttgaagcgaaacaagactaatga

SEQ ID NO: 878 - protein, 844 aa, synthetic construct
  REGION 1..844: note = DNA Polymerase Variant
MHHHHHHGGSGMLPLFDLEENPKRVLLVDGHHLAYRTFYALSLTTSRGEPVQMVYGFARSLLKALKEDGQAVVVVFDAKAPSFRHEAYEAYKAGRAPTPEDFPRQLALVKRLVDLLGLVRLEAPGYEADDVLGTLAKKAEREGMEVCILTGDRDFFQLLSEKVSVLLPDGTLVTPKDVQEKYGVPPERWVDFRALTGDRSDNIPGVAGIGEKTALRLLAEWGSVENLLKNLDRVKPDSLRRKIEAHLEDLRLSLDLARIRTDLPLEVDFKALRRRTPDLEGLRAFLEELELGSLLHEFGLLGGEKPREEAPWPPPEGAFVGFLLSRKEPMWAELLALAAAAEGRVHRATSPVEALADLKEARGFLAKDLAVLALREGVALDPTDDPLLVAYLLDHANTNPERVARRYGGEFTEDAAERALLSERLFQTLFPRLSEKLLWLYQEVERPLSRVLAHMEARGVRLDVPLLEALSFELEKELERLEGEVFRLAGHPFNLNSRDQLEKVLFDELGLTPVTRTEKTGKRSTSAAALEALRGAHPIVELILQYRELSKLKSTYLDRLPRLVHPRTGRLHTRFNQTATATGRLSSSDPNLQNIPVRTPLGQHIRKAFVAEHGWLLLAADYSQIELRVLAHLSGDENLKRVFREGKDIHTETAAWMFGVDSALVDPKMRRAAKTVNFGVLYGMSAARLSQELGIDYKEAEAFIERYFQSFPKVRAWIERTLEEGRTRGYVETLFGRRRYVKDLTSRVRSVREAAERMAWNMPVQGTAADLMKIAMVKLFPRLKPLGAHLLLQVHDELVLEVPEDRAEEAKALVKEVMENAYPLDVPLEVEVGVGRDWLEAKQD

SEQ ID NO: 879 - DNA, 2538 bp, synthetic construct
  misc_feature 1..2538: note = DNA Polymerase Variant
  source 1..2538: mol_type = other DNA
atgcaccatcatcatcatcatggcggtagcggcatgttaccgctgtttgatttggaagaagcaccaaaacgcgtgctgcttgttgacggccatcatctggcgtatcgtaccttctacgcactgagccttacgacctcacgtggtgagcctgtccagatggtgtatgggtttgctcgctccctgctgaaagccctgaaggaagatggtcaagccgtagtagtggttttcgatgcggctgcaccgtcgtttcgtcacgaagcgtacgaggcctataaagctggccgcgcaccgaccccggaagactttccgcgtcagttagcgctcgtcaaacgcctcgtggatttgctgggattagttcgcttggaagctcctggctacgaggcggacgacgtgctcggtacactggccaagaaagcagaacgtgaaggcatggaggtctgcattcttaccggtgatcgcgatttcttccagctgctgtctgagaaagtgagcgttttgctgcccgatggcacgttagtaaccccgaaagatgtgcaagagaaatatggagttccgccagaacgttgggtggactttcgcgcactgactggtgatcgttcagacaacatcccgggcgttgccgggattggtgaaaagacggcgctgcgcctgctggcagaatggggctcggtggaaaatctgctcaagaaccttgatcgtgtgaaacctgatagcttacgccgcaagatcgaagcccacctggaagacttgcgtctgagtctggatcttgcccgtattcgcaccgatctgccgttggaagtagactttaaagctctgcgtcgtcgcacacccgatttagaggggttacgcgcgttcctcgaagaactggagctgggctccctgctgcatgaattcggtttgttgggcaccgagaaaccgcgtgaagaagcaccatggccgccgcccgaaggtgcctttgtcggctttcttctgtcacgcaaagagccaatgtgggcggaactgttagctcttgcagccgccgcggaagggcgtgttcaccgcgcgacctctcctgtcgaggccctcgctgacctcaaagaagcacgtggtttcttggcgaaagatttagccgtgcttgcattacgcgaaggcgttgcgctcgatccgacggacgacccgcttttggtggcttatttgctcgatcatgcgaataccaacccggaacgtgtcgcccgtcgttacggcggcgagtttactgaagatgcggcagaacgcgcgttgcttagcgaacgcctcttccagacgttatttccacgtctttcggagaaattactctggctctatcaagaagtcgaacgtccattgagtcgcgtgcttgcccatatggaggctcgcggtgtgcgcttagatgttccgttgttagaagcactcagcttcgagttggagaaagaactggaacgtcttgaaggcgaagtctttcgtttagcggggcatcccttcaatctcaactctcgcgaccaattggagaaagtgctctttgatgaattaggtttaacccctgtcacgcgtacagagaagaccggcaaacgttccacttcggcagccgccttggaagcacttcgtggtgctcacccgatcgtcgagttgattttgcagtatcgcgagctcagcaaactcaaatcaacctatcttgataggttacctcgtcttgttcatccacgtacgggtcgtttacacacccgcttcaatcaaacggcaacagccaccgggcgcttgtcgtcgagtgacccgaacctccagaatattccagtgcgcacgccgctgggccaacacattcgtaaagcgtttgttgcggaagagggttggttattacttgcggccgattactcccagatcgaacttcgtgtattggcgcatctctctggcgacgagaatcttaaacgtgtgtttcgcgaaggcaaggatattcacactgaaaccgcagcctggatgttcggggtggactcggccttagtggaccccaagatgcgtcgtgccgccaagaccgtcaactttggcgtactctatggtatgtcagcagcacgtcttagtcaggaattgggcattgactacaaagtggctgaagcgtttatcgagcgctatttccaatcctttccgaaagttcgcgcgtggattgaacgtacgctcgaagaaggtcgcactcgcggctatgtggaaacgttattcgggcgtcgtcgctacgttaaggatcttacgtctcgtgtccgctcagtgcgcgaagctgctgagcgtatggcctggaatatgcctgttcagggaacagcggcggacctcatgaagatcgccatggtgaaattgtttccgcgcttgaaacccttaggagcccaccttcttttacaggtgcatgatgaattggtcttggaagtacccgaggatcgcgcatacgaagccaaagcgctcgtgaaagaggttatggaaaacgcgtatccgttagatgttccgttggaggtcgaagtgggtgtaggccgtgattggcttgaagcgaaacaagactaatga

SEQ ID NO: 880 - protein, 844 aa, synthetic construct
  REGION 1..844: note = DNA Polymerase Variant
MHHHHHHGGSGMLPLFDLEEAPKRVLLVDGHHLAYRTFYALSLTTSRGEPVQMVYGFARSLLKALKEDGQAVVVVFDAAAPSFRHEAYEAYKAGRAPTPEDFPRQLALVKRLVDLLGLVRLEAPGYEADDVLGTLAKKAEREGMEVCILTGDRDFFQLLSEKVSVLLPDGTLVTPKDVQEKYGVPPERWVDFRALTGDRSDNIPGVAGIGEKTALRLLAEWGSVENLLKNLDRVKPDSLRRKIEAHLEDLRLSLDLARIRTDLPLEVDFKALRRRTPDLEGLRAFLEELELGSLLHEFGLLGTEKPREEAPWPPPEGAFVGFLLSRKEPMWAELLALAAAAEGRVHRATSPVEALADLKEARGFLAKDLAVLALREGVALDPTDDPLLVAYLLDHANTNPERVARRYGGEFTEDAAERALLSERLFQTLFPRLSEKLLWLYQEVERPLSRVLAHMEARGVRLDVPLLEALSFELEKELERLEGEVFRLAGHPFNLNSRDQLEKVLFDELGLTPVTRTEKTGKRSTSAAALEALRGAHPIVELILQYRELSKLKSTYLDRLPRLVHPRTGRLHTRFNQTATATGRLSSSDPNLQNIPVRTPLGQHIRKAFVAEEGWLLLAADYSQIELRVLAHLSGDENLKRVFREGKDIHTETAAWMFGVDSALVDPKMRRAAKTVNFGVLYGMSAARLSQELGIDYKVAEAFIERYFQSFPKVRAWIERTLEEGRTRGYVETLFGRRRYVKDLTSRVRSVREAAERMAWNMPVQGTAADLMKIAMVKLFPRLKPLGAHLLLQVHDELVLEVPEDRAYEAKALVKEVMENAYPLDVPLEVEVGVGRDWLEAKQD

SEQ ID NO: 881 - DNA, 2538 bp, synthetic construct
  misc_feature 1..2538: note = DNA Polymerase Variant
  source 1..2538: mol_type = other DNA
atgcaccatcatcatcatcatggcggtagcggcatgttaccgctgtttgatttggaagaagcaccaaaacgcgtgctgcttgttgacggccatcatctggcgtatcgtaccttctacgcactgagccttacgacctcacgtggtgagcctgtccagatggtgtatgggtttgctcgctccctgctgaaagccctgaaggaagatggtcaagccgtagtagtggttttcgatgcggctgcaccgtcgtttcgtcacgaagcgtacgaggcctataaagctggccgcgcaccgaccccggaagactttccgcgtcagttagcgctcgtcaaacgcctcgtggatttgctgggattagttcgcttggaagctcctggctacgaggcggacgacgtgctcggtacactggccaagaaagcagaacgtgaaggcatggaggtctgcattcttaccggtgatcgcgatttcttccagctgctgtctgagaaagtgagcgttttgctgcccgatggcacgttagtaaccccgaaagatgtgcaagagaaatatggagttccgccagaacgttgggtggactttcgcgcactgactggtgatcgttcagacaacatcccgggcgttgccgggattggtgaaaagacggcgctgcgcctgctggcagaatggggctcggtggaaaatctgctcaagaaccttgatcgcgtgaaacctgatagcttacgccgcaagatcgaagcccacctggaagacttgcgtctgagtctggatcttgcccgtattcgcaccgatctgccgttggaagtagactttaaagctctgcgtcgtcgcacacccgatttagaggggttacgcgcgttcctcgaagaactggagctgggctccctgctgcatgaattcggtttgttgggcggagagaaaccgcgtgaagaagcaccatggccgccgcccgaaggtgcctttgtcggctttcttctgtcacgcaaagagccaatgtgggcggaactgttagctcttgtagccgccgcggaagggcgtgttcaccgcgcgacctctcctgtcgaggccctcgctgacctcaaagaagcacgtggtttcttggcgaaagatttagccgtgcttgcattacgcgaaggcgttgcgctcgatccgacggacgacccgcttttggtggcttatttgctcgatcatgcgaataccaacccggaacgtgtcgcccgtcgttacggcggcgagtttactgaagatgcggcagaacgcgcgttgcttagcgaacgcctcttccagacgttatttccacgtctttcggagaaattactctggctctatggtgaagtcgaacgtccattgagtcgcgtgcttgcccatatggaggctcgcggtgtgcgcttagatgttccgttgttagaagcactcagcttcgagttggagaaagaactggaacgtcttgaaggcgaagtctttcgtttagcggggcatcccttcaatctcaactctcgcgaccaattggagaaagtgctctttgatgaattaggtttaacccctgtcacgcgtacagagaagaccggcaaacgttccacttcggcagccgccttggaagcacttcgtggtgctcacccgatcgtcgagttgattttgcagtatcgcgagctcagcaaactcaaatcaacctatcttgataggttacctcgtcttgttcatccacgtacgggtcgtttacacacccgcttcaatcaaacggcaacagccaccgggcgcttgtcgtcgagtgacccgaacctccagaatattccagtgcgcacgccgctgggccaacacattcgtaaagcgtttgttgcggaacatggttggttattacttgcggccgattactcccagatcgaacttcgtgtattggcgcatctctctggcgacgagaatcttaaacgtgtgtttcgcgaaggcaaggatattcacactgaaaccgcagcctggatgttcggggtggacccagccttagtggaccccaagatgcgtcgtgccgccaagaccgtcaactttggcgtactctatggtatgtcagcagcacgtcttagtcaggaattgggcattgactacaaagtggctgaagcgtttatcgagcgctatttccaatcctttccgaaagttcgcgcgtggattgaacgtacgctcgaagaaggtcgcactcgcggctatgtggaaacgttattcgggcgtcgtcgctacgttccagatcttacgtctcgtgtccgctcagtgcgcgaagctgctgagcgtatggcctggaatatgcctgttcagggaacagcggcggacctcatgaagatcgccatggtgaaattgtttccgcgcttgaaacccttaggagcccaccttcttttacaggtgcatgatgaattggtcttggaagtacccgaggatcgcgcagaggaagccaaagcactcgtgaaagaggttatggaaaacgcgtatccgttagatgttccgttggaggtcgaagtgggtgtaggccgtgattggcttgaagcgaaacaagactaatga

SEQ ID NO: 882 - protein, 844 aa, synthetic construct
  REGION 1..844: note = DNA Polymerase Variant
MHHHHHHGGSGMLPLFDLEEAPKRVLLVDGHHLAYRTFYALSLTTSRGEPVQMVYGFARSLLKALKEDGQAVVVVFDAAAPSFRHEAYEAYKAGRAPTPEDFPRQLALVKRLVDLLGLVRLEAPGYEADDVLGTLAKKAEREGMEVCILTGDRDFFQLLSEKVSVLLPDGTLVTPKDVQEKYGVPPERWVDFRALTGDRSDNIPGVAGIGEKTALRLLAEWGSVENLLKNLDRVKPDSLRRKIEAHLEDLRLSLDLARIRTDLPLEVDFKALRRRTPDLEGLRAFLEELELGSLLHEFGLLGGEKPREEAPWPPPEGAFVGFLLSRKEPMWAELLALVAAAEGRVHRATSPVEALADLKEARGFLAKDLAVLALREGVALDPTDDPLLVAYLLDHANTNPERVARRYGGEFTEDAAERALLSERLFQTLFPRLSEKLLWLYGEVERPLSRVLAHMEARGVRLDVPLLEALSFELEKELERLEGEVFRLAGHPFNLNSRDQLEKVLFDELGLTPVTRTEKTGKRSTSAAALEALRGAHPIVELILQYRELSKLKSTYLDRLPRLVHPRTGRLHTRFNQTATATGRLSSSDPNLQNIPVRTPLGQHIRKAFVAEHGWLLLAADYSQIELRVLAHLSGDENLKRVFREGKDIHTETAAWMFGVDPALVDPKMRRAAKTVNFGVLYGMSAARLSQELGIDYKVAEAFIERYFQSFPKVRAWIERTLEEGRTRGYVETLFGRRRYVPDLTSRVRSVREAAERMAWNMPVQGTAADLMKIAMVKLFPRLKPLGAHLLLQVHDELVLEVPEDRAEEAKALVKEVMENAYPLDVPLEVEVGVGRDWLEAKQD

SEQ ID NO: 883 - DNA, 2538 bp, synthetic construct
  misc_feature 1..2538: note = DNA Polymerase Variant
  source 1..2538: mol_type = other DNA
atgcaccatcatcatcatcatggcggtagcggcatgttaccgctgtttgatttggaagaaccaccaaaacgcgtgctgcttgttgacggccatcatctggcgtatcgtaccttctacgcactgagccttacgacctcacgtggtgagcctgtccagatggtgtatgggtttgctcgctccctgctgaaagccctgaaggaagatggtcaagccgtagtagtggttttcgatgcggctgcaccgtcgtttcgtcacgaagcgtacgaggcctataaagctggccgcgcaccgaccccggaagactttccgcgtcagttagcgctcgtcaaacgcctcgtggatttgctgggattagttcgcttggaagctcctggctacgaggcggacgacgtgctcggtacactggccaagaaagcagaacgtgaaggcatggaggtctgcattcttaccggtgatcgcgatttcttccagctgctgtctgagaaagtgagcgttttgctgcccgatggcacgttagtaaccccgaaagatgtgcaagagaaatatggagttccgccagaacgttgggtggactttcgcgcactgactggtgatcgttcagacaacatcccgggcgttgccgggattggtgaaaagacggcgctgcgcctgctggcagaatggggctcggtggaaaatctgctcaagaaccttgatcgtgtgaaacctgatagcttacgccgcaagatcgaagcccacctggaagacttgcgtctgagtctggatcttgcccgtattcgcaccgatctgccgttggaagtagactttaaagctctgcgtcgtcgcacacccgatttagaggggttacgcgcgttcctcgaagaactggagctgggctccctgctgcatgaattcggtttgttgggcaccgagaaaccgcgtgaagaagcaccatggccgccgcccgaaggtgcctttgtcggctttcttctgtcacgcaaagagccaatgtgggcggaactgttagctcttgtagccgccgcggaagggcgtgttcaccgcgcgacctctcctgtcgaggccctcgctgacctcaaagaagcacgtggtttcttggcgaaagatttagccgtgcttgcattacgcgaaggcgttgcgctcgatccgacggacgacccgcttttggtggcttatttgctcgatcatgcgaataccaacccggaacgtgtcgcccgtcgttacggcggcgagtttactgaagatgcggcagaacgcgcgttgcttagcgaacgcctcttccagacgttatttccacgtctttcggagaaattactctggctctatcaggaagtcgaacgtccattgagtcgcgtgcttgcccatatggaggctcgcggtgtgcgcttagatgttccgttgttagaagcactcagcttcgagttggagaaagaactggaacgtcttgaaggcgaagtctttcgtttagcggggcatcccttcaatctcaactctcgcgaccaattggagaaagtgctctttgatgaattaggtttaacccctgtcacgcgtacagagaagaccggcaaacgttccacttcggcagccgccttggaagcacttcgtggtgctcacccgatcgtcgagttgattttgcagtatcgcgagctcagcaaactcaaatcaacctatcttgataggttacctaagcttgttcatccacgtacgggtcgtttacacacccgcttcaatcaaacggcaacagccaccgggcgcttgtcgtcgagtgacccgaacctccagaatattccagtgcgcacgccgctgggccaacacattcgtaaagcgtttgttgcggaacatggttggttattacttgcggccgattactcccagatcgaacttcgtgtattggcgcatctctctggcgacgagaatcttaaacgtgtgtttcgcgaaggcaaggatattcacactgaaaccgcagcctggatgttcggggtggactcggccttagtggaccccaagatgcgtcgtgccgccaagaccgtcaactttggcgtactctatggtatgtcagcagcacgtcttagtcaggaattgggcattgactacaaagaggctgaagcgtttatcgagcgctatttccaatcctttccgaaagttcgcgcgtggattgaacgtacgctcgaagaaggtcgcactcgcggctatgtggaaacgttattcgggcgtcgtcgctacgttccagatcttacgtctcgtgtccgctcagtgcgcgaagctgctgagcgtatggcctggaatatgcctgttcagggaacagcggcggacctcatgaagatcgccatggtgaaattgtttccgcgcttgaaacccttaggagcccaccttcttttacaggtgcatgatgaattggtcttggaagtacccgaggatcgcgcagaagaagccaaagcactcgtgaaagaggttatggaaaacgcgtatccgttagatgttccgttggaggtcgaagtgggtgtaggccgtgattggcttgaagcgaaacaagactaatga

SEQ ID NO: 884 - protein, 844 aa, synthetic construct
  REGION 1..844: note = DNA Polymerase Variant
MHHHHHHGGSGMLPLFDLEEPPKRVLLVDGHHLAYRTFYALSLTTSRGEPVQMVYGFARSLLKALKEDGQAVVVVFDAAAPSFRHEAYEAYKAGRAPTPEDFPRQLALVKRLVDLLGLVRLEAPGYEADDVLGTLAKKAEREGMEVCILTGDRDFFQLLSEKVSVLLPDGTLVTPKDVQEKYGVPPERWVDFRALTGDRSDNIPGVAGIGEKTALRLLAEWGSVENLLKNLDRVKPDSLRRKIEAHLEDLRLSLDLARIRTDLPLEVDFKALRRRTPDLEGLRAFLEELELGSLLHEFGLLGTEKPREEAPWPPPEGAFVGFLLSRKEPMWAELLALVAAAEGRVHRATSPVEALADLKEARGFLAKDLAVLALREGVALDPTDDPLLVAYLLDHANTNPERVARRYGGEFTEDAAERALLSERLFQTLFPRLSEKLLWLYQEVERPLSRVLAHMEARGVRLDVPLLEALSFELEKELERLEGEVFRLAGHPFNLNSRDQLEKVLFDELGLTPVTRTEKTGKRSTSAAALEALRGAHPIVELILQYRELSKLKSTYLDRLPKLVHPRTGRLHTRFNQTATATGRLSSSDPNLQNIPVRTPLGQHIRKAFVAEHGWLLLAADYSQIELRVLAHLSGDENLKRVFREGKDIHTETAAWMFGVDSALVDPKMRRAAKTVNFGVLYGMSAARLSQELGIDYKEAEAFIERYFQSFPKVRAWIERTLEEGRTRGYVETLFGRRRYVPDLTSRVRSVREAAERMAWNMPVQGTAADLMKIAMVKLFPRLKPLGAHLLLQVHDELVLEVPEDRAEEAKALVKEVMENAYPLDVPLEVEVGVGRDWLEAKQD

SEQ ID NO: 885 - DNA, 2538 bp, synthetic construct
  misc_feature 1..2538: note = DNA Polymerase Variant
  source 1..2538: mol_type = other DNA
atgcaccatcatcatcatcatggcggtagcggcatgttaccgctgtttgatttggaagaaccaccaaaacgcgtgctgcttgttgacggccatcatctggcgtatcgtaccttctacgcactgagccttacgacctcacgtggtgagcctgtccagatggtgtatgggtttgctcgctccctgctgaaagccctgaaggaagatggtcaagccgtagtagtggttttcgatgcgaaagcaccgtcgtttcgtcacgaagcgtacgaggcctataaagctggccgcgcaccgaccccggaagactttccgcgtcagttagcgctcgtcaaacgcctcgtggatttgctgggattagttcgcttggaagctcctggctacgaggcggacgacgtgctcggtacactggccaagaaagcagaacgtgaaggcatggaggtctgcattcttaccggtgatcgcgatttcttccagctgctgtctgagaaagtgagcgttttgctgcccgatggcacgttagtaaccccgaaagatgtgcaagagaaatatggagttccgccagaacgttgggtggactttcgcgcactgactggtgatcgttcagacaacatcccgggcgttgccgggattggtgaaaagacggcgctgcgcctgctggcagaatggggctcggtggaaaatctgctcaagaaccttgatcgcgtgaaacctgatagcttacgccgcaagatcgaagcccacctggaagacttgcgtctgagtctggatcttgcccgtattcgcaccgatctgccgttggaagtagactttaaagctctgcgtcgtcgcacacccgatttagaggggttacgcgcgttcctcgaagaactggagctgggctccctgctgcatgaattcggtttgttgggcaccgagaaaccgcgtgaagaagcaccatggccgccgcccgaaggtgcctttgtcggctttcttctgtcacgcaaagagccaatgtgggcggaactgttagctcttgtagccgccgcggaagggcgtgttcaccgcgcgacctctcctgtcgaggccctcgctgacctcaaagaagcacgcggtttcttggcgaaagatttagccgtgcttgcattacgcgaaggcgttgcgctcgatccgacggacgacccgcttttggtggcttatttgctcgatcatgcgaataccaacccggaacgtgtcgcccgtcgttacggcggcgagtttactgaagatgcggcagaacgcgcgttgcttagcgaacgcctcttccagacgttatttccacgtctttcggagaaattactctggctctatcaagaagtcgaacgtccattgagtcgcgtgcttgcccatatggaggctcgcggtgtgcgcttagatgttccgttgttagaagcactcagcttcgagttggagaaagaactggaacgtcttgaaggcgaagtctttcgtttagcggggcatcccttcaatctcaactctcgcgaccaattggagaaagtgctctttgatgaattaggtttaacccctgtcacgcgtacagagaagaccggcaaacgttccacttcggcagccgccttggaagcacttcgtggtgctcacccgatcgtcgagttgattttgcagtatcgcgagctcagcaaactcaaatcaacctatcttgataggttacctaagcttgttcatccacgtacgggtcgtttacacacccgcttcaatcaaacggcaacagccaccgggcgcttgtcgtcgagtgacccgaacctccagaatattccagtgcgcacgccgctgggccaacacattcgtaaagcgtttgttgcggaagaaggttggttattacttgcggccgattactcccagatcgaacttcgtgtattggcgcatctctctggcgacgagaatcttaaacgcgtgtttcgcgaaggcaaggatattcacactgaaaccgcagcctggatgttcggggtggacccggccttagtggaccccaagatgcgtcgtgccgccaagaccgtcaactttggcgtactctatggtatgtcagcagcacgtcttagtcaggaattgggcattgactacaaagtggctgaagcgtttatcgagcgctatttccaatcctttccgaaagttcgcgcgtggattgaacgtacgctcgaagaaggtcgcactcgcggctatgtggaaacgttattcgggcgtcgtcgctacgttccagatcttacgtctcgtgtccgctcagtgcgcgaagctgctgagcgtatggcctggaatatgcctgttcagggaacagcggcggacctcatgaagatcgccatggtgaaattgtttccgcgcttgaaacccttaggagcccaccttcttttacaggtgcatgatgaattggtcttggaagtacccgaggatcgcgcatgggaagccaaatcgctcgtgaaagaggttatggaaaacgcgtatccgttagatgttccgttggaggtcgaagtgggtgtaggccgtgattggcttgaagcgaaacaagactaatga

SEQ ID NO: 886 - protein, 844 aa, synthetic construct
  REGION 1..844: note = DNA Polymerase Variant
MHHHHHHGGSGMLPLFDLEEPPKRVLLVDGHHLAYRTFYALSLTTSRGEPVQMVYGFARSLLKALKEDGQAVVVVFDAKAPSFRHEAYEAYKAGRAPTPEDFPRQLALVKRLVDLLGLVRLEAPGYEADDVLGTLAKKAEREGMEVCILTGDRDFFQLLSEKVSVLLPDGTLVTPKDVQEKYGVPPERWVDFRALTGDRSDNIPGVAGIGEKTALRLLAEWGSVENLLKNLDRVKPDSLRRKIEAHLEDLRLSLDLARIRTDLPLEVDFKALRRRTPDLEGLRAFLEELELGSLLHEFGLLGTEKPREEAPWPPPEGAFVGFLLSRKEPMWAELLALVAAAEGRVHRATSPVEALADLKEARGFLAKDLAVLALREGVALDPTDDPLLVAYLLDHANTNPERVARRYGGEFTEDAAERALLSERLFQTLFPRLSEKLLWLYQEVERPLSRVLAHMEARGVRLDVPLLEALSFELEKELERLEGEVFRLAGHPFNLNSRDQLEKVLFDELGLTPVTRTEKTGKRSTSAAALEALRGAHPIVELILQYRELSKLKSTYLDRLPKLVHPRTGRLHTRFNQTATATGRLSSSDPNLQNIPVRTPLGQHIRKAFVAEEGWLLLAADYSQIELRVLAHLSGDENLKRVFREGKDIHTETAAWMFGVDPALVDPKMRRAAKTVNFGVLYGMSAARLSQELGIDYKVAEAFIERYFQSFPKVRAWIERTLEEGRTRGYVETLFGRRRYVPDLTSRVRSVREAAERMAWNMPVQGTAADLMKIAMVKLFPRLKPLGAHLLLQVHDELVLEVPEDRAWEAKSLVKEVMENAYPLDVPLEVEVGVGRDWLEAKQD

SEQ ID NO: 887 - DNA, 2538 bp, synthetic construct
  misc_feature 1..2538: note = DNA Polymerase Variant
  source 1..2538: mol_type = other DNA
atgcaccatcatcatcatcatggcggtagcggcatgttaccgctgtttgatttggaagaaccaccaaaacgcgtgctgcttgttgacggccatcatctggcgtatcgtaccttctacgcactgagccttacgacctcacgtggtgagcctgtccagatggtgtatgggtttgctcgctccctgctgaaagccctgaaggaagatggtcaagccgtagtagtggttttcgatgcgcgtgcaccgtcgtttcgtcacgaagcgtacgaggcctataaagctggccgcgcaccgaccccggaagactttccgcgtcagttagcgctcgtcaaacgcctcgtggatttgctgggattagttcgcttggaagctcctggctacgaggcggacgacgtgctcggtacactggccaagaaagcagaacgtgaaggcatggaggtctgcattcttaccggtgatcgcgatttcttccagctgctgtctgagaaagtgagcgttttgctgcccgatggcacgttagtaaccccgaaagatgtgcaagagaaatatggagttccgccagaacgttgggtggactttcgcgcactgactggtgatcgttcagacaacatcccgggcgttgccgggattggtgaaaagacggcgctgcgcctgctggcagaatggggctcggtggaaaatctgctcaagaaccttgatcgtgtgaaacctgatagcttacgccgcaagatcgaagcccacctggaagacttgcgtctgagtctggatcttgtacgtattcgcaccgatctgccgttggaagtagactttaaagctctgcgtcgtcgcacacccgatttagaggggttacgcgcgttcctcgaagaactggagctgggctccctgctgcatgaattcggtttgttgggcggagagaaaccgcgtgaagaagcaccatggccgccgcccgagggtgcctttgtcggctttcttctgtcacgcaaagagccaatgtgggcggaactgttagctcttgcagccgccgcggaagggcgtgttcaccgcgcgacctctcctgtcgaggccctcgctgacctcaaagaagcacgtggtttcttggcgaaagatttagccgtgcttgcattacgcgaaggcgttgcgctcgatccgacggacgacccgcttttggtggcttatttgctcgatcatgcgaataccaacccggaacgtgtcgcccgtcgttacggcggcgagtttactgaagatgcggcagaacgcgcgttgcttagcgaacgcctcttccagacgttatttccacgtctttcggagaaattactctggctctatcaggaagtcgaacgtccattgagtcgcgtgcttgcccatatggaggctcgcggtgtgcgcttagatgttccgttgttagaagcactcagcttcgagctggaaaaagaactggaacgtcttgaaggcgaagtctttcgtttagcggggcatcccttcaatctcaactctcgcgaccaattggagaaagtgctctttgatgaattaggtttaacccctgtcacgcgtacagagaagaccggcaaacgttccacttcggcagccgccttggaagcacttcgtggtgctcacccgatcgtcgagttgattttgcagtatcgcgagctcagcaaactcaaatcaacctatcttgataggttacctcgtcttgttcatccacgtacgggtcgtttacacacccgcttcaatcaaacggcaacagccaccgggcgcttgtcgtcgagtgacccgaacctccagaatattccagtgcgcacgccgctgggccaacacattcgtaaagcgtttgttgcggaagaaggttggttattacttgcggccgattactcccagatcgaacttcgtgtattggcgcatctctctggcgacgagaatcttaaacgcgtgtttcgcgaaggcaaggatattcacactgaaaccgcagcctggatgttcggggtggacccggccttagtggaccccaagatgcgtcgtgccgccaagaccgtcaactttggcgtactctatggtatgtcagcagcacgtcttagtcaggaattgggcattgactacaaagaagctgaagcgtttatcgagcgctatttccaatcctttccgaaagttcgcgcgtggattgaacgtacgctcgaagaaggtcgcactcgcggctatgtggaaacgttattcgggcgtcgtcgctacgttccagatcttacgtctcgtgtccgctcagtgcgcgaagctgctgagcgtatggcctggaatatgcctgttcagggaacagcggcggacctcatgaagatcgccatggtgaaattgtttccgcgcttgaaacccttaggagcccaccttcttctgcaggtgcatgatgaattggtcttggaagtacccgaggatcgcgcagaagaagccaaagcactcgtgaaagaggttatggaaaacgcgtatccgttagatgttccgttggaggtcgaagtgggtgtaggccgtgattggcttgaagcgaaacaagactaatga

SEQ ID NO: 888 - protein, 844 aa, synthetic construct
  REGION 1..844: note = DNA Polymerase Variant
MHHHHHHGGSGMLPLFDLEEPPKRVLLVDGHHLAYRTFYALSLTTSRGEPVQMVYGFARSLLKALKEDGQAVVVVFDARAPSFRHEAYEAYKAGRAPTPEDFPRQLALVKRLVDLLGLVRLEAPGYEADDVLGTLAKKAEREGMEVCILTGDRDFFQLLSEKVSVLLPDGTLVTPKDVQEKYGVPPERWVDFRALTGDRSDNIPGVAGIGEKTALRLLAEWGSVENLLKNLDRVKPDSLRRKIEAHLEDLRLSLDLVRIRTDLPLEVDFKALRRRTPDLEGLRAFLEELELGSLLHEFGLLGGEKPREEAPWPPPEGAFVGFLLSRKEPMWAELLALAAAAEGRVHRATSPVEALADLKEARGFLAKDLAVLALREGVALDPTDDPLLVAYLLDHANTNPERVARRYGGEFTEDAAERALLSERLFQTLFPRLSEKLLWLYQEVERPLSRVLAHMEARGVRLDVPLLEALSFELEKELERLEGEVFRLAGHPFNLNSRDQLEKVLFDELGLTPVTRTEKTGKRSTSAAALEALRGAHPIVELILQYRELSKLKSTYLDRLPRLVHPRTGRLHTRFNQTATATGRLSSSDPNLQNIPVRTPLGQHIRKAFVAEEGWLLLAADYSQIELRVLAHLSGDENLKRVFREGKDIHTETAAWMFGVDPALVDPKMRRAAKTVNFGVLYGMSAARLSQELGIDYKEAEAFIERYFQSFPKVRAWIERTLEEGRTRGYVETLFGRRRYVPDLTSRVRSVREAAERMAWNMPVQGTAADLMKIAMVKLFPRLKPLGAHLLLQVHDELVLEVPEDRAEEAKALVKEVMENAYPLDVPLEVEVGVGRDWLEAKQD

SEQ ID NO: 889 - DNA, 2538 bp, synthetic construct
  misc_feature 1..2538: note = DNA Polymerase Variant
  source 1..2538: mol_type = other DNA
atgcaccatcatcatcatcatggcggtagcggcatgttaccgctgtttgatttggaagaaccaccaaaacgcgtgctgcttgttgacggccatcatctggcgtatcgtaccttctacgcactgagccttacgacctcacgtggtgagcctgtccagatggtgtatgggtttgctcgctccctgctgaaagccctgaaggaagatggtcaagccgtagtagtggttttcgatgcgaaggcaccgtcgtttcgtcacgaagcgtacgaggcctataaagctggccgcgcaccgaccccggaagactttccgcgtcagttagcgctcgtcaaacgcctcgtggatttgctgggattagttcgcttggaagctcctggctacgaggcggacgacgtgctcggtacactggccaagaaagcagaacgtgaaggcatggaggtctgcattcttaccggtgatcgcgatttcttccagctgctgtctgagaaagtgagcgttttgctgcccgatggcacgttagtaaccccgaaagatgtgcaagagaaatatggagttccgccagaacgttgggtggactttcgcgcactgactggtgatcgttcagacaacatcccgggcgttgccgggattggtgaaaagacggcgctgcgcctgctggcagaatggggctcggtggaaaatctgctcaagaaccttgatcgtgtgaaacctgatagcttacgccgcaagatcgaagcccacctggaagacttgcgtctgagtctggatcttgtacgtattcgcaccgatctgccgttggaagtagactttaaagctctgcgtcgtcgcacacccgatttagaggggttacgcgcgttcctcgaagaactggagctgggctccctgctgcatgaattcggtttgttgggcggagagaaaccgcgtgaagaagcaccatggccgccgcccgagggtgcctttgtcggctttcttctgtcacgcaaagagccaatgtgggcggaactgttagctcttgcagccgccgcggaagggcgtgttcaccgcgcgacctctcctgtcgaggccctcgctgacctcaaagaagcacgtggtttcttggcgaaagatttagccgtgcttgcattacgcgaaggcgttgcgctcgatccgacggacgacccgcttttggtggcttatttgctcgatcatgcgaataccaacccggaacgtgtcgcccgtcgttacggcggcgagtttactgaagatgcggcagaacgcgcgttgcttagcgaacgcctcttccagacgttatttccacgtctttcggagaaattactctggctctatcaggaagtcgaacgtccattgagtcgcgtgcttgcccatatggaggctcgcggtgtgcgcttagatgttccgttgttagaagcactcagcttcgagctggaaaaagaactggaacgtcttgaaggcgaagtctttcgtttagcggggcatcccttcaatctcaactctcgcgaccaattggagaaagtgctctttgatgaattaggtttaacccctgtcacgcgtacagagaagaccggcaaacgttccacttcggcagccgccttggaagcacttcgtggtgctcacccgatcgtcgagttgattttgcagtatcgcgagctcagcaaactcaaatcaacctatcttgataggttacctcgtcttgttcatccacgtacgggtcgtttacacacccgcttcaatcaaacggcaacagccaccgggcgcttgtcgtcgagtgacccgaacctccagaatattccagtgcgcacgccgctgggccaacacattcgtaaagcgtttgttgcggaagaaggttggttattacttgcggccgattactcccagatcgaacttcgtgtattggcgcatctctctggcgacgagaatcttaaacgcgtgtttcgcgaaggcaaggatattcacactgaaaccgcagcctggatgttcggggtggactcggccttagtggaccccaagatgcgtcgtgccgccaagaccgtcaactttggcgtactctatggtatgtcagcagcacgtcttagtcaggaattgggcattgactacaaagaagctgaagcgtttatcgagcgctatttccaatcctttccgaaagttcgcgcgtggattgaacgtacgctcgaagaaggtcgcactcgcggctatgtggaaacgttattcgggcgtcgtcgctacgttccagatcttacgtctcgtgtccgctcagtgcgcgaagctgctgagcgtatggcctggaatatgcctgttcagggaacagcggcggacctcatgaagatcgccatggtgaaattgtttccgcgcttgaaacccttaggagcccaccttcttttccaggtgcatgatgaattggtcttggaagtacccgaggatcgcgcagaagaagccaaagcactcgtgaaagaggttatggaaaacgcgtatccgttagatgttccgttggaggtcgaagtgggtgtaggccgtgattggcttgaagcgaaacaagactaatga

SEQ ID NO: 890 - protein, 844 aa, synthetic construct
  REGION 1..844: note = DNA Polymerase Variant
MHHHHHHGGSGMLPLFDLEEPPKRVLLVDGHHLAYRTFYALSLTTSRGEPVQMVYGFARSLLKALKEDGQAVVVVFDAKAPSFRHEAYEAYKAGRAPTPEDFPRQLALVKRLVDLLGLVRLEAPGYEADDVLGTLAKKAEREGMEVCILTGDRDFFQLLSEKVSVLLPDGTLVTPKDVQEKYGVPPERWVDFRALTGDRSDNIPGVAGIGEKTALRLLAEWGSVENLLKNLDRVKPDSLRRKIEAHLEDLRLSLDLVRIRTDLPLEVDFKALRRRTPDLEGLRAFLEELELGSLLHEFGLLGGEKPREEAPWPPPEGAFVGFLLSRKEPMWAELLALAAAAEGRVHRATSPVEALADLKEARGFLAKDLAVLALREGVALDPTDDPLLVAYLLDHANTNPERVARRYGGEFTEDAAERALLSERLFQTLFPRLSEKLLWLYQEVERPLSRVLAHMEARGVRLDVPLLEALSFELEKELERLEGEVFRLAGHPFNLNSRDQLEKVLFDELGLTPVTRTEKTGKRSTSAAALEALRGAHPIVELILQYRELSKLKSTYLDRLPRLVHPRTGRLHTRFNQTATATGRLSSSDPNLQNIPVRTPLGQHIRKAFVAEEGWLLLAADYSQIELRVLAHLSGDENLKRVFREGKDIHTETAAWMFGVDSALVDPKMRRAAKTVNFGVLYGMSAARLSQELGIDYKEAEAFIERYFQSFPKVRAWIERTLEEGRTRGYVETLFGRRRYVPDLTSRVRSVREAAERMAWNMPVQGTAADLMKIAMVKLFPRLKPLGAHLLFQVHDELVLEVPEDRAEEAKALVKEVMENAYPLDVPLEVEVGVGRDWLEAKQD

SEQ ID NO: 891 - DNA, 2538 bp, synthetic construct
  misc_feature 1..2538: note = DNA Polymerase Variant
  source 1..2538: mol_type = other DNA
atgcaccatcatcatcatcatggcggtagcggcatgttaccgctgtttgatttggaagaaccaccaaaacgcgtgctgcttgttgacggccatcatctggcgtatcgtaccttctacgcactgagccttacgacctcacgtggtgagcctgtccagatggtgtatgggtttgctcgctccctgctgaaagccctgaaggaagatggtcaagccgtagtagtggttttcgatgcgcgtgcaccgtcgtttcgtcacgaagcgtacgaggcctataaagctggccgcgcaccgaccccggaagactttccgcgtcagttagcgctcgtcaaacgcctcgtggatttgctgggattagttcgcttggaagctcctggctacgaggcggacgacgtgctcggtacactggccaagaaagcagaacgtgaaggcatggaggtctgcattcttaccggtgatcgcgatttcttccagctgctgtctgagaaagtgagcgttttgctgcccgatggcacgttagtaaccccgaaagatgtgcaagagaaatatggagttccgccagaacgttgggtggactttcgcgcactgactggtgatcgttcagacaacatcccgggcgttgccgggattggtgaaaagacggcgctgcgcctgctggcagaatggggctcggtggaaaatctgctcaagaaccttgatcgtgtgaaacctgatagcttacgccgcaagatcgaagcccacctggaagacttgcgtctgagtctggatcttgcacgtattcgcaccgatctgccgttggaagtagactttaaagctctgcgtcgtcgcacacccgatttagaggggttacgcgcgttcctcgaagaactggagctgggctccctgctgcatgaattcggtttgttgggcggagagaaaccgcgtgaagaagcaccatggccgccgcccgagggtgcctttgtcggctttcttctgtcacgcaaagagccaatgtgggcggaactgttagctcttgcagccgccgcggaagggcgtgttcaccgcgcgacctctcctgtcgaggccctcgctgacctcaaagaagcacgtggtttcttggcgaaagatttagccgtgcttgcattacgcgaaggcgttgcgctcgatccgacggacgacccgcttttggtggcttatttgctcgatcatgcgaataccaacccggaacgtgtcgcccgtcgttacggcggcgagtttactgaagatgcggcagaacgcgcgttgcttagcgaacgcctcttccagacgttatttccacgtctttcggagaaattactctggctctatcaggaagtcgaacgtccattgagtcgcgtgcttgcccatatggaggctcgcggtgtgcgcttagatgttccgttgttagaagcactcagcttcgagttggagaaagaactggaacgtcttgaaggcgaagtctttcgtttagcggggcatcccttcaatctcaactctcgcgaccaattggagaaagtgctctttgatgaattaggtttaacccctgtcacgcgtacagagaagaccggcaaacgttccacttcggcagccgccttggaagcacttcgtggtgtgcacccgatcgtcgagttgattttgcagtatcgcgagctcagcaaactcaaatcaacctatcttgataggttacctcgtcttgttcatccacgtacgggtcgtttacacacccgcttcaatcaaacggcaacagccaccgggcgcttgtcgtcgagtgacccgaacctccagaatattccagtgcgcacgccgctgggccaacacattcgtaaagcgtttgttgcggaagaaggttggttattacttgcggccgattactcccagatcgaacttcgtgtattggcgcatctctctggcgacgagaatcttaaacgcgtgtttcgcgaaggcaaggatattcacactgaaaccgcagcctggatgttcggggtggacccggccttagtggaccccaagatgcgtcgtgccgccaagaccgtcaactttggcgtactctatggtatgtcagcagcacgtcttagtcaggaattgggcattgactacaaagtagctgaagcgtttatcgagcgctatttccaatcctttccgaaagttcgcgcgtggattgaacgtacgctcgaagaaggtcgcactcgcggctatgtggaaacgttattcgggcgtcgtcgctacgttccagatcttacgtctcgtgtccgctcagtgcgcgaagctgctgagcgtatggcctggaatatgcctgttcagggaacagcggcggacctcatgaagatcgccatggtgaaattgtttccgcgcttgaaacccttaggagcccaccttcttctgcaggtgcatgatgaattggtcttggaagtacccgaggatcgcgcagaagaagccaaagcactcgtgaaagaggttatggaaaacgcgtatccgttagatgttccgttggaggtcgaagtgggtgtaggccgtgattggcttgaagcgaaacaagactaatga

SEQ ID NO: 892 - protein, 844 aa, synthetic construct
  REGION 1..844: note = DNA Polymerase Variant
MHHHHHHGGSGMLPLFDLEEPPKRVLLVDGHHLAYRTFYALSLTTSRGEPVQMVYGFARSLLKALKEDGQAVVVVFDARAPSFRHEAYEAYKAGRAPTPEDFPRQLALVKRLVDLLGLVRLEAPGYEADDVLGTLAKKAEREGMEVCILTGDRDFFQLLSEKVSVLLPDGTLVTPKDVQEKYGVPPERWVDFRALTGDRSDNIPGVAGIGEKTALRLLAEWGSVENLLKNLDRVKPDSLRRKIEAHLEDLRLSLDLARIRTDLPLEVDFKALRRRTPDLEGLRAFLEELELGSLLHEFGLLGGEKPREEAPWPPPEGAFVGFLLSRKEPMWAELLALAAAAEGRVHRATSPVEALADLKEARGFLAKDLAVLALREGVALDPTDDPLLVAYLLDHANTNPERVARRYGGEFTEDAAERALLSERLFQTLFPRLSEKLLWLYQEVERPLSRVLAHMEARGVRLDVPLLEALSFELEKELERLEGEVFRLAGHPFNLNSRDQLEKVLFDELGLTPVTRTEKTGKRSTSAAALEALRGVHPIVELILQYRELSKLKSTYLDRLPRLVHPRTGRLHTRFNQTATATGRLSSSDPNLQNIPVRTPLGQHIRKAFVAEEGWLLLAADYSQIELRVLAHLSGDENLKRVFREGKDIHTETAAWMFGVDPALVDPKMRRAAKTVNFGVLYGMSAARLSQELGIDYKVAEAFIERYFQSFPKVRAWIERTLEEGRTRGYVETLFGRRRYVPDLTSRVRSVREAAERMAWNMPVQGTAADLMKIAMVKLFPRLKPLGAHLLLQVHDELVLEVPEDRAEEAKALVKEVMENAYPLDVPLEVEVGVGRDWLEAKQD

SEQ ID NO: 893 - DNA, 2538 bp, synthetic construct
  misc_feature 1..2538: note = DNA Polymerase Variant
  source 1..2538: mol_type = other DNA
atgcaccatcatcatcatcatggcggtagcggcatgttaccgctgtttgatttggaagaaccaccaaaacgcgtgctgcttgttgacggccatcatctggcgtatcgtaccttctacgcactgagccttacgacctcacgtggtgagcctgtccagatggtgtatgggtttgctcgctccctgctgaaagccctgaaggaagatggtcaagccgtagtagtggttttcgatgcggctgcaccgtcgtttcgtcacgaagcgtacgaggcctataaagctggccgcgcaccgaccccggaagactttccgcgtcagttagcgctcgtcaaacgcctcgtggatttgctgggattagttcgcttggaagctcctggctacgaggcggacgacgtgctcggtacactggccaagaaagcagaacgtgaaggcatggaggtctgcattcttaccggtgatcgcgatttcttccagctgctgtctgagaaagtgagcgttttgctgcccgatggcacgttagtaaccccgaaagatgtgcaagagaaatatggagttccgccagaacgttgggtggactttcgcgcactgactggtgatcgttcagacaacatcccgggcgttgccgggattggtgaaaagacggcgctgcgcctgctggcagaatggggctcggtggaaaatctgctcaagaaccttgatcgcgtgaaacctgatagcttacgccgcaagatcgaagcccacctggaagacttgcgtctgagtctggatcttgcccgtattcgcaccgatctgccgttggaagtagactttaaagctctgcgtcgtcgcacacccgatttagaggggttacgcgcgttcctcgaagaactggagctgggctccctgctgcatgaattcggtttgttgggcggagagaaaccgcgtgaagaagcaccatggccgccgcccgaaggtgcctttgtcggctttcttctgtcacgcaaagagccaatgtgggcggaactgttagctcttgcagccgccgcggaagggcgtgttcaccgcgcgacctctcctgtcgaggccctcgctgacctcggggaagcacgtggtttcttggcgaaagatttagccgtgcttgcattacgcgaaggcgttgcgctcgatccgacggacgacccgcttttggtggcttatttgctcgatcatgcgaataccaacccggaacgtgtcgcccgtcgttacggcggcgagtttactgaagatgcggcagaacgcgcgttgcttagcgaacgcctcttccagacgttatttccacgtctttcggagaaattactctggctctatcaggaagtcgaacgtccattgagtcgcgtgcttgcccatatggaggctcgcggtgtgcgcttagatgttccgttgttagaagcactcagcttcgagttggagaaagaactggaacgtcttgaaggcgaagtctttcgtttagcggggcatcccttcaatctcaactctcgcgaccaattggagaaagtgctctttgatgaattaggtttaacccctgtcacgcgtacagagaagaccggcaaacgttccacttcggcagccgccttggaagcacttcgtggtgctcacccgatcgtcgagttgattttgcagtatcgcgagctcagcaaactcaaatcaacctatcttgataggttacctcgtcttgttcatccacgtacgggtcgtttacacacccgcttcaatcaaacggcaacagccaccgggcgcttgtcgtcgagtgacccgaacctccagaatattccagtgcgcacgccgctgggccaacacattcgtaaagcgtttgttgcggaagagggttggttattacttgcggccgattactcccagatcgaacttcgtgtattggcgcatctctctggcgacgagaatcttaaacgcgtgtttcgcgaaggcaaggatattcacactgaaaccgcagcctggatgttcggggtggacccagccttagtggaccccaagatgcgtcgtgccgccaagaccgtcaactttggcgtactctatggtatgtcagcagcacgtcttagtcaggaattgggcattgactacaaagaagctgaagcgtttatcgagcgctatttccaatcctttccgggtgttcgcgcgtggattgaacgtacgctcgaagaaggtcgcactcgcggctatgtggaaacgttattcgggcgtcgtcgctacgttaaggatcttacgtctcgtgtccgctcagtgcgcgaagctgctgagcgtatggcctggaatatgcctgttcagggaacagcggcggacctcatgaagatcgccatggtgaaattgtttccgcgcttgaaacccttaggagcccaccttcttttacaggtgcatgatgaattggtcttggaagtacccgaggatcgcgcatgggaagccaaagcgctcgtgaaagaggttatggaaaacgcgtatccgttagatgttccgttggaggtcgaagtgggtgtaggccgtgattggcttgaagcgaaacaagactaatga

SEQ ID NO: 894 - protein, 844 aa, synthetic construct
  REGION 1..844: note = DNA Polymerase Variant
MHHHHHHGGSGMLPLFDLEEPPKRVLLVDGHHLAYRTFYALSLTTSRGEPVQMVYGFARSLLKALKEDGQAVVVVFDAAAPSFRHEAYEAYKAGRAPTPEDFPRQLALVKRLVDLLGLVRLEAPGYEADDVLGTLAKKAEREGMEVCILTGDRDFFQLLSEKVSVLLPDGTLVTPKDVQEKYGVPPERWVDFRALTGDRSDNIPGVAGIGEKTALRLLAEWGSVENLLKNLDRVKPDSLRRKIEAHLEDLRLSLDLARIRTDLPLEVDFKALRRRTPDLEGLRAFLEELELGSLLHEFGLLGGEKPREEAPWPPPEGAFVGFLLSRKEPMWAELLALAAAAEGRVHRATSPVEALADLGEARGFLAKDLAVLALREGVALDPTDDPLLVAYLLDHANTNPERVARRYGGEFTEDAAERALLSERLFQTLFPRLSEKLLWLYQEVERPLSRVLAHMEARGVRLDVPLLEALSFELEKELERLEGEVFRLAGHPFNLNSRDQLEKVLFDELGLTPVTRTEKTGKRSTSAAALEALRGAHPIVELILQYRELSKLKSTYLDRLPRLVHPRTGRLHTRFNQTATATGRLSSSDPNLQNIPVRTPLGQHIRKAFVAEEGWLLLAADYSQIELRVLAHLSGDENLKRVFREGKDIHTETAAWMFGVDPALVDPKMRRAAKTVNFGVLYGMSAARLSQELGIDYKEAEAFIERYFQSFPGVRAWIERTLEEGRTRGYVETLFGRRRYVKDLTSRVRSVREAAERMAWNMPVQGTAADLMKIAMVKLFPRLKPLGAHLLLQVHDELVLEVPEDRAWEAKALVKEVMENAYPLDVPLEVEVGVGRDWLEAKQD

SEQ ID NO: 895 - DNA, 2538 bp, synthetic construct
  misc_feature 1..2538: note = DNA Polymerase Variant
  source 1..2538: mol_type = other DNA
atgcaccatcatcatcatcatggcggtagcggcatgttaccgctgtttgatttggaagaagcaccaaaacgcgtgctgcttgttgacggccatcatctggcgtatcgtaccttctacgcactgagccttacgacctcacgtggtgagcctgtccagatggtgtatgggtttgctcgctccctgctgaaagccctgaaggaagatggtcaagccgtagtagtggttttcgatgcgaaagcaccgtcgtttcgtcacgaagcgtacgaggcctataaagctggccgcgcaccgaccccggaagactttccgcgtcagttagcgctcgtcaaacgcctcgtggatttgctgggattagttcgcttggaagctcctggctacgaggcggacgacgtgctcggtacactggccaagaaagcagaacgtgaaggcatggaggtctgcattcttaccggtgatcgcgatttcttccagctgctgtctgagaaagtgagcgttttgctgcccgatggcacgttagtaaccccgaaagatgtgcaagagaaatatggagttccgccagaacgttgggtggactttcgcgcactgactggtgatcgttcagacaacatcccgggcgttgccgggattggtgaaaagacggcgctgcgcctgctggcagaatggggctcggtggaaaatctgctcaagaaccttgatcgcgtgaaacctgatagcttacgccgcaagatcgaagcccacctggaagacttgcgtctgagtctggatcttgcccgtattcgcaccgatctgccgttggaagtagactttaaagctctgcgtcgtcgcacacccgatttagaggggttacgcgcgttcctcgaagaactggagctgggctccctgctgcatgaattcggtttgttgggcggggagaaaccgcgtgaagaagcaccatggccgccgcccgaaggtgcctttgtcggctttcttctgtcacgcaaagagccaatgtgggcggaactgttagctcttgcagccgccgcggaagggcgtgttcaccgcgcgacctctcctgtcgaggccctcgctgacctcggggaagcacgtggtttcttggcgaaagatttagccgtgcttgcattacgcgaaggcgttgcgctcgatccgacggacgacccgcttttggtggcttatttgctcgatcatgcgaataccaacccggaacgtgtcgcccgtcgttacggcggcgagtttactgaagatgcggcagaacgcgcgttgcttagcgaacgcctcttccagacgttatttccacgtctttcggagaaattactctggctctatggtgaagtcgaacgtccattgagtcgcgtgcttgcccatatggaggctcgcggtgtgcgcttagatgttccgttgttagaagcactcagcttcgagttggagaaagaactggaacgtcttgaaggcgaagtctttcgtttagcggggcatcccttcaatctcaactctcgcgaccaattggagaaagtgctctttgatgaattaggtttaacccctgtcacgcgtacagagaagaccggcaaacgttccacttcggcagccgccttggaagcacttcgtggtgctcacccgatcgtcgagttgattttgcagtatcgcgagctcagcaaactcaaatcaacctatcttgataggttacctcgtcttgttcatccacgtacgggtcgtttacacacccgcttcaatcaaacggcaacagccaccgggcgcttgtcgtcgagtgacccgaacctccagaatattccagtgcgcacgccgctgggccaacacattcgtaaagcgtttgttgcggaagagggttggttattacttgcggccgattactcccagatcgaacttcgtgtattggcgcatctctctggcgacgagaatcttaaacgtgtgtttcgcgaaggcaaggatattcacactgaaaccgcagcctggatgttcggggtggacccggccttagtggaccccaagatgcgtcgtgccgccaagaccgtcaactttggcgtactctatggtatgtcagcagcacgtcttagtcaggaattgggcattgactacaaagaagctgaagcgtttatcgagcgctatttccaatcctttccgaaagttcgcgcgtggattgaacgtacgctcgaagaaggtcgcactcgcggctatgtggaaacgttattcgggcgtcgtcgctacgttccagatcttacgtctcgtgtccgctcagtgcgcgaagctgctgagcgtatggcctggaatatgcctgttcagggaacagcggcggacctcatgaagatcgccatggtgaaattgtttccgcgcttgaaacccttaggagcccaccttcttttacaggtgcatgatgaattggtcttggaagtacccgaggatcgcgcatgggaagccaaatcgctcgtgaaagaggttatggaaaacgcgtatccgttagatgttccgttggaggtcgaagtgggtgtaggccgtgattggcttgaagcgaaacaagactaatga

SEQ ID NO: 896 - protein, 844 aa, synthetic construct
  REGION 1..844: note = DNA Polymerase Variant
MHHHHHHGGSGMLPLFDLEEAPKRVLLVDGHHLAYRTFYALSLTTSRGEPVQMVYGFARSLLKALKEDGQAVVVVFDAKAPSFRHEAYEAYKAGRAPTPEDFPRQLALVKRLVDLLGLVRLEAPGYEADDVLGTLAKKAEREGMEVCILTGDRDFFQLLSEKVSVLLPDGTLVTPKDVQEKYGVPPERWVDFRALTGDRSDNIPGVAGIGEKTALRLLAEWGSVENLLKNLDRVKPDSLRRKIEAHLEDLRLSLDLARIRTDLPLEVDFKALRRRTPDLEGLRAFLEELELGSLLHEFGLLGGEKPREEAPWPPPEGAFVGFLLSRKEPMWAELLALAAAAEGRVHRATSPVEALADLGEARGFLAKDLAVLALREGVALDPTDDPLLVAYLLDHANTNPERVARRYGGEFTEDAAERALLSERLFQTLFPRLSEKLLWLYGEVERPLSRVLAHMEARGVRLDVPLLEALSFELEKELERLEGEVFRLAGHPFNLNSRDQLEKVLFDELGLTPVTRTEKTGKRSTSAAALEALRGAHPIVELILQYRELSKLKSTYLDRLPRLVHPRTGRLHTRFNQTATATGRLSSSDPNLQNIPVRTPLGQHIRKAFVAEEGWLLLAADYSQIELRVLAHLSGDENLKRVFREGKDIHTETAAWMFGVDPALVDPKMRRAAKTVNFGVLYGMSAARLSQELGIDYKEAEAFIERYFQSFPKVRAWIERTLEEGRTRGYVETLFGRRRYVPDLTSRVRSVREAAERMAWNMPVQGTAADLMKIAMVKLFPRLKPLGAHLLLQVHDELVLEVPEDRAWEAKSLVKEVMENAYPLDVPLEVEVGVGRDWLEAKQD

SEQ ID NO: 897 - DNA, 2538 bp, synthetic construct
  misc_feature 1..2538: note = DNA Polymerase Variant
  source 1..2538: mol_type = other DNA
atgcaccatcatcatcatcatggcggtagcggcatgttaccgctgtttgatttggaagaaccaccaaaacgcgtgctgcttgttgacggccatcatctggcgtatcgtaccttctacgcactgagccttacgacctcacgtggtgagcctgtccagatggtgtatgggtttgctcgctccctgctgaaagccctgaaggaagatggtcaagccgtagtagtggttttcgatgcgcgtgcaccgtcgtttcgtcacgaagcgtacgaggcctataaagctggccgcgcaccgaccccggaagactttccgcgtcagttagcgctcgtcaaacgcctcgtggatttgctgggattagttcgcttggaagctcctggctacgaggcggacgacgtgctcggtacactggccaagaaagcagaacgtgaaggcatggaggtctgcattcttaccggtgatcgcgatttcttccagctgctgtctgagaaagtgagcgttttgctgcccgatggcacgttagtaaccccgaaagatgtgcaagagaaatatggagttccgccagaacgttgggtggactttcgcgcactgactggtgatcgttcagacaacatcccgggcgttgccgggattggtgaaaagacggcgctgcgcctgctggcagaatggggctcggtggaaaatctgctcaagaaccttgatcgtgtgaaacctgatagcttacgccgcaagatcgaagcccacctggaagacttgcgtctgagtctggatcttgtacgtattcgcaccgatctgccgttggaagtagactttaaagctctgcgtcgtcgcacacccgatttagaggggttacgcgcgttcctcgaagaactggagctgggctccctgctgcatgaattcggtttgttgggcggagagaaaccgcgtgaagaagcaccatggccgccgcccgaaggtgcctttgtcggctttcttctgtcacgcaaagagccaatgtgggcggaactgttagctcttgcagccgccgcggaagggcgtgttcaccgcgcgacctctcctgtcgaggccctcgctgacctcaaagaagcacgtggtttcttggcgaaagatttagccgtgcttgcattacgcgaaggcgttgcgctcgatccgacggacgacccgcttttggtggcttatttgctcgatcatgcgaataccaacccggaacgtgtcgcccgtcgttacggcggcgagtttactgaagatgcggcagaacgcgcgttgcttagcgaacgcctcttccagacgttatttccacgtctttcggagaaattactctggctctatcaggaagtcgaacgtccattgagtcgcgtgcttgcccatatggaggctcgcggtgtgcgcttagatgttccgttgttagaagcactcagcttcgagctggcaaaagaactggaacgtcttgaaggcgaagtctttcgtttagcggggcatcccttcaatctcaactctcgcgaccaattggagaaagtgctctttgatgaattaggtttaacccctgtcacgcgtacagagaagaccggcaaacgttccacttcggcagccgccttggaagcacttcgtggtgtgcacccgatcgtcgagttgattttgcagtatcgcgagctcagcaaactcaaatcaacctatcttgataggttacctcgtcttgttcatccacgtacgggtcgtttacacacccgcttcaatcaaacggcaacagccaccgggcgcttgtcgtcgagtgacccgaacctccagaatattccagtgcgcacgccgctgggccaacacattcgtaaagcgtttgttgcggaagaaggttggttattacttgcggccgattactcccagatcgaacttcgtgtattggcgcatctctctggcgacgagaatcttaaacgcgtgtttcgcgaaggcaaggatattcacactgaaaccgcagcctggatgttcggggtggactcggccttagtggaccccaagatgcgtcgtgccgccaagaccgtcaactttggcgtactctatggtatgtcagcagcacgtcttagtcaggaattgggcattgactacaaagaagctgaagcgtttatcgagcgctatttccaatcctttccgaaagttcgcgcgtggattgaacgtacgctcgaagaaggtcgcactcgcggctatgtggaaacgttattcgggcgtcgtcgctacgttccagatcttacgtctcgtgtccgctcagtgcgcgaagctgctgagcgtatggcctggaatatgcctgttcagggaacagcggcggacctcatgaagatcgccatggtgaaattgtttccgcgcttgaaacccttaggagcccaccttcttttacaggtgcatgatgaattggtcttggaagtacccgaggatcgcgcagaagaagccaaagcactcgtgaaagaggttatggaaaacgcgtatccgttagatgttccgttggaggtcgaagtgggtgtaggccgtgattggcttgaagcgaaacaagactaatga

SEQ ID NO: 898 - protein, 844 aa, synthetic construct
  REGION 1..844: note = DNA Polymerase Variant
MHHHHHHGGSGMLPLFDLEEPPKRVLLVDGHHLAYRTFYALSLTTSRGEPVQMVYGFARSLLKALKEDGQAVVVVFDARAPSFRHEAYEAYKAGRAPTPEDFPRQLALVKRLVDLLGLVRLEAPGYEADDVLGTLAKKAEREGMEVCILTGDRDFFQLLSEKVSVLLPDGTLVTPKDVQEKYGVPPERWVDFRALTGDRSDNIPGVAGIGEKTALRLLAEWGSVENLLKNLDRVKPDSLRRKIEAHLEDLRLSLDLVRIRTDLPLEVDFKALRRRTPDLEGLRAFLEELELGSLLHEFGLLGGEKPREEAPWPPPEGAFVGFLLSRKEPMWAELLALAAAAEGRVHRATSPVEALADLKEARGFLAKDLAVLALREGVALDPTDDPLLVAYLLDHANTNPERVARRYGGEFTEDAAERALLSERLFQTLFPRLSEKLLWLYQEVERPLSRVLAHMEARGVRLDVPLLEALSFELAKELERLEGEVFRLAGHPFNLNSRDQLEKVLFDELGLTPVTRTEKTGKRSTSAAALEALRGVHPIVELILQYRELSKLKSTYLDRLPRLVHPRTGRLHTRFNQTATATGRLSSSDPNLQNIPVRTPLGQHIRKAFVAEEGWLLLAADYSQIELRVLAHLSGDENLKRVFREGKDIHTETAAWMFGVDSALVDPKMRRAAKTVNFGVLYGMSAARLSQELGIDYKEAEAFIERYFQSFPKVRAWIERTLEEGRTRGYVETLFGRRRYVPDLTSRVRSVREAAERMAWNMPVQGTAADLMKIAMVKLFPRLKPLGAHLLLQVHDELVLEVPEDRAEEAKALVKEVMENAYPLDVPLEVEVGVGRDWLEAKQD

SEQ ID NO: 899 - DNA, 2538 bp, synthetic construct
  misc_feature 1..2538: note = DNA Polymerase Variant
  source 1..2538: mol_type = other DNA
atgcaccatcatcatcatcatggcggtagcggcatgttaccgctgtttgatttggaagaaaacccaaaacgcgtgctgcttgttgacggccatcatctggcgtatcgtaccttctacgcactgagccttacgacctcacgtggtgagcctgtccagatggtgtatgggtttgctcgctccctgctgaaagccctgaaggaagatggtcaagccgtagtagtggttttcgatgcggctgcaccgtcgtttcgtcacgaagcgtacgaggcctataaagctggccgcgcaccgaccccggaagactttccgcgtcagttagcgctcgtcaaacgcctcgtggatttgctgggattagttcgcttggaagctcctggctacgaggcggacgacgtgctcggtacactggccaagaaagcagaacgtgaaggcatggaggtctgcattcttaccggtgatcgcgatttcttccagctgctgtctgagaaagtgagcgttttgctgcccgatggcacgttagtaaccccgaaagatgtgcaagagaaatatggagttccgccagaacgttgggtggactttcgcgcactgactggtgatcgttcagacaacatcccgggcgttgccgggattggtgaaaagacggcgctgcgcctgctggcagaatggggctcggtggaaaatctgctcaagaaccttgatcgtgtgaaacctgatagcttacgccgcaagatcgaagcccacctggaagacttgcgtctgagtctggatcttgcccgtattcgcaccgatctgccgttggaagtagactttaaagctctgcgtcgtcgcacacccgatttagaggggttacgcgcgttcctcgaagaactggagctgggctccctgctgcatgaattcggtttgttgggcggggagaaaccgcgtgaagaagcaccatggccgccgcccgaaggtgcctttgtcggctttcttctgtcacgcaaagagccaatgtgggcggaactgttagctcttgtagccgccgcggaagggcgtgttcaccgcgcgacctctcctgtcgaggccctcgctgacctcaaagaagcacgtggtttcttggcgaaagatttagccgtgcttgcattacgcgaaggcgttgccctcgatccgacggacgacccgcttttggtggcttatttgctcgatcatgcgaataccaacccggaacgtgtcgcccgtcgttacggcggcgagtttactgaagatgcggcagaacgcgcgttgcttagcgaacgcctcttccagacgttatttccacgtctttcggagaaattactctggctctatcaggaagtcgaacgtccattgagtcgcgtgcttgcccatatggaggctcgcggtgtgcgcttagatgttccgttgttagaagcactcagcttcgagttggagaaagaactggaacgtcttgaaggcgaagtctttcgtttagcggggcatcccttcaatctcaactctcgcgaccaattggagaaagtgctctttgatgaattaggtttaacccctgtcacgcgtacagagaagaccggcaaacgttccacttcggcagccgccttggaagcacttcgtggtgctcacccgatcgtcgagttgattttgcagtatcgcgagctcagcaaactcaaatcaacctatcttgataggttacctcgtcttgttcatccacgtacgggtcgtttacacacccgcttcaatcaaacggcaacagccaccgggcgcttgtcgtcgagtgacccgaacctccagaatattccagtgcgcacgccgctgggccaacacattcgtaaagcgtttgttgcggaagaaggttggttattacttgcggccgattactcccagatcgaacttcgtgtattggcgcatctctctggcgacgagaatcttaaacgtgtgtttcgcgaaggcaaggatattcacactgaaaccgcagcctggatgttcggggtggacccggccttagtggaccccaagatgcgtcgtgccgccaagaccgtcaactttggcgtactctatggtatgtcagcagcacgtcttagtcaggaattgggcattgactacaaagaagctgaagcgtttatcgagcgctatttccaatcctttccgaaagttcgcgcgtggattgaacgtacgctcgaagaaggtcgcactcgcggctatgtggaaacgttattcgggcgtcgtcgctacgttccagatcttacgtctcgtgtccgctcagtgcgcgaagctgctgagcgtatggcctggaatatgcctgttcagggaacagcggcggacctcatgaagatcgccatggtgaaattgtttccgcgcttgaaacccttaggagcccaccttcttttacaggtgcatgatgaattggtcttggaagtacccgaggatcgcgcagaagaagccaaagcactcgtgaaagaggttatggaaaacgcgtatccgttagatgttccgttggaggtcgaagtgggtgtaggccgtgattggcttgaagcgaaacaagactaatga

SEQ ID NO: 900 - protein, 844 aa, synthetic construct
  REGION 1..844: note = DNA Polymerase Variant
MHHHHHHGGSGMLPLFDLEENPKRVLLVDGHHLAYRTFYALSLTTSRGEPVQMVYGFARSLLKALKEDGQAVVVVFDAAAPSFRHEAYEAYKAGRAPTPEDFPRQLALVKRLVDLLGLVRLEAPGYEADDVLGTLAKKAEREGMEVCILTGDRDFFQLLSEKVSVLLPDGTLVTPKDVQEKYGVPPERWVDFRALTGDRSDNIPGVAGIGEKTALRLLAEWGSVENLLKNLDRVKPDSLRRKIEAHLEDLRLSLDLARIRTDLPLEVDFKALRRRTPDLEGLRAFLEELELGSLLHEFGLLGGEKPREEAPWPPPEGAFVGFLLSRKEPMWAELLALVAAAEGRVHRATSPVEALADLKEARGFLAKDLAVLALREGVALDPTDDPLLVAYLLDHANTNPERVARRYGGEFTEDAAERALLSERLFQTLFPRLSEKLLWLYQEVERPLSRVLAHMEARGVRLDVPLLEALSFELEKELERLEGEVFRLAGHPFNLNSRDQLEKVLFDELGLTPVTRTEKTGKRSTSAAALEALRGAHPIVELILQYRELSKLKSTYLDRLPRLVHPRTGRLHTRFNQTATATGRLSSSDPNLQNIPVRTPLGQHIRKAFVAEEGWLLLAADYSQIELRVLAHLSGDENLKRVFREGKDIHTETAAWMFGVDPALVDPKMRRAAKTVNFGVLYGMSAARLSQELGIDYKEAEAFIERYFQSFPKVRAWIERTLEEGRTRGYVETLFGRRRYVPDLTSRVRSVREAAERMAWNMPVQGTAADLMKIAMVKLFPRLKPLGAHLLLQVHDELVLEVPEDRAEEAKALVKEVMENAYPLDVPLEVEVGVGRDWLEAKQD

SEQ ID NO: 901 - DNA, 2538 bp, synthetic construct
  misc_feature 1..2538: note = DNA Polymerase Variant
  source 1..2538: mol_type = other DNA
atgcaccatcatcatcatcatggcggtagcggcatgttaccgctgtttgatttggaagaaccaccaaaacgcgtgctgcttgttgacggccatcatctggcgtatcgtaccttctacgcactgagccttacgacctcacgtggtgagcctgtccagatggtgtatgggtttgctcgctccctgctgaaagccctgaaggaagatggtcaagccgtagtagtggttttcgatgcggctgcaccgtcgtttcgtcacgaagcgtacgaggcctataaagctggccgcgcaccgaccccggaagactttccgcgtcagttagcgctcgtcaaacgcctcgtggatttgctgggattagttcgcttggaagctcctggctacgaggcggacgacgtgctcggtacactggccaagaaagcagaacgtgaaggcatggaggtctgcattcttaccggtgatcgcgatttcttccagctgctgtctgagaaagtgagcgttttgctgcccgatggcacgttagtaaccccgaaagatgtgcaagagaaatatggagttccgccagaacgttgggtggactttcgcgcactgactggtgatcgttcagacaacatcccgggcgttgccgggattggtgaaaagacggcgctgcgcctgctggcagaatggggctcggtggaaaatctgctcaagaaccttgatcgtgtgaaacctgatagcttacgccgcaagatcgaagcccacctggaagacttgcgtctgagtctggatcttgcccgtattcgcaccgatctgccgttggaagtagactttaaagctctgcgtcgtcgcacacccgatttagaggggttacgcgcgttcctcgaagaactggagctgggctccctgctgcatgaattcggtttgttgggcggggagaaaccgcgtgaagaagcaccatggccgccgcccgaaggtgcctttgtcggctttcttctgtcacgcaaagagccaatgtgggcggaactgttagctcttgcagccgccgcggaagggcgtgttcaccgcgcgacctctcctgtcgaggccctcgctgacctcaaagaagcacgtggtttcttggcgaaagatttagccgtgcttgcattacgcgaaggcgttgcgctcgatccgacggacgacccgcttttggtggcttatttgctcgatcatgcgaataccaacccggaacgtgtcgcccgtcgttacggcggcgagtttactgaagatgcggcagaacgcgcgttgcttagcgaacgcctcttccagacgttatttccacgtctttcggagaaattactctggctctatcaggaagtcgaacgtccattgagtcgcgtgcttgcccatatggaggctcgcggtgtgcgcttagatgttccgttgttagaagcactcagcttcgagttggagaaagaactggaacgtcttgaaggcgaagtctttcgtttagcggggcatcccttcaatctcaactctcgcgaccaattggagaaagtgctctttgatgaattaggtttaacccctgtcacgcgtacagagaagaccggcaaacgttccacttcggcagccgccttggaagcacttcgtggtgctcacccgatcgtcgagttgattttgcagtatcgcgagctcagcaaactcaaatcaacctatcttgataggttacctcgtcttgttcatccacgtacgggtcgtttacacacccgcttcaatcaaacggcaacagccaccgggcgcttgtcgtcgagtgacccgaacctccagaatattccagtgcgcacgccgctgggccaacacattcgtaaagcgtttgttgcggaagaaggttggttattacttgcggccgattactcccagatcgaacttcgtgtattggcgcatctctctggcgacgagaatcttaaacgcgtgtttcgcgaaggcaaggatattcacactgaaaccgcagcctggatgttcggggtggacccagccttagtggaccccaagatgcgtcgtgccgccaagaccgtcaactttggcgtactctatggtatgtcagcagcacgtcttagtcaggaattgggcattgactacaaagaagctgaagcgtttatcgagcgctatttccaatcctttccgggtgttcgcgcgtggattgaacgtacgctcgaagaaggtcgcactcgcggctatgtggaaacgttattcgggcgtcgtcgctacgttccagatcttacgtctcgtgtccgctcagtgcgcgaagctgctgagcgtatggcctggaatatgcctgttcagggaacagcggcggacctcatgaagatcgccatggtgaaattgtttccgcgcttgaaacccttaggagcccaccttcttttacaggtgcatgatgaattggtcttggaagtacccgaggatcgcgcagaagaagccaaagcactcgtgaaagaggttatggaaaacgcgtatccgttagatgttccgttggaggtcgaagtgggtgtaggccgtgattggcttgaagcgaaacaagactaatga

SEQ ID NO: 902 - protein, 844 aa, synthetic construct
  REGION 1..844: note = DNA Polymerase Variant
MHHHHHHGGSGMLPLFDLEEPPKRVLLVDGHHLAYRTFYALSLTTSRGEPVQMVYGFARSLLKALKEDGQAVVVVFDAAAPSFRHEAYEAYKAGRAPTPEDFPRQLALVKRLVDLLGLVRLEAPGYEADDVLGTLAKKAEREGMEVCILTGDRDFFQLLSEKVSVLLPDGTLVTPKDVQEKYGVPPERWVDFRALTGDRSDNIPGVAGIGEKTALRLLAEWGSVENLLKNLDRVKPDSLRRKIEAHLEDLRLSLDLARIRTDLPLEVDFKALRRRTPDLEGLRAFLEELELGSLLHEFGLLGGEKPREEAPWPPPEGAFVGFLLSRKEPMWAELLALAAAAEGRVHRATSPVEALADLKEARGFLAKDLAVLALREGVALDPTDDPLLVAYLLDHANTNPERVARRYGGEFTEDAAERALLSERLFQTLFPRLSEKLLWLYQEVERPLSRVLAHMEARGVRLDVPLLEALSFELEKELERLEGEVFRLAGHPFNLNSRDQLEKVLFDELGLTPVTRTEKTGKRSTSAAALEALRGAHPIVELILQYRELSKLKSTYLDRLPRLVHPRTGRLHTRFNQTATATGRLSSSDPNLQNIPVRTPLGQHIRKAFVAEEGWLLLAADYSQIELRVLAHLSGDENLKRVFREGKDIHTETAAWMFGVDPALVDPKMRRAAKTVNFGVLYGMSAARLSQELGIDYKEAEAFIERYFQSFPGVRAWIERTLEEGRTRGYVETLFGRRRYVPDLTSRVRSVREAAERMAWNMPVQGTAADLMKIAMVKLFPRLKPLGAHLLLQVHDELVLEVPEDRAEEAKALVKEVMENAYPLDVPLEVEVGVGRDWLEAKQD

SEQ ID NO: 903 - DNA, 2538 bp, synthetic construct
  misc_feature 1..2538: note = DNA Polymerase Variant
  source 1..2538: mol_type = other DNA
atgcaccatcatcatcatcatggcggtagcggcatgttaccgctgtttgatttggaagaaccaccaaaacgcgtgctgcttgttgacggccatcatctggcgtatcgtaccttctacgcactgagccttacgacctcacgtggtgagcctgtccagatggtgtatgggtttgctcgctccctgctgaaagccctgaaggaagatggtcaagccgtagtagtggttttcgatgcgaaagcaccgtcgtttcgtcacgaagcgtacgaggcctataaagctggccgcgcaccgaccccggaagactttccgcgtcagttagcgctcgtcaaacgcctcgtggatttgctgggattagttcgcttggaagctcctggctacgaggcggacgacgtgctcggtacactggccaagaaagcagaacgtgaaggcatggaggtctgcattcttaccggtgatcgcgatttcttccagctgctgtctgagaaagtgagcgttttgctgcccgatggcacgttagtaaccccgaaagatgtgcaagagaaatatggagttccgccagaacgttgggtggactttcgcgcactgactggtgatcgttcagacaacatcccgggcgttgccgggattggtgaaaagacggcgctgcgcctgctggcagaatggggctcggtggaaaatctgctcaagaaccttgatcgtgtgaaacctgatagcttacgccgcaagatcgaagcccacctggaagacttgcgtctgagtctggatcttgcccgtattcgcaccgatctgccgttggaagtagactttaaagctctgcgtcgtcgcacacccgatttagaggggttacgcgcgttcctcgaagaactggagctgggctccctgctgcatgaattcggtttgttgggcggagagaaaccgcgtgaagaagcaccatggccgccgcccgaaggtgcctttgtcggctttcttctgtcacgcaaagagccaatgtgggcggaactgttagctcttgcagccgccgcggaagggcgtgttcaccgcgcgacctctcctgtcgaggccctcgctgacctcaaagaagcacgtggtttcttggcgaaagatttagccgtgcttgcattacgcgaaggcgttgcgctcgatccgacggacgacccgcttttggtggcttatttgctcgatcatgcgaataccaacccggaacgtgtcgcccgtcgttacggcggcgagtttactgaagatgcggcagaacgcgcgttgcttagcgaacgcctcttccagacgttatttccacgtctttcggagaaattactctggctctatcaggaagtcgaacgtccattgagtcgcgtgcttgcccatatggagcgtcgcggtgtgcgcttagatgttccgttgttagaagcactcagcttcgagttggagaaagaactggaacgtcttgaaggcgaagtctttcgtttagcggggcatcccttcaatctcaactctcgcgaccaattggagaaagtgctctttgatgaattaggtttaacccctgtcacgcgtacagagaagaccggcaaacgttccacttcggcagccgccttggaagcacttcgtggtgctcacccgatcgtcgagttgattttgcagtatcgcgagctcagcaaactcaaatcaacctatcttgataggttacctcgtcttgttcatccacgtacgggtcgtttacacacccgcttcaatcaaacggcaacagccaccgggcgcttgtcgtcgagtgacccgaacctccagaatattccagtgcgcacgccgctgggccaacacattcgtaaagcgtttgttgcggaagaaggttggttattacttgcggccgattactcccagatcgaacttcgtgtattggcgcatctctctggcgacgagaatcttaaacgcgtgtttcgcgaaggcaaggatattcacactgaaaccgcagcctggatgttcggggtggacccagccttagtggaccccaagatgcgtcgtgccgccaagaccgtcaactttggcgtactctatggtatgtcagcagcacgtcttagtcaggaattgggcattgactacaaagaagctgaagcgtttatcgagcgctatttccaatcctttccgaaagttcgcgcgtggattgaacgtacgctcgaagaaggtcgcactcgcggctatgtggaaacgttattcgggcgtcgtcgctacgttccagatcttacgtctcgtgtccgctcagtgcgcgaagctgctgagcgtatggcctggaatatgcctgttcagggaacagcggcggacctcatgaagatcgccatggtgaaattgtttccgcgcttgaaacccttaggagcccaccttcttttacaggtgcatgatgaattggtcttggaagtacccgaggatcgcgcagaagaagccaaagcactcgtgaaagaggttatggaaaacgcgtatccgttagatgttccgttggaggtcgaagtgggtgtaggccgtgattggcttgaagcgaaacaagactaatga

SEQ ID NO: 904 - protein, 844 aa, synthetic construct
  REGION 1..844: note = DNA Polymerase Variant
MHHHHHHGGSGMLPLFDLEEPPKRVLLVDGHHLAYRTFYALSLTTSRGEPVQMVYGFARSLLKALKEDGQAVVVVFDAKAPSFRHEAYEAYKAGRAPTPEDFPRQLALVKRLVDLLGLVRLEAPGYEADDVLGTLAKKAEREGMEVCILTGDRDFFQLLSEKVSVLLPDGTLVTPKDVQEKYGVPPERWVDFRALTGDRSDNIPGVAGIGEKTALRLLAEWGSVENLLKNLDRVKPDSLRRKIEAHLEDLRLSLDLARIRTDLPLEVDFKALRRRTPDLEGLRAFLEELELGSLLHEFGLLGGEKPREEAPWPPPEGAFVGFLLSRKEPMWAELLALAAAAEGRVHRATSPVEALADLKEARGFLAKDLAVLALREGVALDPTDDPLLVAYLLDHANTNPERVARRYGGEFTEDAAERALLSERLFQTLFPRLSEKLLWLYQEVERPLSRVLAHMERRGVRLDVPLLEALSFELEKELERLEGEVFRLAGHPFNLNSRDQLEKVLFDELGLTPVTRTEKTGKRSTSAAALEALRGAHPIVELILQYRELSKLKSTYLDRLPRLVHPRTGRLHTRFNQTATATGRLSSSDPNLQNIPVRTPLGQHIRKAFVAEEGWLLLAADYSQIELRVLAHLSGDENLKRVFREGKDIHTETAAWMFGVDPALVDPKMRRAAKTVNFGVLYGMSAARLSQELGIDYKEAEAFIERYFQSFPKVRAWIERTLEEGRTRGYVETLFGRRRYVPDLTSRVRSVREAAERMAWNMPVQGTAADLMKIAMVKLFPRLKPLGAHLLLQVHDELVLEVPEDRAEEAKALVKEVMENAYPLDVPLEVEVGVGRDWLEAKQD

SEQ ID NO: 905 - DNA, 2538 bp, synthetic construct
  misc_feature 1..2538: note = DNA Polymerase Variant
  source 1..2538: mol_type = other DNA
atgcaccatcatcatcatcatggcggtagcggcatgttaccgctgtttgatttggaagaaccaccaaaacgcgtgctgcttgttgacggccatcatctggcgtatcgtaccttctacgcactgagccttacgacctcacgtggtgagcctgtccagatggtgtatgggtttgctcgctccctgctgaaagccctgaaggaagatggtcaagccgtagtagtggttttcgatgcggctgcaccgtcgtttcgtcacgaagcgtacgaggcctataaagctggccgcgcaccgaccccggaagactttccgcgtcagttagcgctcgtcaaacgcctcgtggatttgctgggattagttcgcttggaagctcctggctacgaggcggacgacgtgctcggtacactggccaagaaagcagaacgtgaaggcatggaggtctgcattcttaccggtgatcgcgatttcttccagctgctgtctgagaaagtgagcgttttgctgcccgatggcacgttagtaaccccgaaagatgtgcaagagaaatatggagttccgccagaacgttgggtggactttcgcgcactgactggtgatcgttcagacaacatcccgggcgttgccgggattggtgaaaagacggcgctgcgcctgctggcagaatggggctcggtggaaaatctgctcaagaaccttgatcgcgtgaaacctgatagcttacgccgcaagatcgaagcccacctggaagacttgcgtctgagtctggatcttgcccgtattcgcaccgatctgccgttggaagtagactttaaagctctgcgtcgtcgcacacccgatttagaggggttacgcgcgttcctcgaagaactggagctgggctccctgctgcatgaattcggtttgttgggcggagagaaaccgcgtgaagaagcaccatggccgccgcccgaaggtgcctttgtcggctttcttctgtcacgcaaagagccaatgtgggcggaactgttagctcttgcagccgccgcggaagggcgtgttcaccgcgcgacctctcctgtcgaggccctcgctgacctcaaagaagcacgcggtttcttggcgaaagatttagccgtgcttgcattacgcgaaggcgttgcgctcgatccgacggacgacccgcttttggtggcttatttgctcgatcatgcgaataccaacccggaacgtgtcgcccgtcgttacggcggcgagtttactgaagatgcggcagaacgcgcgttgcttagcgaacgcctcttccagacgttatttccacgtctttcggagaaattactctggctctatcaggaagtcgaacgtccattgagtcgcgtgcttgcccatatggaggctcgcggtgtgcgcttagatgttccgttgttagaagcactcagcttcgagttggagaaagaactggaacgtcttgaaggcgaagtctttcgtttagcggggcatcccttcaatctcaactctcgcgaccaattggagaaagtgctctttgatgaattaggtttaacccctgtcacgcgtacagagaagaccggcaaacgttccacttcggcagccgccttggaagcacttcgtggtgctcacccgatcgtcgagttgattttgcagtatcgcgagctcagcaaactcaaatcaacctatcttgataggttacctaagcttgttcatccacgtacgggtcgtttacacacccgcttcaatcaaacggcaacagccaccgggcgcttgtcgtcgagtgacccgaacctccagaatattccagtgcgcacgccgctgggccaacacattcgtaaagcgtttgttgcggaagagggttggttattacttgcggccgattactcccagatcgaacttcgtgtattggcgcatctctctggcgacgagaatcttaaagctgtgtttcgcgaaggcaaggatattcacactgaaaccgcagcctggatgttcggggtggacccggccttagtggaccccaagatgcgtcgtgccgccaagaccgtcaactttggcgtactctatggtatgtcagcagcacgtcttagtcaggaattgggcattgactacaaagaagctgaagcgtttatcgagcgctatttccaatcctttccgaaagttcgcgcgtggattgaacgtacgctcgaagaaggtcgcactcgcggctatgtggaaacgttattcgggcgtcgtcgctacgttccagatcttacgtctcgtgtccgctcagtgcgcgaagctgctgagcgtatggcctggaatatgcctgttcagggaacagcggcggacctcatgaagatcgccatggtgaaattgtttccgcgcttgaaacccttaggagcccaccttcttttacaggtgcatgatgaattggtcttggaagtacccgaggatcgcgcagaagaagccaaagcactcgtgaaagaggttatggaaaacgcgtatccgttagatgttccgttggaggtcgaagtgggtgtaggccgtgattggcttgaagcgaaacaagactaatga

SEQ ID NO: 906 - protein, 844 aa, synthetic construct
  REGION 1..844: note = DNA Polymerase Variant
MHHHHHHGGSGMLPLFDLEEPPKRVLLVDGHHLAYRTFYALSLTTSRGEPVQMVYGFARSLLKALKEDGQAVVVVFDAAAPSFRHEAYEAYKAGRAPTPEDFPRQLALVKRLVDLLGLVRLEAPGYEADDVLGTLAKKAEREGMEVCILTGDRDFFQLLSEKVSVLLPDGTLVTPKDVQEKYGVPPERWVDFRALTGDRSDNIPGVAGIGEKTALRLLAEWGSVENLLKNLDRVKPDSLRRKIEAHLEDLRLSLDLARIRTDLPLEVDFKALRRRTPDLEGLRAFLEELELGSLLHEFGLLGGEKPREEAPWPPPEGAFVGFLLSRKEPMWAELLALAAAAEGRVHRATSPVEALADLKEARGFLAKDLAVLALREGVALDPTDDPLLVAYLLDHANTNPERVARRYGGEFTEDAAERALLSERLFQTLFPRLSEKLLWLYQEVERPLSRVLAHMEARGVRLDVPLLEALSFELEKELERLEGEVFRLAGHPFNLNSRDQLEKVLFDELGLTPVTRTEKTGKRSTSAAALEALRGAHPIVELILQYRELSKLKSTYLDRLPKLVHPRTGRLHTRFNQTATATGRLSSSDPNLQNIPVRTPLGQHIRKAFVAEEGWLLLAADYSQIELRVLAHLSGDENLKAVFREGKDIHTETAAWMFGVDPALVDPKMRRAAKTVNFGVLYGMSAARLSQELGIDYKEAEAFIERYFQSFPKVRAWIERTLEEGRTRGYVETLFGRRRYVPDLTSRVRSVREAAERMAWNMPVQGTAADLMKIAMVKLFPRLKPLGAHLLLQVHDELVLEVPEDRAEEAKALVKEVMENAYPLDVPLEVEVGVGRDWLEAKQD

SEQ ID NO: 907 - DNA, 2538 bp, synthetic construct
  misc_feature 1..2538: note = DNA Polymerase Variant
  source 1..2538: mol_type = other DNA
atgcaccatcatcatcatcatggcggtagcggcatgttaccgctgtttgatttggaagaaccaccaaaacgcgtgctgcttgttgacggccatcatctggcgtatcgtaccttctacgcactgagccttacgacctcacgtggtgagcctgtccagatggtgtatgggtttgctcgctccctgctgaaagccctgaaggaagatggtcaagccgtagtagtggttttcgatgcgaaagcaccgtcgtttcgtcacgaagcgtacgaggcctataaagctggccgcgcaccgaccccggaagactttccgcgtcagttagcgctcgtcaaacgcctcgtggatttgctgggattagttcgcttggaagctcctggctacgaggcggacgacgtgctcggtacactggccaagaaagcagaacgtgaaggcatggaggtctgcattcttaccggtgatcgcgatttcttccagctgctgtctgagaaagtgagcgttttgctgcccgatggcacgttagtaaccccgaaagatgtgcaagagaaatatggagttccgccagaacgttgggtggactttcgcgcactgactggtgatcgttcagacaacatcccgggcgttgccgggattggtgaaaagacggcgctgcgcctgctggcagaatggggctcggtggaaaatctgctcaagaaccttgatcgtgtgaaacctgatagcttacgccgcaagatcgaagcccacctggaagacttgcgtctgagtctggatcttgcccgtattcgcaccgatctgccgttggaagtagactttaaagctctgcgtcgtcgcacacccgatttagaggggttacgcgcgttcctcgaagaactggagctgggctccctgctgcatgaattcggtttgttgggcggagagaaaccgcgtgaagaagcaccatggccgccgcccgaaggtgcctttgtcggctttcttctgtcacgcaaagagccaatgtgggcggaactgttagctcttgcagccgccgcggaagggcgtgttcaccgcgcgacctctcctgtcgaggccctcgctgacctcaaagaagcacgtggtttcttggcgaaagatttagccgtgcttgcattacgcgaaggcgttgcgctcgatccgacggacgacccgcttttggtggcttattgtctcgatcatgcgaataccaacccggaacgtgtcgcccgtcgttacggcggcgagtttactgaagatgcggcagaacgcgcgttgcttagcgaacgcctcttccagacgttatttccacgtctttcggagaaattactctggctctatcaggaagtcgaacgtccattgagtcgcgtgcttgcccatatggaggctcgcggtgtgcgcttagatgttccgttgttagaagcactcagcttcgagttggagaaagaactggaacgtcttgaaggcgaagtctttcgtttagcggggcatcccttcaatctcaactctcgcgaccaattggagaaagtgctctttgatgaattaggtttaacccctgtcacgcgtacagagaagaccggcaaacgttccacttcggcagccgccttggaagcacttcgtggtgctcacccgatcgtcgagttgattttgcagtatcgcgagctcagcaaactcaaatcaacctatcttgataggttacctcgtcttgttcatccacgtacgggtcgtttacacacccgcttcaatcaaacggcaacagccaccgggcgcttgtcgtcgagtgacccgaacctccagaatattccagtgcgcacgccgctgggccaacacattcgtaaagcgtttgttgcggaagaaggttggttattacttgcggccgattactcccagatcgaacttcgtgtattggcgcatctctctggcgacgagaatcttaaacgcgtgtttcgcgaaggcaaggatattcacactgaaaccgcagcctggatgttcggggtggacccagccttagtggaccccaagatgcgtcgtgccgccaagaccgtcaactttggcgtactctatggtatgtcagcagcacgtcttagtcaggaattgggcattgactacaaagaagctgaagcgtttatcgagcgctatttccaatcctttccgaaagttcgcgcgtggattgaacgtacgctcgaagaaggtcgcactcgcggctatgtggaaacgttattcgggcgtcgtcgctacgttccagatcttacgtctcgtgtccgctcagtgcgcgaagctgctgagcgtatggcctggaatatgcctgttcagggaacagcggcggacctcatgaagatcgccatggtgaaattgtttccgcgcttgaaacccttaggagcccaccttcttttacaggtgcatgatgaattggtcttggaagtacccgaggatcgcgcagaagaagccaaagcactcgtgaaagaggttatggaaaacgcgtatccgttagatgttccgttggaggtcgaagtgggtgtaggccgtgattggcttgaagcgaaacaagactaatga

SEQ ID NO: 908 - protein, 844 aa, synthetic construct
  REGION 1..844: note = DNA Polymerase Variant
MHHHHHHGGSGMLPLFDLEEPPKRVLLVDGHHLAYRTFYALSLTTSRGEPVQMVYGFARSLLKALKEDGQAVVVVFDAKAPSFRHEAYEAYKAGRAPTPEDFPRQLALVKRLVDLLGLVRLEAPGYEADDVLGTLAKKAEREGMEVCILTGDRDFFQLLSEKVSVLLPDGTLVTPKDVQEKYGVPPERWVDFRALTGDRSDNIPGVAGIGEKTALRLLAEWGSVENLLKNLDRVKPDSLRRKIEAHLEDLRLSLDLARIRTDLPLEVDFKALRRRTPDLEGLRAFLEELELGSLLHEFGLLGGEKPREEAPWPPPEGAFVGFLLSRKEPMWAELLALAAAAEGRVHRATSPVEALADLKEARGFLAKDLAVLALREGVALDPTDDPLLVAYCLDHANTNPERVARRYGGEFTEDAAERALLSERLFQTLFPRLSEKLLWLYQEVERPLSRVLAHMEARGVRLDVPLLEALSFELEKELERLEGEVFRLAGHPFNLNSRDQLEKVLFDELGLTPVTRTEKTGKRSTSAAALEALRGAHPIVELILQYRELSKLKSTYLDRLPRLVHPRTGRLHTRFNQTATATGRLSSSDPNLQNIPVRTPLGQHIRKAFVAEEGWLLLAADYSQIELRVLAHLSGDENLKRVFREGKDIHTETAAWMFGVDPALVDPKMRRAAKTVNFGVLYGMSAARLSQELGIDYKEAEAFIERYFQSFPKVRAWIERTLEEGRTRGYVETLFGRRRYVPDLTSRVRSVREAAERMAWNMPVQGTAADLMKIAMVKLFPRLKPLGAHLLLQVHDELVLEVPEDRAEEAKALVKEVMENAYPLDVPLEVEVGVGRDWLEAKQD

SEQ ID NO: 909 - DNA, 2538 bp, synthetic construct
  misc_feature 1..2538: note = DNA Polymerase Variant
  source 1..2538: mol_type = other DNA
atgcaccatcatcatcatcatggcggtagcggcatgttaccgctgtttgatttggaagaaccaccaaaacgcgtgctgcttgttgacggccatcatctggcgtatcgtaccttctacgcactgagccttacgacctcacgtggtgagcctgtccagatggtgtatgggtttgctcgctccctgctgaaagccctgaaggaagatggtcaagccgtagtagtggttttcgatgcgaaagcaccgtcgtttcgtcacgaagcgtacgaggcctataaagctggccgcgcaccgaccccggaagactttccgcgtcagttagcgctcgtcaaacgcctcgtggatttgctgggattagttcgcttggaagctcctggctacgaggcggacgacgtgctcggtacactggccaagaaagcagaacgtgaaggcatggaggtctgcattcttaccggtgatcgcgatttcttccagctgctgtctgagaaagtgagcgttttgctgcccgatggcacgttagtaaccccgaaagatgtgcaagagaaatatggagttccgccagaacgttgggtggactttcgcgcactgactggtgatcgttcagacaacatcccgggcgttgccgggattggtgaaaagacggcgctgcgcctgctggcagaatggggctcggtggaaaatctgctcaagaaccttgatcgtgtgaaacctgatagcttacgccgcaagatcgaagcccacctggaagacttgcgtctgagtctggatcttgcccgtattcgcaccgatctgccgttggaagtagactttaaagctctgcgtcgtcgcacacccgatttagaggggttacgcgcgttcctcgaagaactggagctgggctccctgctgcatgaattcggtttgttgggcggagagaaaccgcgtgaagaagcaccatggccgccgcccgaaggtgcctttgtcggctttcttctgtcacgcaaagagccaatgtgggcggaactgttagctcttgcagccgccgcggaagggcgtgttcaccgcgcgacctctcctgtcgaggccctcgctgacctcaaagaagcacgtggtttcttggcgaaagatttagccgtgcttacgttacgcgaaggcgttgcgctcgatccgacggacgacccgcttttggtggcttatttgctcgatcatgcgaataccaacccggaacgtgtcgcccgtcgttacggcggcgagtttactgaagatgcggcagaacgcgcgttgcttagcgaacgcctcttccagacgttatttccacgtctttcggagaaattactctggctctatcaggaagtcgaacgtccattgagtcgcgtgcttgcccatatggaggctcgcggtgtgcgcttagatgttccgttgttagaagcactcagcttcgagttggagaaagaactggaacgtcttgaaggcgaagtctttcgtttagcggggcatcccttcaatctcaactctcgcgaccaattggagaaagtgctctttgatgaattaggtttaacccctgtcacgcgtacagagaagaccggcaaacgttccacttcggcagccgccttggaagcacttcgtggtgctcacccgatcgtcgagttgattttgcagtatcgcgagctcagcaaactcaaatcaacctatcttgataggttacctcgtcttgttcatccacgtacgggtcgtttacacacccgcttcaatcaaacggcaacagccaccgggcgcttgtcgtcgagtgacccgaacctccagaatattccagtgcgcacgccgctgggccaacacattcgtaaagcgtttgttgcggaagaaggttggttattacttgcggccgattactcccagatcgaacttcgtgtattggcgcatctctctggcgacgagaatcttaaacgcgtgtttcgcgaaggcaaggatattcacactgaaaccgcagcctggatgttcggggtggacccagccttagtggaccccaagatgcgtcgtgccgccaagaccgtcaactttggcgtactctatggtatgtcagcagcacgtcttagtcaggaattgggcattgactacaaagaagctgaagcgtttatcgagcgctatttccaatcctttccgaaagttcgcgcgtggattgaacgtacgctcgaagaaggtcgcactcgcggctatgtggaaacgttattcgggcgtcgtcgctacgttccagatcttacgtctcgtgtccgctcagtgcgcgaagctgctgagcgtatggcctggaatatgcctgttcagggaacagcggcggacctcatgaagatcgccatggtgaaattgtttccgcgcttgaaacccttaggagcccaccttcttttacaggtgcatgatgaattggtcttggaagtacccgaggatcgcgcagaagaagccaaagcactcgtgaaagaggttatggaaaacgcgtatccgttagatgttccgttggaggtcgaagtgggtgtaggccgtgattggcttgaagcgaaacaagactaatga

SEQ ID NO: 910 - protein, 844 aa, synthetic construct
  REGION 1..844: note = DNA Polymerase Variant
MHHHHHHGGSGMLPLFDLEEPPKRVLLVDGHHLAYRTFYALSLTTSRGEPVQMVYGFARSLLKALKEDGQAVVVVFDAKAPSFRHEAYEAYKAGRAPTPEDFPRQLALVKRLVDLLGLVRLEAPGYEADDVLGTLAKKAEREGMEVCILTGDRDFFQLLSEKVSVLLPDGTLVTPKDVQEKYGVPPERWVDFRALTGDRSDNIPGVAGIGEKTALRLLAEWGSVENLLKNLDRVKPDSLRRKIEAHLEDLRLSLDLARIRTDLPLEVDFKALRRRTPDLEGLRAFLEELELGSLLHEFGLLGGEKPREEAPWPPPEGAFVGFLLSRKEPMWAELLALAAAAEGRVHRATSPVEALADLKEARGFLAKDLAVLTLREGVALDPTDDPLLVAYLLDHANTNPERVARRYGGEFTEDAAERALLSERLFQTLFPRLSEKLLWLYQEVERPLSRVLAHMEARGVRLDVPLLEALSFELEKELERLEGEVFRLAGHPFNLNSRDQLEKVLFDELGLTPVTRTEKTGKRSTSAAALEALRGAHPIVELILQYRELSKLKSTYLDRLPRLVHPRTGRLHTRFNQTATATGRLSSSDPNLQNIPVRTPLGQHIRKAFVAEEGWLLLAADYSQIELRVLAHLSGDENLKRVFREGKDIHTETAAWMFGVDPALVDPKMRRAAKTVNFGVLYGMSAARLSQELGIDYKEAEAFIERYFQSFPKVRAWIERTLEEGRTRGYVETLFGRRRYVPDLTSRVRSVREAAERMAWNMPVQGTAADLMKIAMVKLFPRLKPLGAHLLLQVHDELVLEVPEDRAEEAKALVKEVMENAYPLDVPLEVEVGVGRDWLEAKQD

SEQ ID NO: 911 - DNA, 2538 bp, synthetic construct
  misc_feature 1..2538: note = DNA Polymerase Variant
  source 1..2538: mol_type = other DNA
atgcaccatcatcatcatcatggcggtagcggcatgttaccgctgtttgatttggaagaaccaccaaaacgcgtgctgcttgttgacggccatcatctggcgtatcgtaccttctacgcactgagccttacgacctcacgtggtgagcctgtccagatggtgtatgggtttgctcgctccctgctgaaagccctgaaggaagatggtcaagccgtagtagtggttttcgatgcgcgtgcaccgtcgtttcgtcacgaagcgtacgaggcctataaagctggccgcgcaccgaccccggaagactttccgcgtcagttagcgctcgtcaaacgcctcgtggatttgctgggattagttcgcttggaagctcctggctacgaggcggacgacgtgctcggtacactggccaagaaagcagaacgtgaaggcatggaggtctgcattcttaccggtgatcgcgatttcttccagctgctgtctgagaaagtgagcgttttgctgcccgatggcacgttagtaaccccgaaagatctgcaagagaaatatggagttccgccagaacgttgggtggactttcgcgcactgactggtgatcgttcagacaacatcccgggcgttgccgggattggtgaaaagacggcgctgcgcctgctggcagaatggggctcggtggaaaatctgctcaagaaccttgatcgtgtgaaacctgatagcttacgccgcaagatcgaagcccacctggaagacttgcgtctgagtctggatcttgtacgtattcgcaccgatctgccgttggaagtagactttaaagctctgcgtcgtcgcacacccgatttagaggggttacgcgcgttcctcgaagaactggagctgggctccctgctgcatgaattcggtttgttgggcggagagaaaccgcgtgaagaagcaccatggccgccgcccgggggtgcctttgtcggctttcttctgtcacgcaaagagccaatgtgggcggaactgttagctcttgcagccgccgcggaagggcgtgttcaccgcgcgacctctcctgtcgaggccctcgctgacctcaaagaagcacgtggtttcttggcgaaagatttagccgtgcttgcattacgcgaaggcgttgcgctcgatccgacggacgacccgcttttggtggcttatttgctcgatcatgcgaataccaacccggaacgtgtcgcccgtcgttacggcggcgagtttactgaagatgcggcagaacgcgcgttgcttagcgaacgcctcttccagacgttatttccacgtctttcggagaaattactctggctctatcaggaagtcgaacgtccattgagtcgcgtgcttgcccatatggaggctcgcggtgtgcgcttagatgttccgttgttagaagcactcagcttcgagttggagaaagaactggaacgtcttgaaggcgaagtctttcgtttagcggggcatcccttcaatctcaactctcgcgaccaattggagaaagtgctctttgatgaattaggtttaacccctgtcacgcgtacagagaagaccggcaaacgttccacttcggcagccgccttggaagcacttcgtggtgtgcacccgatcgtcgagttgattttgcagtatcgcgagctcagcaaactcaaatcaacctatcttgataggttacctcgtcttgttcatccacgtacgggtcgtttacacacccgcttcaatcaaacggcaacagccaccgggcgcttgtcgtcgagtgacccgaacctccagaatattccagtgcgcacgccgctgggccaacacattcgtaaagcgtttgttgcggaagaaggttggttattacttgcggccgattactcccagatcgaacttcgtgtattggcgcatctctctggcgacgagaatcttaaacgcgtgtttcgcgaaggcaaggatattcacactgaaaccgcagcctggatgttcggggtggactcggccttagtggaccccaagatgcgtcgtgccgccaagaccgtcaactttggcgtactctatggtatgtcagcagcacgtcttagtcaggaattgggcattgactacaaagaagctgaagcgtttatcgagcgctatttccaatcctttccgaaagttcgcgcgtggattgaacgtacgctcgaagaaggtcgcactcgcggctatgtggaaacgttattcgggcgtcgtcgctacgttccagatcttacgtctcgtgtccgctcagtgcgcgaagctgctgagcgtatggcctggaatatgcctgttcagggaacagcggcggacctcatgaagatcgccatggtgaaattgtttccgcgcttgaaacccttaggagcccaccttcttttacaggtgcatgatgaattggtcttggaagtacccgaggatcgcgcagaagaagccaaagcactcgtgaaagaggttatggaaaacgcgtatccgttagatgttccgttggaggtcgaagtgggtgtaggccgtgattggcttgaagcgaaacaagactaatga

SEQ ID NO: 912 - protein, 844 aa, synthetic construct
  REGION 1..844: note = DNA Polymerase Variant
MHHHHHHGGSGMLPLFDLEEPPKRVLLVDGHHLAYRTFYALSLTTSRGEPVQMVYGFARSLLKALKEDGQAVVVVFDARAPSFRHEAYEAYKAGRAPTPEDFPRQLALVKRLVDLLGLVRLEAPGYEADDVLGTLAKKAEREGMEVCILTGDRDFFQLLSEKVSVLLPDGTLVTPKDLQEKYGVPPERWVDFRALTGDRSDNIPGVAGIGEKTALRLLAEWGSVENLLKNLDRVKPDSLRRKIEAHLEDLRLSLDLVRIRTDLPLEVDFKALRRRTPDLEGLRAFLEELELGSLLHEFGLLGGEKPREEAPWPPPGGAFVGFLLSRKEPMWAELLALAAAAEGRVHRATSPVEALADLKEARGFLAKDLAVLALREGVALDPTDDPLLVAYLLDHANTNPERVARRYGGEFTEDAAERALLSERLFQTLFPRLSEKLLWLYQEVERPLSRVLAHMEARGVRLDVPLLEALSFELEKELERLEGEVFRLAGHPFNLNSRDQLEKVLFDELGLTPVTRTEKTGKRSTSAAALEALRGVHPIVELILQYRELSKLKSTYLDRLPRLVHPRTGRLHTRFNQTATATGRLSSSDPNLQNIPVRTPLGQHIRKAFVAEEGWLLLAADYSQIELRVLAHLSGDENLKRVFREGKDIHTETAAWMFGVDSALVDPKMRRAAKTVNFGVLYGMSAARLSQELGIDYKEAEAFIERYFQSFPKVRAWIERTLEEGRTRGYVETLFGRRRYVPDLTSRVRSVREAAERMAWNMPVQGTAADLMKIAMVKLFPRLKPLGAHLLLQVHDELVLEVPEDRAEEAKALVKEVMENAYPLDVPLEVEVGVGRDWLEAKQD

SEQ ID NO: 913 - DNA, 2538 bp, synthetic construct
  misc_feature 1..2538: note = DNA Polymerase Variant
  source 1..2538: mol_type = other DNA
atgcaccatcatcatcatcatggcggtagcggcatgttaccgctgtttgatttggaagaaaacccaaaacgcgtgctgcttgttgacggccatcatctggcgtatcgtaccttctacgcactgagccttacgacctcacgtggtgagcctgtccagatggtgtatgggtttgctcgctccctgctgaaagccctgaaggaagatggtcaagccgtagtagtggttttcgatgcgaaagcaccgtcgtttcgtcacgaagcgtacgaggcctataaagctggccgcgcaccgaccccggaagactttccgcgtcagttagcgctcgtcaaacgcctcgtggatttgctgggattagttcgcttggaagctcctggctacgaggcggacgacgtgctcggtacactggccaagaaagcagaacgtgaaggcatggaggtctgcattcttaccggtgatcgcgatttcttccagctgctgtctgagaaagtgagcgttttgctgcccgatggcacgttagtaaccccgaaagatgtgcaagagaaatatggagttccgccagaacgttgggtggactttcgcgcactgactggtgatcgttcagacaacatcccgggcgttgccgggattggtgaaaagacggcgctgcgcctgctggcagaatggggctcggtggaaaatctgctcaagaaccttgataaagtgaaacctgatagcttacgccgcaagatcgaagcccacctggaagacttgcgtctgagtctggatcttgcccgtattcgcaccgatctgccgttggaagtagactttaaagctctgcgtcgtcgcacacccgatttagaggggttacgcgcgttcctcgaagaactggagctgggctccctgctgcatgaattcggtttgttgggcggagagaaaccgcgtgaagaagcaccatggccgccgcccgaaggtgcctttgtcggctttcttctgtcacgcaaagagccaatgtgggcggaactgttagctcttgtagccgccgcggaagggcgtgttcaccgcgcgacctctcctgtcgaggccctcgctgacctcaaagaagcacgtggtttcttggcgaaagatttagccgtgcttgcattacgcgaaggcgttgccctcgatccgacggacgacccgcttttggtggcttatttgctcgatcatgcgaataccaacccggaacgtgtcgcccgtcgttacggcggcgagtttactgaagatgcggcagaacgcgcgttgcttagcgaacgcctcttccagacgttatttccacgtctttcggagaaattactctggctctatcaggaagtcgaacgtccattgagtcgcgtgcttgcccatatggaggctcgcggtgtgcgcttagatgttccgttgttagaagcactcagcttcgagttggagaaagaactggaacgtcttgaaggcgaagtctttcgtttagcggggcatcccttcaatctcaactctcgcgaccaattggagaaagtgctctttgatgaattaggtttaacccctgtcacgcgtacagagaagaccggcaaacgttccacttcggcagccgccttggaagcacttcgtggtgctcacccgatcgtcgagttgattttgcagtatcgcgagctcagcaaactcaaatcaacctatcttgataggttacctaagcttgttcatccacgtacgggtcgtttacacacccgcttcaatcaaacggcaacagccaccgggcgcttgtcgtcgagtgacccgaacctccagaatattccagtgcgcacgccgctgggccaacacattcgtaaagcgtttgttgcggaagagggttggttattacttgcggccgattactcccagatcgaacttcgtgtattggcgcatctctctggcgacgagaatcttaaacgtgtgtttcgcgaaggcaaggatattcacactgaaaccgcagcctggatgttcggggtggactcggccttagtggaccccaagatgcgtcgtgccgccaagaccgtcaactttggcgtactctatggtatgtcagcagcacgtcttagtcaggaattgggcattgactacaaagaagctgaagcgtttatcgagcgctatttccaatcctttccgaaagttcgcgcgtggattgaacgtacgctcgaagaaggtcgcactcgcggctatgtggaaacgttattcgggcgtcgtcgctacgttccagatcttacgtctcgtgtccgctcagtgcgcgaagctgctgagcgtatggcctggaatatgcctgttcagggaacagcggcggacctcatgaagatcgccatggtgaaattgtttccgcgcttgaaacccttaggagcccaccttcttttacaggtgcatgatgaattggtcttggaagtacccgaggatcgcgcagaagaagccaaagcactcgtgaaagaggttatggaaaacgcgtatccgttagatgttccgttggaggtcgaagtgggtgtaggccgtgattggcttgaagcgaaacaagactaatga

SEQ ID NO: 914 - protein, 844 aa, synthetic construct
  REGION 1..844: note = DNA Polymerase Variant
MHHHHHHGGSGMLPLFDLEENPKRVLLVDGHHLAYRTFYALSLTTSRGEPVQMVYGFARSLLKALKEDGQAVVVVFDAKAPSFRHEAYEAYKAGRAPTPEDFPRQLALVKRLVDLLGLVRLEAPGYEADDVLGTLAKKAEREGMEVCILTGDRDFFQLLSEKVSVLLPDGTLVTPKDVQEKYGVPPERWVDFRALTGDRSDNIPGVAGIGEKTALRLLAEWGSVENLLKNLDKVKPDSLRRKIEAHLEDLRLSLDLARIRTDLPLEVDFKALRRRTPDLEGLRAFLEELELGSLLHEFGLLGGEKPREEAPWPPPEGAFVGFLLSRKEPMWAELLALVAAAEGRVHRATSPVEALADLKEARGFLAKDLAVLALREGVALDPTDDPLLVAYLLDHANTNPERVARRYGGEFTEDAAERALLSERLFQTLFPRLSEKLLWLYQEVERPLSRVLAHMEARGVRLDVPLLEALSFELEKELERLEGEVFRLAGHPFNLNSRDQLEKVLFDELGLTPVTRTEKTGKRSTSAAALEALRGAHPIVELILQYRELSKLKSTYLDRLPKLVHPRTGRLHTRFNQTATATGRLSSSDPNLQNIPVRTPLGQHIRKAFVAEEGWLLLAADYSQIELRVLAHLSGDENLKRVFREGKDIHTETAAWMFGVDSALVDPKMRRAAKTVNFGVLYGMSAARLSQELGIDYKEAEAFIERYFQSFPKVRAWIERTLEEGRTRGYVETLFGRRRYVPDLTSRVRSVREAAERMAWNMPVQGTAADLMKIAMVKLFPRLKPLGAHLLLQVHDELVLEVPEDRAEEAKALVKEVMENAYPLDVPLEVEVGVGRDWLEAKQD

SEQ ID NO: 915 - DNA, 2538 bp, synthetic construct
  misc_feature 1..2538: note = DNA Polymerase Variant
  source 1..2538: mol_type = other DNA
atgcaccatcatcatcatcatggcggtagcggcatgttaccgctgtttgatttggaagaaccaccaaaacgcgtgctgcttgttgacggccatcatctggcgtatcgtaccttctacgcactgagccttacgacctcacgtggtgagcctgtccagatggtgtatgggtttgctcgctccctgctgaaagccctgaaggaagatggtcaagccgtagtagtggttttcgatgcgaaggcaccgtcgtttcgtcacgaagcgtacgaggcctataaagctggccgcgcaccgaccccggaagactttccgcgtcagttagcgctcgtcaaacgcctcgtggatttgctgggattagttcgcttggaagctcctggctacgaggcggacgacgtgctcggtacactggccaagaaagcagaacgtgaaggcatggaggtctgcattcttaccggtgatcgcgatttcttccagctgctgtctgagaaagtgagcgttttgctgcccgatggcacgttagtaaccccgaaagatgtgcaagagaaatatggagttccgccagaacgttgggtggactttcgcgcactgactggtgatcgttcagacaacatcccgggcgttgccgggattggtgaaaagacggcgctgcgcctgctggcagaatggggctcggtggaaaatctgctcaagaaccttgatcgtgtgaaacctgatagcttacgccgcaagatcgaagcccacctggaagacttgcgtctgagtctggatcttgtacgtattcgcaccgatctgccgttggaagtagactttaaagctctgcgtcgtcgcacacccgatttagaggggttacgcgcgttcctcgaagaactggagctgggctccctgctgcatgaattcggtttgttgggcggagagaaaccgcgtgaagaagcaccatggccgccgcccgggggtgcctttgtcggctttcttctgtcacgcaaagagccaatgtgggcggaactgttagctcttgcagccgccgcggaagggcgtgttcaccgcgcgacctctcctgtcgaggccctcgctgacctcaaagaagcacgtggtttcttggcgaaagatttagccgtgcttgcattacgcgaaggcgttgcgctcgatccgacggacgacccgcttttggtggcttatttgctcgatcatgcgaataccaacccggaacgtgtcgcccgtcgttacggcggcgagtttactgaagatgcggcagaacgcgcgttgcttagcgaacgcctcttccagacgttatttccacgtctttcggagaaattactctggctctatcaggaagtcgaacgtccattgagtcgcgtgcttgcccatatggaggctcgcggtgtgcgcttagatgttccgttgttagaagcactcagcttcgagttggagaaagaactggaacgtcttgaaggcgaagtctttcgtttagcggggcatcccttcaatctcaactctcgcgaccaattggagaaagtgctctttgatgaattaggtttaacccctgtcacgcgtacagagaagaccggcaaacgttccacttcggcagccgccttggaagcacttcgtggtgtgcacccgatcgtcgagttgattttgcagtatcgcgagctcagcaaactcaaatcaacctatcttgataggttacctcgtcttgttcatccacgtacgggtcgtttacacacccgcttcaatcaaacggcaacagccaccgggcgcttgtcgtcgagtgacccgaacctccagaatattccagtgcgcacgccgctgggccaacacattcgtaaagcgtttgttgcggaagaaggttggttattacttgcggccgattactcccagatcgaacttcgtgtattggcgcatctctctggcgacgagaatcttaaacgcgtgtttcgcgaaggcaaggatattcacactgaaaccgcagcctggatgttcggggtggacccggccttagtggaccccaagatgcgtcgtgccgccaagaccgtcaactttggcgtactctatggtatgtcagcagcacgtcttagtcaggaattgggcattgactacaaagaagctgaagcgtttatcgagcgctatttccaatcctttccgaaagttcgcgcgtggattgaacgtacgctcgaagaaggtcgcactcgcggctatgtggaaacgttattcgggcgtcgtcgctacgttccagatcttacgtctcgtgtccgctcagtgcgcgaagctgctgagcgtatggcctggaatatgcctgttcagggaacagcggcggacctcatgaagatcgccatggtgaaattgtttccgcgcttgaaacccttaggagcccaccttcttttacaggtgcatgatgaattggtcttggaagtacccgaggatcgcgcagaagaagccaaagcactcgtgaaagaggttatggaaaacgcgtatccgttagatgttccgttggaggtcgaagtgggtgtaggccgtgattggcttgaagcgaaacaagactaatga

SEQ ID NO: 916 - protein, 844 aa, synthetic construct
  REGION 1..844: note = DNA Polymerase Variant
MHHHHHHGGSGMLPLFDLEEPPKRVLLVDGHHLAYRTFYALSLTTSRGEPVQMVYGFARSLLKALKEDGQAVVVVFDAKAPSFRHEAYEAYKAGRAPTPEDFPRQLALVKRLVDLLGLVRLEAPGYEADDVLGTLAKKAEREGMEVCILTGDRDFFQLLSEKVSVLLPDGTLVTPKDVQEKYGVPPERWVDFRALTGDRSDNIPGVAGIGEKTALRLLAEWGSVENLLKNLDRVKPDSLRRKIEAHLEDLRLSLDLVRIRTDLPLEVDFKALRRRTPDLEGLRAFLEELELGSLLHEFGLLGGEKPREEAPWPPPGGAFVGFLLSRKEPMWAELLALAAAAEGRVHRATSPVEALADLKEARGFLAKDLAVLALREGVALDPTDDPLLVAYLLDHANTNPERVARRYGGEFTEDAAERALLSERLFQTLFPRLSEKLLWLYQEVERPLSRVLAHMEARGVRLDVPLLEALSFELEKELERLEGEVFRLAGHPFNLNSRDQLEKVLFDELGLTPVTRTEKTGKRSTSAAALEALRGVHPIVELILQYRELSKLKSTYLDRLPRLVHPRTGRLHTRFNQTATATGRLSSSDPNLQNIPVRTPLGQHIRKAFVAEEGWLLLAADYSQIELRVLAHLSGDENLKRVFREGKDIHTETAAWMFGVDPALVDPKMRRAAKTVNFGVLYGMSAARLSQELGIDYKEAEAFIERYFQSFPKVRAWIERTLEEGRTRGYVETLFGRRRYVPDLTSRVRSVREAAERMAWNMPVQGTAADLMKIAMVKLFPRLKPLGAHLLLQVHDELVLEVPEDRAEEAKALVKEVMENAYPLDVPLEVEVGVGRDWLEAKQD

SEQ ID NO: 917 - DNA, 2538 bp, synthetic construct
  misc_feature 1..2538: note = DNA Polymerase Variant
  source 1..2538: mol_type = other DNA
atgcaccatcatcatcatcatggcggtagcggcatgttaccgctgtttgatttggaagaaaacccaaaacgcgtgctgcttgttgacggccatcatctggcgtatcgtaccttctacgcactgagccttacgacctcacgtggtgagcctgtccagatggtgtatgggtttgctcgctccctgctgaaagccctgaaggaagatggtcaagccgtagtagtggttttcgatgcgcgcgcaccgtcgtttcgtcacgaagcgtacgaggcctataaagctggccgcgcaccgaccccggaagactttccgcgtcagttagcgctcgtcaaacgcctcgtggatttgctgggattagttcgcttggaagctcctggctacgaggcggacgacgtgctcggtacactggccaagaaagcagaacgtgaaggcatggaggtctgcattcttaccggtgatcgcgatttcttccagctgctgtctgagaaagtgagcgttttgctgcccgatggcacgttagtaaccccgaaagatgtgcaagagaaatatggagttccgccagaacgttgggtggactttcgcgcactgactggtgatcgttcagacaacatcccgggcgttgccgggattggtgaaaagacggcgctgcgcctgctggcagaatggggctcggtggaaaatctgctcaagaaccttgatcgtgtgaaacctgatagcttacgccgcaagatcgaagcccacctggaagacttgcgtctgagtctggatcttgcccgtattcgcaccgatctgccgttggaagtagactttaaagctctgcgtcgtcgcacacccgatttagaggggttacgcgcgttcctcgaagaactggagctgggctccctgctgcatgaattcggtttgttgggcaccgagaaaccacgtgaagaagcaccatggccgccgcccgaaggtgcctttgtcggctttcttctgtcacgcaaagagccaatgtgggcggaactgttagctcttgcagccgccgcggaagggcgtgttcaccgcgcgacctctcctgtcgaggccctcgctgacctcaaagaagcacgtggtttcttggcgaaagatttagccgtgcttgcattacgcgaaggcgttgcgctcgatccgacggacgacccgcttttggtggcttatttgctcgatcatgcgaataccaacccggaacgtgtcgcccgtcgttacggcggcgagtttactgaagatgcggcagaacgcgcgttgcttagcgaacgcctcttccagacgttatttccacgtctttcggagaaattactctggctctatggtgaagtcgaacgtccattgagtcgcgtgcttgcccatatggaggctcgcggtgtgcgcttagatgttccgttgttagaagcactcagcttcgagttggagaaagaactggaacgtcttgaaggcgaagtctttcgtttagcggggcatcccttcaatctcaactctcgcgaccaattggagaaagtgctctttgatgaattaggtttaacccctgtcacgcgtacagagaagaccggcaaacgttccacttcggcagccgccttggaagcacttcgtggtgctcacccgatcgtcgagttgattttgcagtatcgcgagctcagcaaactcaaatcaacctatcttgataggttacctcgtcttgttcatccacgtacgggtcgtttacacacccgcttcaatcaaacggcaacagccaccgggcgcttgtcgtcgagtgacccgaacctccagaatattccagtgcgcacgccgctgggccaacacattcgtaaagcgtttgttgcggaagaaggttggttattacttgcggccgattactcccagatcgaacttcgtgtattggcgcatctctctggcgacgagaatcttaaacgcgtgtttcgcgaaggcaaggatattcacactgaaaccgcagcctggatgttcggggtggactcggccttagtggaccccaagatgcgtcgtgccgccaagaccgtcaactttggcgtactctatggtatgtcagcagcacgtcttagtcaggaattgggcattgactacaaagaagctgaagcgtttatcgagcgctatttccaatcctttccgaaagttcgcgcgtggattgaacgtacgctcgaagaaggtcgcactcgcggctatgtggaaacgttattcgggcgtcgtcgctacgttccagatcttacgtctcgtgtccgctcagtgcgcgaagctgctgagcgtatggcctggaatatgcctgttcagggaacagcggcggacctcatgaagatcgccatggtgaaattgtttccgcgcttgaaacccttaggagcccaccttcttttacaggtgcatgatgaattggtcttggaagtacccgaggatcgcgcagaagaagccaaagcactcgtgaaagaggttatggaaaacgcgtatccgttagatgttccgttggaggtcgaagtgggtgtaggccgtgattggcttgaagcgaaacaagactaatga

SEQ ID NO: 918 - protein, 844 aa, synthetic construct
  REGION 1..844: note = DNA Polymerase Variant
MHHHHHHGGSGMLPLFDLEENPKRVLLVDGHHLAYRTFYALSLTTSRGEPVQMVYGFARSLLKALKEDGQAVVVVFDARAPSFRHEAYEAYKAGRAPTPEDFPRQLALVKRLVDLLGLVRLEAPGYEADDVLGTLAKKAEREGMEVCILTGDRDFFQLLSEKVSVLLPDGTLVTPKDVQEKYGVPPERWVDFRALTGDRSDNIPGVAGIGEKTALRLLAEWGSVENLLKNLDRVKPDSLRRKIEAHLEDLRLSLDLARIRTDLPLEVDFKALRRRTPDLEGLRAFLEELELGSLLHEFGLLGTEKPREEAPWPPPEGAFVGFLLSRKEPMWAELLALAAAAEGRVHRATSPVEALADLKEARGFLAKDLAVLALREGVALDPTDDPLLVAYLLDHANTNPERVARRYGGEFTEDAAERALLSERLFQTLFPRLSEKLLWLYGEVERPLSRVLAHMEARGVRLDVPLLEALSFELEKELERLEGEVFRLAGHPFNLNSRDQLEKVLFDELGLTPVTRTEKTGKRSTSAAALEALRGAHPIVELILQYRELSKLKSTYLDRLPRLVHPRTGRLHTRFNQTATATGRLSSSDPNLQNIPVRTPLGQHIRKAFVAEEGWLLLAADYSQIELRVLAHLSGDENLKRVFREGKDIHTETAAWMFGVDSALVDPKMRRAAKTVNFGVLYGMSAARLSQELGIDYKEAEAFIERYFQSFPKVRAWIERTLEEGRTRGYVETLFGRRRYVPDLTSRVRSVREAAERMAWNMPVQGTAADLMKIAMVKLFPRLKPLGAHLLLQVHDELVLEVPEDRAEEAKALVKEVMENAYPLDVPLEVEVGVGRDWLEAKQD

SEQ ID NO: 919 - DNA, 2538 bp, synthetic construct
  misc_feature 1..2538: note = DNA Polymerase Variant
  source 1..2538: mol_type = other DNA
atgcaccatcatcatcatcatggcggtagcggcatgttaccgctgtttgatttggaagaaaacccaaaacgcgtgctgcttgttgacggccatcatctggcgtatcgtaccttctacgcactgagccttacgacctcacgtggtgagcctgtccagatggtgtatgggtttgctcgctccctgctgaaagccctgaaggaagatggtcaagccgtagtagtggttttcgatgcgcgcgcaccgtcgtttcgtcacgaagcgtacgaggcctataaagctggccgcgcaccgaccccggaagactttccgcgtcagttagcgctcgtcaaacgcctcgtggatttgctgggattagttcgcttggaagctcctggctacgaggcggacgacgtgctcggtacactggccaagaaagcagaacgtgaaggcatggaggtctgcattcttaccggtgatcgcgatttcttccagctgctgtctgagaaagtgagcgttttgctgcccgatggcacgttagtaaccccgaaagatgtgcaagagaaatatggagttccgccagaacgttgggtggactttcgcgcactgactggtgatcgttcagacaacatcccgggcgttgccgggattggtgaaaagacggcgctgcgcctgctggcagaatggggctcggtggaaaatctgctcaagaaccttgataaagtgaaacctgatagcttacgccgcaagatcgaagcccacctggaagacttgcgtctgagtctggatcttgcccgtattcgcaccgatctgccgttggaagtagactttaaagctctgcgtcgtcgcacacccgatttagaggggttacgcgcgttcctcgaagaactggagctgggctccctgctgcatgaattcggtttgttgggcaccgagaaaccgcgtgaagaagcaccatggccgccgcccgaaggtgcctttgtcggctttcttctgtcacgcaaagagccaatgtgggcggaactgttagctcttgtagccgccgcggaagggcgtgttcaccgcgcgacctctcctgtcgaggccctcgctgacctcaaagaagcacgtggtttcttggcgaaagatttagccgtgcttgcattacgcgaaggcgttggcctcgatccgacggacgacccgcttttggtggcttatttgctcgatcatgcgaataccaacccggaacgtgtcgcccgtcgttacggcggcgagtttactgaagatgcggcagaacgcgcgttgcttagcgaacgcctcttccagacgttatttccacgtctttcggagaaattactctggctctatcaagaagtcgaacgtccattgagtcgcgtgcttgcccatatggaggctcgcggtgtgcgcttagatgttccgttgttagaagcactcagcttcgagttggagaaagaactggaacgtcttgaaggcgaagtctttcgtttagcggggcatcccttcaatctcaactctcgcgaccaattggagaaagtgctctttgatgaattaggtttaacccctgtcacgcgtacagagaagaccggcaaacgttccacttcggcagccgccttggaagcacttcgtggtgctcacccgatcgtcgagttgattttgcagtatcgcgagctcagcaaactcaaatcaacctatcttgataggttacctaagcttgttcatccacgtacgggtcgtttacacacccgcttcaatcaaacggcaacagccaccgggcgcttgtcgtcgagtgacccgaacctccagaatattccagtgcgcacgccgctgggccaacacattcgtaaagcgtttgttgcggaagagggttggttattacttgcggccgattactcccagatcgaacttcgtgtattggcgcatctctctggcgacgagaatcttaaacgcgtgtttcgcgaaggcaaggatattcacactgaaaccgcagcctggatgttcggggtggacccagccttagtggaccccaagatgcgtcgtgccgccaagaccgtcaactttggcgtactctatggtatgtcagcagcacgtcttagtcaggaattgggcattgactacaaagaagctgaagcgtttatcgagcgctatttccaatcctttccgggtgttcgcgcgtggattgaacgtacgctcgaagaaggtcgcactcgcggctatgtggaaacgttattcgggcgtcgtcgctacgttccagatcttacgtctcgtgtccgctcagtgcgcgaagctgctgagcgtatggcctggaatatgcctgttcagggaacagcggcggacctcatgaagatcgccatggtgaaattgtttccgcgcttgaaacccttaggagcccaccttcttttacaggtgcatgatgaattggtcttggaagtacccgaggatcgcgcagaagaagccaaagcactcgtgaaagaggttatggaaaacgcgtatccgttagatgttccgttggaggtcgaagtgggtgtaggccgtgattggcttgaagcgaaacaagactaatga

SEQ ID NO: 920 - protein, 844 aa, synthetic construct
  REGION 1..844: note = DNA Polymerase Variant
MHHHHHHGGSGMLPLFDLEENPKRVLLVDGHHLAYRTFYALSLTTSRGEPVQMVYGFARSLLKALKEDGQAVVVVFDARAPSFRHEAYEAYKAGRAPTPEDFPRQLALVKRLVDLLGLVRLEAPGYEADDVLGTLAKKAEREGMEVCILTGDRDFFQLLSEKVSVLLPDGTLVTPKDVQEKYGVPPERWVDFRALTGDRSDNIPGVAGIGEKTALRLLAEWGSVENLLKNLDKVKPDSLRRKIEAHLEDLRLSLDLARIRTDLPLEVDFKALRRRTPDLEGLRAFLEELELGSLLHEFGLLGTEKPREEAPWPPPEGAFVGFLLSRKEPMWAELLALVAAAEGRVHRATSPVEALADLKEARGFLAKDLAVLALREGVGLDPTDDPLLVAYLLDHANTNPERVARRYGGEFTEDAAERALLSERLFQTLFPRLSEKLLWLYQEVERPLSRVLAHMEARGVRLDVPLLEALSFELEKELERLEGEVFRLAGHPFNLNSRDQLEKVLFDELGLTPVTRTEKTGKRSTSAAALEALRGAHPIVELILQYRELSKLKSTYLDRLPKLVHPRTGRLHTRFNQTATATGRLSSSDPNLQNIPVRTPLGQHIRKAFVAEEGWLLLAADYSQIELRVLAHLSGDENLKRVFREGKDIHTETAAWMFGVDPALVDPKMRRAAKTVNFGVLYGMSAARLSQELGIDYKEAEAFIERYFQSFPGVRAWIERTLEEGRTRGYVETLFGRRRYVPDLTSRVRSVREAAERMAWNMPVQGTAADLMKIAMVKLFPRLKPLGAHLLLQVHDELVLEVPEDRAEEAKALVKEVMENAYPLDVPLEVEVGVGRDWLEAKQD

SEQ ID NO: 921 - DNA, 2538 bp, synthetic construct
  misc_feature 1..2538: note = DNA Polymerase Variant
  source 1..2538: mol_type = other DNA
atgcaccatcatcatcatcatggcggtagcggcatgttaccgctgtttgatttggaagaaccaccaaaacgcgtgctgcttgttgacggccatcatctggcgtatcgtaccttctacgcactgagccttacgacctcacgtggtgagcctgtccagatggtgtatgggtttgctcgctccctgctgaaagccctgaaggaagatggtcaagccgtagtagtggttttcgatgcgaaagcaccgtcgtttcgtcacgaagcgtacgaggcctataaagctggccgcgcaccgaccccggaagactttccgcgtcagttagcgctcgtcaaacgcctcgtggatttgctgggattagttcgcttggaagctcctggctacgaggcggacgacgtgctcggtacactggccaagaaagcagaacgtgaaggcatggaggtctgcattcttaccggtgatcgcgatttcttccagctgctgtctgagaaagtgagcgttttgctgcccgatggcacgttagtaaccccgaaagatgtgcaagagaaatatggagttccgccagaacgttgggtggactttcgcgcactgactggtgatcgttcagacaacatcccgggcgttgccgggattggtgaaaagacggcgctgcgcctgctggcagaatggggctcggtggaaaatctgctcaagaaccttgatcgcgtgaaacctgatagcttacgccgcaagatcgaagcccacctggaagacttgcgtctgagtctggatcttgcccgtattcgcaccgatctgccgttggaagtagactttaaagctctgcgtcgtcgcacacccgatttagaggggttacgcgcgttcctcgaagaactggagctgggctccctgctgcatgaattcggtttgttgggcggagagaaaccgcgtgaagaagcaccatggccgccgcccgaaggtgcctttgtcggctttcttctgtcacgcaaagagccaatgtgggcggaactgttagctcttgtagccgccgcggaagggcgtgttcaccgcgcgacctctcctgtcgaggccctcgctgacctcaaagaagcacgtggtttcttggcgaaagatttagccgtgcttgcattacgcgaaggcgttgcgctcgatccgacggacgacccgcttttggtggcttatttgctcgatcatgcgaataccaacccggaacgtgtcgcccgtcgttacggcggcgagtttactgaagatgcggcagaacgcgcgttgcttagcgaacgcctcttccagacgttatttccacgtctttcggagaaattactctggctctatggtgaagtcgaacgtccattgagtcgcgtgcttgcccatatggaggctcgcggtgtgcgcttagatgttccgttgttagaagcactcagcttcgagttggagaaagaactggaacgtcttgaaggcgaagtctttcgtttagcggggcatcccttcaatctcaactctcgcgaccaattggagaaagtgctctttgatgaattaggtttaacccctgtcacgcgtacagagaagaccggcaaacgttccacttcggcagccgccttggaagcacttcgtggtgctcacccgatcgtcgagttgattttgcagtatcgcgagctcagcaaactcaaatcaacctatcttgataggttacctcgtcttgttcatccacgtacgggtcgtttacacacccgcttcaatcaaacggcaacagccaccgggcgcttgtcgtcgagtgacccgaacctccagaatattccagtgcgcacgccgctgggccaacacattcgtaaagcgtttgttgcggaagagggttggttattacttgcggccgattactcccagatcgaacttcgtgtattggcgcatctctctggcgacgagaatcttaaacgcgtgtttcgcgaaggcaaggatattcacactgaaaccgcagcctggatgttcggggtggacccagccttagtggaccccaagatgcgtcgtgccgccaagaccgtcaactttggcgtactctatggtatgtcagcagcacgtcttagtcaggaattgggcattgactacaaagtggctgaagcgtttatcgagcgctatttccaatcctttccgaaagttcgcgcgtggattgaacgtacgctcgaagaaggtcgcactcgcggctatgtggaaacgttattcgggcgtcgtcgctacgttccagatcttacgtctcgtgtccgctcagtgcgcgaagctgctgagcgtatggcctggaatatgcctgttcagggaacagcggcggacctcatgaagatcgccatggtgaaattgtttccgcgcttgaaacccttaggagcccaccttcttttacaggtgcatgatgaattggtcttggaagtacccgaggatcgcgcagaagaagccaaagcactcgtgaaagaggttatggaaaacgcgtatccgttagatgttccgttggaggtcgaagtgggtgtaggccgtgattggcttgaagcgaaacaagactaatga

SEQ ID NO: 922 - protein, 844 aa, synthetic construct
  REGION 1..844: note = DNA Polymerase Variant
MHHHHHHGGSGMLPLFDLEEPPKRVLLVDGHHLAYRTFYALSLTTSRGEPVQMVYGFARSLLKALKEDGQAVVVVFDAKAPSFRHEAYEAYKAGRAPTPEDFPRQLALVKRLVDLLGLVRLEAPGYEADDVLGTLAKKAEREGMEVCILTGDRDFFQLLSEKVSVLLPDGTLVTPKDVQEKYGVPPERWVDFRALTGDRSDNIPGVAGIGEKTALRLLAEWGSVENLLKNLDRVKPDSLRRKIEAHLEDLRLSLDLARIRTDLPLEVDFKALRRRTPDLEGLRAFLEELELGSLLHEFGLLGGEKPREEAPWPPPEGAFVGFLLSRKEPMWAELLALVAAAEGRVHRATSPVEALADLKEARGFLAKDLAVLALREGVALDPTDDPLLVAYLLDHANTNPERVARRYGGEFTEDAAERALLSERLFQTLFPRLSEKLLWLYGEVERPLSRVLAHMEARGVRLDVPLLEALSFELEKELERLEGEVFRLAGHPFNLNSRDQLEKVLFDELGLTPVTRTEKTGKRSTSAAALEALRGAHPIVELILQYRELSKLKSTYLDRLPRLVHPRTGRLHTRFNQTATATGRLSSSDPNLQNIPVRTPLGQHIRKAFVAEEGWLLLAADYSQIELRVLAHLSGDENLKRVFREGKDIHTETAAWMFGVDPALVDPKMRRAAKTVNFGVLYGMSAARLSQELGIDYKVAEAFIERYFQSFPKVRAWIERTLEEGRTRGYVETLFGRRRYVPDLTSRVRSVREAAERMAWNMPVQGTAADLMKIAMVKLFPRLKPLGAHLLLQVHDELVLEVPEDRAEEAKALVKEVMENAYPLDVPLEVEVGVGRDWLEAKQD

SEQ ID NO: 923 - DNA, 2538 bp, synthetic construct
  misc_feature 1..2538: note = DNA Polymerase Variant
  source 1..2538: mol_type = other DNA
atgcaccatcatcatcatcatggcggtagcggcatgttaccgctgtttgatttggaagaaccaccaaaacgcgtgctgcttgttgacggccatcatctggcgtatcgtaccttctacgcactgagccttacgacctcacgtggtgagcctgtccagatggtgtatgggtttgctcgctccctgctgaaagccctgaaggaagatggtcaagccgtagtagtggttttcgatgcgaaagcaccgtcgtttcgtcacgaagcgtacgaggcctataaagctggccgcgcaccgaccccggaagactttccgcgtcagttagcgctcgtcaaacgcctcgtggatttgctgggattagttcgcttggaagctcctggctacgaggcggacgacgtgctcggtacactggccaagaaagcagaacgtgaaggcatggaggtctgcattcttaccggtgatcgcgatttcttccagctgctgtctgagaaagtgagcgttttgctgcccgatggcacgttagtaaccccgaaagatgtgcaagagaaatatggagttccgccagaacgttgggtggactttcgcgcactgactggtgatcgttcagacaacatcccgggcgttgccgggattggtgaaaagacggcgctgcgcctgctggcagaatggggctcggtggaaaatctgctcaagaaccttgatcgtgtgaaacctgatagcttacgccgcaagatcgaagcccacctggaagacttgcgtctgagtctggatcttgcccgtattcgcaccgatctgccgttggaagtagactttaaagctctgcgtcgtcgcacacccgatttagaggggttacgcgcgttcctcgaagaactggagctgggctccctgctgcatgaattcggtttgttgggcggagagaaaccgcgtgaagaagcaccatggccgccgcccgaaggtgcctttgtcggctttcttctgtcacgcaaagagccaatgtgggcggaactgttagctcttgcagccgccgcggaagggcgtgttcaccgcgcgacctctcctgtcgaggccctcgctgacctcaaagaagcacgtggtttcttggcgaaagatttagccgtgcttgcattacgcgaaggcgttgcgctcgatccgacggacgacccgcttttggtggcttatttgctcgatcatgcgaataccaacccggaacgtgtcgcccgtcgttacggcggcgagtttactgaagatgcggcagaacgcgcgttgcttagcgaacgcctcacgcagacgttatttccacgtctttcggagaaattactctggctctatcaggaagtcgaacgtccattgagtcgcgtgcttgcccatatggaggctcgcggtgtgcgcttagatgttccgttgttagaagcactcagcttcgagttggagaaagaactggaacgtcttgaaggcgaagtctttcgtttagcggggcatcccttcaatctcaactctcgcgaccaattggagaaagtgctctttgatgaattaggtttaacccctgtcacgcgtacagagaagaccggcaaacgttccacttcggcagccgccttggaagcacttcgtggtgctcacccgatcgtcgagttgattttgcagtatcgcgagctcagcaaactcaaatcaacctatcttgataggttacctcgtcttgttcatccacgtacgggtcgtttacacacccgcttcaatcaaacggcaacagccaccgggcgcttgtcgtcgagtgacccgaacctccagaatattccagtgcgcacgccgctgggccaacacattcgtaaagcgtttgttgcggaagaaggttggttattacttgcggccgattactcccagatcgaacttcgtgtattggcgcatctctctggcgacgagaatcttaaacgcgtgtttcgcgaaggcaaggatattcacactgaaaccgcagcctggatgttcggggtggacccagccttagtggaccccaagatgcgtcgtgccgccaagaccgtcaactttggcgtactctatggtatgtcagcagcacgtcttagtcaggaattgggcattgactacaaagaagctgaagcgtttatcgagcgctatttccaatcctttccgaaagttcgcgcgtggattgaacgtacgctcgaagaaggtcgcactcgcggctatgtggaaacgttattcgggcgtcgtcgctacgttccagatcttacgtctcgtgtccgctcagtgcgcgaagctgctgagcgtatggcctggaatatgcctgttcagggaacagcggcggacctcatgaagatcgccatggtgaaattgtttccgcgcttgaaacccttaggagcccaccttcttttacaggtgcatgatgaattggtcttggaagtacccgaggatcgcgcagaagaagccaaagcactcgtgaaagaggttatggaaaacgcgtatccgttagatgttccgttggaggtcgaagtgggtgtaggccgtgattggcttgaagcgaaacaagactaatga

SEQ ID NO: 924 - protein, 844 aa, synthetic construct
  REGION 1..844: note = DNA Polymerase Variant
MHHHHHHGGSGMLPLFDLEEPPKRVLLVDGHHLAYRTFYALSLTTSRGEPVQMVYGFARSLLKALKEDGQAVVVVFDAKAPSFRHEAYEAYKAGRAPTPEDFPRQLALVKRLVDLLGLVRLEAPGYEADDVLGTLAKKAEREGMEVCILTGDRDFFQLLSEKVSVLLPDGTLVTPKDVQEKYGVPPERWVDFRALTGDRSDNIPGVAGIGEKTALRLLAEWGSVENLLKNLDRVKPDSLRRKIEAHLEDLRLSLDLARIRTDLPLEVDFKALRRRTPDLEGLRAFLEELELGSLLHEFGLLGGEKPREEAPWPPPEGAFVGFLLSRKEPMWAELLALAAAAEGRVHRATSPVEALADLKEARGFLAKDLAVLALREGVALDPTDDPLLVAYLLDHANTNPERVARRYGGEFTEDAAERALLSERLTQTLFPRLSEKLLWLYQEVERPLSRVLAHMEARGVRLDVPLLEALSFELEKELERLEGEVFRLAGHPFNLNSRDQLEKVLFDELGLTPVTRTEKTGKRSTSAAALEALRGAHPIVELILQYRELSKLKSTYLDRLPRLVHPRTGRLHTRFNQTATATGRLSSSDPNLQNIPVRTPLGQHIRKAFVAEEGWLLLAADYSQIELRVLAHLSGDENLKRVFREGKDIHTETAAWMFGVDPALVDPKMRRAAKTVNFGVLYGMSAARLSQELGIDYKEAEAFIERYFQSFPKVRAWIERTLEEGRTRGYVETLFGRRRYVPDLTSRVRSVREAAERMAWNMPVQGTAADLMKIAMVKLFPRLKPLGAHLLLQVHDELVLEVPEDRAEEAKALVKEVMENAYPLDVPLEVEVGVGRDWLEAKQD

SEQ ID NO: 925 - DNA, 2538 bp, synthetic construct
  misc_feature 1..2538: note = DNA Polymerase Variant
  source 1..2538: mol_type = other DNA
atgcaccatcatcatcatcatggcggtagcggcatgttaccgctgtttgatttggaagaagcaccaaaacgcgtgctgcttgttgacggccatcatctggcgtatcgtaccttctacgcactgagccttacgacctcacgtggtgagcctgtccagatggtgtatgggtttgctcgctccctgctgaaagccctgaaggaagatggtcaagccgtagtagtggttttcgatgcgaaagcaccgtcgtttcgtcacgaagcgtacgaggcctataaagctggccgcgcaccgaccccggaagactttccgcgtcagttagcgctcgtcaaacgcctcgtggatttgctgggattagttcgcttggaagctcctggctacgaggcggacgacgtgctcggtacactggccaagaaagcagaacgtgaaggcatggaggtctgcattcttaccggtgatcgcgatttcttccagctgctgtctgagaaagtgagcgttttgctgcccgatggcacgttagtaaccccgaaagatgtgcaagagaaatatggagttccgccagaacgttgggtggactttcgcgcactgactggtgatcgttcagacaacatcccgggcgttgccgggattggtgaaaagacggcgctgcgcctgctggcagaatggggctcggtggaaaatctgctcaagaaccttgatcgtgtgaaacctgatagcttacgccgcaagatcgaagcccacctggaagacttgcgtctgagtctggatcttgcccgtattcgcaccgatctgccgttggaagtagactttaaagctctgcgtcgtcgcacacccgatttagaggggttacgcgcgttcctcgaagaactggagctgggctccctgctgcatgaattcggtttgttgggcggagagaaaccgcgtgaagaagcaccatggccgccgcccgaaggtgcctttgtcggctttcttctgtcacgcaaagagccaatgtgggcggaactgttagctcttgtagccgccgcggaagggcgtgttcaccgcgcgacctctcctgtcgaggccctcgctgacctcggggaagcacgtggtttcttggcgaaagatttagccgtgcttgcattacgcgaaggcgttgcgctcgatccgacggacgacccgcttttggtggcttatttgctcgatcatgcgaataccaacccggaacgtgtcgcccgtcgttacggcggcgagtttactgaagatgcggcagaacgcgcgttgcttagcgaacgcctcttccagacgttatttccacgtctttcggagaaattactctggctctatcaagaagtcgaacgtccattgagtcgcgtgcttgcccatatggaggctcgcggtgtgcgcttagatgttccgttgttagaagcactcagcttcgagttggagaaagaactggaacgtcttgaaggcgaagtctttcgtttagcggggcatcccttcaatctcaactctcgcgaccaattggagaaagtgctctttgatgaattaggtttaacccctgtcacgcgtacagagaagaccggcaaacgttccacttcggcagccgccttggaagcacttcgtggtgctcacccgatcgtcgagttgattttgcagtatcgcgagctcagcaaactcaaatcaacctatcttgataggttacctcgtcttgttcatccacgtacgggtcgtttacacacccgcttcaatcaaacggcaacagccaccgggcgcttgtcgtcgagtgacccgaacctccagaatattccagtgcgcacgccgctgggccaacacattcgtaaagcgtttgttgcggaagagggttggttattacttgcggccgattactcccagatcgaacttcgtgtattggcgcatctctctggcgacgagaatcttaaacgcgtgtttcgcgaaggcaaggatattcacactgaaaccgcagcctggatgttcggggtggacccagccttagtggaccccaagatgcgtcgtgccgccaagaccgtcaactttggcgtactctatggtatgtcagcagcacgtcttagtcaggaattgggcattgactacaaagaagctgaagcgtttatcgagcgctatttccaatcctttccgaaagttcgcgcgtggattgaacgtacgctcgaagaaggtcgcactcgcggctatgtggaaacgttattcgggcgtcgtcgctacgttccagatcttacgtctcgtgtccgctcagtgcgcgaagctgctgagcgtatggcctggaatatgcctgttcagggaacagcggcggacctcatgaagatcgccatggtgaaattgtttccgcgcttgaaacccttaggagcccaccttcttttacaggtgcatgatgaattggtcttggaagtacccgaggatcgcgcatacgaagccaaatcgctcgtgaaagaggttatggaaaacgcgtatccgttagatgttccgttggaggtcgaagtgggtgtaggccgtgattggcttgaagcgaaacaagactaatga

SEQ ID NO: 926 - protein, 844 aa, synthetic construct
  REGION 1..844: note = DNA Polymerase Variant
MHHHHHHGGSGMLPLFDLEEAPKRVLLVDGHHLAYRTFYALSLTTSRGEPVQMVYGFARSLLKALKEDGQAVVVVFDAKAPSFRHEAYEAYKAGRAPTPEDFPRQLALVKRLVDLLGLVRLEAPGYEADDVLGTLAKKAEREGMEVCILTGDRDFFQLLSEKVSVLLPDGTLVTPKDVQEKYGVPPERWVDFRALTGDRSDNIPGVAGIGEKTALRLLAEWGSVENLLKNLDRVKPDSLRRKIEAHLEDLRLSLDLARIRTDLPLEVDFKALRRRTPDLEGLRAFLEELELGSLLHEFGLLGGEKPREEAPWPPPEGAFVGFLLSRKEPMWAELLALVAAAEGRVHRATSPVEALADLGEARGFLAKDLAVLALREGVALDPTDDPLLVAYLLDHANTNPERVARRYGGEFTEDAAERALLSERLFQTLFPRLSEKLLWLYQEVERPLSRVLAHMEARGVRLDVPLLEALSFELEKELERLEGEVFRLAGHPFNLNSRDQLEKVLFDELGLTPVTRTEKTGKRSTSAAALEALRGAHPIVELILQYRELSKLKSTYLDRLPRLVHPRTGRLHTRFNQTATATGRLSSSDPNLQNIPVRTPLGQHIRKAFVAEEGWLLLAADYSQIELRVLAHLSGDENLKRVFREGKDIHTETAAWMFGVDPALVDPKMRRAAKTVNFGVLYGMSAARLSQELGIDYKEAEAFIERYFQSFPKVRAWIERTLEEGRTRGYVETLFGRRRYVPDLTSRVRSVREAAERMAWNMPVQGTAADLMKIAMVKLFPRLKPLGAHLLLQVHDELVLEVPEDRAYEAKSLVKEVMENAYPLDVPLEVEVGVGRDWLEAKQD

SEQ ID NO: 927 - DNA, 2538 bp, synthetic construct
  misc_feature 1..2538: note = DNA Polymerase Variant
  source 1..2538: mol_type = other DNA
atgcaccatcatcatcatcatggcggtagcggcatgttaccgctgtttgatttggaagaaccaccaaaacgcgtgctgcttgttgacggccatcatctggcgtatcgtaccttctacgcactgagccttacgacctcacgtggtgagcctgtccagatggtgtatgggtttgctcgctccctgctgaaagccctgaaggaagatggtcaagccgtagtagtggttttcgatgcggctgcaccgtcgtttcgtcacgaagcgtacgaggcctataaagctggccgcgcaccgaccccggaagactttccgcgtcagttagcgctcgtcaaacgcctcgtggatttgctgggattagttcgcttggaagctcctggctacgaggcggacgacgtgctcggtacactggccaagaaagcagaacgtgaaggcatggaggtctgcattcttaccggtgatcgcgatttcttccagctgctgtctgagaaagtgagcgttttgctgcccgatggcacgttagtaaccccgaaagatctgcaagagaaatatggagttccgccagaacgttgggtggactttcgcgcactgactggtgatcgttcagacaacatcccgggcgttgccgggattggtgaaaagacggcgctgcgcctgctggcagaatggggctcggtggaaaatctgctcaagaaccttgataaagtgaaacctgatagcttacgccgcaagatcgaagcccacctggaagacttgcgtctgagtctggatcttgcccgtattcgcaccgatctgccgttggaagtagactttaaagctctgcgtcgtcgcacacccgatttagaggggttacgcgcgttcctcgaagaactggagctgggctccctgctgcatgaattcggtttgttgggcggggagaaaccgcgtgaagaagcaccatggccgccgcccgaaggtgcctttgtcggctttcttctgtcacgcaaagagccaatgtgggcggaactgttagctcttgcagccgccgcggaagggcgtgttcaccgcgcgacctctcctgtcgaggccctcgctgacctcaaagaagcacgtggtttcttggcgaaagatttagccgtgcttgcattacgcgaaggcgttgcgctcgatccgacggacgacccgcttttggtggcttatttgctcgatcatgcgaataccaacccggaacgtgtcgcccgtcgttacggcggcgagtttactgaagatgcggcagaacgcgcgttgcttagcgaacgcctcttccagacgttatttccacgtctttcggagaaattactctggctctatggtgaagtcgaacgtccattgagtcgcgtgcttgcccatatggaggctcgcggtgtgcgcttagatgttccgttgttagaagcactcagcttcgagttggagaaagaactggaacgtcttgaaggcgaagtctttcgtttagcggggcatcccttcaatctcaactctcgcgaccaattggagaaagtgctctttgatgaattaggtttaacccctgtcacgcgtacagagaagaccggcaaacgttccacttcggcagccgccttggaagcacttcgtggtgctcacccgatcgtcgagttgattttgcagtatcgcgagctcagcaaactcaaatcaacctatcttgataggttacctaagcttgttcatccacgtacgggtcgtttacacacccgcttcaatcaaacggcaacagccaccgggcgcttgtcgtcgagtgacccgaacctccagaatattccagtgcgcacgccgctgggccaacacattcgtaaagcgtttgttgcggaagagggttggttattacttgcggccgattactcccagatcgaacttcgtgtattggcgcatctctctggcgacgagaatcttaaacgtgtgtttcgcgaaggcaaggatattcacactgaaaccgcagcctggatgttcggggtggacccggccttagtggaccccaagatgcgtcgtgccgccaagaccgtcaactttggcgtactctatggtatgtcagcagcacgtcttagtcaggaattgggcattgactacaaagaggctgaagcgtttatcgagcgctatttccaatcctttccgaaagttcgcgcgtggattgaacgtacgctcgaagaaggtcgcactcgcggctatgtggaaacgttattcgggcgtcgtcgctacgttccagatcttacgtctcgtgtccgctcagtgcgcgaagctgctgagcgtatggcctggaatatgcctgttcagggaacagcggcggacctcatgaagatcgccatggtgaaattgtttccgcgcttgaaacccttaggagcccaccttcttttacaggtgcatgatgaattggtcttggaagtacccgaggatcgcgcagaggaagccaaatcgctcgtgaaagaggttatggaaaacgcgtatccgttagatgttccgttggaggtcgaagtgggtgtaggccgtgattggcttgaagcgaaacaagactaatga

SEQ ID NO: 928 - protein, 844 aa, synthetic construct
  REGION 1..844: note = DNA Polymerase Variant
MHHHHHHGGSGMLPLFDLEEPPKRVLLVDGHHLAYRTFYALSLTTSRGEPVQMVYGFARSLLKALKEDGQAVVVVFDAAAPSFRHEAYEAYKAGRAPTPEDFPRQLALVKRLVDLLGLVRLEAPGYEADDVLGTLAKKAEREGMEVCILTGDRDFFQLLSEKVSVLLPDGTLVTPKDLQEKYGVPPERWVDFRALTGDRSDNIPGVAGIGEKTALRLLAEWGSVENLLKNLDKVKPDSLRRKIEAHLEDLRLSLDLARIRTDLPLEVDFKALRRRTPDLEGLRAFLEELELGSLLHEFGLLGGEKPREEAPWPPPEGAFVGFLLSRKEPMWAELLALAAAAEGRVHRATSPVEALADLKEARGFLAKDLAVLALREGVALDPTDDPLLVAYLLDHANTNPERVARRYGGEFTEDAAERALLSERLFQTLFPRLSEKLLWLYGEVERPLSRVLAHMEARGVRLDVPLLEALSFELEKELERLEGEVFRLAGHPFNLNSRDQLEKVLFDELGLTPVTRTEKTGKRSTSAAALEALRGAHPIVELILQYRELSKLKSTYLDRLPKLVHPRTGRLHTRFNQTATATGRLSSSDPNLQNIPVRTPLGQHIRKAFVAEEGWLLLAADYSQIELRVLAHLSGDENLKRVFREGKDIHTETAAWMFGVDPALVDPKMRRAAKTVNFGVLYGMSAARLSQELGIDYKEAEAFIERYFQSFPKVRAWIERTLEEGRTRGYVETLFGRRRYVPDLTSRVRSVREAAERMAWNMPVQGTAADLMKIAMVKLFPRLKPLGAHLLLQVHDELVLEVPEDRAEEAKSLVKEVMENAYPLDVPLEVEVGVGRDWLEAKQD

SEQ ID NO: 929 - DNA, 2538 bp, synthetic construct
  misc_feature 1..2538: note = DNA Polymerase Variant
  source 1..2538: mol_type = other DNA
atgcaccatcatcatcatcatggcggtagcggcatgttaccgctgtttgatttggaagaaccaccaaaacgcgtgctgcttgttgacggccatcatctggcgtatcgtaccttctacgcactgagccttacgacctcacgtggtgagcctgtccagatggtgtatgggtttgctcgctccctgctgaaagccctgaaggaagatggtcaagccgtagtagtggttttcgatgcgcgtgcaccgtcgtttcgtcacgaagcgtacgaggcctataaagctggccgcgcaccgaccccggaagactttccgcgtcagttagcgctcgtcaaacgcctcgtggatttgctgggattagttcgcttggaagctcctggctacgaggcggacgacgtgctcggtacactggccaagaaagcagaacgtgaaggcatggaggtctgcattcttaccggtgatcgcgatttcttccagctgctgtctgagaaagtgagcgttttgctgcccgatggcacgttagtaaccccgaaagatgtgcaagagaaatatggagttccgccagaacgttgggtggactttcgcgcactgactggtgatcgttcagacaacatcccgggcgttgccgggattggtgaaaagacggcgctgcgcctgctggcagaatggggctcggtggaaaatctgctcaagaaccttgatcgtgtgaaacctgatagcttacgccgcaagatcgaagcccacctggaagacttgcgtctgagtctggatcttgcacgtattcgcaccgatctgccgttggaagtagactttaaagctctgcgtcgtcgcacacccgatttagaggggttacgcgcgttcctcgaagaactggagctgggctccctgctgcatgaattcggtttgttgggcggagagaaaccgcgtgaagaagcaccatggccgccgcccgagggtgcctttgtcggctttcttctgtcacgcaaagagccaatgtgggcggaactgttagctcttgcagccgccgcggaagggcgtgttcaccgcgcgacctctcctgtcgaggccctcgctgacctcaaagaagcacgtggtttcttggcgaaagatttagccgtgcttgcattacgcgaaggcgttgcgctcgatccgacggacgacccgcttttggtggcttatttgctcgatcatgcgaataccaacccggaacgtgtcgcccgtcgttacggcggcgagtttactgaagatgcggcagaacgcgcgttgcttagcgaacgcctcttccagacgttatttccacgtctttcggagaaattactctggctctatcaggaagtcgaacgtccattgagtcgcgtgcttgcccatatggaggctcgcggtgtgcgcttagatgttccgttgttagaagcactcagcttcgaggcggaaaaagaactggaacgtcttgaaggcgaagtctttcgtttagcggggcatcccttcaatctcaactctcgcgaccaattggagaaagtgctctttgatgaattaggtttaacccctgtcacgcgtacagagaagaccggcaaacgttccacttcggcagccgccttggaagcacttcgtggtgtgcacccgatcgtcgagttgattttgcagtatcgcgagctcagcaaactcaaatcaacctatcttgataggttacctcgtcttgttcatccacgtacgggtcgtttacacacccgcttcaatcaaacggcaacagccaccgggcgcttgtcgtcgagtgacccgaacctccagaatattccagtgcgcacgccgctgggccaacacattcgtaaagcgtttgttgcggaagaaggttggttattacttgcggccgattactcccagatcgaacttcgtgtattggcgcatctctctggcgacgagaatcttaaacgcgtgtttcgcgaaggcaaggatattcacactgaaaccgcagcctggatgttcggggtggactcggccttagtggaccccaagatgcgtcgtgccgccaagaccgtcaactttggcgtactctatggtatgtcagcagcacgtcttagtcaggaattgggcattgactacaaagtagctgaagcgtttatcgagcgctatttccaatcctttccgaaagttcgcgcgtggattgaacgtacgctcgaagaaggtcgcactcgcggctatgtggaaacgttattcgggcgtcgtcgctacgttccagatcttacgtctcgtgtccgctcagtgcgcgaagctgctgagcgtatggcctggaatatgcctgttcagggaacagcggcggacctcatgaagatcgccatggtgaaattgtttccgcgcttgaaacccttaggagcccaccttcttctgcaggtgcatgatgaattggtcttggaagtacccgaggatcgcgcagaagaagccaaagcactcgtgaaagaggttatggaaaacgcgtatccgttagatgttccgttggaggtcgaagtgggtgtaggccgtgattggcttgaagcgaaacaagactaatga

SEQ ID NO: 930 - protein, 844 aa, synthetic construct
  REGION 1..844: note = DNA Polymerase Variant
MHHHHHHGGSGMLPLFDLEEPPKRVLLVDGHHLAYRTFYALSLTTSRGEPVQMVYGFARSLLKALKEDGQAVVVVFDARAPSFRHEAYEAYKAGRAPTPEDFPRQLALVKRLVDLLGLVRLEAPGYEADDVLGTLAKKAEREGMEVCILTGDRDFFQLLSEKVSVLLPDGTLVTPKDVQEKYGVPPERWVDFRALTGDRSDNIPGVAGIGEKTALRLLAEWGSVENLLKNLDRVKPDSLRRKIEAHLEDLRLSLDLARIRTDLPLEVDFKALRRRTPDLEGLRAFLEELELGSLLHEFGLLGGEKPREEAPWPPPEGAFVGFLLSRKEPMWAELLALAAAAEGRVHRATSPVEALADLKEARGFLAKDLAVLALREGVALDPTDDPLLVAYLLDHANTNPERVARRYGGEFTEDAAERALLSERLFQTLFPRLSEKLLWLYQEVERPLSRVLAHMEARGVRLDVPLLEALSFEAEKELERLEGEVFRLAGHPFNLNSRDQLEKVLFDELGLTPVTRTEKTGKRSTSAAALEALRGVHPIVELILQYRELSKLKSTYLDRLPRLVHPRTGRLHTRFNQTATATGRLSSSDPNLQNIPVRTPLGQHIRKAFVAEEGWLLLAADYSQIELRVLAHLSGDENLKRVFREGKDIHTETAAWMFGVDSALVDPKMRRAAKTVNFGVLYGMSAARLSQELGIDYKVAEAFIERYFQSFPKVRAWIERTLEEGRTRGYVETLFGRRRYVPDLTSRVRSVREAAERMAWNMPVQGTAADLMKIAMVKLFPRLKPLGAHLLLQVHDELVLEVPEDRAEEAKALVKEVMENAYPLDVPLEVEVGVGRDWLEAKQD

SEQ ID NO: 931 - DNA, 2538 bp, synthetic construct; identical to SEQ ID NO: 677
  misc_feature 1..2538: note = DNA Polymerase Variant
  source 1..2538: mol_type = other DNA

SEQ ID NO: 932 - protein, 844 aa, synthetic construct; identical to SEQ ID NO: 678
  REGION 1..844: note = DNA Polymerase Variant

SEQ ID NO: 933 - DNA, 2538 bp, synthetic construct
  misc_feature 1..2538: note = DNA Polymerase Variant
  source 1..2538: mol_type = other DNA
atgcaccatcatcatcatcatggcggtagcggcatgttaccgctgtttgatttggaagaaccaccaaaacgcgtgctgcttgttgacggccatcatctggcgtatcgtaccttctacgcactgagccttacgacctcacgtggtgagcctgtccagatggtgtatgggtttgctcgctccctgctgaaagccctgaaggaagatggtcaagccgtagtagtggttttcgatgcgaaagcaccgtcgtttcgtcacgaagcgtacgaggcctataaagctggccgcgcaccgaccccggaagactttccgcgtcagttagcgctcgtcaaacgcctcgtggatttgctgggattagttcgcttggaagctcctggctacgaggcggacgacgtgctcggtacactggccaagaaagcagaacgtgaaggcatggaggtctgcattcttaccggtgatcgcgatttcttccagctgctgtctgagaaagtgagcgttttgctgcccgatggcacgttagtaaccccgaaagatgtgcaagagaaatatggagttccgccagaacgttgggtggactttcgcgcactgactggtgatcgttcagacaacatcccgggcgttgccgggattggtgaaaagacggcgctgcgcctgctggcagaatggggctcggtggaaaatctgctcaagaaccttgatcgtgtgaaacctgatagcttacgccgcaagatcgaagcccacctggaagacttgcgtctgagtctggatcttgcccgtattcgcaccgatctgccgttggaagtagactttaaagctctgcgtcgtcgcacacccgatttagaggggttacgcgcgttcctcgaagaactggagctgggctccctgctgcatgaattcggtttgttgggcggagagaaaccgcgtgaagaagcaccatggccgccgcccgaaggtgcctttgtcggctttcttctgtcacgcaaagagccaatgtgggcggaactgttagctcttgcagccgccgcggaagggcgtgttcaccgcgcgacctctcctgtcgaggccctcgctgacctcaaagaagcacgtggtttcttggcgaaagatttagccgtgcttgcattacgcgaaggcgttgcgctcgatccgacggacgacccgcttttggtgtcgtatttgctcgatcatgcgaataccaacccggaacgtgtcgcccgtcgttacggcggcgagtttactgaagatgcggcagaacgcgcgttgcttagcgaacgcctcttccagacgttatttccacgtctttcggagaaattactctggctctatcaggaagtcgaacgtccattgagtcgcgtgcttgcccatatggaggctcgcggtgtgcgcttagatgttccgttgttagaagcactcagcttcgagttggagaaagaactggaacgtcttgaaggcgaagtctttcgtttagcggggcatcccttcaatctcaactctcgcgaccaattggagaaagtgctctttgatgaattaggtttaacccctgtcacgcgtacagagaagaccggcaaacgttccacttcggcagccgccttggaagcacttcgtggtgctcacccgatcgtcgagttgattttgcagtatcgcgagctcagcaaactcaaatcaacctatcttgataggttacctcgtcttgttcatccacgtacgggtcgtttacacacccgcttcaatcaaacggcaacagccaccgggcgcttgtcgtcgagtgacccgaacctccagaatattccagtgcgcacgccgctgggccaacacattcgtaaagcgtttgttgcggaagaaggttggttattacttgcggccgattactcccagatcgaacttcgtgtattggcgcatctctctggcgacgagaatcttaaacgcgtgtttcgcgaaggcaaggatattcacactgaaaccgcagcctggatgttcggggtggacccagccttagtggaccccaagatgcgtcgtgccgccaagaccgtcaactttggcgtactctatggtatgtcagcagcacgtcttagtcaggaattgggcattgactacaaagaagctgaagcgtttatcgagcgctatttccaatcctttccgaaagttcgcgcgtggattgaacgtacgctcgaagaaggtcgcactcgcggctatgtggaaacgttattcgggcgtcgtcgctacgttccagatcttacgtctcgtgtccgctcagtgcgcgaagctgctgagcgtatggcctggaatatgcctgttcagggaacagcggcggacctcatgaagatcgccatggtgaaattgtttccgcgcttgaaacccttaggagcccaccttcttttacaggtgcatgatgaattggtcttggaagtacccgaggatcgcgcagaagaagccaaagcactcgtgaaagaggttatggaaaacgcgtatccgttagatgttccgttggaggtcgaagtgggtgtaggccgtgattggcttgaagcgaaacaagactaatga

SEQ ID NO: 934 - protein, 844 aa, synthetic construct; identical to SEQ ID NO: 726
  REGION 1..844: note = DNA Polymerase Variant

SEQ ID NO: 935 - DNA, 2538 bp, synthetic construct
  misc_feature 1..2538: note = DNA Polymerase Variant
  source 1..2538: mol_type = other DNA
atgcaccatcatcatcatcatggcggtagcggcatgttaccgctgtttgatttggaagaagcaccaaaacgcgtgctgcttgttgacggccatcatctggcgtatcgtaccttctacgcactgagccttacgacctcacgtggtgagcctgtccagatggtgtatgggtttgctcgctccctgctgaaagccctgaaggaagatggtcaagccgtagtagtggttttcgatgcggctgcaccgtcgtttcgtcacgaagcgtacgaggcctataaagctggccgcgcaccgaccccggaagactttccgcgtcagttagcgctcgtcaaacgcctcgtggatttgctgggattagttcgcttggaagctcctggctacgaggcggacgacgtgctcggtacactggccaagaaagcagaacgtgaaggcatggaggtctgcattcttaccggtgatcgcgatttcttccagctgctgtctgagaaagtgagcgttttgctgcccgatggcacgttagtaaccccgaaagatgtgcaagagaaatatggagttccgccagaacgttgggtggactttcgcgcactgactggtgatcgttcagacaacatcccgggcgttgccgggattggtgaaaagacggcgctgcgcctgctggcagaatggggctcggtggaaaatctgctcaagaaccttgatcgcgtgaaacctgatagcttacgccgcaagatcgaagcccacctggaagacttgcgtctgagtctggatcttgcccgtattcgcaccgatctgccgttggaagtagactttaaagctctgcgtcgtcgcacacccgatttagaggggttacgcgcgttcctcgaagaactggagctgggctccctgctgcatgaattcggtttgttgggcggggagaaaccgcgtgaagaagcaccatggccgccgcccgaaggtgcctttgtcggctttcttctgtcacgcaaagagccaatgtgggcggaactgttagctcttgtagccgccgcggaagggcgtgttcaccgcgcgacctctcctgtcgaggccctcgctgacctcaaagaagcacgcggtttcttggcgaaagatttagccgtgcttgcattacgcgaaggcgttggcctcgatccgacggacgacccgcttttggtggcttatttgctcgatcatgcgaataccaacccggaacgtgtcgcccgtcgttacggcggcgagtttactgaagatgcggcagaacgcgcgttgcttagcgaacgcctcttccagacgttatttccacgtctttcggagaaattactctggctctatcaggaagtcgaacgtccattgagtcgcgtgcttgcccatatggaggctcgcggtgtgcgcttagatgttccgttgttagaagcactcagcttcgagttggagaaagaactggaacgtcttgaaggcgaagtctttcgtttagcggggcatcccttcaatctcaactctcgcgaccaattggagaaagtgctctttgatgaattaggtttaacccctgtcacgcgtacagagaagaccggcaaacgttccacttcggcagccgccttggaagcacttcgtggtgctcacccgatcgtcgagttgattttgcagtatcgcgagctcagcaaactcaaatcaacctatcttgataggttacctcgtcttgttcatccacgtacgggtcgtttacacacccgcttcaatcaaacggcaacagccaccgggcgcttgtcgtcgagtgacccgaacctccagaatattccagtgcgcacgccgctgggccaacacattcgtaaagcgtttgttgcggaagagggttggttattacttgcggccgattactcccagatcgaacttcgtgtattggcgcatctctctggcgacgagaatcttaaacgcgtgtttcgcgaaggcaaggatattcacactgaaaccgcagcctggatgttcggggtggactcggccttagtggaccccaagatgcgtcgtgccgccaagaccgtcaactttggcgtactctatggtatgtcagcagcacgtcttagtcaggaattgggcattgactacaaagaagctgaagcgtttatcgagcgctatttccaatcctttccgaaagttcgcgcgtggattgaacgtacgctcgaagaaggtcgcactcgcggctatgtggaaacgttattcgggcgtcgtcgctacgttccagatcttacgtctcgtgtccgctcagtgcgcgaagctgctgagcgtatggcctggaatatgcctgttcagggaacagcggcggacctcatgaagatcgccatggtgaaattgtttccgcgcttgaaacccttaggagcccaccttcttttacaggtgcatgatgaattggtcttggaagtacccgaggatcgcgcagaagaagccaaagcactcgtgaaagaggttatggaaaacgcgtatccgttagatgttccgttggaggtcgaagtgggtgtaggccgtgattggcttgaagcgaaacaagactaatga

SEQ ID NO: 936 - protein, 844 aa, synthetic construct
  REGION 1..844: note = DNA Polymerase Variant
MHHHHHHGGSGMLPLFDLEEAPKRVLLVDGHHLAYRTFYALSLTTSRGEPVQMVYGFARSLLKALKEDGQAVVVVFDAAAPSFRHEAYEAYKAGRAPTPEDFPRQLALVKRLVDLLGLVRLEAPGYEADDVLGTLAKKAEREGMEVCILTGDRDFFQLLSEKVSVLLPDGTLVTPKDVQEKYGVPPERWVDFRALTGDRSDNIPGVAGIGEKTALRLLAEWGSVENLLKNLDRVKPDSLRRKIEAHLEDLRLSLDLARIRTDLPLEVDFKALRRRTPDLEGLRAFLEELELGSLLHEFGLLGGEKPREEAPWPPPEGAFVGFLLSRKEPMWAELLALVAAAEGRVHRATSPVEALADLKEARGFLAKDLAVLALREGVGLDPTDDPLLVAYLLDHANTNPERVARRYGGEFTEDAAERALLSERLFQTLFPRLSEKLLWLYQEVERPLSRVLAHMEARGVRLDVPLLEALSFELEKELERLEGEVFRLAGHPFNLNSRDQLEKVLFDELGLTPVTRTEKTGKRSTSAAALEALRGAHPIVELILQYRELSKLKSTYLDRLPRLVHPRTGRLHTRFNQTATATGRLSSSDPNLQNIPVRTPLGQHIRKAFVAEEGWLLLAADYSQIELRVLAHLSGDENLKRVFREGKDIHTETAAWMFGVDSALVDPKMRRAAKTVNFGVLYGMSAARLSQELGIDYKEAEAFIERYFQSFPKVRAWIERTLEEGRTRGYVETLFGRRRYVPDLTSRVRSVREAAERMAWNMPVQGTAADLMKIAMVKLFPRLKPLGAHLLLQVHDELVLEVPEDRAEEAKALVKEVMENAYPLDVPLEVEVGVGRDWLEAKQD

SEQ ID NO: 937 - DNA, 2538 bp, synthetic construct
  misc_feature 1..2538: note = DNA Polymerase Variant
  source 1..2538: mol_type = other DNA
atgcaccatcatcatcatcatggcggtagcggcatgttaccgctgtttgatttggaagaaccaccaaaacgcgtgctgcttgttgacggccatcatctggcgtatcgtaccttctacgcactgagccttacgacctcacgtggtgagcctgtccagatggtgtatgggtttgctcgctccctgctgaaagccctgaaggaagatggtcaagccgtagtagtggttttcgatgcgaaagcaccgtcgtttcgtcacgaagcgtacgaggcctataaagctggccgcgcaccgaccccggaagactttccgcgtcagttagcgctcgtcaaacgcctcgtggatttgctgggattagttcgcttggaagctcctggctacgaggcggacgacgtgctcggtacactggccaagaaagcagaacgtgaaggcatggaggtctgcattcttaccggtgatcgcgatttcttccagctgctgtctgagaaagtgagcgttttgctgcccgatggcacgttagtaaccccgaaagatgtgcaagagaaatatggagttccgccagaacgttgggtggactttcgcgcactgactggtgatcgttcagacaacatcccgggcgttgccgggattggtgaaaagacggcgctgcgcctgctggcagaatggggctcggtggaaaatctgctcaagaaccttgatcgtgtgaaacctgatagcttacgccgcaagatcgaagcccacctggaagacttgcgtctgagtctggatcttgcccgtattcgcaccgatctgccgttggaagtagactttaaagctctgcgtcgtcgcacacccgatttagaggggttacgcgcgttcctcgaagaactggagctgggctccctgctgcatgaattcggtttgttgggcggagagaaaccgcgtgaagaagcaccatggccgccgcccgaaggtgcctttgtcggctttcttctgtcacgcaaagagccaatgtgggcggaactgttagctcttgcagccgccgcggaagggcgtgttcaccgcgcgacctctcctgtcgaggccctcgctgacctcaaagaagcacgtggtttcttggcgaaagatttagccgtgcttgcattacgcgaaggcgttgcgctcgatccgacggacgacccgcttttggtggcttatttgctcgatcatgcgaataccaacccggaacgtgtcgcccgtcgttacggcggcgagtttactgaagatgcggcagaacgcgcgttgcttagcgaacgcctcttccagacgttatttccacgtctttcggagaaattactctggctctatcaggaagtcgaacgtccattgagtcgcgtgcttgcccatatggaggctcgcggtgtgcgcttagatgttccgttgttagaagcactcagcttcgagttggagaaagaactggaacgtcttgaaggcgaagtctttcgtttagcggggcatcccttcaatctcaactctcgcgaccaattggagaaagtgctctttgatgaattaggtttaacccctgtcacgcgtacagagaagaccggcaaacgttccacttcggcagccgccttggaagcacttcgtggtgctcacccgatcgtcgagttgattttgcagtatcgcgagctcagcaaactcaaatcaacctatcttgataggttacctcgtcttgttcatccacgtacgggtcgtttacacacccgcttcaatcaaacggcaacagccaccgggcgcttgtcgtcgagtgacccgaacctccagaatattccagtgcgcacgccgctgggccaacacattcgtaaagcgtttgttgcggaagaaggttggttattacttgcggccgattactcccagatcgaacttcgtgtattggcgcatctctctggcgacgagaatcttaaacgcgtgtttcgcgaaggcaaggatattcacactgaaaccgcagcctggatgttcggggtggacccagccttagtggaccccaagatgcgtcgtgccgccaagaccgtcaactttggcgtactctatggtatgtcagcagcacgtcttagtcaggaattgggcattgactacaaagaagctgaagcgtttatcgagcgctatttccaatcctttccgaaagttcgcgcgtggattgaacgtatgctcgaagaaggtcgcactcgcggctatgtggaaacgttattcgggcgtcgtcgctacgttccagatcttacgtctcgtgtccgctcagtgcgcgaagctgctgagcgtatggcctggaatatgcctgttcagggaacagcggcggacctcatgaagatcgccatggtgaaattgtttccgcgcttgaaacccttaggagcccaccttcttttacaggtgcatgatgaattggtcttggaagtacccgaggatcgcgcagaagaagccaaagcactcgtgaaagaggttatggaaaacgcgtatccgttagatgttccgttggaggtcgaagtgggtgtaggccgtgattggcttgaagcgaaacaagactaatga

SEQ ID NO: 938 - protein, 844 aa, synthetic construct
  REGION 1..844: note = DNA Polymerase Variant
MHHHHHHGGSGMLPLFDLEEPPKRVLLVDGHHLAYRTFYALSLTTSRGEPVQMVYGFARSLLKALKEDGQAVVVVFDAKAPSFRHEAYEAYKAGRAPTPEDFPRQLALVKRLVDLLGLVRLEAPGYEADDVLGTLAKKAEREGMEVCILTGDRDFFQLLSEKVSVLLPDGTLVTPKDVQEKYGVPPERWVDFRALTGDRSDNIPGVAGIGEKTALRLLAEWGSVENLLKNLDRVKPDSLRRKIEAHLEDLRLSLDLARIRTDLPLEVDFKALRRRTPDLEGLRAFLEELELGSLLHEFGLLGGEKPREEAPWPPPEGAFVGFLLSRKEPMWAELLALAAAAEGRVHRATSPVEALADLKEARGFLAKDLAVLALREGVALDPTDDPLLVAYLLDHANTNPERVARRYGGEFTEDAAERALLSERLFQTLFPRLSEKLLWLYQEVERPLSRVLAHMEARGVRLDVPLLEALSFELEKELERLEGEVFRLAGHPFNLNSRDQLEKVLFDELGLTPVTRTEKTGKRSTSAAALEALRGAHPIVELILQYRELSKLKSTYLDRLPRLVHPRTGRLHTRFNQTATATGRLSSSDPNLQNIPVRTPLGQHIRKAFVAEEGWLLLAADYSQIELRVLAHLSGDENLKRVFREGKDIHTETAAWMFGVDPALVDPKMRRAAKTVNFGVLYGMSAARLSQELGIDYKEAEAFIERYFQSFPKVRAWIERMLEEGRTRGYVETLFGRRRYVPDLTSRVRSVREAAERMAWNMPVQGTAADLMKIAMVKLFPRLKPLGAHLLLQVHDELVLEVPEDRAEEAKALVKEVMENAYPLDVPLEVEVGVGRDWLEAKQD

SEQ ID NO: 939 - DNA, 2538 bp, synthetic construct
  misc_feature 1..2538: note = DNA Polymerase Variant
  source 1..2538: mol_type = other DNA
atgcaccatcatcatcatcatggcggtagcggcatgttaccgctgtttgatttggaagaagcaccaaaacgcgtgctgcttgttgacggccatcatctggcgtatcgtaccttctacgcactgagccttacgacctcacgtggtgagcctgtccagatggtgtatgggtttgctcgctccctgctgaaagccctgaaggaagatggtcaagccgtagtagtggttttcgatgcggctgcaccgtcgtttcgtcacgaagcgtacgaggcctataaagctggccgcgcaccgaccccggaagactttccgcgtcagttagcgctcgtcaaacgcctcgtggatttgctgggattagttcgcttggaagctcctggctacgaggcggacgacgtgctcggtacactggccaagaaagcagaacgtgaaggcatggaggtctgcattcttaccggtgatcgcgatttcttccagctgctgtctgagaaagtgagcgttttgctgcccgatggcacgttagtaaccccgaaagatgtgcaagagaaatatggagttccgccagaacgttgggtggactttcgcgcactgactggtgatcgttcagacaacatcccgggcgttgccgggattggtgaaaagacggcgctgcgcctgctggcagaatggggctcggtggaaaatctgctcaagaaccttgataaagtgaaacctgatagcttacgccgcaagatcgaagcccacctggaagacttgcgtctgagtctggatcttgcccgtattcgcaccgatctgccgttggaagtagactttaaagctctgcgtcgtcgcacacccgatttagaggggttacgcgcgttcctcgaagaactggagctgggctccctgctgcatgaattcggtttgttgggcggggagaaaccgcgtgaagaagcaccatggccgccgcccgaaggtgcctttgtcggctttcttctgtcacgcaaagagccaatgtgggcggaactgttagctcttgtagccgccgcggaagggcgtgttcaccgcgcgacctctcctgtcgaggccctcgctgacctcaaagaagcacgtggtttcttggcgaaagatttagccgtgcttgcattacgcgaaggcgttgccctcgatccgacggacgacccgcttttggtggcttatttgctcgatcatgcgaataccaacccggaacgtgtcgcccgtcgttacggcggcgagtttactgaagatgcggcagaacgcgcgttgcttagcgaacgcctcttccagacgttatttccacgtctttcggagaaattactctggctctatcaggaagtcgaacgtccattgagtcgcgtgcttgcccatatggaggctcgcggtgtgcgcttagatgttccgttgttagaagcactcagcttcgagttggagaaagaactggaacgtcttgaaggcgaagtctttcgtttagcggggcatcccttcaatctcaactctcgcgaccaattggagaaagtgctctttgatgaattaggtttaacccctgtcacgcgtacagagaagaccggcaaacgttccacttcggcagccgccttggaagcacttcgtggtgctcacccgatcgtcgagttgattttgcagtatcgcgagctcagcaaactcaaatcaacctatcttgataggttacctcgtcttgttcatccacgtacgggtcgtttacacacccgcttcaatcaaacggcaacagccaccgggcgcttgtcgtcgagtgacccgaacctccagaatattccagtgcgcacgccgctgggccaacacattcgtaaagcgtttgttgcggaacatggttggttattacttgcggccgattactcccagatcgaacttcgtgtattggcgcatctctctggcgacgagaatcttaaagctgtgtttcgcgaaggcaaggatattcacactgaaaccgcagcctggatgttcggggtggacccggccttagtggaccccaagatgcgtcgtgccgccaagaccgtcaactttggcgtactctatggtatgtcagcagcacgtcttagtcaggaattgggcattgactacaaagaagctgaagcgtttatcgagcgctatttccaatcctttccgaaagttcgcgcgtggattgaacgtacgctcgaagaaggtcgcactcgcggctatgtggaaacgttattcgggcgtcgtcgctacgttccagatcttacgtctcgtgtccgctcagtgcgcgaagctgctgagcgtatggcctggaatatgcctgttcagggaacagcggcggacctcatgaagatcgccatggtgaaattgtttccgcgcttgaaacccttaggagcccaccttcttttacaggtgcatgatgaattggtcttggaagtacccgaggatcgcgcagaagaagccaaagcactcgtgaaagaggttatggaaaacgcgtatccgttagatgttccgttggaggtcgaagtgggtgtaggccgtgattggcttgaagcgaaacaagactaatga

SEQ ID NO: 940 - protein, 844 aa, synthetic construct
  REGION 1..844: note = DNA Polymerase Variant
MHHHHHHGGSGMLPLFDLEEAPKRVLLVDGHHLAYRTFYALSLTTSRGEPVQMVYGFARSLLKALKEDGQAVVVVFDAAAPSFRHEAYEAYKAGRAPTPEDFPRQLALVKRLVDLLGLVRLEAPGYEADDVLGTLAKKAEREGMEVCILTGDRDFFQLLSEKVSVLLPDGTLVTPKDVQEKYGVPPERWVDFRALTGDRSDNIPGVAGIGEKTALRLLAEWGSVENLLKNLDKVKPDSLRRKIEAHLEDLRLSLDLARIRTDLPLEVDFKALRRRTPDLEGLRAFLEELELGSLLHEFGLLGGEKPREEAPWPPPEGAFVGFLLSRKEPMWAELLALVAAAEGRVHRATSPVEALADLKEARGFLAKDLAVLALREGVALDPTDDPLLVAYLLDHANTNPERVARRYGGEFTEDAAERALLSERLFQTLFPRLSEKLLWLYQEVERPLSRVLAHMEARGVRLDVPLLEALSFELEKELERLEGEVFRLAGHPFNLNSRDQLEKVLFDELGLTPVTRTEKTGKRSTSAAALEALRGAHPIVELILQYRELSKLKSTYLDRLPRLVHPRTGRLHTRFNQTATATGRLSSSDPNLQNIPVRTPLGQHIRKAFVAEHGWLLLAADYSQIELRVLAHLSGDENLKAVFREGKDIHTETAAWMFGVDPALVDPKMRRAAKTVNFGVLYGMSAARLSQELGIDYKEAEAFIERYFQSFPKVRAWIERTLEEGRTRGYVETLFGRRRYVPDLTSRVRSVREAAERMAWNMPVQGTAADLMKIAMVKLFPRLKPLGAHLLLQVHDELVLEVPEDRAEEAKALVKEVMENAYPLDVPLEVEVGVGRDWLEAKQD

SEQ ID NO: 941 - DNA, 2538 bp, synthetic construct
  misc_feature 1..2538: note = DNA Polymerase Variant
  source 1..2538: mol_type = other DNA
atgcaccatcatcatcatcatggcggtagcggcatgttaccgctgtttgatttggaagaaccaccaaaacgcgtgctgcttgttgacggccatcatctggcgtatcgtaccttctacgcactgagccttacgacctcacgtggtgagcctgtccagatggtgtatgggtttgctcgctccctgctgaaagccctgaaggaagatggtcaagccgtagtagtggttttcgatgcgaaagcaccgtcgtttcgtcacgaagcgtacgaggcctataaagctggccgcgcaccgaccccggaagactttccgcgtcagttagcgctcgtcaaacgcctcgtggatttgctgggattagttcgcttggaagctcctggctacgaggcggacgacgtgctcggtacactggccaagaaagcagaacgtgaaggcatggaggtctgcattcttaccggtgatcgcgatttcttccagctgctgtctgagaaagtgagcgttttgctgcccgatggcacgttagtaaccccgaaagatgtgcaagagaaatatggagttccgccagaacgttgggtggactttcgcgcactgactggtgatcgttcagacaacatcccgggcgttgccgggattggtgaaaagacggcgctgcgcctgctggcagaatggggctcggtggaaaatctgctcaagaaccttgatcgtgtgaaacctgatagcttacgccgcaagatcgaagcccacctggaagacttgcgtctgagtctggatcttgcccgtattcgcaccgatctgccgttggaagtagactttaaagctctgcgtcgtcgcacacccgatttagaggggttacgcgcgttcctcgaagaactggagctgggctccctgctgcatgaattcggtttgttgggcggagagaaaccgcgtgaagaagcaccatggccgccgcccgaaggtgcctttgtcggctttcttctgtcacgcaaagagccaatgtgggcggaactgttagctcttgcagccgccgcggaagggcgtgttcaccgcgcgacctctcctgtcgaggccctcgctgacctcaaagaagcacgtggtttcttggcgaaagatttagccgtgcttgcagtgcgcgaaggcgttgcgctcgatccgacggacgacccgcttttggtggcttatttgctcgatcatgcgaataccaacccggaacgtgtcgcccgtcgttacggcggcgagtttactgaagatgcggcagaacgcgcgttgcttagcgaacgcctcttccagacgttatttccacgtctttcggagaaattactctggctctatcaggaagtcgaacgtccattgagtcgcgtgcttgcccatatggaggctcgcggtgtgcgcttagatgttccgttgttagaagcactcagcttcgagttggagaaagaactggaacgtcttgaaggcgaagtctttcgtttagcggggcatcccttcaatctcaactctcgcgaccaattggagaaagtgctctttgatgaattaggtttaacccctgtcacgcgtacagagaagaccggcaaacgttccacttcggcagccgccttggaagcacttcgtggtgctcacccgatcgtcgagttgattttgcagtatcgcgagctcagcaaactcaaatcaacctatcttgataggttacctcgtcttgttcatccacgtacgggtcgtttacacacccgcttcaatcaaacggcaacagccaccgggcgcttgtcgtcgagtgacccgaacctccagaatattccagtgcgcacgccgctgggccaacacattcgtaaagcgtttgttgcggaagaaggttggttattacttgcggccgattactcccagatcgaacttcgtgtattggcgcatctctctggcgacgagaatcttaaacgcgtgtttcgcgaaggcaaggatattcacactgaaaccgcagcctggatgttcggggtggacccagccttagtggaccccaagatgcgtcgtgccgccaagaccgtcaactttggcgtactctatggtatgtcagcagcacgtcttagtcaggaattgggcattgactacaaagaagctgaagcgtttatcgagcgctatttccaatcctttccgaaagttcgcgcgtggattgaacgtacgctcgaagaaggtcgcactcgcggctatgtggaaacgttattcgggcgtcgtcgctacgttccagatcttacgtctcgtgtccgctcagtgcgcgaagctgctgagcgtatggcctggaatatgcctgttcagggaacagcggcggacctcatgaagatcgccatggtgaaattgtttccgcgcttgaaacccttaggagcccaccttcttttacaggtgcatgatgaattggtcttggaagtacccgaggatcgcgcagaagaagccaaagcactcgtgaaagaggttatggaaaacgcgtatccgttagatgttccgttggaggtcgaagtgggtgtaggccgtgattggcttgaagcgaaacaagactaatga

SEQ ID NO: 942 - protein, 844 aa, synthetic construct
  REGION 1..844: note = DNA Polymerase Variant
MHHHHHHGGSGMLPLFDLEEPPKRVLLVDGHHLAYRTFYALSLTTSRGEPVQMVYGFARSLLKALKEDGQAVVVVFDAKAPSFRHEAYEAYKAGRAPTPEDFPRQLALVKRLVDLLGLVRLEAPGYEADDVLGTLAKKAEREGMEVCILTGDRDFFQLLSEKVSVLLPDGTLVTPKDVQEKYGVPPERWVDFRALTGDRSDNIPGVAGIGEKTALRLLAEWGSVENLLKNLDRVKPDSLRRKIEAHLEDLRLSLDLARIRTDLPLEVDFKALRRRTPDLEGLRAFLEELELGSLLHEFGLLGGEKPREEAPWPPPEGAFVGFLLSRKEPMWAELLALAAAAEGRVHRATSPVEALADLKEARGFLAKDLAVLAVREGVALDPTDDPLLVAYLLDHANTNPERVARRYGGEFTEDAAERALLSERLFQTLFPRLSEKLLWLYQEVERPLSRVLAHMEARGVRLDVPLLEALSFELEKELERLEGEVFRLAGHPFNLNSRDQLEKVLFDELGLTPVTRTEKTGKRSTSAAALEALRGAHPIVELILQYRELSKLKSTYLDRLPRLVHPRTGRLHTRFNQTATATGRLSSSDPNLQNIPVRTPLGQHIRKAFVAEEGWLLLAADYSQIELRVLAHLSGDENLKRVFREGKDIHTETAAWMFGVDPALVDPKMRRAAKTVNFGVLYGMSAARLSQELGIDYKEAEAFIERYFQSFPKVRAWIERTLEEGRTRGYVETLFGRRRYVPDLTSRVRSVREAAERMAWNMPVQGTAADLMKIAMVKLFPRLKPLGAHLLLQVHDELVLEVPEDRAEEAKALVKEVMENAYPLDVPLEVEVGVGRDWLEAKQD

SEQ ID NO: 943 - DNA, 2538 bp, synthetic construct
  misc_feature 1..2538: note = DNA Polymerase Variant
  source 1..2538: mol_type = other DNA
atgcaccatcatcatcatcatggcggtagcggcatgttaccgctgtttgatttggaagaaccaccaaaacgcgtgctgcttgttgacggccatcatctggcgtatcgtaccttctacgcactgagccttacgacctcacgtggtgagcctgtccagatggtgtatgggtttgctcgctccctgctgaaagccctgaaggaagatggtcaagccgtagtagtggttttcgatgcgaaagcaccgtcgtttcgtcacgaagcgtacgaggcctataaagctggccgcgcaccgaccccggaagactttccgcgtcagttagcgctcgtcaaacgcctcgtggatttgctgggattagttcgcttggaagctcctggctacgaggcggacgacgtgctcggtacactggccaagaaagcagaacgtgaaggcatggaggtctgcattcttaccggtgatcgcgatttcttccagctgctgtctgagaaagtgagcgttttgctgcccgatggcacgttagtaaccccgaaagatgtgcaagagaaatatggagttccgccagaacgttgggtggactttcgcgcactgactggtgatcgttcagacaacatcccgggcgttgccgggattggtgaaaagacggcgctgcgcctgctggcagaatggggctcggtggaaaatctgctcaagaaccttgatcgtgtgaaacctgatagcttacgccgcaagatcgaagcccacctggaagacttgcgtctgagtctggatcttgcccgtattcgcaccgatctgccgttggaagtagactttaaagctctgcgtcgtcgcacacccgatttagaggggttacgcgcgttcctcgaagaactggagctgggctccctgctgcatgaattcggtttgttgggcggagagaaaccgcgtgaagaagcaccatggccgccgcccgaaggtgcctttgtcggctttcttctgtcacgcaaagagccaatgtgggcggaactgttagctcttgtagccgccgcggaagggcgtgttcaccgcgcgacctctcctgtcgaggccctcgctgacctcggggaagcacgtggtttcttggcgaaagatttagccgtgcttgcattacgcgaaggcgttggcctcgatccgacggacgacccgcttttggtggcttatttgctcgatcatgcgaataccaacccggaacgtgtcgcccgtcgttacggcggcgagtttactgaagatgcggcagaacgcgcgttgcttagcgaacgcctcttccagacgttatttccacgtctttcggagaaattactctggctctatcaagaagtcgaacgtccattgagtcgcgtgcttgcccatatggaggctcgcggtgtgcgcttagatgttccgttgttagaagcactcagcttcgagttggagaaagaactggaacgtcttgaaggcgaagtctttcgtttagcggggcatcccttcaatctcaactctcgcgaccaattggagaaagtgctctttgatgaattaggtttaacccctgtcacgcgtacagagaagaccggcaaacgttccacttcggcagccgccttggaagcacttcgtggtgctcacccgatcgtcgagttgattttgcagtatcgcgagctcagcaaactcaaatcaacctatcttgataggttacctcgtcttgttcatccacgtacgggtcgtttacacacccgcttcaatcaaacggcaacagccaccgggcgcttgtcgtcgagtgacccgaacctccagaatattccagtgcgcacgccgctgggccaacacattcgtaaagcgtttgttgcggaagaaggttggttattacttgcggccgattactcccagatcgaacttcgtgtattggcgcatctctctggcgacgagaatcttaaacgcgtgtttcgcgaaggcaaggatattcacactgaaaccgcagcctggatgttcggggtggacccggccttagtggaccccaagatgcgtcgtgccgccaagaccgtcaactttggcgtactctatggtatgtcagcagcacgtcttagtcaggaattgggcattgactacaaagaagctgaagcgtttatcgagcgctatttccaatcctttccgaaagttcgcgcgtggattgaacgtacgctcgaagaaggtcgcactcgcggctatgtggaaacgttattcgggcgtcgtcgctacgttccagatcttacgtctcgtgtccgctcagtgcgcgaagctgctgagcgtatggcctggaatatgcctgttcagggaacagcggcggacctcatgaagatcgccatggtgaaattgtttccgcgcttgaaacccttaggagcccaccttcttttacaggtgcatgatgaattggtcttggaagtacccgaggatcgcgcagaagaagccaaagcactcgtgaaagaggttatggaaaacgcgtatccgttagatgttccgttggaggtcgaagtgggtgtaggccgtgattggcttgaagcgaaacaagactaatga

SEQ ID NO: 944 - protein, 844 aa, synthetic construct
  REGION 1..844: note = DNA Polymerase Variant
MHHHHHHGGSGMLPLFDLEEPPKRVLLVDGHHLAYRTFYALSLTTSRGEPVQMVYGFARSLLKALKEDGQAVVVVFDAKAPSFRHEAYEAYKAGRAPTPEDFPRQLALVKRLVDLLGLVRLEAPGYEADDVLGTLAKKAEREGMEVCILTGDRDFFQLLSEKVSVLLPDGTLVTPKDVQEKYGVPPERWVDFRALTGDRSDNIPGVAGIGEKTALRLLAEWGSVENLLKNLDRVKPDSLRRKIEAHLEDLRLSLDLARIRTDLPLEVDFKALRRRTPDLEGLRAFLEELELGSLLHEFGLLGGEKPREEAPWPPPEGAFVGFLLSRKEPMWAELLALVAAAEGRVHRATSPVEALADLGEARGFLAKDLAVLALREGVGLDPTDDPLLVAYLLDHANTNPERVARRYGGEFTEDAAERALLSERLFQTLFPRLSEKLLWLYQEVERPLSRVLAHMEARGVRLDVPLLEALSFELEKELERLEGEVFRLAGHPFNLNSRDQLEKVLFDELGLTPVTRTEKTGKRSTSAAALEALRGAHPIVELILQYRELSKLKSTYLDRLPRLVHPRTGRLHTRFNQTATATGRLSSSDPNLQNIPVRTPLGQHIRKAFVAEEGWLLLAADYSQIELRVLAHLSGDENLKRVFREGKDIHTETAAWMFGVDPALVDPKMRRAAKTVNFGVLYGMSAARLSQELGIDYKEAEAFIERYFQSFPKVRAWIERTLEEGRTRGYVETLFGRRRYVPDLTSRVRSVREAAERMAWNMPVQGTAADLMKIAMVKLFPRLKPLGAHLLLQVHDELVLEVPEDRAEEAKALVKEVMENAYPLDVPLEVEVGVGRDWLEAKQD

SEQ ID NO: 945 - DNA, 2538 bp, synthetic construct
  misc_feature 1..2538: note = DNA Polymerase Variant
  source 1..2538: mol_type = other DNA
atgcaccatcatcatcatcatggcggtagcggcatgttaccgctgtttgatttggaagaaccaccaaaacgcgtgctgcttgttgacggccatcatctggcgtatcgtaccttctacgcactgagccttacgacctcacgtggtgagcctgtccagatggtgtatgggtttgctcgctccctgctgaaagccctgaaggaagatggtcaagccgtagtagtggttttcgatgcgaaagcaccgtcgtttcgtcacgaagcgtacgaggcctataaagctggccgcgcaccgaccccggaagactttccgcgtcagttagcgctcgtcaaacgcctcgtggatttgctgggattagttcgcttggaagctcctggctacgaggcggacgacgtgctcggtacactggccaagaaagcagaacgtgaaggcatggaggtctgcattcttaccggtgatcgcgatttcttccagctgctgtctgagaaagtgagcgttttgctgcccgatggcacgttagtaaccccgaaagatgtgcaagagaaatatggagttccgccagaacgttgggtggactttcgcgcactgactggtgatcgttcagacaacatcccgggcgttgccgggattggtgaaaagacggcgctgcgcctgctggcagaatggggctcggtggaaaatctgctcaagaaccttgatcgtgtgaaacctgatagcttacgccgcaagatcgaagcccacctggaagacttgcgtctgagtctggatcttgcccgtattcgcaccgatctgccgttggaagtagactttaaagctctgcgtcgtcgcacacccgatttagaggggttacgcgcgttcctcgaagaactggagctgggctccctgctgcatgaattcggtttgttgggcggagagaaaccgcgtgaagaagcaccatggccgccgcccgaaggtgcctttgtcggctttcttctgtcacgcaaagagccaatgtgggcggaactgttagctcttgcagccgccgcggaagggcgtgttcaccgcgcgacctctcctgtcgaggccctcgctgacctcaaagaagcacgtggtttcttggcgaaagatttagccgtgcttgcattacgcgaaggcgttgcgctcgatccgacggacgacccgcttttggtggcttatttgctcgatcatgcgaataccaacccggaacgtgtcgcccgtcgttacggcggcgagtttactgaagatgcggcagaacgcgcgttgcttagcgaacgcctcttccagacgttatttccacgtctttcggagaaattactctggctctatcaggaagtcgaacgtccattgagtcgcgtgcttgcccatatggaggctcgcggtgtgcttttagatgttccgttgttagaagcactcagcttcgagttggagaaagaactggaacgtcttgaaggcgaagtctttcgtttagcggggcatcccttcaatctcaactctcgcgaccaattggagaaagtgctctttgatgaattaggtttaacccctgtcacgcgtacagagaagaccggcaaacgttccacttcggcagccgccttggaagcacttcgtggtgctcacccgatcgtcgagttgattttgcagtatcgcgagctcagcaaactcaaatcaacctatcttgataggttacctcgtcttgttcatccacgtacgggtcgtttacacacccgcttcaatcaaacggcaacagccaccgggcgcttgtcgtcgagtgacccgaacctccagaatattccagtgcgcacgccgctgggccaacacattcgtaaagcgtttgttgcggaagaaggttggttattacttgcggccgattactcccagatcgaacttcgtgtattggcgcatctctctggcgacgagaatcttaaacgcgtgtttcgcgaaggcaaggatattcacactgaaaccgcagcctggatgttcggggtggacccagccttagtggaccccaagatgcgtcgtgccgccaagaccgtcaactttggcgtactctatggtatgtcagcagcacgtcttagtcaggaattgggcattgactacaaagaagctgaagcgtttatcgagcgctatttccaatcctttccgaaagttcgcgcgtggattgaacgtacgctcgaagaaggtcgcactcgcggctatgtggaaacgttattcgggcgtcgtcgctacgttccagatcttacgtctcgtgtccgctcagtgcgcgaagctgctgagcgtatggcctggaatatgcctgttcagggaacagcggcggacctcatgaagatcgccatggtgaaattgtttccgcgcttgaaacccttaggagcccaccttcttttacaggtgcatgatgaattggtcttggaagtacccgaggatcgcgcagaagaagccaaagcactcgtgaaagaggttatggaaaacgcgtatccgttagatgttccgttggaggtcgaagtgggtgtaggccgtgattggcttgaagcgaaacaagactaatga

SEQ ID NO: 946 - protein, 844 aa, synthetic construct
  REGION 1..844: note = DNA Polymerase Variant
MHHHHHHGGSGMLPLFDLEEPPKRVLLVDGHHLAYRTFYALSLTTSRGEPVQMVYGFARSLLKALKEDGQAVVVVFDAKAPSFRHEAYEAYKAGRAPTPEDFPRQLALVKRLVDLLGLVRLEAPGYEADDVLGTLAKKAEREGMEVCILTGDRDFFQLLSEKVSVLLPDGTLVTPKDVQEKYGVPPERWVDFRALTGDRSDNIPGVAGIGEKTALRLLAEWGSVENLLKNLDRVKPDSLRRKIEAHLEDLRLSLDLARIRTDLPLEVDFKALRRRTPDLEGLRAFLEELELGSLLHEFGLLGGEKPREEAPWPPPEGAFVGFLLSRKEPMWAELLALAAAAEGRVHRATSPVEALADLKEARGFLAKDLAVLALREGVALDPTDDPLLVAYLLDHANTNPERVARRYGGEFTEDAAERALLSERLFQTLFPRLSEKLLWLYQEVERPLSRVLAHMEARGVLLDVPLLEALSFELEKELERLEGEVFRLAGHPFNLNSRDQLEKVLFDELGLTPVTRTEKTGKRSTSAAALEALRGAHPIVELILQYRELSKLKSTYLDRLPRLVHPRTGRLHTRFNQTATATGRLSSSDPNLQNIPVRTPLGQHIRKAFVAEEGWLLLAADYSQIELRVLAHLSGDENLKRVFREGKDIHTETAAWMFGVDPALVDPKMRRAAKTVNFGVLYGMSAARLSQELGIDYKEAEAFIERYFQSFPKVRAWIERTLEEGRTRGYVETLFGRRRYVPDLTSRVRSVREAAERMAWNMPVQGTAADLMKIAMVKLFPRLKPLGAHLLLQVHDELVLEVPEDRAEEAKALVKEVMENAYPLDVPLEVEVGVGRDWLEAKQD

SEQ ID NO: 947 - DNA, 2538 bp, synthetic construct
  misc_feature 1..2538: note = DNA Polymerase Variant
  source 1..2538: mol_type = other DNA
atgcaccatcatcatcatcatggcggtagcggcatgttaccgctgtttgatttggaagaaccaccaaaacgcgtgctgcttgttgacggccatcatctggcgtatcgtaccttctacgcactgagccttacgacctcacgtggtgagcctgtccagatggtgtatgggtttgctcgctccctgctgaaagccctgaaggaagatggtcaagccgtagtagtggttttcgatgcgaaagcaccgtcgtttcgtcacgaagcgtacgaggcctataaagctggccgcgcaccgaccccggaagactttccgcgtcagttagcgctcgtcaaacgcctcgtggatttgctgggattagttcgcttggaagctcctggctacgaggcggacgacgtgctcggtacactggccaagaaagcagaacgtgaaggcatggaggtctgcattcttaccggtgatcgcgatttcttccagctgctgtctgagaaagtgagcgttttgctgcccgatggcacgttagtaaccccgaaagatgtgcaagagaaatatggagttccgccagaacgttgggtggactttcgcgcactgactggtgatcgttcagacaacatcccgggcgttgccgggattggtgaaaagacggcgctgcgcctgctggcagaatggggctcggtggaaaatctgctcaagaaccttgatcgtgtgaaacctgatagcttacgccgcaagatcgaagcccacctggaagacttgcgtctgagtctggatcttgcccgtattcgcaccgatctgccgttggaagtagactttaaagctctgcgtcgtcgcacacccgatttagaggggttacgcgcgttcctcgaagaactggagctgggctccctgctgcatgaattcggtttgttgggcggagagaaaccgcgtgaagaagcaccatggccgccgcccgaaggtgcctttgtcggctttcttctgtcacgcaaagagccaatgtgggcggaactgttagctcttgcagccgccgcggaagggcgtgttcaccgcgcgacctctcctgtcgaggccctcgctgacctcaaagaagcacgtggtttcttggcgaaagatttagccgtgcttgcattacgcgaaggcgttgcgctcgatccgacggacgacccgcttttggtggcttatttgctcgatcatgcgaataccaacccggaacgtgtcgcccgtcgttacggcggcgagtttactgaagatgcggcagaacgcgcgttgcttagcgaacgcctcttccagacgttatttccacgtctttcggagaaattactctggctctatcaggaagtcgaacgtccattgagtcgccttcttgcccatatggaggctcgcggtgtgcgcttagatgttccgttgttagaagcactcagcttcgagttggagaaagaactggaacgtcttgaaggcgaagtctttcgtttagcggggcatcccttcaatctcaactctcgcgaccaattggagaaagtgctctttgatgaattaggtttaacccctgtcacgcgtacagagaagaccggcaaacgttccacttcggcagccgccttggaagcacttcgtggtgctcacccgatcgtcgagttgattttgcagtatcgcgagctcagcaaactcaaatcaacctatcttgataggttacctcgtcttgttcatccacgtacgggtcgtttacacacccgcttcaatcaaacggcaacagccaccgggcgcttgtcgtcgagtgacccgaacctccagaatattccagtgcgcacgccgctgggccaacacattcgtaaagcgtttgttgcggaagaaggttggttattacttgcggccgattactcccagatcgaacttcgtgtattggcgcatctctctggcgacgagaatcttaaacgcgtgtttcgcgaaggcaaggatattcacactgaaaccgcagcctggatgttcggggtggacccagccttagtggaccccaagatgcgtcgtgccgccaagaccgtcaactttggcgtactctatggtatgtcagcagcacgtcttagtcaggaattgggcattgactacaaagaagctgaagcgtttatcgagcgctatttccaatcctttccgaaagttcgcgcgtggattgaacgtacgctcgaagaaggtcgcactcgcggctatgtggaaacgttattcgggcgtcgtcgctacgttccagatcttacgtctcgtgtccgctcagtgcgcgaagctgctgagcgtatggcctggaatatgcctgttcagggaacagcggcggacctcatgaagatcgccatggtgaaattgtttccgcgcttgaaacccttaggagcccaccttcttttacaggtgcatgatgaattggtcttggaagtacccgaggatcgcgcagaagaagccaaagcactcgtgaaagaggttatggaaaacgcgtatccgttagatgttccgttggaggtcgaagtgggtgtaggccgtgattggcttgaagcgaaacaagactaatga

SEQ ID NO: 948 - protein, 844 aa, synthetic construct
  REGION 1..844: note = DNA Polymerase Variant
MHHHHHHGGSGMLPLFDLEEPPKRVLLVDGHHLAYRTFYALSLTTSRGEPVQMVYGFARSLLKALKEDGQAVVVVFDAKAPSFRHEAYEAYKAGRAPTPEDFPRQLALVKRLVDLLGLVRLEAPGYEADDVLGTLAKKAEREGMEVCILTGDRDFFQLLSEKVSVLLPDGTLVTPKDVQEKYGVPPERWVDFRALTGDRSDNIPGVAGIGEKTALRLLAEWGSVENLLKNLDRVKPDSLRRKIEAHLEDLRLSLDLARIRTDLPLEVDFKALRRRTPDLEGLRAFLEELELGSLLHEFGLLGGEKPREEAPWPPPEGAFVGFLLSRKEPMWAELLALAAAAEGRVHRATSPVEALADLKEARGFLAKDLAVLALREGVALDPTDDPLLVAYLLDHANTNPERVARRYGGEFTEDAAERALLSERLFQTLFPRLSEKLLWLYQEVERPLSRLLAHMEARGVRLDVPLLEALSFELEKELERLEGEVFRLAGHPFNLNSRDQLEKVLFDELGLTPVTRTEKTGKRSTSAAALEALRGAHPIVELILQYRELSKLKSTYLDRLPRLVHPRTGRLHTRFNQTATATGRLSSSDPNLQNIPVRTPLGQHIRKAFVAEEGWLLLAADYSQIELRVLAHLSGDENLKRVFREGKDIHTETAAWMFGVDPALVDPKMRRAAKTVNFGVLYGMSAARLSQELGIDYKEAEAFIERYFQSFPKVRAWIERTLEEGRTRGYVETLFGRRRYVPDLTSRVRSVREAAERMAWNMPVQGTAADLMKIAMVKLFPRLKPLGAHLLLQVHDELVLEVPEDRAEEAKALVKEVMENAYPLDVPLEVEVGVGRDWLEAKQD

SEQ ID NO: 949 - DNA, 2538 bp, synthetic construct
  misc_feature 1..2538: note = DNA Polymerase Variant
  source 1..2538: mol_type = other DNA
atgcaccatcatcatcatcatggcggtagcggcatgttaccgctgtttgatttggaagaaccaccaaaacgcgtgctgcttgttgacggccatcatctggcgtatcgtaccttctacgcactgagccttacgacctcacgtggtgagcctgtccagatggtgtatgggtttgctcgctccctgctgaaagccctgaaggaagatggtcaagccgtagtagtggttttcgatgcgaaagcaccgtcgtttcgtcacgaagcgtacgaggcctataaagctggccgcgcaccgaccccggaagactttccgcgtcagttagcgctcgtcaaacgcctcgtggatttgctgggattagttcgcttggaagctcctggctacgaggcggacgacgtgctcggtacactggccaagaaagcagaacgtgaaggcatggaggtctgcattcttaccggtgatcgcgatttcttccagctgctgtctgagaaagtgagcgttttgctgcccgatggcacgttagtaaccccgaaagatgtgcaagagaaatatggagttccgccagaacgttgggtggactttcgcgcactgactggtgatcgttcagacaacatcccgggcgttgccgggattggtgaaaagacggcgctgcgcctgctggcagaatggggctcggtggaaaatctgctcaagaaccttgatcgtgtgaaacctgatagcttacgccgcaagatcgaagcccacctggaagacttgcgtctgagtctggatcttgcccgtattcgcaccgatctgccgttggaagtagactttaaagctctgcgtcgtcgcacacccgatttagaggggttacgcgcgttcctcgaagaactggagctgggctccctgctgcatgaattcggtttgttgggcggagagaaaccgcgtgaagaagcaccatggccgccgcccgaaggtgcctttgtcggctttcttctgtcacgcaaagagccaatgtgggcggaactgttagctcttgcagccgccgcggaagggcgtgttcaccgcgcgacctctcctgtcgaggccctcgctgacctcaaagaagcacgtggtttcttggcgaaagatttagccgtgcttgcattacgcgaaggcgttgcgctcgatccgacggacgacccgcttttggtggcttatttgctcgatcatgcgaataccaacccggaacgtgtcgcccgtcgttacggcggcgagtttactgaagatgcggcagaacgcgcgttgcttagcgaacgcctcttccagacgttatttccacgtctttcggagaaattactctggctctatcaggaagtcgaacgtccattgagtcgcgtgcttgcccatatggaggctcgcggtgtgcgcttagatgttccgttgttagaagcactcagcttcgagttggagaaagaactggaacgtcttgaaggcgaagtctttcgtttagcggggcatcccttcaatctcaactctcgcgaccaattggagaaagtgctctttgatgaattaggtttaacccctgtcacgcgtacagagaagaccggcaaacgttccacttcggcagccgccttggaagcacttcgtggtgctcacccgatcgtcgagttgattttgcagtatcgcgagctcagcaaactcaaatcaacctatcttgataggttacctcgtcttgttcatccacgtacgggtcgtttacacacccgcttcaatcaaacggcaacagccaccgggcgcttgtcgtcgagtgacccgaacctccagaatattccagtgcgcacgccgctgggccaacacattcgtaaagcgtttgttgcggaagaaggttggttattacttgcggccgattactcccagatcgaacttcgtgtattggcgcatctctctggcgacgagaatcttaaacgcgtgtttcgcgaaggcaaggatattcacactgaaaccgcagcctggatgttcggggtggacccagccttagtggaccccaagatgcgtcgtgccgccaagaccgtcaactttggcgtactctatggtatgtcagcagcacgtcttagtcaggaattgggcattgactacaaagaagctgaagcgtttatcgagcgctatttccaatcctttccgaaagttcttgcgtggattgaacgtacgctcgaagaaggtcgcactcgcggctatgtggaaacgttattcgggcgtcgtcgctacgttccagatcttacgtctcgtgtccgctcagtgcgcgaagctgctgagcgtatggcctggaatatgcctgttcagggaacagcggcggacctcatgaagatcgccatggtgaaattgtttccgcgcttgaaacccttaggagcccaccttcttttacaggtgcatgatgaattggtcttggaagtacccgaggatcgcgcagaagaagccaaagcactcgtgaaagaggttatggaaaacgcgtatccgttagatgttccgttggaggtcgaagtgggtgtaggccgtgattggcttgaagcgaaacaagactaatga

SEQ ID NO: 950 - protein, 844 aa, synthetic construct
  REGION 1..844: note = DNA Polymerase Variant
MHHHHHHGGSGMLPLFDLEEPPKRVLLVDGHHLAYRTFYALSLTTSRGEPVQMVYGFARSLLKALKEDGQAVVVVFDAKAPSFRHEAYEAYKAGRAPTPEDFPRQLALVKRLVDLLGLVRLEAPGYEADDVLGTLAKKAEREGMEVCILTGDRDFFQLLSEKVSVLLPDGTLVTPKDVQEKYGVPPERWVDFRALTGDRSDNIPGVAGIGEKTALRLLAEWGSVENLLKNLDRVKPDSLRRKIEAHLEDLRLSLDLARIRTDLPLEVDFKALRRRTPDLEGLRAFLEELELGSLLHEFGLLGGEKPREEAPWPPPEGAFVGFLLSRKEPMWAELLALAAAAEGRVHRATSPVEALADLKEARGFLAKDLAVLALREGVALDPTDDPLLVAYLLDHANTNPERVARRYGGEFTEDAAERALLSERLFQTLFPRLSEKLLWLYQEVERPLSRVLAHMEARGVRLDVPLLEALSFELEKELERLEGEVFRLAGHPFNLNSRDQLEKVLFDELGLTPVTRTEKTGKRSTSAAALEALRGAHPIVELILQYRELSKLKSTYLDRLPRLVHPRTGRLHTRFNQTATATGRLSSSDPNLQNIPVRTPLGQHIRKAFVAEEGWLLLAADYSQIELRVLAHLSGDENLKRVFREGKDIHTETAAWMFGVDPALVDPKMRRAAKTVNFGVLYGMSAARLSQELGIDYKEAEAFIERYFQSFPKVLAWIERTLEEGRTRGYVETLFGRRRYVPDLTSRVRSVREAAERMAWNMPVQGTAADLMKIAMVKLFPRLKPLGAHLLLQVHDELVLEVPEDRAEEAKALVKEVMENAYPLDVPLEVEVGVGRDWLEAKQD

SEQ ID NO: 951 - DNA, 2538 bp, synthetic construct
  misc_feature 1..2538: note = DNA Polymerase Variant
  source 1..2538: mol_type = other DNA
atgcaccatcatcatcatcatggcggtagcggcatgttaccgctgtttgatttggaagaaccaccaaaacgcgtgctgcttgttgacggccatcatctggcgtatcgtaccttctacgcactgagccttacgacctcacgtggtgagcctgtccagatggtgtatgggtttgctcgctccctgctgaaagccctgaaggaagatggtcaagccgtagtagtggttttcgatgcgcgcgcaccgtcgtttcgtcacgaagcgtacgaggcctataaagctggccgcgcaccgaccccggaagactttccgcgtcagttagcgctcgtcaaacgcctcgtggatttgctgggattagttcgcttggaagctcctggctacgaggcggacgacgtgctcggtacactggccaagaaagcagaacgtgaaggcatggaggtctgcattcttaccggtgatcgcgatttcttccagctgctgtctgagaaagtgagcgttttgctgcccgatggcacgttagtaaccccgaaagatgtgcaagagaaatatggagttccgccagaacgttgggtggactttcgcgcactgactggtgatcgttcagacaacatcccgggcgttgccgggattggtgaaaagacggcgctgcgcctgctggcagaatggggctcggtggaaaatctgctcaagaaccttgatcgcgtgaaacctgatagcttacgccgcaagatcgaagcccacctggaagacttgcgtctgagtctggatcttgcccgtattcgcaccgatctgccgttggaagtagactttaaagctctgcgtcgtcgcacacccgatttagaggggttacgcgcgttcctcgaagaactggagctgggctccctgctgcatgaattcggtttgttgggcaccgagaaaccgcgtgaagaagcaccatggccgccgcccgaaggtgcctttgtcggctttcttctgtcacgcaaagagccaatgtgggcggaactgttagctcttgtagccgccgcggaagggcgtgttcaccgcgcgacctctcctgtcgaggccctcgctgacctcaaagaagcacgtggtttcttggcgaaagatttagccgtgcttgcattacgcgaaggcgttgcgctcgatccgacggacgacccgcttttggtggcttatttgctcgatcatgcgaataccaacccggaacgtgtcgcccgtcgttacggcggcgagtttactgaagatgcggcagaacgcgcgttgcttagcgaacgcctcttccagacgttatttccacgtctttcggagaaattactctggctctatcaagaagtcgaacgtccattgagtcgcgtgcttgcccatatggaggctcgcggtgtgcgcttagatgttccgttgttagaagcactcagcttcgagttggagaaagaactggaacgtcttgaaggcgaagtctttcgtttagcggggcatcccttcaatctcaactctcgcgaccaattggagaaagtgctctttgatgaattaggtttaacccctgtcacgcgtacagagaagaccggcaaacgttccacttcggcagccgccttggaagcacttcgtggtgctcacccgatcgtcgagttgattttgcagtatcgcgagctcagcaaactcaaatcaacctatcttgataggttacctcgtcttgttcatccacgtacgggtcgtttacacacccgcttcaatcaaacggcaacagccaccgggcgcttgtcgtcgagtgacccgaacctccagaatattccagtgcgcacgccgctgggccaacacattcgtaaagcgtttgttgcggaagagggttggttattacttgcggccgattactcccagatcgaacttcgtgtattggcgcatctctctggcgacgagaatcttaaagctgtgtttcgcgaaggcaaggatattcacactgaaaccgcagcctggatgttcggggtggacccggccttagtggaccccaagatgcgtcgtgccgccaagaccgtcaactttggcgtactctatggtatgtcagcagcacgtcttagtcaggaattgggcattgactacaaagaggctgaagcgtttatcgagcgctatttccaatcctttccgggtgttcgcgcgtggattgaacgtacgctcgaagaaggtcgcactcgcggctatgtggaaacgttattcgggcgtcgtcgctacgttccagatcttacgtctcgtgtccgctcagtgcgcgaagctgctgagcgtatggcctggaatatgcctgttcagggaacagcggcggacctcatgaagatcgccatggtgaaattgtttccgcgcttgaaacccttaggagcccaccttcttttacaggtgcatgatgaattggtcttggaagtacccgaggatcgcgcagaagaagccaaagcactcgtgaaagaggttatggaaaacgcgtatccgttagatgttccgttggaggtcgaagtgggtgtaggccgtgattggcttgaagcgaaacaagactaatga

SEQ ID NO: 952 - protein, 844 aa, synthetic construct
  REGION 1..844: note = DNA Polymerase Variant
MHHHHHHGGSGMLPLFDLEEPPKRVLLVDGHHLAYRTFYALSLTTSRGEPVQMVYGFARSLLKALKEDGQAVVVVFDARAPSFRHEAYEAYKAGRAPTPEDFPRQLALVKRLVDLLGLVRLEAPGYEADDVLGTLAKKAEREGMEVCILTGDRDFFQLLSEKVSVLLPDGTLVTPKDVQEKYGVPPERWVDFRALTGDRSDNIPGVAGIGEKTALRLLAEWGSVENLLKNLDRVKPDSLRRKIEAHLEDLRLSLDLARIRTDLPLEVDFKALRRRTPDLEGLRAFLEELELGSLLHEFGLLGTEKPREEAPWPPPEGAFVGFLLSRKEPMWAELLALVAAAEGRVHRATSPVEALADLKEARGFLAKDLAVLALREGVALDPTDDPLLVAYLLDHANTNPERVARRYGGEFTEDAAERALLSERLFQTLFPRLSEKLLWLYQEVERPLSRVLAHMEARGVRLDVPLLEALSFELEKELERLEGEVFRLAGHPFNLNSRDQLEKVLFDELGLTPVTRTEKTGKRSTSAAALEALRGAHPIVELILQYRELSKLKSTYLDRLPRLVHPRTGRLHTRFNQTATATGRLSSSDPNLQNIPVRTPLGQHIRKAFVAEEGWLLLAADYSQIELRVLAHLSGDENLKAVFREGKDIHTETAAWMFGVDPALVDPKMRRAAKTVNFGVLYGMSAARLSQELGIDYKEAEAFIERYFQSFPGVRAWIERTLEEGRTRGYVETLFGRRRYVPDLTSRVRSVREAAERMAWNMPVQGTAADLMKIAMVKLFPRLKPLGAHLLLQVHDELVLEVPEDRAEEAKALVKEVMENAYPLDVPLEVEVGVGRDWLEAKQD

SEQ ID NO: 953 - DNA, 2538 bp, synthetic construct
  misc_feature 1..2538: note = DNA Polymerase Variant
  source 1..2538: mol_type = other DNA
atgcaccatcatcatcatcatggcggtagcggcatgttaccgctgtttgatttggaagaaccaccaaaacgcgtgctgcttgttgacggccatcatctggcgtatcgtaccttctacgcactgagccttacgacctcacgtggtgagcctgtccagatggtgtatgggtttgctcgctccctgctgaaagccctgaaggaagatggtcaagccgtagtagtggttttcgatgcgaaagcaccgtcgtttcgtcacgaagcgtacgaggcctataaagctggccgcgcaccgaccccggaagactttccgcgtcagttagcgctcgtcaaacgcctcgtggatttgctgggattagttcgcttggaagctcctggctacgaggcggacgacgtgctcggtacactggccaagaaagcagaacgtgaaggcatggaggtctgcattcttaccggtgatcgcgatttcttccagctgctgtctgagaaagtgagcgttttgctgcccgatggcacgttagtaaccccgaaagatgtgcaagagaaatatggagttccgccagaacgttgggtggactttcgcgcactgactggtgatcgttcagacaacatcccgggcgttgccgggattggtgaaaagacggcgctgcgcctgctggcagaatggggctcggtggaaaatctgctcaagaaccttgatcgtgtgaaacctgatagcttacgccgcaagatcgaagcccacctggaagacttgcgtctgagtctggatcttgcccgtattcgcaccgatctgccgttggaagtagactttaaagctctgcgtcgtcgcacacccgatttagaggggttacgcgcgttcctcgaagaactggagctgggctccctgctgcatgaattcggtttgttgggcggagagaaaccgcgtgaagaagcaccatggccgccgcccgaaggtgcctttgtcggctttcttctgtcacgcaaagagccaatgtgggcggaactgttagctcttgcagccgccgcggaagggcgtgttcaccgcgcgacctctcctgtcgaggccctcgctgacctcaaagaagcacgtggtttcttggcgaaagatttagccgtgcttgcattacgcgaaggcgttgcgctcgatccgacggacgacccgcttttggtggcttatttgtgggatcatgcgaataccaacccggaacgtgtcgcccgtcgttacggcggcgagtttactgaagatgcggcagaacgcgcgttgcttagcgaacgcctcttccagacgttatttccacgtctttcggagaaattactctggctctatcaggaagtcgaacgtccattgagtcgcgtgcttgcccatatggaggctcgcggtgtgcgcttagatgttccgttgttagaagcactcagcttcgagttggagaaagaactggaacgtcttgaaggcgaagtctttcgtttagcggggcatcccttcaatctcaactctcgcgaccaattggagaaagtgctctttgatgaattaggtttaacccctgtcacgcgtacagagaagaccggcaaacgttccacttcggcagccgccttggaagcacttcgtggtgctcacccgatcgtcgagttgattttgcagtatcgcgagctcagcaaactcaaatcaacctatcttgataggttacctcgtcttgttcatccacgtacgggtcgtttacacacccgcttcaatcaaacggcaacagccaccgggcgcttgtcgtcgagtgacccgaacctccagaatattccagtgcgcacgccgctgggccaacacattcgtaaagcgtttgttgcggaagaaggttggttattacttgcggccgattactcccagatcgaacttcgtgtattggcgcatctctctggcgacgagaatcttaaacgcgtgtttcgcgaaggcaaggatattcacactgaaaccgcagcctggatgttcggggtggacccagccttagtggaccccaagatgcgtcgtgccgccaagaccgtcaactttggcgtactctatggtatgtcagcagcacgtcttagtcaggaattgggcattgactacaaagaagctgaagcgtttatcgagcgctatttccaatcctttccgaaagttcgcgcgtggattgaacgtacgctcgaagaaggtcgcactcgcggctatgtggaaacgttattcgggcgtcgtcgctacgttccagatcttacgtctcgtgtccgctcagtgcgcgaagctgctgagcgtatggcctggaatatgcctgttcagggaacagcggcggacctcatgaagatcgccatggtgaaattgtttccgcgcttgaaacccttaggagcccaccttcttttacaggtgcatgatgaattggtcttggaagtacccgaggatcgcgcagaagaagccaaagcactcgtgaaagaggttatggaaaacgcgtatccgttagatgttccgttggaggtcgaagtgggtgtaggccgtgattggcttgaagcgaaacaagactaatga

SEQ ID NO: 954 - protein, 844 aa, synthetic construct
  REGION 1..844: note = DNA Polymerase Variant
MHHHHHHGGSGMLPLFDLEEPPKRVLLVDGHHLAYRTFYALSLTTSRGEPVQMVYGFARSLLKALKEDGQAVVVVFDAKAPSFRHEAYEAYKAGRAPTPEDFPRQLALVKRLVDLLGLVRLEAPGYEADDVLGTLAKKAEREGMEVCILTGDRDFFQLLSEKVSVLLPDGTLVTPKDVQEKYGVPPERWVDFRALTGDRSDNIPGVAGIGEKTALRLLAEWGSVENLLKNLDRVKPDSLRRKIEAHLEDLRLSLDLARIRTDLPLEVDFKALRRRTPDLEGLRAFLEELELGSLLHEFGLLGGEKPREEAPWPPPEGAFVGFLLSRKEPMWAELLALAAAAEGRVHRATSPVEALADLKEARGFLAKDLAVLALREGVALDPTDDPLLVAYLWDHANTNPERVARRYGGEFTEDAAERALLSERLFQTLFPRLSEKLLWLYQEVERPLSRVLAHMEARGVRLDVPLLEALSFELEKELERLEGEVFRLAGHPFNLNSRDQLEKVLFDELGLTPVTRTEKTGKRSTSAAALEALRGAHPIVELILQYRELSKLKSTYLDRLPRLVHPRTGRLHTRFNQTATATGRLSSSDPNLQNIPVRTPLGQHIRKAFVAEEGWLLLAADYSQIELRVLAHLSGDENLKRVFREGKDIHTETAAWMFGVDPALVDPKMRRAAKTVNFGVLYGMSAARLSQELGIDYKEAEAFIERYFQSFPKVRAWIERTLEEGRTRGYVETLFGRRRYVPDLTSRVRSVREAAERMAWNMPVQGTAADLMKIAMVKLFPRLKPLGAHLLLQVHDELVLEVPEDRAEEAKALVKEVMENAYPLDVPLEVEVGVGRDWLEAKQD

SEQ ID NO: 955 - DNA, 2538 bp, synthetic construct
  misc_feature 1..2538: note = DNA Polymerase Variant
  source 1..2538: mol_type = other DNA
atgcaccatcatcatcatcatggcggtagcggcatgttaccgctgtttgatttggaagaaccaccaaaacgcgtgctgcttgttgacggccatcatctggcgtatcgtaccttctacgcactgagccttacgacctcacgtggtgagcctgtccagatggtgtatgggtttgctcgctccctgctgaaagccctgaaggaagatggtcaagccgtagtagtggttttcgatgcgaaagcaccgtcgtttcgtcacgaagcgtacgaggcctataaagctggccgcgcaccgaccccggaagactttccgcgtcagttagcgctcgtcaaacgcctcgtggatttgctgggattagttcgcttggaagctcctggctacgaggcggacgacgtgctcggtacactggccaagaaagcagaacgtgaaggcatggaggtctgcattcttaccggtgatcgcgatttcttccagctgctgtctgagaaagtgagcgttttgctgcccgatggcacgttagtaaccccgaaagatgtgcaagagaaatatggagttccgccagaacgttgggtggactttcgcgcactgactggtgatcgttcagacaacatcccgggcgttgccgggattggtgaaaagacggcgctgcgcctgctggcagaatggggctcggtggaaaatctgctcaagaaccttgatcgtgtgaaacctgatagcttacgccgcaagatcgaagcccacctggaagacttgcgtctgagtctggatcttgcccgtattcgcaccgatctgccgttggaagtagactttaaagctctgcgtcgtcgcacacccgatttagaggggttacgcgcgttcctcgaagaactggagctgggctccctgctgcatgaattcggtttgttgggcggagagaaaccgcgtgaagaagcaccatggccgccgcccgaaggtgcctttgtcggctttcttctgtcacgcaaagagccaatgtgggcggaactgttagctcttgcagccgccgcggaagggcgtgttcaccgcgcgacctctcctgtcgaggccctcgctgacctcaaagaagcacgtggtttcttggcgaaagatttagccgtgtatgcattacgcgaaggcgttgcgctcgatccgacggacgacccgcttttggtggcttatttgctcgatcatgcgaataccaacccggaacgtgtcgcccgtcgttacggcggcgagtttactgaagatgcggcagaacgcgcgttgcttagcgaacgcctcttccagacgttatttccacgtctttcggagaaattactctggctctatcaggaagtcgaacgtccattgagtcgcgtgcttgcccatatggaggctcgcggtgtgcgcttagatgttccgttgttagaagcactcagcttcgagttggagaaagaactggaacgtcttgaaggcgaagtctttcgtttagcggggcatcccttcaatctcaactctcgcgaccaattggagaaagtgctctttgatgaattaggtttaacccctgtcacgcgtacagagaagaccggcaaacgttccacttcggcagccgccttggaagcacttcgtggtgctcacccgatcgtcgagttgattttgcagtatcgcgagctcagcaaactcaaatcaacctatcttgataggttacctcgtcttgttcatccacgtacgggtcgtttacacacccgcttcaatcaaacggcaacagccaccgggcgcttgtcgtcgagtgacccgaacctccagaatattccagtgcgcacgccgctgggccaacacattcgtaaagcgtttgttgcggaagaaggttggttattacttgcggccgattactcccagatcgaacttcgtgtattggcgcatctctctggcgacgagaatcttaaacgcgtgtttcgcgaaggcaaggatattcacactgaaaccgcagcctggatgttcggggtggacccagccttagtggaccccaagatgcgtcgtgccgccaagaccgtcaactttggcgtactctatggtatgtcagcagcacgtcttagtcaggaattgggcattgactacaaagaagctgaagcgtttatcgagcgctatttccaatcctttccgaaagttcgcgcgtggattgaacgtacgctcgaagaaggtcgcactcgcggctatgtggaaacgttattcgggcgtcgtcgctacgttccagatcttacgtctcgtgtccgctcagtgcgcgaagctgctgagcgtatggcctggaatatgcctgttcagggaacagcggcggacctcatgaagatcgccatggtgaaattgtttccgcgcttgaaacccttaggagcccaccttcttttacaggtgcatgatgaattggtcttggaagtacccgaggatcgcgcagaagaagccaaagcactcgtgaaagaggttatggaaaacgcgtatccgttagatgttccgttggaggtcgaagtgggtgtaggccgtgattggcttgaagcgaaacaagactaatga

SEQ ID NO: 956 - protein, 844 aa, synthetic construct
  REGION 1..844: note = DNA Polymerase Variant
MHHHHHHGGSGMLPLFDLEEPPKRVLLVDGHHLAYRTFYALSLTTSRGEPVQMVYGFARSLLKALKEDGQAVVVVFDAKAPSFRHEAYEAYKAGRAPTPEDFPRQLALVKRLVDLLGLVRLEAPGYEADDVLGTLAKKAEREGMEVCILTGDRDFFQLLSEKVSVLLPDGTLVTPKDVQEKYGVPPERWVDFRALTGDRSDNIPGVAGIGEKTALRLLAEWGSVENLLKNLDRVKPDSLRRKIEAHLEDLRLSLDLARIRTDLPLEVDFKALRRRTPDLEGLRAFLEELELGSLLHEFGLLGGEKPREEAPWPPPEGAFVGFLLSRKEPMWAELLALAAAAEGRVHRATSPVEALADLKEARGFLAKDLAVYALREGVALDPTDDPLLVAYLLDHANTNPERVARRYGGEFTEDAAERALLSERLFQTLFPRLSEKLLWLYQEVERPLSRVLAHMEARGVRLDVPLLEALSFELEKELERLEGEVFRLAGHPFNLNSRDQLEKVLFDELGLTPVTRTEKTGKRSTSAAALEALRGAHPIVELILQYRELSKLKSTYLDRLPRLVHPRTGRLHTRFNQTATATGRLSSSDPNLQNIPVRTPLGQHIRKAFVAEEGWLLLAADYSQIELRVLAHLSGDENLKRVFREGKDIHTETAAWMFGVDPALVDPKMRRAAKTVNFGVLYGMSAARLSQELGIDYKEAEAFIERYFQSFPKVRAWIERTLEEGRTRGYVETLFGRRRYVPDLTSRVRSVREAAERMAWNMPVQGTAADLMKIAMVKLFPRLKPLGAHLLLQVHDELVLEVPEDRAEEAKALVKEVMENAYPLDVPLEVEVGVGRDWLEAKQD

SEQ ID NO: 957 - DNA, 2538 bp, synthetic construct
  misc_feature 1..2538: note = DNA Polymerase Variant
  source 1..2538: mol_type = other DNA
atgcaccatcatcatcatcatggcggtagcggcatgttaccgctgtttgatttggaagaaccaccaaaacgcgtgctgcttgttgacggccatcatctggcgtatcgtaccttctacgcactgagccttacgacctcacgtggtgagcctgtccagatggtgtatgggtttgctcgctccctgctgaaagccctgaaggaagatggtcaagccgtagtagtggttttcgatgcgcgtgcaccgtcgtttcgtcacgaagcgtacgaggcctataaagctggccgcgcaccgaccccggaagactttccgcgtcagttagcgctcgtcaaacgcctcgtggatttgctgggattagttcgcttggaagctcctggctacgaggcggacgacgtgctcggtacactggccaagaaagcagaacgtgaaggcatggaggtctgcattcttaccggtgatcgcgatttcttccagctgctgtctgagaaagtgagcgttttgctgcccgatggcacgttagtaaccccgaaagatgtgcaagagaaatatggagttccgccagaacgttgggtggactttcgcgcactgactggtgatcgttcagacaacatcccgggcgttgccgggattggtgaaaagacggcgctgcgcctgctggcagaatggggctcggtggaaaatctgctcaagaaccttgatcgtgtgaaacctgatagcttacgccgcaagatcgaagcccacctggaagacttgcgtctgagtctggatcttgtacgtattcgcaccgatctgccgttggaagtagactttaaagctctgcgtcgtcgcacacccgatttagaggggttacgcgcgttcctcgaagaactggagctgggctccctgctgcatgaattcggtttgttgggcggagagaaaccgcgtgaagaagcaccatggccgccgcccgaaggtgcctttgtcggctttcttctgtcacgcaaagagccaatgtgggcggaactgttagctcttgcagccgccgcggaagggcgtgttcaccgcgcgacctctcctgtcgaggccctcgctgacctcaaagaagcacgtggtttcttggcgaaagatttagccgtgcttgcattacgcgaaggcgttgcgctcgatccgacggacgacccgcttttggtggcttatttgctcgatcatgcgaataccaacccggaacgtgtcgcccgtcgttacggcggcgagtttactgaagatgcggcagaacgcgcgttgcttagcgaacgcctcttccagacgttatttccacgtctttcggagaaattactctggctctatcaggaagtcgaacgtccattgagtcgcgtgcttgcccatatggaggctcgcggtgtgcgcttagatgttccgttgttagaagcactcagcttcgaggcggaaaaagaactggaacgtcttgaaggcgaagtctttcgtttagcggggcatcccttcaatctcaactctcgcgaccaattggagaaagtgctctttgatgaattaggtttaacccctgtcacgcgtacagagaagaccggcaaacgttccacttcggcagccgccttggaagcacttcgtggtgtgcacccgatcgtcgagttgattttgcagtatcgcgagctcagcaaactcaaatcaacctatcttgataggttacctcgtcttgttcatccacgtacgggtcgtttacacacccgcttcaatcaaacggcaacagccaccgggcgcttgtcgtcgagtgacccgaacctccagaatattccagtgcgcacgccgctgggccaacacattcgtaaagcgtttgttgcggaagaaggttggttattacttgcggccgattactcccagatcgaacttcgtgtattggcgcatctctctggcgacgagaatcttaaacgcgtgtttcgcgaaggcaaggatattcacactgaaaccgcagcctggatgttcggggtggacccggccttagtggaccccaagatgcgtcgtgccgccaagaccgtcaactttggcgtactctatggtatgtcagcagcacgtcttagtcaggaattgggcattgactacaaagtagctgaagcgtttatcgagcgctatttccaatcctttccgaaagttcgcgcgtggattgaacgtacgctcgaagaaggtcgcactcgcggctatgtggaaacgttattcgggcgtcgtcgctacgttccagatcttacgtctcgtgtccgctcagtgcgcgaagctgctgagcgtatggcctggaatatgcctgttcagggaacagcggcggacctcatgaagatcgccatggtgaaattgtttccgcgcttgaaacccttaggagcccaccttcttctgcaggtgcatgatgaattggtcttggaagtacccgaggatcgcgcagaagaagccaaagcactcgtgaaagaggttatggaaaacgcgtatccgttagatgttccgttggaggtcgaagtgggtgtaggccgtgattggcttgaagcgaaacaagactaatga

SEQ ID NO: 958 - protein, 844 aa, synthetic construct
  REGION 1..844: note = DNA Polymerase Variant
MHHHHHHGGSGMLPLFDLEEPPKRVLLVDGHHLAYRTFYALSLTTSRGEPVQMVYGFARSLLKALKEDGQAVVVVFDARAPSFRHEAYEAYKAGRAPTPEDFPRQLALVKRLVDLLGLVRLEAPGYEADDVLGTLAKKAEREGMEVCILTGDRDFFQLLSEKVSVLLPDGTLVTPKDVQEKYGVPPERWVDFRALTGDRSDNIPGVAGIGEKTALRLLAEWGSVENLLKNLDRVKPDSLRRKIEAHLEDLRLSLDLVRIRTDLPLEVDFKALRRRTPDLEGLRAFLEELELGSLLHEFGLLGGEKPREEAPWPPPEGAFVGFLLSRKEPMWAELLALAAAAEGRVHRATSPVEALADLKEARGFLAKDLAVLALREGVALDPTDDPLLVAYLLDHANTNPERVARRYGGEFTEDAAERALLSERLFQTLFPRLSEKLLWLYQEVERPLSRVLAHMEARGVRLDVPLLEALSFEAEKELERLEGEVFRLAGHPFNLNSRDQLEKVLFDELGLTPVTRTEKTGKRSTSAAALEALRGVHPIVELILQYRELSKLKSTYLDRLPRLVHPRTGRLHTRFNQTATATGRLSSSDPNLQNIPVRTPLGQHIRKAFVAEEGWLLLAADYSQIELRVLAHLSGDENLKRVFREGKDIHTETAAWMFGVDPALVDPKMRRAAKTVNFGVLYGMSAARLSQELGIDYKVAEAFIERYFQSFPKVRAWIERTLEEGRTRGYVETLFGRRRYVPDLTSRVRSVREAAERMAWNMPVQGTAADLMKIAMVKLFPRLKPLGAHLLLQVHDELVLEVPEDRAEEAKALVKEVMENAYPLDVPLEVEVGVGRDWLEAKQD

SEQ ID NO: 959 - DNA, 2538 bp, synthetic construct
  misc_feature 1..2538: note = DNA Polymerase Variant
  source 1..2538: mol_type = other DNA
atgcaccatcatcatcatcatggcggtagcggcatgttaccgctgtttgatttggaagaaccaccaaaacgcgtgctgcttgttgacggccatcatctggcgtatcgtaccttctacgcactgagccttacgacctcacgtggtgagcctgtccagatggtgtatgggtttgctcgctccctgctgaaagccctgaaggaagatggtcaagccgtagtagtggttttcgatgcgaaagcaccgtcgtttcgtcacgaagcgtacgaggcctataaagctggccgcgcaccgaccccggaagactttccgcgtcagttagcgctcgtcaaacgcctcgtggatttgctgggattagttcgcttggaagctcctggctacgaggcggacgacgtgctcggtacactggccaagaaagcagaacgtgaaggcatggaggtctgcattcttaccggtgatcgcgatttcttccagctgctgtctgagaaagtgagcgttttgctgcccgatggcacgttagtaaccccgaaagatgtgcaagagaaatatggagttccgccagaacgttgggtggactttcgcgcactgactggtgatcgttcagacaacatcccgggcgttgccgggattggtgaaaagacggcgctgcgcctgctggcagaatggggctcggtggaaaatctgctcaagaaccttgatcgtgtgaaacctgatagcttacgccgcaagatcgaagcccacctggaagacttgcgtctgagtctggatcttgcccgtattcgcaccgatctgccgttggaagtagactttaaagctctgcgtcgtcgcacacccgatttagaggggttacgcgcgttcctcgaagaactggagctgggctccctgctgcatgaattcggtttgttgggcggagagaaaccgcgtgaagaagcaccatggccgccgcccgaaggtgcctttgtcggctttcttctgtcacgcaaagagccaatgtgggcggaactgttagctcttgcagccgccgcggaagggcgtgttcaccgcgcgacctctcctgtcgaggccctcgctgacctcaaagaagcacgtggtttcttggcgaaagatttagccgtgcttgcattacgcgaaggcgttgcgctcgatccgacggacgacccgcttttggtggcttatttgctcgatcatgcgaataccaacccggaacgtgtcgcccgtcgttacggcggcgagtttactgaagatgcggcagaacgcgcgttgcttagcgaacgcctcttccagacgttatttcggcgtctttcggagaaattactctggctctatcaggaagtcgaacgtccattgagtcgcgtgcttgcccatatggaggctcgcggtgtgcgcttagatgttccgttgttagaagcactcagcttcgagttggagaaagaactggaacgtcttgaaggcgaagtctttcgtttagcggggcatcccttcaatctcaactctcgcgaccaattggagaaagtgctctttgatgaattaggtttaacccctgtcacgcgtacagagaagaccggcaaacgttccacttcggcagccgccttggaagcacttcgtggtgctcacccgatcgtcgagttgattttgcagtatcgcgagctcagcaaactcaaatcaacctatcttgataggttacctcgtcttgttcatccacgtacgggtcgtttacacacccgcttcaatcaaacggcaacagccaccgggcgcttgtcgtcgagtgacccgaacctccagaatattccagtgcgcacgccgctgggccaacacattcgtaaagcgtttgttgcggaagaaggttggttattacttgcggccgattactcccagatcgaacttcgtgtattggcgcatctctctggcgacgagaatcttaaacgcgtgtttcgcgaaggcaaggatattcacactgaaaccgcagcctggatgttcggggtggacccagccttagtggaccccaagatgcgtcgtgccgccaagaccgtcaactttggcgtactctatggtatgtcagcagcacgtcttagtcaggaattgggcattgactacaaagaagctgaagcgtttatcgagcgctatttccaatcctttccgaaagttcgcgcgtggattgaacgtacgctcgaagaaggtcgcactcgcggctatgtggaaacgttattcgggcgtcgtcgctacgttccagatcttacgtctcgtgtccgctcagtgcgcgaagctgctgagcgtatggcctggaatatgcctgttcagggaacagcggcggacctcatgaagatcgccatggtgaaattgtttccgcgcttgaaacccttaggagcccaccttcttttacaggtgcatgatgaattggtcttggaagtacccgaggatcgcgcagaagaagccaaagcactcgtgaaagaggttatggaaaacgcgtatccgttagatgttccgttggaggtcgaagtgggtgtaggccgtgattggcttgaagcgaaacaagactaatga

SEQ ID NO: 960 - protein, 844 aa, synthetic construct
  REGION 1..844: note = DNA Polymerase Variant
MHHHHHHGGSGMLPLFDLEEPPKRVLLVDGHHLAYRTFYALSLTTSRGEPVQMVYGFARSLLKALKEDGQAVVVVFDAKAPSFRHEAYEAYKAGRAPTPEDFPRQLALVKRLVDLLGLVRLEAPGYEADDVLGTLAKKAEREGMEVCILTGDRDFFQLLSEKVSVLLPDGTLVTPKDVQEKYGVPPERWVDFRALTGDRSDNIPGVAGIGEKTALRLLAEWGSVENLLKNLDRVKPDSLRRKIEAHLEDLRLSLDLARIRTDLPLEVDFKALRRRTPDLEGLRAFLEELELGSLLHEFGLLGGEKPREEAPWPPPEGAFVGFLLSRKEPMWAELLALAAAAEGRVHRATSPVEALADLKEARGFLAKDLAVLALREGVALDPTDDPLLVAYLLDHANTNPERVARRYGGEFTEDAAERALLSERLFQTLFRRLSEKLLWLYQEVERPLSRVLAHMEARGVRLDVPLLEALSFELEKELERLEGEVFRLAGHPFNLNSRDQLEKVLFDELGLTPVTRTEKTGKRSTSAAALEALRGAHPIVELILQYRELSKLKSTYLDRLPRLVHPRTGRLHTRFNQTATATGRLSSSDPNLQNIPVRTPLGQHIRKAFVAEEGWLLLAADYSQIELRVLAHLSGDENLKRVFREGKDIHTETAAWMFGVDPALVDPKMRRAAKTVNFGVLYGMSAARLSQELGIDYKEAEAFIERYFQSFPKVRAWIERTLEEGRTRGYVETLFGRRRYVPDLTSRVRSVREAAERMAWNMPVQGTAADLMKIAMVKLFPRLKPLGAHLLLQVHDELVLEVPEDRAEEAKALVKEVMENAYPLDVPLEVEVGVGRDWLEAKQD

SEQ ID NO: 961 - DNA, 2538 bp, synthetic construct
  misc_feature 1..2538: note = DNA Polymerase Variant
  source 1..2538: mol_type = other DNA
atgcaccatcatcatcatcatggcggtagcggcatgttaccgctgtttgatttggaagaaccaccaaaacgcgtgctgcttgttgacggccatcatctggcgtatcgtaccttctacgcactgagccttacgacctcacgtggtgagcctgtccagatggtgtatgggtttgctcgctccctgctgaaagccctgaaggaagatggtcaagccgtagtagtggttttcgatgcgaaagcaccgtcgtttcgtcacgaagcgtacgaggcctataaagctggccgcgcaccgaccccggaagactttccgcgtcagttagcgctcgtcaaacgcctcgtggatttgctgggattagttcgcttggaagctcctggctacgaggcggacgacgtgctcggtacactggccaagaaagcagaacgtgaaggcatggaggtctgcattcttaccggtgatcgcgatttcttccagctgctgtctgagaaagtgagcgttttgctgcccgatggcacgttagtaaccccgaaagatgtgcaagagaaatatggagttccgccagaacgttgggtggactttcgcgcactgactggtgatcgttcagacaacatcccgggcgttgccgggattggtgaaaagacggcgctgcgcctgctggcagaatggggctcggtggaaaatctgctcaagaaccttgatcgtgtgaaacctgatagcttacgccgcaagatcgaagcccacctggaagacttgcgtctgagtctggatcttgcccgtattcgcaccgatctgccgttggaagtagactttaaagctctgcgtcgtcgcacacccgatttagaggggttacgcgcgttcctcgaagaactggagctgggctccctgctgcatgaattcggtttgttgggcggagagaaaccgcgtgaagaagcaccatggccgccgcccgaaggtgcctttgtcggctttcttctgtcacgcaaagagccaatgtgggcggaactgttagctcttgcagccgccgcggaagggcgtgttcaccgcgcgacctctcctgtcgaggccctcgctgacctcaaagaagcacgtggtttcttggcgaaagatttagccgtgcttgcattacgcgaaggcgttgcgctcgatccgacggacgacccgcttttggtggcttatttgctcgatcatgcgaataccaacccggaacgtgtcgcccgtcgttacggcggcgagtttactgaagatgcggcagaacgcgcgttgcttagcgaacgcctcttccagacgttatttccacgtctttcggagaaattactctggctctatcaggaagtcgaacgtccattgagtcgcgtgcttgccgggatggaggctcgcggtgtgcgcttagatgttccgttgttagaagcactcagcttcgagttggagaaagaactggaacgtcttgaaggcgaagtctttcgtttagcggggcatcccttcaatctcaactctcgcgaccaattggagaaagtgctctttgatgaattaggtttaacccctgtcacgcgtacagagaagaccggcaaacgttccacttcggcagccgccttggaagcacttcgtggtgctcacccgatcgtcgagttgattttgcagtatcgcgagctcagcaaactcaaatcaacctatcttgataggttacctcgtcttgttcatccacgtacgggtcgtttacacacccgcttcaatcaaacggcaacagccaccgggcgcttgtcgtcgagtgacccgaacctccagaatattccagtgcgcacgccgctgggccaacacattcgtaaagcgtttgttgcggaagaaggttggttattacttgcggccgattactcccagatcgaacttcgtgtattggcgcatctctctggcgacgagaatcttaaacgcgtgtttcgcgaaggcaaggatattcacactgaaaccgcagcctggatgttcggggtggacccagccttagtggaccccaagatgcgtcgtgccgccaagaccgtcaactttggcgtactctatggtatgtcagcagcacgtcttagtcaggaattgggcattgactacaaagaagctgaagcgtttatcgagcgctatttccaatcctttccgaaagttcgcgcgtggattgaacgtacgctcgaagaaggtcgcactcgcggctatgtggaaacgttattcgggcgtcgtcgctacgttccagatcttacgtctcgtgtccgctcagtgcgcgaagctgctgagcgtatggcctggaatatgcctgttcagggaacagcggcggacctcatgaagatcgccatggtgaaattgtttccgcgcttgaaacccttaggagcccaccttcttttacaggtgcatgatgaattggtcttggaagtacccgaggatcgcgcagaagaagccaaagcactcgtgaaagaggttatggaaaacgcgtatccgttagatgttccgttggaggtcgaagtgggtgtaggccgtgattggcttgaagcgaaacaagactaatga

SEQ ID NO: 962 - protein, 844 aa, synthetic construct
  REGION 1..844: note = DNA Polymerase Variant
MHHHHHHGGSGMLPLFDLEEPPKRVLLVDGHHLAYRTFYALSLTTSRGEPVQMVYGFARSLLKALKEDGQAVVVVFDAKAPSFRHEAYEAYKAGRAPTPEDFPRQLALVKRLVDLLGLVRLEAPGYEADDVLGTLAKKAEREGMEVCILTGDRDFFQLLSEKVSVLLPDGTLVTPKDVQEKYGVPPERWVDFRALTGDRSDNIPGVAGIGEKTALRLLAEWGSVENLLKNLDRVKPDSLRRKIEAHLEDLRLSLDLARIRTDLPLEVDFKALRRRTPDLEGLRAFLEELELGSLLHEFGLLGGEKPREEAPWPPPEGAFVGFLLSRKEPMWAELLALAAAAEGRVHRATSPVEALADLKEARGFLAKDLAVLALREGVALDPTDDPLLVAYLLDHANTNPERVARRYGGEFTEDAAERALLSERLFQTLFPRLSEKLLWLYQEVERPLSRVLAGMEARGVRLDVPLLEALSFELEKELERLEGEVFRLAGHPFNLNSRDQLEKVLFDELGLTPVTRTEKTGKRSTSAAALEALRGAHPIVELILQYRELSKLKSTYLDRLPRLVHPRTGRLHTRFNQTATATGRLSSSDPNLQNIPVRTPLGQHIRKAFVAEEGWLLLAADYSQIELRVLAHLSGDENLKRVFREGKDIHTETAAWMFGVDPALVDPKMRRAAKTVNFGVLYGMSAARLSQELGIDYKEAEAFIERYFQSFPKVRAWIERTLEEGRTRGYVETLFGRRRYVPDLTSRVRSVREAAERMAWNMPVQGTAADLMKIAMVKLFPRLKPLGAHLLLQVHDELVLEVPEDRAEEAKALVKEVMENAYPLDVPLEVEVGVGRDWLEAKQD

SEQ ID NO: 963 - DNA, 2538 bp, synthetic construct
  misc_feature 1..2538: note = DNA Polymerase Variant
  source 1..2538: mol_type = other DNA
atgcaccatcatcatcatcatggcggtagcggcatgttaccgctgtttgatttggaagaaccaccaaaacgcgtgctgcttgttgacggccatcatctggcgtatcgtaccttctacgcactgagccttacgacctcacgtggtgagcctgtccagatggtgtatgggtttgctcgctccctgctgaaagccctgaaggaagatggtcaagccgtagtagtggttttcgatgcgcgtgcaccgtcgtttcgtcacgaagcgtacgaggcctataaagctggccgcgcaccgaccccggaagactttccgcgtcagttagcgctcgtcaaacgcctcgtggatttgctgggattagttcgcttggaagctcctggctacgaggcggacgacgtgctcggtacactggccaagaaagcagaacgtgaaggcatggaggtctgcattcttaccggtgatcgcgatttcttccagctgctgtctgagaaagtgagcgttttgctgcccgatggcacgttagtaaccccgaaagatgtgcaagagaaatatggagttccgccagaacgttgggtggactttcgcgcactgactggtgatcgttcagacaacatcccgggcgttgccgggattggtgaaaagacggcgctgcgcctgctggcagaatggggctcggtggaaaatctgctcaagaaccttgatcgtgtgaaacctgatagcttacgccgcaagatcgaagcccacctggaagacttgcgtctgagtctggatcttgcacgtattcgcaccgatctgccgttggaagtagactttaaagctctgcgtcgtcgcacacccgatttagaggggttacgcgcgttcctcgaagaactggagctgggctccctgctgcatgaattcggtttgttgggcggagagaaaccgcgtgaagaagcaccatggccgccgcccgagggtgcctttgtcggctttcttctgtcacgcaaagagccaatgtgggcggaactgttagctcttgcagccgccgcggaagggcgtgttcaccgcgcgacctctcctgtcgaggccctcgctgacctcaaagaagcacgtggtttcttggcgaaagatttagccgtgcttgcattacgcgaaggcgttgcgctcgatccgacggacgacccgcttttggtggcttatttgctcgatcatgcgaataccaacccggaacgtgtcgcccgtcgttacggcggcgagtttactgaagatgcggcagaacgcgcgttgcttagcgaacgcctcttccagacgttatttccacgtctttcggagaaattactctggctctatcaggaagtcgaacgtccattgagtcgcgtgcttgcccatatggaggctcgcggtgtgcgcttagatgttccgttgttagaagcactcagcttcgagctggaaaaagaactggaacgtcttgaaggcgaagtctttcgtttagcggggcatcccttcaatctcaactctcgcgaccaattggagaaagtgctctttgatgaattaggtttaacccctgtcacgcgtacagagaagaccggcaaacgttccacttcggcagccgccttggaagcacttcgtggtgcgcacccgatcgtcgagttgattttgcagtatcgcgagctcagcaaactcaaatcaacctatcttgataggttacctcgtcttgttcatccacgtacgggtcgtttacacacccgcttcaatcaaacggcaacagccaccgggcgcttgtcgtcgagtgacccgaacctccagaatattccagtgcgcacgccgctgggccaacacattcgtaaagcgtttgttgcggaagaaggttggttattacttgcggccgattactcccagatcgaacttcgtgtattggcgcatctctctggcgacgagaatcttaaacgcgtgtttcgcgaaggcaaggatattcacactgaaaccgcagcctggatgttcggggtggacccggccttagtggaccccaagatgcgtcgtgccgccaagaccgtcaactttggcgtactctatggtatgtcagcagcacgtcttagtcaggaattgggcattgactacaaagaagctgaagcgtttatcgagcgctatttccaatcctttccgaaagttcgcgcgtggattgaacgtacgctcgaagaaggtcgcactcgcggctatgtggaaacgttattcgggcgtcgtcgctacgttccagatcttacgtctcgtgtccgctcagtgcgcgaagctgctgagcgtatggcctggaatatgcctgttcagggaacagcggcggacctcatgaagatcgccatggtgaaattgtttccgcgcttgaaacccttaggagcccaccttcttctgcaggtgcatgatgaattggtcttggaagtacccgaggatcgcgcagaagaagccaaagcactcgtgaaagaggttatggaaaacgcgtatccgttagatgttccgttggaggtcgaagtgggtgtaggccgtgattggcttgaagcgaaacaagactaatga

SEQ ID NO: 964 - protein, 844 aa, synthetic construct
  REGION 1..844: note = DNA Polymerase Variant
MHHHHHHGGSGMLPLFDLEEPPKRVLLVDGHHLAYRTFYALSLTTSRGEPVQMVYGFARSLLKALKEDGQAVVVVFDARAPSFRHEAYEAYKAGRAPTPEDFPRQLALVKRLVDLLGLVRLEAPGYEADDVLGTLAKKAEREGMEVCILTGDRDFFQLLSEKVSVLLPDGTLVTPKDVQEKYGVPPERWVDFRALTGDRSDNIPGVAGIGEKTALRLLAEWGSVENLLKNLDRVKPDSLRRKIEAHLEDLRLSLDLARIRTDLPLEVDFKALRRRTPDLEGLRAFLEELELGSLLHEFGLLGGEKPREEAPWPPPEGAFVGFLLSRKEPMWAELLALAAAAEGRVHRATSPVEALADLKEARGFLAKDLAVLALREGVALDPTDDPLLVAYLLDHANTNPERVARRYGGEFTEDAAERALLSERLFQTLFPRLSEKLLWLYQEVERPLSRVLAHMEARGVRLDVPLLEALSFELEKELERLEGEVFRLAGHPFNLNSRDQLEKVLFDELGLTPVTRTEKTGKRSTSAAALEALRGAHPIVELILQYRELSKLKSTYLDRLPRLVHPRTGRLHTRFNQTATATGRLSSSDPNLQNIPVRTPLGQHIRKAFVAEEGWLLLAADYSQIELRVLAHLSGDENLKRVFREGKDIHTETAAWMFGVDPALVDPKMRRAAKTVNFGVLYGMSAARLSQELGIDYKEAEAFIERYFQSFPKVRAWIERTLEEGRTRGYVETLFGRRRYVPDLTSRVRSVREAAERMAWNMPVQGTAADLMKIAMVKLFPRLKPLGAHLLLQVHDELVLEVPEDRAEEAKALVKEVMENAYPLDVPLEVEVGVGRDWLEAKQD

SEQ ID NO: 965 - DNA, 2538 bp, synthetic construct
  misc_feature 1..2538: note = DNA Polymerase Variant
  source 1..2538: mol_type = other DNA
atgcaccatcatcatcatcatggcggtagcggcatgttaccgctgtttgatttggaagaaccaccaaaacgcgtgctgcttgttgacggccatcatctggcgtatcgtaccttctacgcactgagccttacgacctcacgtggtgagcctgtccagatggtgtatgggtttgctcgctccctgctgaaagccctgaaggaagatggtcaagccgtagtagtggttttcgatgcgaaagcaccgtcgtttcgtcacgaagcgtacgaggcctataaagctggccgcgcaccgaccccggaagactttccgcgtcagttagcgctcgtcaaacgcctcgtggatttgctgggattagttcgcttggaagctcctggctacgaggcggacgacgtgctcggtacactggccaagaaagcagaacgtgaaggcatggaggtctgcattcttaccggtgatcgcgatttcttccagctgctgtctgagaaagtgagcgttttgctgcccgatggcacgttagtaaccccgaaagatgtgcaagagaaatatggagttccgccagaacgttgggtggactttcgcgcactgactggtgatcgttcagacaacatcccgggcgttgccgggattggtgaaaagacggcgctgcgcctgctggcagaatggggctcggtggaaaatctgctcaagaaccttgatcgtgtgaaacctgatagcttacgccgcaagatcgaagcccacctggaagacttgcgtctgagtctggatcttgcccgtattcgcaccgatctgccgttggaagtagactttaaagctctgcgtcgtcgcacacccgatttagaggggttacgcgcgttcctcgaagaactggagctgggctccctgctgcatgaattcggtttgttgggcggagagaaaccgcgtgaagaagcaccatggccgccgcccgaaggtgcctttgtcggctttcttctgtcacgcaaagagccaatgtgggcggaactgttagctcttgcagccgccgcggaagggcgtgttcaccgcgcgacctctcctgtcgaggccctcgctgacctcaaagaagcacgtggtttcttggcgaaagatttagccgtgcttgcattacgcgaaggcgttgcgctcgatccgacggacgacccgcttttggtggcttatttgctcgatcatgcgaataccaacccggaacgtgtcgcccgtcgttacggcggcgagtttactgaagatgcggcagaacgcgcgttgcttagcgaacgcctcttccagacgttatttccacgtctttcggagaaaagtctctggctctatcaggaagtcgaacgtccattgagtcgcgtgcttgcccatatggaggctcgcggtgtgcgcttagatgttccgttgttagaagcactcagcttcgagttggagaaagaactggaacgtcttgaaggcgaagtctttcgtttagcggggcatcccttcaatctcaactctcgcgaccaattggagaaagtgctctttgatgaattaggtttaacccctgtcacgcgtacagagaagaccggcaaacgttccacttcggcagccgccttggaagcacttcgtggtgctcacccgatcgtcgagttgattttgcagtatcgcgagctcagcaaactcaaatcaacctatcttgataggttacctcgtcttgttcatccacgtacgggtcgtttacacacccgcttcaatcaaacggcaacagccaccgggcgcttgtcgtcgagtgacccgaacctccagaatattccagtgcgcacgccgctgggccaacacattcgtaaagcgtttgttgcggaagaaggttggttattacttgcggccgattactcccagatcgaacttcgtgtattggcgcatctctctggcgacgagaatcttaaacgcgtgtttcgcgaaggcaaggatattcacactgaaaccgcagcctggatgttcggggtggacccagccttagtggaccccaagatgcgtcgtgccgccaagaccgtcaactttggcgtactctatggtatgtcagcagcacgtcttagtcaggaattgggcattgactacaaagaagctgaagcgtttatcgagcgctatttccaatcctttccgaaagttcgcgcgtggattgaacgtacgctcgaagaaggtcgcactcgcggctatgtggaaacgttattcgggcgtcgtcgctacgttccagatcttacgtctcgtgtccgctcagtgcgcgaagctgctgagcgtatggcctggaatatgcctgttcagggaacagcggcggacctcatgaagatcgccatggtgaaattgtttccgcgcttgaaacccttaggagcccaccttcttttacaggtgcatgatgaattggtcttggaagtacccgaggatcgcgcagaagaagccaaagcactcgtgaaagaggttatggaaaacgcgtatccgttagatgttccgttggaggtcgaagtgggtgtaggccgtgattggcttgaagcgaaacaagactaatga

SEQ ID NO: 966 - protein, 844 aa, synthetic construct
  REGION 1..844: note = DNA Polymerase Variant
MHHHHHHGGSGMLPLFDLEEPPKRVLLVDGHHLAYRTFYALSLTTSRGEPVQMVYGFARSLLKALKEDGQAVVVVFDAKAPSFRHEAYEAYKAGRAPTPEDFPRQLALVKRLVDLLGLVRLEAPGYEADDVLGTLAKKAEREGMEVCILTGDRDFFQLLSEKVSVLLPDGTLVTPKDVQEKYGVPPERWVDFRALTGDRSDNIPGVAGIGEKTALRLLAEWGSVENLLKNLDRVKPDSLRRKIEAHLEDLRLSLDLARIRTDLPLEVDFKALRRRTPDLEGLRAFLEELELGSLLHEFGLLGGEKPREEAPWPPPEGAFVGFLLSRKEPMWAELLALAAAAEGRVHRATSPVEALADLKEARGFLAKDLAVLALREGVALDPTDDPLLVAYLLDHANTNPERVARRYGGEFTEDAAERALLSERLFQTLFPRLSEKSLWLYQEVERPLSRVLAHMEARGVRLDVPLLEALSFELEKELERLEGEVFRLAGHPFNLNSRDQLEKVLFDELGLTPVTRTEKTGKRSTSAAALEALRGAHPIVELILQYRELSKLKSTYLDRLPRLVHPRTGRLHTRFNQTATATGRLSSSDPNLQNIPVRTPLGQHIRKAFVAEEGWLLLAADYSQIELRVLAHLSGDENLKRVFREGKDIHTETAAWMFGVDPALVDPKMRRAAKTVNFGVLYGMSAARLSQELGIDYKEAEAFIERYFQSFPKVRAWIERTLEEGRTRGYVETLFGRRRYVPDLTSRVRSVREAAERMAWNMPVQGTAADLMKIAMVKLFPRLKPLGAHLLLQVHDELVLEVPEDRAEEAKALVKEVMENAYPLDVPLEVEVGVGRDWLEAKQD

SEQ ID NO: 967 - DNA, 2538 bp, synthetic construct
  misc_feature 1..2538: note = DNA Polymerase Variant
  source 1..2538: mol_type = other DNA
atgcaccatcatcatcatcatggcggtagcggcatgttaccgctgtttgatttggaagaaccaccaaaacgcgtgctgcttgttgacggccatcatctggcgtatcgtaccttctacgcactgagccttacgacctcacgtggtgagcctgtccagatggtgtatgggtttgctcgctccctgctgaaagccctgaaggaagatggtcaagccgtagtagtggttttcgatgcgaaggcaccgtcgtttcgtcacgaagcgtacgaggcctataaagctggccgcgcaccgaccccggaagactttccgcgtcagttagcgctcgtcaaacgcctcgtggatttgctgggattagttcgcttggaagctcctggctacgaggcggacgacgtgctcggtacactggccaagaaagcagaacgtgaaggcatggaggtctgcattcttaccggtgatcgcgatttcttccagctgctgtctgagaaagtgagcgttttgctgcccgatggcacgttagtaaccccgaaagatgtgcaagagaaatatggagttccgccagaacgttgggtggactttcgcgcactgactggtgatcgttcagacaacatcccgggcgttgccgggattggtgaaaagacggcgctgcgcctgctggcagaatggggctcggtggaaaatctgctcaagaaccttgatcgtgtgaaacctgatagcttacgccgcaagatcgaagcccacctggaagacttgcgtctgagtctggatcttgtacgtattcgcaccgatctgccgttggaagtagactttaaagctctgcgtcgtcgcacacccgatttagaggggttacgcgcgttcctcgaagaactggagctgggctccctgctgcatgaattcggtttgttgggcggagagaaaccgcgtgaagaagcaccatggccgccgcccgaaggtgcctttgtcggctttcttctgtcacgcaaagagccaatgtgggcggaactgttagctcttgcagccgccgcggaagggcgtgttcaccgcgcgacctctcctgtcgaggccctcgctgacctcaaagaagcacgtggtttcttggcgaaagatttagccgtgcttgcattacgcgaaggcgttgcgctcgatccgacggacgacccgcttttggtggcttatttgctcgatcatgcgaataccaacccggaacgtgtcgcccgtcgttacggcggcgagtttactgaagatgcggcagaacgcgcgttgcttagcgaacgcctcttccagacgttatttccacgtctttcggagaaattactctggctctatcaggaagtcgaacgtccattgagtcgcgtgcttgcccatatggaggctcgcggtgtgcgcttagatgttccgttgttagaagcactcagcttcgagttggagaaagaactggaacgtcttgaaggcgaagtctttcgtttagcggggcatcccttcaatctcaactctcgcgaccaattggagaaagtgctctttgatgaattaggtttaacccctgtcacgcgtacagagaagaccggcaaacgttccacttcggcagccgccttggaagcacttcgtggtgtgcacccgatcgtcgagttgattttgcagtatcgcgagctcagcaaactcaaatcaacctatcttgataggttacctaagcttgttcatccacgtacgggtcgtttacacacccgcttcaatcaaacggcaacagccaccgggcgcttgtcgtcgagtgacccgaacctccagaatattccagtgcgcacgccgctgggccaacacattcgtaaagcgtttgttgcggaagaaggttggttattacttgcggccgattactcccagatcgaacttcgtgtattggcgcatctctctggcgacgagaatcttaaacgcgtgtttcgcgaaggcaaggatattcacactgaaaccgcagcctggatgttcggggtggactcggccttagtggaccccaagatgcgtcgtgccgccaagaccgtcaactttggcgtactctatggtatgtcagcagcacgtcttagtcaggaattgggcattgactacaaagaagctgaagcgtttatcgagcgctatttccaatcctttccgaaagttcgcgcgtggattgaacgtacgctcgaagaaggtcgcactcgcggctatgtggaaacgttattcgggcgtcgtcgctacgttccagatcttacgtctcgtgtccgctcagtgcgcgaagctgctgagcgtatggcctggaatatgcctgttcagggaacagcggcggacctcatgaagatcgccatggtgaaattgtttccgcgcttgaaacccttaggagcccaccttcttctgcaggtgcatgatgaattggtcttggaagtacccgaggatcgcgcagaagaagccaaagcactcgtgaaagaggttatggaaaacgcgtatccgttagatgttccgttggaggtcgaagtgggtgtaggccgtgattggcttgaagcgaaacaagactaatga

SEQ ID NO: 968 - protein, 844 aa, synthetic construct
  REGION 1..844: note = DNA Polymerase Variant
MHHHHHHGGSGMLPLFDLEEPPKRVLLVDGHHLAYRTFYALSLTTSRGEPVQMVYGFARSLLKALKEDGQAVVVVFDAKAPSFRHEAYEAYKAGRAPTPEDFPRQLALVKRLVDLLGLVRLEAPGYEADDVLGTLAKKAEREGMEVCILTGDRDFFQLLSEKVSVLLPDGTLVTPKDVQEKYGVPPERWVDFRALTGDRSDNIPGVAGIGEKTALRLLAEWGSVENLLKNLDRVKPDSLRRKIEAHLEDLRLSLDLVRIRTDLPLEVDFKALRRRTPDLEGLRAFLEELELGSLLHEFGLLGGEKPREEAPWPPPEGAFVGFLLSRKEPMWAELLALAAAAEGRVHRATSPVEALADLKEARGFLAKDLAVLALREGVALDPTDDPLLVAYLLDHANTNPERVARRYGGEFTEDAAERALLSERLFQTLFPRLSEKLLWLYQEVERPLSRVLAHMEARGVRLDVPLLEALSFELEKELERLEGEVFRLAGHPFNLNSRDQLEKVLFDELGLTPVTRTEKTGKRSTSAAALEALRGVHPIVELILQYRELSKLKSTYLDRLPKLVHPRTGRLHTRFNQTATATGRLSSSDPNLQNIPVRTPLGQHIRKAFVAEEGWLLLAADYSQIELRVLAHLSGDENLKRVFREGKDIHTETAAWMFGVDSALVDPKMRRAAKTVNFGVLYGMSAARLSQELGIDYKEAEAFIERYFQSFPKVRAWIERTLEEGRTRGYVETLFGRRRYVPDLTSRVRSVREAAERMAWNMPVQGTAADLMKIAMVKLFPRLKPLGAHLLLQVHDELVLEVPEDRAEEAKALVKEVMENAYPLDVPLEVEVGVGRDWLEAKQD

SEQ ID NO: 969 - DNA, 2538 bp, synthetic construct
  misc_feature 1..2538: note = DNA Polymerase Variant
  source 1..2538: mol_type = other DNA
atgcaccatcatcatcatcatggcggtagcggcatgttaccgctgtttgatttggaagaaccaccaaaacgcgtgctgcttgttgacggccatcatctggcgtatcgtaccttctacgcactgagccttacgacctcacgtggtgagcctgtccagatggtgtatgggtttgctcgctccctgctgaaagccctgaaggaagatggtcaagccgtagtagtggttttcgatgcgaaagcaccgtcgtttcgtcacgaagcgtacgaggcctataaagctggccgcgcaccgaccccggaagactttccgcgtcagttagcgctcgtcaaacgcctcgtggatttgctgggattagttcgcttggaagctcctggctacgaggcggacgacgtgctcggtacactggccaagaaagcagaacgtgaaggcatggaggtctgcattcttaccggtgatcgcgatttcttccagctgctgtctgagaaagtgagcgttttgctgcccgatggcacgttagtaaccccgaaagatgtgcaagagaaatatggagttccgccagaacgttgggtggactttcgcgcactgactggtgatcgttcagacaacatcccgggcgttgccgggattggtgaaaagacggcgctgcgcctgctggcagaatggggctcggtggaaaatctgctcaagaaccttgatcgtgtgaaacctgatagcttacgccgcaagatcgaagcccacctggaagacttgcgtctgagtctggatcttgcccgtattcgcaccgatctgccgttggaagtagactttaaagctctgcgtcgtcgcacacccgatttagaggggttacgcgcgttcctcgaagaactggagctgggctccctgctgcatgaattcggtttgttgggcggagagaaaccgcgtgaagaagcaccatggccgccgcccgaaggtgcctttgtcggctttcttctgtcacgcaaagagccaatgtgggcggaactgttagctcttgcagccgccgcggaagggcgtgttcaccgcgcgacctctcctgtcgaggccctcgctgacctcaaagaagcacgtggtttcttggcgaaagatttagccgtgcttgcattacgcgaaggcgttgcgctcgatccgacggacgacccgcttttggtggcttatttgctcgatcatgcgaataccaacccggaacgtgtcgcccgtcgttacggcggcgagtttactgaagatgcggcagaacgcgcgttgcttagcgaacgcctcttccagacgttatttccacgtctttcggagaaattactctggctctatcaggaagtcgaacgtccattgagtcgcgtgcttgcccatatggaggctcgcggtgtgcgcttagatgttccgttgttagaagcactcagcttcgagttggagaaagaactggaacgtcttgaaggcgaagtctttcgtttagcggggcatcccttcaatctcaactctcgcgaccaattggagaaagtgctctttgatgaattaggtttaacccctgtcacgcgtacagagaagaccggcaaacgttccacttcggcagccgccttggaagcacttcgtggtgctcacccgatcgtcgagttgattttgcagtatcgcgagctcagcaaactcaaatcaacctatcttgataggttacctcgtcttgttcatccacgtacgggtcgtttacacacccgcttcaatcaaacggcaacagccaccgggcgcttgtcgtcgagtgacccgaacctccagaatattccagtgcgcacgccgctgggccaacacattcgtaaagcgtttgttgcggaagaaggttggttattacttgcggccgattactcccagatcgaacttcgtgtattggcgcatctctctggcgacgagaatcttaaacgcgtgtttcgcgaaggcaaggatattcacactgaaaccgcagcctggatgttcggggtggacccagccttagtggaccccaagatgcgtcgtgccgccaagaccgtcaactttggcgtactctatggtatgtcagcagcacgtcttagtcaggaattgggcattgactacaaagaagctgaagcgtttatcgagcgctatttccaatcctttccgaaagttcgcgcgtggattgaacgtacgctcgaagaaggtcgcactcgcggctatacggaaacgttattcgggcgtcgtcgctacgttccagatcttacgtctcgtgtccgctcagtgcgcgaagctgctgagcgtatggcctggaatatgcctgttcagggaacagcggcggacctcatgaagatcgccatggtgaaattgtttccgcgcttgaaacccttaggagcccaccttcttttacaggtgcatgatgaattggtcttggaagtacccgaggatcgcgcagaagaagccaaagcactcgtgaaagaggttatggaaaacgcgtatccgttagatgttccgttggaggtcgaagtgggtgtaggccgtgattggcttgaagcgaaacaagactaatga

SEQ ID NO: 970 - protein, 844 aa, synthetic construct
  REGION 1..844: note = DNA Polymerase Variant
MHHHHHHGGSGMLPLFDLEEPPKRVLLVDGHHLAYRTFYALSLTTSRGEPVQMVYGFARSLLKALKEDGQAVVVVFDAKAPSFRHEAYEAYKAGRAPTPEDFPRQLALVKRLVDLLGLVRLEAPGYEADDVLGTLAKKAEREGMEVCILTGDRDFFQLLSEKVSVLLPDGTLVTPKDVQEKYGVPPERWVDFRALTGDRSDNIPGVAGIGEKTALRLLAEWGSVENLLKNLDRVKPDSLRRKIEAHLEDLRLSLDLARIRTDLPLEVDFKALRRRTPDLEGLRAFLEELELGSLLHEFGLLGGEKPREEAPWPPPEGAFVGFLLSRKEPMWAELLALAAAAEGRVHRATSPVEALADLKEARGFLAKDLAVLALREGVALDPTDDPLLVAYLLDHANTNPERVARRYGGEFTEDAAERALLSERLFQTLFPRLSEKLLWLYQEVERPLSRVLAHMEARGVRLDVPLLEALSFELEKELERLEGEVFRLAGHPFNLNSRDQLEKVLFDELGLTPVTRTEKTGKRSTSAAALEALRGAHPIVELILQYRELSKLKSTYLDRLPRLVHPRTGRLHTRFNQTATATGRLSSSDPNLQNIPVRTPLGQHIRKAFVAEEGWLLLAADYSQIELRVLAHLSGDENLKRVFREGKDIHTETAAWMFGVDPALVDPKMRRAAKTVNFGVLYGMSAARLSQELGIDYKEAEAFIERYFQSFPKVRAWIERTLEEGRTRGYTETLFGRRRYVPDLTSRVRSVREAAERMAWNMPVQGTAADLMKIAMVKLFPRLKPLGAHLLLQVHDELVLEVPEDRAEEAKALVKEVMENAYPLDVPLEVEVGVGRDWLEAKQD

SEQ ID NO: 971 - DNA, 2538 bp, synthetic construct
  misc_feature 1..2538: note = DNA Polymerase Variant
  source 1..2538: mol_type = other DNA
atgcaccatcatcatcatcatggcggtagcggcatgttaccgctgtttgatttggaagaaccaccaaaacgcgtgctgcttgttgacggccatcatctggcgtatcgtaccttctacgcactgagccttacgacctcacgtggtgagcctgtccagatggtgtatgggtttgctcgctccctgctgaaagccctgaaggaagatggtcaagccgtagtagtggttttcgatgcgaaagcaccgtcgtttcgtcacgaagcgtacgaggcctataaagctggccgcgcaccgaccccggaagactttccgcgtcagttagcgctcgtcaaacgcctcgtggatttgctgggattagttcgcttggaagctcctggctacgaggcggacgacgtgctcggtacactggccaagaaagcagaacgtgaaggcatggaggtctgcattcttaccggtgatcgcgatttcttccagctgctgtctgagaaagtgagcgttttgctgcccgatggcacgttagtaaccccgaaagatgtgcaagagaaatatggagttccgccagaacgttgggtggactttcgcgcactgactggtgatcgttcagacaacatcccgggcgttgccgggattggtgaaaagacggcgctgcgcctgctggcagaatggggctcggtggaaaatctgctcaagaaccttgatcgtgtgaaacctgatagcttacgccgcaagatcgaagcccacctggaagacttgcgtctgagtctggatcttgcccgtattcgcaccgatctgccgttggaagtagactttaaagctctgcgtcgtcgcacacccgatttagaggggttacgcgcgttcctcgaagaactggagctgggctccctgctgcatgaattcggtttgttgggcggagagaaaccgcgtgaagaagcaccatggccgccgcccgaaggtgcctttgtcggctttcttctgtcacgcaaagagccaatgtgggcggaactgttagctcttgcagccgccgcggaagggcgtgttcaccgcgcgacctctcctgtcgaggccctcgctgacctcaaagaagcacgtggtttcttggcgaaagatttagccgtgcttgcattacgcgaaggcgttgcgctcgatccgacggacgacccgcttttggtggcttatttgctcgatcatgcgaataccaacccggaacgtgtcgcccgtcgttacggcggcgagtttactgaagatgcggcagaacgcgcgttgcttagcgaacgcctcttccagacgttatttccacgtctttcggagaaattactctggctctatcaggaagtcgaacgtccattgagtcgcgtgcttgcccatatggaggctcgcggtgtgcgcttagatgttccgttgttagaagcactcagcttcgagttggagaaagaactggaacgtcttgaaggcgaagtctttcgtttagcggggcatcccttcaatctcaactctcgcgaccaattggagaaagtgctctttgatgaattaggtttaacccctgtcacgcgtacagagaagaccggcaaacgttccacttcggcagccgccttggaagcacttcgtggtgctcacccgatcgtcgagttgattttgcagtatcgcgagctcagcaaactcaaatcaacctatcttgataggttacctcgtcttgttcatccacgtacgggtcgtttacacacccgcttcaatcaaacggcaacagccaccgggcgcttgtcgtcgagtgacccgaacctccagaatattccagtgcgcacgccgctgggccaacacattcgtaaagcgtttgttgcggaagaaggttggttattacttgcggccgattactcccagatcgaacttcgtgtattggcgcatctctctggcgacgagaatcttaaacgcgtgtttcgcgaaggcaaggatattcacactgaaaccgcagcctggatgttcggggtggacccagccttagtggaccccaagatgcgtcgtgccgccaagaccgtcaactttggcgtactctatggtatgtcagcagcacgtcttagtcaggaattgggcattgactacaaagaagctgaagcgtttatcgaggtgtatttccaatcctttccgaaagttcgcgcgtggattgaacgtacgctcgaagaaggtcgcactcgcggctatgtggaaacgttattcgggcgtcgtcgctacgttccagatcttacgtctcgtgtccgctcagtgcgcgaagctgctgagcgtatggcctggaatatgcctgttcagggaacagcggcggacctcatgaagatcgccatggtgaaattgtttccgcgcttgaaacccttaggagcccaccttcttttacaggtgcatgatgaattggtcttggaagtacccgaggatcgcgcagaagaagccaaagcactcgtgaaagaggttatggaaaacgcgtatccgttagatgttccgttggaggtcgaagtgggtgtaggccgtgattggcttgaagcgaaacaagactaatga

SEQ ID NO: 972 - protein, 844 aa, synthetic construct
  REGION 1..844: note = DNA Polymerase Variant
MHHHHHHGGSGMLPLFDLEEPPKRVLLVDGHHLAYRTFYALSLTTSRGEPVQMVYGFARSLLKALKEDGQAVVVVFDAKAPSFRHEAYEAYKAGRAPTPEDFPRQLALVKRLVDLLGLVRLEAPGYEADDVLGTLAKKAEREGMEVCILTGDRDFFQLLSEKVSVLLPDGTLVTPKDVQEKYGVPPERWVDFRALTGDRSDNIPGVAGIGEKTALRLLAEWGSVENLLKNLDRVKPDSLRRKIEAHLEDLRLSLDLARIRTDLPLEVDFKALRRRTPDLEGLRAFLEELELGSLLHEFGLLGGEKPREEAPWPPPEGAFVGFLLSRKEPMWAELLALAAAAEGRVHRATSPVEALADLKEARGFLAKDLAVLALREGVALDPTDDPLLVAYLLDHANTNPERVARRYGGEFTEDAAERALLSERLFQTLFPRLSEKLLWLYQEVERPLSRVLAHMEARGVRLDVPLLEALSFELEKELERLEGEVFRLAGHPFNLNSRDQLEKVLFDELGLTPVTRTEKTGKRSTSAAALEALRGAHPIVELILQYRELSKLKSTYLDRLPRLVHPRTGRLHTRFNQTATATGRLSSSDPNLQNIPVRTPLGQHIRKAFVAEEGWLLLAADYSQIELRVLAHLSGDENLKRVFREGKDIHTETAAWMFGVDPALVDPKMRRAAKTVNFGVLYGMSAARLSQELGIDYKEAEAFIEVYFQSFPKVRAWIERTLEEGRTRGYVETLFGRRRYVPDLTSRVRSVREAAERMAWNMPVQGTAADLMKIAMVKLFPRLKPLGAHLLLQVHDELVLEVPEDRAEEAKALVKEVMENAYPLDVPLEVEVGVGRDWLEAKQD

SEQ ID NO: 973 - DNA, 2538 bp, synthetic construct
  misc_feature 1..2538: note = DNA Polymerase Variant
  source 1..2538: mol_type = other DNA
atgcaccatcatcatcatcatggcggtagcggcatgttaccgctgtttgatttggaagaaccaccaaaacgcgtgctgcttgttgacggccatcatctggcgtatcgtaccttctacgcactgagccttacgacctcacgtggtgagcctgtccagatggtgtatgggtttgctcgctccctgctgaaagccctgaaggaagatggtcaagccgtagtagtggttttcgatgcgaaagcaccgtcgtttcgtcacgaagcgtacgaggcctataaagctggccgcgcaccgaccccggaagactttccgcgtcagttagcgctcgtcaaacgcctcgtggatttgctgggattagttcgcttggaagctcctggctacgaggcggacgacgtgctcggtacactggccaagaaagcagaacgtgaaggcatggaggtctgcattcttaccggtgatcgcgatttcttccagctgctgtctgagaaagtgagcgttttgctgcccgatggcacgttagtaaccccgaaagatgtgcaagagaaatatggagttccgccagaacgttgggtggactttcgcgcactgactggtgatcgttcagacaacatcccgggcgttgccgggattggtgaaaagacggcgctgcgcctgctggcagaatggggctcggtggaaaatctgctcaagaaccttgatcgtgtgaaacctgatagcttacgccgcaagatcgaagcccacctggaagacttgcgtctgagtctggatcttgcccgtattcgcaccgatctgccgttggaagtagactttaaagctctgcgtcgtcgcacacccgatttagaggggttacgcgcgttcctcgaagaactggagctgggctccctgctgcatgaattcggtttgttgggcggagagaaaccgcgtgaagaagcaccatggccgccgcccgaaggtgcctttgtcggctttcttctgtcacgcaaagagccaatgtgggcggaactgttagctcttgcagccgccgcggaagggcgtgttcaccgcgcgacctctcctgtcgaggccctcgctgacctcaaagaagcacgtggtttcttggcgaaagatttagccgtgcttgcattacgcgaaggcgttgcgctcgatccgacggacgacccgcttttggtggcttatttgctcgatcatgcgaataccaacccggaacgtgtcgcccgtcgttacggcggcgagtttactgaagatgcggcagaacgcgcgttgcttagcgaacgcctcttccagacgttatttccacgtctttcggagaaattactctggctctatcaggaagtcgaacgtccaactagtcgcgtgcttgcccatatggaggctcgcggtgtgcgcttagatgttccgttgttagaagcactcagcttcgagttggagaaagaactggaacgtcttgaaggcgaagtctttcgtttagcggggcatcccttcaatctcaactctcgcgaccaattggagaaagtgctctttgatgaattaggtttaacccctgtcacgcgtacagagaagaccggcaaacgttccacttcggcagccgccttggaagcacttcgtggtgctcacccgatcgtcgagttgattttgcagtatcgcgagctcagcaaactcaaatcaacctatcttgataggttacctcgtcttgttcatccacgtacgggtcgtttacacacccgcttcaatcaaacggcaacagccaccgggcgcttgtcgtcgagtgacccgaacctccagaatattccagtgcgcacgccgctgggccaacacattcgtaaagcgtttgttgcggaagaaggttggttattacttgcggccgattactcccagatcgaacttcgtgtattggcgcatctctctggcgacgagaatcttaaacgcgtgtttcgcgaaggcaaggatattcacactgaaaccgcagcctggatgttcggggtggacccagccttagtggaccccaagatgcgtcgtgccgccaagaccgtcaactttggcgtactctatggtatgtcagcagcacgtcttagtcaggaattgggcattgactacaaagaagctgaagcgtttatcgagcgctatttccaatcctttccgaaagttcgcgcgtggattgaacgtacgctcgaagaaggtcgcactcgcggctatgtggaaacgttattcgggcgtcgtcgctacgttccagatcttacgtctcgtgtccgctcagtgcgcgaagctgctgagcgtatggcctggaatatgcctgttcagggaacagcggcggacctcatgaagatcgccatggtgaaattgtttccgcgcttgaaacccttaggagcccaccttcttttacaggtgcatgatgaattggtcttggaagtacccgaggatcgcgcagaagaagccaaagcactcgtgaaagaggttatggaaaacgcgtatccgttagatgttccgttggaggtcgaagtgggtgtaggccgtgattggcttgaagcgaaacaagactaatga

SEQ ID NO: 974 - protein, 844 aa, synthetic construct
  REGION 1..844: note = DNA Polymerase Variant
MHHHHHHGGSGMLPLFDLEEPPKRVLLVDGHHLAYRTFYALSLTTSRGEPVQMVYGFARSLLKALKEDGQAVVVVFDAKAPSFRHEAYEAYKAGRAPTPEDFPRQLALVKRLVDLLGLVRLEAPGYEADDVLGTLAKKAEREGMEVCILTGDRDFFQLLSEKVSVLLPDGTLVTPKDVQEKYGVPPERWVDFRALTGDRSDNIPGVAGIGEKTALRLLAEWGSVENLLKNLDRVKPDSLRRKIEAHLEDLRLSLDLARIRTDLPLEVDFKALRRRTPDLEGLRAFLEELELGSLLHEFGLLGGEKPREEAPWPPPEGAFVGFLLSRKEPMWAELLALAAAAEGRVHRATSPVEALADLKEARGFLAKDLAVLALREGVALDPTDDPLLVAYLLDHANTNPERVARRYGGEFTEDAAERALLSERLFQTLFPRLSEKLLWLYQEVERPTSRVLAHMEARGVRLDVPLLEALSFELEKELERLEGEVFRLAGHPFNLNSRDQLEKVLFDELGLTPVTRTEKTGKRSTSAAALEALRGAHPIVELILQYRELSKLKSTYLDRLPRLVHPRTGRLHTRFNQTATATGRLSSSDPNLQNIPVRTPLGQHIRKAFVAEEGWLLLAADYSQIELRVLAHLSGDENLKRVFREGKDIHTETAAWMFGVDPALVDPKMRRAAKTVNFGVLYGMSAARLSQELGIDYKEAEAFIERYFQSFPKVRAWIERTLEEGRTRGYVETLFGRRRYVPDLTSRVRSVREAAERMAWNMPVQGTAADLMKIAMVKLFPRLKPLGAHLLLQVHDELVLEVPEDRAEEAKALVKEVMENAYPLDVPLEVEVGVGRDWLEAKQD

SEQ ID NO: 975 - DNA, 2538 bp, synthetic construct
  misc_feature 1..2538: note = DNA Polymerase Variant
  source 1..2538: mol_type = other DNA
atgcaccatcatcatcatcatggcggtagcggcatgttaccgctgtttgatttggaagaagcaccaaaacgcgtgctgcttgttgacggccatcatctggcgtatcgtaccttctacgcactgagccttacgacctcacgtggtgagcctgtccagatggtgtatgggtttgctcgctccctgctgaaagccctgaaggaagatggtcaagccgtagtagtggttttcgatgcggctgcaccgtcgtttcgtcacgaagcgtacgaggcctataaagctggccgcgcaccgaccccggaagactttccgcgtcagttagcgctcgtcaaacgcctcgtggatttgctgggattagttcgcttggaagctcctggctacgaggcggacgacgtgctcggtacactggccaagaaagcagaacgtgaaggcatggaggtctgcattcttaccggtgatcgcgatttcttccagctgctgtctgagaaagtgagcgttttgctgcccgatggcacgttagtaaccccgaaagatgtgcaagagaaatatggagttccgccagaacgttgggtggactttcgcgcactgactggtgatcgttcagacaacatcccgggcgttgccgggattggtgaaaagacggcgctgcgcctgctggcagaatggggctcggtggaaaatctgctcaagaaccttgatcgcgtgaaacctgatagcttacgccgcaagatcgaagcccacctggaagacttgcgtctgagtctggatcttgcccgtattcgcaccgatctgccgttggaagtagactttaaagctctgcgtcgtcgcacacccgatttagaggggttacgcgcgttcctcgaagaactggagctgggctccctgctgcatgaattcggtttgttgggcggggagaaaccgcgtgaagaagcaccatggccgccgcccgaaggtgcctttgtcggctttcttctgtcacgcaaagagccaatgtgggcggaactgttagctcttgcagccgccgcggaagggcgtgttcaccgcgcgacctctcctgtcgaggccctcgctgacctcaaagaagcacgtggtttcttggcgaaagatttagccgtgcttgcattacgcgaaggcgttggcctcgatccgacggacgacccgcttttggtggcttatttgctcgatcatgcgaataccaacccggaacgtgtcgcccgtcgttacggcggcgagtttactgaagatgcggcagaacgcgcgttgcttagcgaacgcctcttccagacgttatttccacgtctttcggagaaattactctggctctatggtgaagtcgaacgtccattgagtcgcgtgcttgcccatatggaggctcgcggtgtgcgcttagatgttccgttgttagaagcactcagcttcgagttggagaaagaactggaacgtcttgaaggcgaagtctttcgtttagcggggcatcccttcaatctcaactctcgcgaccaattggagaaagtgctctttgatgaattaggtttaacccctgtcacgcgtacagagaagaccggcaaacgttccacttcggcagccgccttggaagcacttcgtggtgctcacccgatcgtcgagttgattttgcagtatcgcgagctcagcaaactcaaatcaacctatcttgataggttacctaagcttgttcatccacgtacgggtcgtttacacacccgcttcaatcaaacggcaacagccaccgggcgcttgtcgtcgagtgacccgaacctccagaatattccagtgcgcacgccgctgggccaacacattcgtaaagcgtttgttgcggaagagggttggttattacttgcggccgattactcccagatcgaacttcgtgtattggcgcatctctctggcgacgagaatcttaaacgtgtgtttcgcgaaggcaaggatattcacactgaaaccgcagcctggatgttcggggtggactcggccttagtggaccccaagatgcgtcgtgccgccaagaccgtcaactttggcgtactctatggtatgtcagcagcacgtcttagtcaggaattgggcattgactacaaagaagctgaagcgtttatcgagcgctatttccaatcctttccgaaagttcgcgcgtggattgaacgtacgctcgaagaaggtcgcactcgcggctatgtggaaacgttattcgggcgtcgtcgctacgttccagatcttacgtctcgtgtccgctcagtgcgcgaagctgctgagcgtatggcctggaatatgcctgttcagggaacagcggcggacctcatgaagatcgccatggtgaaattgtttccgcgcttgaaacccttaggagcccaccttcttttacaggtgcatgatgaattggtcttggaagtacccgaggatcgcgcagaggaagccaaagcgctcgtgaaagaggttatggaaaacgcgtatccgttagatgttccgttggaggtcgaagtgggtgtaggccgtgattggcttgaagcgaaacaagactaatga

SEQ ID NO: 976 - protein, 844 aa, synthetic construct
  REGION 1..844: note = DNA Polymerase Variant
MHHHHHHGGSGMLPLFDLEEAPKRVLLVDGHHLAYRTFYALSLTTSRGEPVQMVYGFARSLLKALKEDGQAVVVVFDAAAPSFRHEAYEAYKAGRAPTPEDFPRQLALVKRLVDLLGLVRLEAPGYEADDVLGTLAKKAEREGMEVCILTGDRDFFQLLSEKVSVLLPDGTLVTPKDVQEKYGVPPERWVDFRALTGDRSDNIPGVAGIGEKTALRLLAEWGSVENLLKNLDRVKPDSLRRKIEAHLEDLRLSLDLARIRTDLPLEVDFKALRRRTPDLEGLRAFLEELELGSLLHEFGLLGGEKPREEAPWPPPEGAFVGFLLSRKEPMWAELLALAAAAEGRVHRATSPVEALADLKEARGFLAKDLAVLALREGVGLDPTDDPLLVAYLLDHANTNPERVARRYGGEFTEDAAERALLSERLFQTLFPRLSEKLLWLYGEVERPLSRVLAHMEARGVRLDVPLLEALSFELEKELERLEGEVFRLAGHPFNLNSRDQLEKVLFDELGLTPVTRTEKTGKRSTSAAALEALRGAHPIVELILQYRELSKLKSTYLDRLPKLVHPRTGRLHTRFNQTATATGRLSSSDPNLQNIPVRTPLGQHIRKAFVAEEGWLLLAADYSQIELRVLAHLSGDENLKRVFREGKDIHTETAAWMFGVDSALVDPKMRRAAKTVNFGVLYGMSAARLSQELGIDYKEAEAFIERYFQSFPKVRAWIERTLEEGRTRGYVETLFGRRRYVPDLTSRVRSVREAAERMAWNMPVQGTAADLMKIAMVKLFPRLKPLGAHLLLQVHDELVLEVPEDRAEEAKALVKEVMENAYPLDVPLEVEVGVGRDWLEAKQD

SEQ ID NO: 977 - DNA, 2538 bp, synthetic construct; identical to SEQ ID NO: 743
  misc_feature 1..2538: note = DNA Polymerase Variant
  source 1..2538: mol_type = other DNA

SEQ ID NO: 978 - protein, 844 aa, synthetic construct; identical to SEQ ID NO: 744
  REGION 1..844: note = DNA Polymerase Variant

SEQ ID NO: 979 - DNA, 2538 bp, synthetic construct
  misc_feature 1..2538: note = DNA Polymerase Variant
  source 1..2538: mol_type = other DNA
atgcaccatcatcatcatcatggcggtagcggcatgttaccgctgtttgatttggaagaaccaccaaaacgcgtgctgcttgttgacggccatcatctggcgtatcgtaccttctacgcactgagccttacgacctcacgtggtgagcctgtccagatggtgtatgggtttgctcgctccctgctgaaagccctgaaggaagatggtcaagccgtagtagtggttttcgatgcgaaagcaccgtcgtttcgtcacgaagcgtacgaggcctataaagctggccgcgcaccgaccccggaagactttccgcgtcagttagcgctcgtcaaacgcctcgtggatttgctgggattagttcgcttggaagctcctggctacgaggcggacgacgtgctcggtacactggccaagaaagcagaacgtgaaggcatggaggtctgcattcttaccggtgatcgcgatttcttccagctgctgtctgagaaagtgagcgttttgctgcccgatggcacgttagtaaccccgaaagatgtgcaagagaaatatggagttccgccagaacgttgggtggactttcgcgcactgactggtgatcgttcagacaacatcccgggcgttgccgggattggtgaaaagacggcgctgcgcctgctggcagaatggggctcggtggaaaatctgctcaagaaccttgatcgtgtgaaacctgatagcttacgccgcaagatcgaagcccacctggaagacttgcgtctgagtctggatcttgcccgtattcgcaccgatctgccgttggaagtagactttaaagctctgcgtcgtcgcacacccgatttagaggggttacgcgcgttcctcgaagaactggagctgggctccctgctgcatgaattcggtttgttgggcggagagaaaccgcgtgaagaagcaccatggccgccgcccgaaggtgcctttgtcggctttcttctgtcacgcaaagagccaatgtgggcggaactgttagctcttgcagccgccgcggaagggcgtgttcaccgcgcgacctctcctgtcgaggccctcgctgacctcaaagaagcaatgggtttcttggcgaaagatttagccgtgcttgcattacgcgaaggcgttgcgctcgatccgacggacgacccgcttttggtggcttatttgctcgatcatgcgaataccaacccggaacgtgtcgcccgtcgttacggcggcgagtttactgaagatgcggcagaacgcgcgttgcttagcgaacgcctcttccagacgttatttccacgtctttcggagaaattactctggctctatcaggaagtcgaacgtccattgagtcgcgtgcttgcccatatggaggctcgcggtgtgcgcttagatgttccgttgttagaagcactcagcttcgagttggagaaagaactggaacgtcttgaaggcgaagtctttcgtttagcggggcatcccttcaatctcaactctcgcgaccaattggagaaagtgctctttgatgaattaggtttaacccctgtcacgcgtacagagaagaccggcaaacgttccacttcggcagccgccttggaagcacttcgtggtgctcacccgatcgtcgagttgattttgcagtatcgcgagctcagcaaactcaaatcaacctatcttgataggttacctcgtcttgttcatccacgtacgggtcgtttacacacccgcttcaatcaaacggcaacagccaccgggcgcttgtcgtcgagtgacccgaacctccagaatattccagtgcgcacgccgctgggccaacacattcgtaaagcgtttgttgcggaagaaggttggttattacttgcggccgattactcccagatcgaacttcgtgtattggcgcatctctctggcgacgagaatcttaaacgcgtgtttcgcgaaggcaaggatattcacactgaaaccgcagcctggatgttcggggtggacccagccttagtggaccccaagatgcgtcgtgccgccaagaccgtcaactttggcgtactctatggtatgtcagcagcacgtcttagtcaggaattgggcattgactacaaagaagctgaagcgtttatcgagcgctatttccaatcctttccgaaagttcgcgcgtggattgaacgtacgctcgaagaaggtcgcactcgcggctatgtggaaacgttattcgggcgtcgtcgctacgttccagatcttacgtctcgtgtccgctcagtgcgcgaagctgctgagcgtatggcctggaatatgcctgttcagggaacagcggcggacctcatgaagatcgccatggtgaaattgtttccgcgcttgaaacccttaggagcccaccttcttttacaggtgcatgatgaattggtcttggaagtacccgaggatcgcgcagaagaagccaaagcactcgtgaaagaggttatggaaaacgcgtatccgttagatgttccgttggaggtcgaagtgggtgtaggccgtgattggcttgaagcgaaacaagactaatga

SEQ ID NO: 980 - protein, 844 aa, synthetic construct
  REGION 1..844: note = DNA Polymerase Variant
MHHHHHHGGSGMLPLFDLEEPPKRVLLVDGHHLAYRTFYALSLTTSRGEPVQMVYGFARSLLKALKEDGQAVVVVFDAKAPSFRHEAYEAYKAGRAPTPEDFPRQLALVKRLVDLLGLVRLEAPGYEADDVLGTLAKKAEREGMEVCILTGDRDFFQLLSEKVSVLLPDGTLVTPKDVQEKYGVPPERWVDFRALTGDRSDNIPGVAGIGEKTALRLLAEWGSVENLLKNLDRVKPDSLRRKIEAHLEDLRLSLDLARIRTDLPLEVDFKALRRRTPDLEGLRAFLEELELGSLLHEFGLLGGEKPREEAPWPPPEGAFVGFLLSRKEPMWAELLALAAAAEGRVHRATSPVEALADLKEAMGFLAKDLAVLALREGVALDPTDDPLLVAYLLDHANTNPERVARRYGGEFTEDAAERALLSERLFQTLFPRLSEKLLWLYQEVERPLSRVLAHMEARGVRLDVPLLEALSFELEKELERLEGEVFRLAGHPFNLNSRDQLEKVLFDELGLTPVTRTEKTGKRSTSAAALEALRGAHPIVELILQYRELSKLKSTYLDRLPRLVHPRTGRLHTRFNQTATATGRLSSSDPNLQNIPVRTPLGQHIRKAFVAEEGWLLLAADYSQIELRVLAHLSGDENLKRVFREGKDIHTETAAWMFGVDPALVDPKMRRAAKTVNFGVLYGMSAARLSQELGIDYKEAEAFIERYFQSFPKVRAWIERTLEEGRTRGYVETLFGRRRYVPDLTSRVRSVREAAERMAWNMPVQGTAADLMKIAMVKLFPRLKPLGAHLLLQVHDELVLEVPEDRAEEAKALVKEVMENAYPLDVPLEVEVGVGRDWLEAKQD

SEQ ID NO: 981 - DNA, 2538 bp, synthetic construct
  misc_feature 1..2538: note = DNA Polymerase Variant
  source 1..2538: mol_type = other DNA
atgcaccatcatcatcatcatggcggtagcggcatgttaccgctgtttgatttggaagaaccaccaaaacgcgtgctgcttgttgacggccatcatctggcgtatcgtaccttctacgcactgagccttacgacctcacgtggtgagcctgtccagatggtgtatgggtttgctcgctccctgctgaaagccctgaaggaagatggtcaagccgtagtagtggttttcgatgcgaaagcaccgtcgtttcgtcacgaagcgtacgaggcctataaagctggccgcgcaccgaccccggaagactttccgcgtcagttagcgctcgtcaaacgcctcgtggatttgctgggattagttcgcttggaagctcctggctacgaggcggacgacgtgctcggtacactggccaagaaagcagaacgtgaaggcatggaggtctgcattcttaccggtgatcgcgatttcttccagctgctgtctgagaaagtgagcgttttgctgcccgatggcacgttagtaaccccgaaagatgtgcaagagaaatatggagttccgccagaacgttgggtggactttcgcgcactgactggtgatcgttcagacaacatcccgggcgttgccgggattggtgaaaagacggcgctgcgcctgctggcagaatggggctcggtggaaaatctgctcaagaaccttgatcgtgtgaaacctgatagcttacgccgcaagatcgaagcccacctggaagacttgcgtctgagtctggatcttgcccgtattcgcaccgatctgccgttggaagtagactttaaagctctgcgtcgtcgcacacccgatttagaggggttacgcgcgttcctcgaagaactggagctgggctccctgctgcatgaattcggtttgttgggcggagagaaaccgcgtgaagaagcaccatggccgccgcccgaaggtgcctttgtcggctttcttctgtcacgcaaagagccaatgtgggcggaactgttagctcttgcagccgccgcggaagggcgtgttcaccgcgcgacctctcctgtcgaggccctcgctgacctcaaagaagcacgtggtttcttggcgaaagatttagccgtgcttgcattacgcgaaggcgttgcgctcgatccgacggacgacccgcttttggtggcttatttgctcgatcatgcgaataccaacccggaacgtgtcgcccgtcgttacggcggctggtttactgaagatgcggcagaacgcgcgttgcttagcgaacgcctcttccagacgttatttccacgtctttcggagaaattactctggctctatcaggaagtcgaacgtccattgagtcgcgtgcttgcccatatggaggctcgcggtgtgcgcttagatgttccgttgttagaagcactcagcttcgagttggagaaagaactggaacgtcttgaaggcgaagtctttcgtttagcggggcatcccttcaatctcaactctcgcgaccaattggagaaagtgctctttgatgaattaggtttaacccctgtcacgcgtacagagaagaccggcaaacgttccacttcggcagccgccttggaagcacttcgtggtgctcacccgatcgtcgagttgattttgcagtatcgcgagctcagcaaactcaaatcaacctatcttgataggttacctcgtcttgttcatccacgtacgggtcgtttacacacccgcttcaatcaaacggcaacagccaccgggcgcttgtcgtcgagtgacccgaacctccagaatattccagtgcgcacgccgctgggccaacacattcgtaaagcgtttgttgcggaagaaggttggttattacttgcggccgattactcccagatcgaacttcgtgtattggcgcatctctctggcgacgagaatcttaaacgcgtgtttcgcgaaggcaaggatattcacactgaaaccgcagcctggatgttcggggtggacccagccttagtggaccccaagatgcgtcgtgccgccaagaccgtcaactttggcgtactctatggtatgtcagcagcacgtcttagtcaggaattgggcattgactacaaagaagctgaagcgtttatcgagcgctatttccaatcctttccgaaagttcgcgcgtggattgaacgtacgctcgaagaaggtcgcactcgcggctatgtggaaacgttattcgggcgtcgtcgctacgttccagatcttacgtctcgtgtccgctcagtgcgcgaagctgctgagcgtatggcctggaatatgcctgttcagggaacagcggcggacctcatgaagatcgccatggtgaaattgtttccgcgcttgaaacccttaggagcccaccttcttttacaggtgcatgatgaattggtcttggaagtacccgaggatcgcgcagaagaagccaaagcactcgtgaaagaggttatggaaaacgcgtatccgttagatgttccgttggaggtcgaagtgggtgtaggccgtgattggcttgaagcgaaacaagactaatga

SEQ ID NO: 982 - protein, 844 aa, synthetic construct
  REGION 1..844: note = DNA Polymerase Variant
MHHHHHHGGSGMLPLFDLEEPPKRVLLVDGHHLAYRTFYALSLTTSRGEPVQMVYGFARSLLKALKEDGQAVVVVFDAKAPSFRHEAYEAYKAGRAPTPEDFPRQLALVKRLVDLLGLVRLEAPGYEADDVLGTLAKKAEREGMEVCILTGDRDFFQLLSEKVSVLLPDGTLVTPKDVQEKYGVPPERWVDFRALTGDRSDNIPGVAGIGEKTALRLLAEWGSVENLLKNLDRVKPDSLRRKIEAHLEDLRLSLDLARIRTDLPLEVDFKALRRRTPDLEGLRAFLEELELGSLLHEFGLLGGEKPREEAPWPPPEGAFVGFLLSRKEPMWAELLALAAAAEGRVHRATSPVEALADLKEARGFLAKDLAVLALREGVALDPTDDPLLVAYLLDHANTNPERVARRYGGWFTEDAAERALLSERLFQTLFPRLSEKLLWLYQEVERPLSRVLAHMEARGVRLDVPLLEALSFELEKELERLEGEVFRLAGHPFNLNSRDQLEKVLFDELGLTPVTRTEKTGKRSTSAAALEALRGAHPIVELILQYRELSKLKSTYLDRLPRLVHPRTGRLHTRFNQTATATGRLSSSDPNLQNIPVRTPLGQHIRKAFVAEEGWLLLAADYSQIELRVLAHLSGDENLKRVFREGKDIHTETAAWMFGVDPALVDPKMRRAAKTVNFGVLYGMSAARLSQELGIDYKEAEAFIERYFQSFPKVRAWIERTLEEGRTRGYVETLFGRRRYVPDLTSRVRSVREAAERMAWNMPVQGTAADLMKIAMVKLFPRLKPLGAHLLLQVHDELVLEVPEDRAEEAKALVKEVMENAYPLDVPLEVEVGVGRDWLEAKQD

SEQ ID NO: 983 - DNA, 2538 bp, synthetic construct
  misc_feature 1..2538: note = DNA Polymerase Variant
  source 1..2538: mol_type = other DNA
atgcaccatcatcatcatcatggcggtagcggcatgttaccgctgtttgatttggaagaaccaccaaaacgcgtgctgcttgttgacggccatcatctggcgtatcgtaccttctacgcactgagccttacgacctcacgtggtgagcctgtccagatggtgtatgggtttgctcgctccctgctgaaagccctgaaggaagatggtcaagccgtagtagtggttttcgatgcgaaagcaccgtcgtttcgtcacgaagcgtacgaggcctataaagctggccgcgcaccgaccccggaagactttccgcgtcagttagcgctcgtcaaacgcctcgtggatttgctgggattagttcgcttggaagctcctggctacgaggcggacgacgtgctcggtacactggccaagaaagcagaacgtgaaggcatggaggtctgcattcttaccggtgatcgcgatttcttccagctgctgtctgagaaagtgagcgttttgctgcccgatggcacgttagtaaccccgaaagatgtgcaagagaaatatggagttccgccagaacgttgggtggactttcgcgcactgactggtgatcgttcagacaacatcccgggcgttgccgggattggtgaaaagacggcgctgcgcctgctggcagaatggggctcggtggaaaatctgctcaagaaccttgatcgtgtgaaacctgatagcttacgccgcaagatcgaagcccacctggaagacttgcgtctgagtctggatcttgcccgtattcgcaccgatctgccgttggaagtagactttaaagctctgcgtcgtcgcacacccgatttagaggggttacgcgcgttcctcgaagaactggagctgggctccctgctgcatgaattcggtttgttgggcggagagaaaccgcgtgaagaagcaccatggccgccgcccgaaggtgcctttgtcggctttcttctgtcacgcaaagagccaatgtgggcggaactgttagctcttgcagccgccgcggaagggcgtgttcaccgcgcgacctctcctgtcgaggccctcgctgacctcaaagaagcacgtggtttcttggcgaaagatttagccgtgcttgcattacgcgaaggcgttgcgctcgatccgacggacgacccgcttttggtggcttatttgctcgatcatgcgaataccaacccggaacgtgtcgcccgtcgttacggcggcgagtttactgaagatgcggcagaacgcgcgttgcttagcgaacgcctcttccagacgttatttccacgtctttcggagaaattactctggctctatcaggaagtcgaacgtccattgagtcgcgtgcttgccgatatggaggctcgcggtgtgcgcttagatgttccgttgttagaagcactcagcttcgagttggagaaagaactggaacgtcttgaaggcgaagtctttcgtttagcggggcatcccttcaatctcaactctcgcgaccaattggagaaagtgctctttgatgaattaggtttaacccctgtcacgcgtacagagaagaccggcaaacgttccacttcggcagccgccttggaagcacttcgtggtgctcacccgatcgtcgagttgattttgcagtatcgcgagctcagcaaactcaaatcaacctatcttgataggttacctcgtcttgttcatccacgtacgggtcgtttacacacccgcttcaatcaaacggcaacagccaccgggcgcttgtcgtcgagtgacccgaacctccagaatattccagtgcgcacgccgctgggccaacacattcgtaaagcgtttgttgcggaagaaggttggttattacttgcggccgattactcccagatcgaacttcgtgtattggcgcatctctctggcgacgagaatcttaaacgcgtgtttcgcgaaggcaaggatattcacactgaaaccgcagcctggatgttcggggtggacccagccttagtggaccccaagatgcgtcgtgccgccaagaccgtcaactttggcgtactctatggtatgtcagcagcacgtcttagtcaggaattgggcattgactacaaagaagctgaagcgtttatcgagcgctatttccaatcctttccgaaagttcgcgcgtggattgaacgtacgctcgaagaaggtcgcactcgcggctatgtggaaacgttattcgggcgtcgtcgctacgttccagatcttacgtctcgtgtccgctcagtgcgcgaagctgctgagcgtatggcctggaatatgcctgttcagggaacagcggcggacctcatgaagatcgccatggtgaaattgtttccgcgcttgaaacccttaggagcccaccttcttttacaggtgcatgatgaattggtcttggaagtacccgaggatcgcgcagaagaagccaaagcactcgtgaaagaggttatggaaaacgcgtatccgttagatgttccgttggaggtcgaagtgggtgtaggccgtgattggcttgaagcgaaacaagactaatga

SEQ ID NO: 984 - protein, 844 aa, synthetic construct
  REGION 1..844: note = DNA Polymerase Variant
MHHHHHHGGSGMLPLFDLEEPPKRVLLVDGHHLAYRTFYALSLTTSRGEPVQMVYGFARSLLKALKEDGQAVVVVFDAKAPSFRHEAYEAYKAGRAPTPEDFPRQLALVKRLVDLLGLVRLEAPGYEADDVLGTLAKKAEREGMEVCILTGDRDFFQLLSEKVSVLLPDGTLVTPKDVQEKYGVPPERWVDFRALTGDRSDNIPGVAGIGEKTALRLLAEWGSVENLLKNLDRVKPDSLRRKIEAHLEDLRLSLDLARIRTDLPLEVDFKALRRRTPDLEGLRAFLEELELGSLLHEFGLLGGEKPREEAPWPPPEGAFVGFLLSRKEPMWAELLALAAAAEGRVHRATSPVEALADLKEARGFLAKDLAVLALREGVALDPTDDPLLVAYLLDHANTNPERVARRYGGEFTEDAAERALLSERLFQTLFPRLSEKLLWLYQEVERPLSRVLADMEARGVRLDVPLLEALSFELEKELERLEGEVFRLAGHPFNLNSRDQLEKVLFDELGLTPVTRTEKTGKRSTSAAALEALRGAHPIVELILQYRELSKLKSTYLDRLPRLVHPRTGRLHTRFNQTATATGRLSSSDPNLQNIPVRTPLGQHIRKAFVAEEGWLLLAADYSQIELRVLAHLSGDENLKRVFREGKDIHTETAAWMFGVDPALVDPKMRRAAKTVNFGVLYGMSAARLSQELGIDYKEAEAFIERYFQSFPKVRAWIERTLEEGRTRGYVETLFGRRRYVPDLTSRVRSVREAAERMAWNMPVQGTAADLMKIAMVKLFPRLKPLGAHLLLQVHDELVLEVPEDRAEEAKALVKEVMENAYPLDVPLEVEVGVGRDWLEAKQD

SEQ ID NO: 985 - DNA, 2538 bp, synthetic construct
  misc_feature 1..2538: note = DNA Polymerase Variant
  source 1..2538: mol_type = other DNA
atgcaccatcatcatcatcatggcggtagcggcatgttaccgctgtttgatttggaagaaccaccaaaacgcgtgctgcttgttgacggccatcatctggcgtatcgtaccttctacgcactgagccttacgacctcacgtggtgagcctgtccagatggtgtatgggtttgctcgctccctgctgaaagccctgaaggaagatggtcaagccgtagtagtggttttcgatgcgaaagcaccgtcgtttcgtcacgaagcgtacgaggcctataaagctggccgcgcaccgaccccggaagactttccgcgtcagttagcgctcgtcaaacgcctcgtggatttgctgggattagttcgcttggaagctcctggctacgaggcggacgacgtgctcggtacactggccaagaaagcagaacgtgaaggcatggaggtctgcattcttaccggtgatcgcgatttcttccagctgctgtctgagaaagtgagcgttttgctgcccgatggcacgttagtaaccccgaaagatgtgcaagagaaatatggagttccgccagaacgttgggtggactttcgcgcactgactggtgatcgttcagacaacatcccgggcgttgccgggattggtgaaaagacggcgctgcgcctgctggcagaatggggctcggtggaaaatctgctcaagaaccttgatcgtgtgaaacctgatagcttacgccgcaagatcgaagcccacctggaagacttgcgtctgagtctggatcttgcccgtattcgcaccgatctgccgttggaagtagactttaaagctctgcgtcgtcgcacacccgatttagaggggttacgcgcgttcctcgaagaactggagctgggctccctgctgcatgaattcggtttgttgggcggggagaaaccgcgtgaagaagcaccatggccgccgcccgaaggtgcctttgtcggctttcttctgtcacgcaaagagccaatgtgggcggaactgttagctcttgtagccgccgcggaagggcgtgttcaccgcgcgacctctcctgtcgaggccctcgctgacctcaaagaagcacgtggtttcttggcgaaagatttagccgtgcttgcattacgcgaaggcgttgcgctcgatccgacggacgacccgcttttggtggcttatttgctcgatcatgcgaataccaacccggaacgtgtcgcccgtcgttacggcggcgagtttactgaagatgcggcagaacgcgcgttgcttagcgaacgcctcttccagacgttatttccacgtctttcggagaaattactctggctctatcaggaagtcgaacgtccattgagtcgcgtgcttgcccatatggaggctcgcggtgtgcgcttagatgttccgttgttagaagcactcagcttcgagttggagaaagaactggaacgtcttgaaggcgaagtctttcgtttagcggggcatcccttcaatctcaactctcgcgaccaattggagaaagtgctctttgatgaattaggtttaacccctgtcacgcgtacagagaagaccggcaaacgttccacttcggcagccgccttggaagcacttcgtggtgctcacccgatcgtcgagttgattttgcagtatcgcgagctcagcaaactcaaatcaacctatcttgataggttacctcgtcttgttcatccacgtacgggtcgtttacacacccgcttcaatcaaacggcaacagccaccgggcgcttgtcgtcgagtgacccgaacctccagaatattccagtgcgcacgccgctgggccaacacattcgtaaagcgtttgttgcggaagagggttggttattacttgcggccgattactcccagatcgaacttcgtgtattggcgcatctctctggcgacgagaatcttaaacgcgtgtttcgcgaaggcaaggatattcacactgaaaccgcagcctggatgttcggggtggacccagccttagtggaccccaagatgcgtcgtgccgccaagaccgtcaactttggcgtactctatggtatgtcagcagcacgtcttagtcaggaattgggcattgactacaaagaggctgaagcgtttatcgagcgctatttccaatcctttccgaaagttcgcgcgtggattgaacgtacgctcgaagaaggtcgcactcgcggctatgtggaaacgttattcgggcgtcgtcgctacgttccagatcttacgtctcgtgtccgctcagtgcgcgaagctgctgagcgtatggcctggaatatgcctgttcagggaacagcggcggacctcatgaagatcgccatggtgaaattgtttccgcgcttgaaacccttaggagcccaccttcttttacaggtgcatgatgaattggtcttggaagtacccgaggatcgcgcagaggaagccaaatcgctcgtgaaagaggttatggaaaacgcgtatccgttagatgttccgttggaggtcgaagtgggtgtaggccgtgattggcttgaagcgaaacaagactaatga

SEQ ID NO: 986 - protein, 844 aa, synthetic construct
  REGION 1..844: note = DNA Polymerase Variant
MHHHHHHGGSGMLPLFDLEEPPKRVLLVDGHHLAYRTFYALSLTTSRGEPVQMVYGFARSLLKALKEDGQAVVVVFDAKAPSFRHEAYEAYKAGRAPTPEDFPRQLALVKRLVDLLGLVRLEAPGYEADDVLGTLAKKAEREGMEVCILTGDRDFFQLLSEKVSVLLPDGTLVTPKDVQEKYGVPPERWVDFRALTGDRSDNIPGVAGIGEKTALRLLAEWGSVENLLKNLDRVKPDSLRRKIEAHLEDLRLSLDLARIRTDLPLEVDFKALRRRTPDLEGLRAFLEELELGSLLHEFGLLGGEKPREEAPWPPPEGAFVGFLLSRKEPMWAELLALVAAAEGRVHRATSPVEALADLKEARGFLAKDLAVLALREGVALDPTDDPLLVAYLLDHANTNPERVARRYGGEFTEDAAERALLSERLFQTLFPRLSEKLLWLYQEVERPLSRVLAHMEARGVRLDVPLLEALSFELEKELERLEGEVFRLAGHPFNLNSRDQLEKVLFDELGLTPVTRTEKTGKRSTSAAALEALRGAHPIVELILQYRELSKLKSTYLDRLPRLVHPRTGRLHTRFNQTATATGRLSSSDPNLQNIPVRTPLGQHIRKAFVAEEGWLLLAADYSQIELRVLAHLSGDENLKRVFREGKDIHTETAAWMFGVDPALVDPKMRRAAKTVNFGVLYGMSAARLSQELGIDYKEAEAFIERYFQSFPKVRAWIERTLEEGRTRGYVETLFGRRRYVPDLTSRVRSVREAAERMAWNMPVQGTAADLMKIAMVKLFPRLKPLGAHLLLQVHDELVLEVPEDRAEEAKSLVKEVMENAYPLDVPLEVEVGVGRDWLEAKQD

SEQ ID NO: 987 - DNA, 2538 bp, synthetic construct
  misc_feature 1..2538: note = DNA Polymerase Variant
  source 1..2538: mol_type = other DNA
atgcaccatcatcatcatcatggcggtagcggcatgttaccgctgtttgatttggaagaaaacccaaaacgcgtgctgcttgttgacggccatcatctggcgtatcgtaccttctacgcactgagccttacgacctcacgtggtgagcctgtccagatggtgtatgggtttgctcgctccctgctgaaagccctgaaggaagatggtcaagccgtagtagtggttttcgatgcgcgcgcaccgtcgtttcgtcacgaagcgtacgaggcctataaagctggccgcgcaccgaccccggaagactttccgcgtcagttagcgctcgtcaaacgcctcgtggatttgctgggattagttcgcttggaagctcctggctacgaggcggacgacgtgctcggtacactggccaagaaagcagaacgtgaaggcatggaggtctgcattcttaccggtgatcgcgatttcttccagctgctgtctgagaaagtgagcgttttgctgcccgatggcacgttagtaaccccgaaagatgtgcaagagaaatatggagttccgccagaacgttgggtggactttcgcgcactgactggtgatcgttcagacaacatcccgggcgttgccgggattggtgaaaagacggcgctgcgcctgctggcagaatggggctcggtggaaaatctgctcaagaaccttgatcgtgtgaaacctgatagcttacgccgcaagatcgaagcccacctggaagacttgcgtctgagtctggatcttgcccgtattcgcaccgatctgccgttggaagtagactttaaagctctgcgtcgtcgcacacccgatttagaggggttacgcgcgttcctcgaagaactggagctgggctccctgctgcatgaattcggtttgttgggcggagagaaaccgcgtgaagaagcaccatggccgccgcccgaaggtgcctttgtcggctttcttctgtcacgcaaagagccaatgtgggcggaactgttagctcttgtagccgccgcggaagggcgtgttcaccgcgcgacctctcctgtcgaggccctcgctgacctcaaagaagcacgtggtttcttggcgaaagatttagccgtgcttgcattacgcgaaggcgttgcgctcgatccgacggacgacccgcttttggtggcttatttgctcgatcatgcgaataccaacccggaacgtgtcgcccgtcgttacggcggcgagtttactgaagatgcggcagaacgcgcgttgcttagcgaacgcctcttccagacgttatttccacgtctttcggagaaattactctggctctatcaagaagtcgaacgtccattgagtcgcgtgcttgcccatatggaggctcgcggtgtgcgcttagatgttccgttgttagaagcactcagcttcgagttggagaaagaactggaacgtcttgaaggcgaagtctttcgtttagcggggcatcccttcaatctcaactctcgcgaccaattggagaaagtgctctttgatgaattaggtttaacccctgtcacgcgtacagagaagaccggcaaacgttccacttcggcagccgccttggaagcacttcgtggtgctcacccgatcgtcgagttgattttgcagtatcgcgagctcagcaaactcaaatcaacctatcttgataggttacctcgtcttgttcatccacgtacgggtcgtttacacacccgcttcaatcaaacggcaacagccaccgggcgcttgtcgtcgagtgacccgaacctccagaatattccagtgcgcacgccgctgggccaacacattcgtaaagcgtttgttgcggaagagggttggttattacttgcggccgattactcccagatcgaacttcgtgtattggcgcatctctctggcgacgagaatcttaaacgcgtgtttcgcgaaggcaaggatattcacactgaaaccgcagcctggatgttcggggtggacccggccttagtggaccccaagatgcgtcgtgccgccaagaccgtcaactttggcgtactctatggtatgtcagcagcacgtcttagtcaggaattgggcattgactacaaagaagctgaagcgtttatcgagcgctatttccaatcctttccgaaagttcgcgcgtggattgaacgtacgctcgaagaaggtcgcactcgcggctatgtggaaacgttattcgggcgtcgtcgctacgttccagatcttacgtctcgtgtccgctcagtgcgcgaagctgctgagcgtatggcctggaatatgcctgttcagggaacagcggcggacctcatgaagatcgccatggtgaaattgtttccgcgcttgaaacccttaggagcccaccttcttttacaggtgcatgatgaattggtcttggaagtacccgaggatcgcgcagaagaagccaaagcactcgtgaaagaggttatggaaaacgcgtatccgttagatgttccgttggaggtcgaagtgggtgtaggccgtgattggcttgaagcgaaacaagactaatga

SEQ ID NO: 988 - protein, 844 aa, synthetic construct
  REGION 1..844: note = DNA Polymerase Variant
MHHHHHHGGSGMLPLFDLEENPKRVLLVDGHHLAYRTFYALSLTTSRGEPVQMVYGFARSLLKALKEDGQAVVVVFDARAPSFRHEAYEAYKAGRAPTPEDFPRQLALVKRLVDLLGLVRLEAPGYEADDVLGTLAKKAEREGMEVCILTGDRDFFQLLSEKVSVLLPDGTLVTPKDVQEKYGVPPERWVDFRALTGDRSDNIPGVAGIGEKTALRLLAEWGSVENLLKNLDRVKPDSLRRKIEAHLEDLRLSLDLARIRTDLPLEVDFKALRRRTPDLEGLRAFLEELELGSLLHEFGLLGGEKPREEAPWPPPEGAFVGFLLSRKEPMWAELLALVAAAEGRVHRATSPVEALADLKEARGFLAKDLAVLALREGVALDPTDDPLLVAYLLDHANTNPERVARRYGGEFTEDAAERALLSERLFQTLFPRLSEKLLWLYQEVERPLSRVLAHMEARGVRLDVPLLEALSFELEKELERLEGEVFRLAGHPFNLNSRDQLEKVLFDELGLTPVTRTEKTGKRSTSAAALEALRGAHPIVELILQYRELSKLKSTYLDRLPRLVHPRTGRLHTRFNQTATATGRLSSSDPNLQNIPVRTPLGQHIRKAFVAEEGWLLLAADYSQIELRVLAHLSGDENLKRVFREGKDIHTETAAWMFGVDPALVDPKMRRAAKTVNFGVLYGMSAARLSQELGIDYKEAEAFIERYFQSFPKVRAWIERTLEEGRTRGYVETLFGRRRYVPDLTSRVRSVREAAERMAWNMPVQGTAADLMKIAMVKLFPRLKPLGAHLLLQVHDELVLEVPEDRAEEAKALVKEVMENAYPLDVPLEVEVGVGRDWLEAKQD

SEQ ID NO: 989 - DNA, 2538 bp, synthetic construct
  misc_feature 1..2538: note = DNA Polymerase Variant
  source 1..2538: mol_type = other DNA
atgcaccatcatcatcatcatggcggtagcggcatgttaccgctgtttgatttggaagaagcaccaaaacgcgtgctgcttgttgacggccatcatctggcgtatcgtaccttctacgcactgagccttacgacctcacgtggtgagcctgtccagatggtgtatgggtttgctcgctccctgctgaaagccctgaaggaagatggtcaagccgtagtagtggttttcgatgcgaaagcaccgtcgtttcgtcacgaagcgtacgaggcctataaagctggccgcgcaccgaccccggaagactttccgcgtcagttagcgctcgtcaaacgcctcgtggatttgctgggattagttcgcttggaagctcctggctacgaggcggacgacgtgctcggtacactggccaagaaagcagaacgtgaaggcatggaggtctgcattcttaccggtgatcgcgatttcttccagctgctgtctgagaaagtgagcgttttgctgcccgatggcacgttagtaaccccgaaagatgtgcaagagaaatatggagttccgccagaacgttgggtggactttcgcgcactgactggtgatcgttcagacaacatcccgggcgttgccgggattggtgaaaagacggcgctgcgcctgctggcagaatggggctcggtggaaaatctgctcaagaaccttgatcgtgtgaaacctgatagcttacgccgcaagatcgaagcccacctggaagacttgcgtctgagtctggatcttgcccgtattcgcaccgatctgccgttggaagtagactttaaagctctgcgtcgtcgcacacccgatttagaggggttacgcgcgttcctcgaagaactggagctgggctccctgctgcatgaattcggtttgttgggcggggagaaaccgcgtgaagaagcaccatggccgccgcccgaaggtgcctttgtcggctttcttctgtcacgcaaagagccaatgtgggcggaactgttagctcttgcagccgccgcggaagggcgtgttcaccgcgcgacctctcctgtcgaggccctcgctgacctcaaagaagcacgcggtttcttggcgaaagatttagccgtgcttgcattacgcgaaggcgttgccctcgatccgacggacgacccgcttttggtggcttatttgctcgatcatgcgaataccaacccggaacgtgtcgcccgtcgttacggcggcgagtttactgaagatgcggcagaacgcgcgttgcttagcgaacgcctcttccagacgttatttccacgtctttcggagaaattactctggctctatcaagaagtcgaacgtccattgagtcgcgtgcttgcccatatggaggctcgcggtgtgcgcttagatgttccgttgttagaagcactcagcttcgagttggagaaagaactggaacgtcttgaaggcgaagtctttcgtttagcggggcatcccttcaatctcaactctcgcgaccaattggagaaagtgctctttgatgaattaggtttaacccctgtcacgcgtacagagaagaccggcaaacgttccacttcggcagccgccttggaagcacttcgtggtgctcacccgatcgtcgagttgattttgcagtatcgcgagctcagcaaactcaaatcaacctatcttgataggttacctcgtcttgttcatccacgtacgggtcgtttacacacccgcttcaatcaaacggcaacagccaccgggcgcttgtcgtcgagtgacccgaacctccagaatattccagtgcgcacgccgctgggccaacacattcgtaaagcgtttgttgcggaagagggttggttattacttgcggccgattactcccagatcgaacttcgtgtattggcgcatctctctggcgacgagaatcttaaacgcgtgtttcgcgaaggcaaggatattcacactgaaaccgcagcctggatgttcggggtggactcggccttagtggaccccaagatgcgtcgtgccgccaagaccgtcaactttggcgtactctatggtatgtcagcagcacgtcttagtcaggaattgggcattgactacaaagaagctgaagcgtttatcgagcgctatttccaatcctttccgaaagttcgcgcgtggattgaacgtacgctcgaagaaggtcgcactcgcggctatgtggaaacgttattcgggcgtcgtcgctacgttccagatcttacgtctcgtgtccgctcagtgcgcgaagctgctgagcgtatggcctggaatatgcctgttcagggaacagcggcggacctcatgaagatcgccatggtgaaattgtttccgcgcttgaaacccttaggagcccaccttcttttacaggtgcatgatgaattggtcttggaagtacccgaggatcgcgcatacgaagccaaatcgctcgtgaaagaggttatggaaaacgcgtatccgttagatgttccgttggaggtcgaagtgggtgtaggccgtgattggcttgaagcgaaacaagactaatga

SEQ ID NO: 990 - protein, 844 aa, synthetic construct
  REGION 1..844: note = DNA Polymerase Variant
MHHHHHHGGSGMLPLFDLEEAPKRVLLVDGHHLAYRTFYALSLTTSRGEPVQMVYGFARSLLKALKEDGQAVVVVFDAKAPSFRHEAYEAYKAGRAPTPEDFPRQLALVKRLVDLLGLVRLEAPGYEADDVLGTLAKKAEREGMEVCILTGDRDFFQLLSEKVSVLLPDGTLVTPKDVQEKYGVPPERWVDFRALTGDRSDNIPGVAGIGEKTALRLLAEWGSVENLLKNLDRVKPDSLRRKIEAHLEDLRLSLDLARIRTDLPLEVDFKALRRRTPDLEGLRAFLEELELGSLLHEFGLLGGEKPREEAPWPPPEGAFVGFLLSRKEPMWAELLALAAAAEGRVHRATSPVEALADLKEARGFLAKDLAVLALREGVALDPTDDPLLVAYLLDHANTNPERVARRYGGEFTEDAAERALLSERLFQTLFPRLSEKLLWLYQEVERPLSRVLAHMEARGVRLDVPLLEALSFELEKELERLEGEVFRLAGHPFNLNSRDQLEKVLFDELGLTPVTRTEKTGKRSTSAAALEALRGAHPIVELILQYRELSKLKSTYLDRLPRLVHPRTGRLHTRFNQTATATGRLSSSDPNLQNIPVRTPLGQHIRKAFVAEEGWLLLAADYSQIELRVLAHLSGDENLKRVFREGKDIHTETAAWMFGVDSALVDPKMRRAAKTVNFGVLYGMSAARLSQELGIDYKEAEAFIERYFQSFPKVRAWIERTLEEGRTRGYVETLFGRRRYVPDLTSRVRSVREAAERMAWNMPVQGTAADLMKIAMVKLFPRLKPLGAHLLLQVHDELVLEVPEDRAYEAKSLVKEVMENAYPLDVPLEVEVGVGRDWLEAKQD

SEQ ID NO: 991 - DNA, 2538 bp, synthetic construct
  misc_feature 1..2538: note = DNA Polymerase Variant
  source 1..2538: mol_type = other DNA
atgcaccatcatcatcatcatggcggtagcggcatgttaccgctgtttgatttggaagaaccaccaaaacgcgtgctgcttgttgacggccatcatctggcgtatcgtaccttctacgcactgagccttacgacctcacgtggtgagcctgtccagatggtgtatgggtttgctcgctccctgctgaaagccctgaaggaagatggtcaagccgtagtagtggttttcgatgcgaaagcaccgtcgtttcgtcacgaagcgtacgaggcctataaagctggccgcgcaccgaccccggaagactttccgcgtcagttagcgctcgtcaaacgcctcgtggatttgctgggattagttcgcttggaagctcctggctacgaggcggacgacgtgctcggtacactggccaagaaagcagaacgtgaaggcatggaggtctgcattcttaccggtgatcgcgatttcttccagctgctgtctgagaaagtgagcgttttgctgcccgatggcacgttagtaaccccgaaagatgtgcaagagaaatatggagttccgccagaacgttgggtggactttcgcgcactgactggtgatcgttcagacaacatcccgggcgttgccgggattggtgaaaagacggcgctgcgcctgctggcagaatggggctcggtggaaaatctgctcaagaaccttgatcgtgtgaaacctgatagcttacgccgcaagatcgaagcccacctggaagacttgcgtctgagtctggatcttgcccgtattcgcaccgatctgccgttggaagtagactttaaagctctgcgtcgtcgcacacccgatttagaggggttacgcgcgttcctcgaagaactggagctgggctccctgctgcatgaattcggtttgttgggcggagagaaaccgcgtgaagaagcaccatggccgccgcccgaaggtgcctttgtcggctttcttctgtcacgcaaagagccaatgtgggcggaactgttagctcttgcagccgccgcggaagggcgtgttcaccgcgcgacctctcctgtcgaggccctcgctgacctcaaagaagcacgtggtttcttggcgaaagatttagccgtgcttgcattacgcgaaggcgttgcgctcgatccgacggacgacccgcttttggtggcttatttgctcgatcatgcgaataccaacccggaacgtgtcgcccgtcgttacggcggcgagtttactgaagatgcggcagaacgcgcgttgcttagcgaacgcctcttccagacgttatttccacgtctttcgaagaaattactctggctctatcaggaagtcgaacgtccattgagtcgcgtgcttgcccatatggaggctcgcggtgtgcgcttagatgttccgttgttagaagcactcagcttcgagttggagaaagaactggaacgtcttgaaggcgaagtctttcgtttagcggggcatcccttcaatctcaactctcgcgaccaattggagaaagtgctctttgatgaattaggtttaacccctgtcacgcgtacagagaagaccggcaaacgttccacttcggcagccgccttggaagcacttcgtggtgctcacccgatcgtcgagttgattttgcagtatcgcgagctcagcaaactcaaatcaacctatcttgataggttacctcgtcttgttcatccacgtacgggtcgtttacacacccgcttcaatcaaacggcaacagccaccgggcgcttgtcgtcgagtgacccgaacctccagaatattccagtgcgcacgccgctgggccaacacattcgtaaagcgtttgttgcggaagaaggttggttattacttgcggccgattactcccagatcgaacttcgtgtattggcgcatctctctggcgacgagaatcttaaacgcgtgtttcgcgaaggcaaggatattcacactgaaaccgcagcctggatgttcggggtggacccagccttagtggaccccaagatgcgtcgtgccgccaagaccgtcaactttggcgtactctatggtatgtcagcagcacgtcttagtcaggaattgggcattgactacaaagaagctgaagcgtttatcgagcgctatttccaatcctttccgaaagttcgcgcgtggattgaacgtacgctcgaagaaggtcgcactcgcggctatgtggaaacgttattcgggcgtcgtcgctacgttccagatcttacgtctcgtgtccgctcagtgcgcgaagctgctgagcgtatggcctggaatatgcctgttcagggaacagcggcggacctcatgaagatcgccatggtgaaattgtttccgcgcttgaaacccttaggagcccaccttcttttacaggtgcatgatgaattggtcttggaagtacccgaggatcgcgcagaagaagccaaagcactcgtgaaagaggttatggaaaacgcgtatccgttagatgttccgttggaggtcgaagtgggtgtaggccgtgattggcttgaagcgaaacaagactaatga

SEQ ID NO: 992 - protein, 844 aa, synthetic construct
  REGION 1..844: note = DNA Polymerase Variant
MHHHHHHGGSGMLPLFDLEEPPKRVLLVDGHHLAYRTFYALSLTTSRGEPVQMVYGFARSLLKALKEDGQAVVVVFDAKAPSFRHEAYEAYKAGRAPTPEDFPRQLALVKRLVDLLGLVRLEAPGYEADDVLGTLAKKAEREGMEVCILTGDRDFFQLLSEKVSVLLPDGTLVTPKDVQEKYGVPPERWVDFRALTGDRSDNIPGVAGIGEKTALRLLAEWGSVENLLKNLDRVKPDSLRRKIEAHLEDLRLSLDLARIRTDLPLEVDFKALRRRTPDLEGLRAFLEELELGSLLHEFGLLGGEKPREEAPWPPPEGAFVGFLLSRKEPMWAELLALAAAAEGRVHRATSPVEALADLKEARGFLAKDLAVLALREGVALDPTDDPLLVAYLLDHANTNPERVARRYGGEFTEDAAERALLSERLFQTLFPRLSKKLLWLYQEVERPLSRVLAHMEARGVRLDVPLLEALSFELEKELERLEGEVFRLAGHPFNLNSRDQLEKVLFDELGLTPVTRTEKTGKRSTSAAALEALRGAHPIVELILQYRELSKLKSTYLDRLPRLVHPRTGRLHTRFNQTATATGRLSSSDPNLQNIPVRTPLGQHIRKAFVAEEGWLLLAADYSQIELRVLAHLSGDENLKRVFREGKDIHTETAAWMFGVDPALVDPKMRRAAKTVNFGVLYGMSAARLSQELGIDYKEAEAFIERYFQSFPKVRAWIERTLEEGRTRGYVETLFGRRRYVPDLTSRVRSVREAAERMAWNMPVQGTAADLMKIAMVKLFPRLKPLGAHLLLQVHDELVLEVPEDRAEEAKALVKEVMENAYPLDVPLEVEVGVGRDWLEAKQD

SEQ ID NO: 993 - DNA, 2538 bp, synthetic construct
  misc_feature 1..2538: note = DNA Polymerase Variant
  source 1..2538: mol_type = other DNA
atgcaccatcatcatcatcatggcggtagcggcatgttaccgctgtttgatttggaagaagcaccaaaacgcgtgctgcttgttgacggccatcatctggcgtatcgtaccttctacgcactgagccttacgacctcacgtggtgagcctgtccagatggtgtatgggtttgctcgctccctgctgaaagccctgaaggaagatggtcaagccgtagtagtggttttcgatgcgaaagcaccgtcgtttcgtcacgaagcgtacgaggcctataaagctggccgcgcaccgaccccggaagactttccgcgtcagttagcgctcgtcaaacgcctcgtggatttgctgggattagttcgcttggaagctcctggctacgaggcggacgacgtgctcggtacactggccaagaaagcagaacgtgaaggcatggaggtctgcattcttaccggtgatcgcgatttcttccagctgctgtctgagaaagtgagcgttttgctgcccgatggcacgttagtaaccccgaaagatgtgcaagagaaatatggagttccgccagaacgttgggtggactttcgcgcactgactggtgatcgttcagacaacatcccgggcgttgccgggattggtgaaaagacggcgctgcgcctgctggcagaatggggctcggtggaaaatctgctcaagaaccttgatcgcgtgaaacctgatagcttacgccgcaagatcgaagcccacctggaagacttgcgtctgagtctggatcttgcccgtattcgcaccgatctgccgttggaagtagactttaaagctctgcgtcgtcgcacacccgatttagaggggttacgcgcgttcctcgaagaactggagctgggctccctgctgcatgaattcggtttgttgggcaccgagaaaccgcgtgaagaagcaccatggccgccgcccgaaggtgcctttgtcggctttcttctgtcacgcaaagagccaatgtgggcggaactgttagctcttgtagccgccgcggaagggcgtgttcaccgcgcgacctctcctgtcgaggccctcgctgacctcaaagaagcacgtggtttcttggcgaaagatttagccgtgcttgcattacgcgaaggcgttgcgctcgatccgacggacgacccgcttttggtggcttatttgctcgatcatgcgaataccaacccggaacgtgtcgcccgtcgttacggcggcgagtttactgaagatgcggcagaacgcgcgttgcttagcgaacgcctcttccagacgttatttccacgtctttcggagaaattactctggctctatcaggaagtcgaacgtccattgagtcgcgtgcttgcccatatggaggctcgcggtgtgcgcttagatgttccgttgttagaagcactcagcttcgagttggagaaagaactggaacgtcttgaaggcgaagtctttcgtttagcggggcatcccttcaatctcaactctcgcgaccaattggagaaagtgctctttgatgaattaggtttaacccctgtcacgcgtacagagaagaccggcaaacgttccacttcggcagccgccttggaagcacttcgtggtgctcacccgatcgtcgagttgattttgcagtatcgcgagctcagcaaactcaaatcaacctatcttgataggttacctcgtcttgttcatccacgtacgggtcgtttacacacccgcttcaatcaaacggcaacagccaccgggcgcttgtcgtcgagtgacccgaacctccagaatattccagtgcgcacgccgctgggccaacacattcgtaaagcgtttgttgcggaagaaggttggttattacttgcggccgattactcccagatcgaacttcgtgtattggcgcatctctctggcgacgagaatcttaaacgtgtgtttcgcgaaggcaaggatattcacactgaaaccgcagcctggatgttcggggtggacccggccttagtggaccccaagatgcgtcgtgccgccaagaccgtcaactttggcgtactctatggtatgtcagcagcacgtcttagtcaggaattgggcattgactacaaagaagctgaagcgtttatcgagcgctatttccaatcctttccgaaagttcgcgcgtggattgaacgtacgctcgaagaaggtcgcactcgcggctatgtggaaacgttattcgggcgtcgtcgctacgttccagatcttacgtctcgtgtccgctcagtgcgcgaagctgctgagcgtatggcctggaatatgcctgttcagggaacagcggcggacctcatgaagatcgccatggtgaaattgtttccgcgcttgaaacccttaggagcccaccttcttttacaggtgcatgatgaattggtcttggaagtacccgaggatcgcgcagaggaagccaaagcactcgtgaaagaggttatggaaaacgcgtatccgttagatgttccgttggaggtcgaagtgggtgtaggccgtgattggcttgaagcgaaacaagactaatga

SEQ ID NO: 994 - protein, 844 aa, synthetic construct
  REGION 1..844: note = DNA Polymerase Variant
MHHHHHHGGSGMLPLFDLEEAPKRVLLVDGHHLAYRTFYALSLTTSRGEPVQMVYGFARSLLKALKEDGQAVVVVFDAKAPSFRHEAYEAYKAGRAPTPEDFPRQLALVKRLVDLLGLVRLEAPGYEADDVLGTLAKKAEREGMEVCILTGDRDFFQLLSEKVSVLLPDGTLVTPKDVQEKYGVPPERWVDFRALTGDRSDNIPGVAGIGEKTALRLLAEWGSVENLLKNLDRVKPDSLRRKIEAHLEDLRLSLDLARIRTDLPLEVDFKALRRRTPDLEGLRAFLEELELGSLLHEFGLLGTEKPREEAPWPPPEGAFVGFLLSRKEPMWAELLALVAAAEGRVHRATSPVEALADLKEARGFLAKDLAVLALREGVALDPTDDPLLVAYLLDHANTNPERVARRYGGEFTEDAAERALLSERLFQTLFPRLSEKLLWLYQEVERPLSRVLAHMEARGVRLDVPLLEALSFELEKELERLEGEVFRLAGHPFNLNSRDQLEKVLFDELGLTPVTRTEKTGKRSTSAAALEALRGAHPIVELILQYRELSKLKSTYLDRLPRLVHPRTGRLHTRFNQTATATGRLSSSDPNLQNIPVRTPLGQHIRKAFVAEEGWLLLAADYSQIELRVLAHLSGDENLKRVFREGKDIHTETAAWMFGVDPALVDPKMRRAAKTVNFGVLYGMSAARLSQELGIDYKEAEAFIERYFQSFPKVRAWIERTLEEGRTRGYVETLFGRRRYVPDLTSRVRSVREAAERMAWNMPVQGTAADLMKIAMVKLFPRLKPLGAHLLLQVHDELVLEVPEDRAEEAKALVKEVMENAYPLDVPLEVEVGVGRDWLEAKQD

SEQ ID NO: 995 - DNA, 2538 bp, synthetic construct; identical to SEQ ID NO: 717
  misc_feature 1..2538: note = DNA Polymerase Variant
  source 1..2538: mol_type = other DNA

SEQ ID NO: 996 - protein, 844 aa, synthetic construct; identical to SEQ ID NO: 718
  REGION 1..844: note = DNA Polymerase Variant

SEQ ID NO: 997 - DNA, 2538 bp, synthetic construct
  misc_feature 1..2538: note = DNA Polymerase Variant
  source 1..2538: mol_type = other DNA
atgcaccatcatcatcatcatggcggtagcggcatgttaccgctgtttgatttggaagaaccaccaaaacgcgtgctgcttgttgacggccatcatctggcgtatcgtaccttctacgcactgagccttacgacctcacgtggtgagcctgtccagatggtgtatgggtttgctcgctccctgctgaaagccctgaaggaagatggtcaagccgtagtagtggttttcgatgcgaaagcaccgtcgtttcgtcacgaagcgtacgaggcctataaagctggccgcgcaccgaccccggaagactttccgcgtcagttagcgctcgtcaaacgcctcgtggatttgctgggattagttcgcttggaagctcctggctacgaggcggacgacgtgctcggtacactggccaagaaagcagaacgtgaaggcatggaggtctgcattcttaccggtgatcgcgatttcttccagctgctgtctgagaaagtgagcgttttgctgcccgatggcacgttagtaaccccgaaagatgtgcaagagaaatatggagttccgccagaacgttgggtggactttcgcgcactgactggtgatcgttcagacaacatcccgggcgttgccgggattggtgaaaagacggcgctgcgcctgctggcagaatggggctcggtggaaaatctgctcaagaaccttgatcgtgtgaaacctgatagcttacgccgcaagatcgaagcccacctggaagacttgcgtctgagtctggatcttgcccgtattcgcaccgatctgccgttggaagtagactttaaagctctgcgtcgtcgcacacccgatttagaggggttacgcgcgttcctcgaagaactggagctgggctccctgctgcatgaattcggtttgttgggcggagagaaaccgcgtgaagaagcaccatggccgccgcccgaaggtgcctttgtcggctttcttctgtcacgcaaagagccaatgtgggcggaactgttagctcttgcagccgccgcggaagggcgtgttcaccgcgcgacctctcctgtcgaggccctcgctgacctcaaagaagcacgtggtttcttggcgaaagatttagccgtgcttgcattacgcgaaggctgtgcgctcgatccgacggacgacccgcttttggtggcttatttgctcgatcatgcgaataccaacccggaacgtgtcgcccgtcgttacggcggcgagtttactgaagatgcggcagaacgcgcgttgcttagcgaacgcctcttccagacgttatttccacgtctttcggagaaattactctggctctatcaggaagtcgaacgtccattgagtcgcgtgcttgcccatatggaggctcgcggtgtgcgcttagatgttccgttgttagaagcactcagcttcgagttggagaaagaactggaacgtcttgaaggcgaagtctttcgtttagcggggcatcccttcaatctcaactctcgcgaccaattggagaaagtgctctttgatgaattaggtttaacccctgtcacgcgtacagagaagaccggcaaacgttccacttcggcagccgccttggaagcacttcgtggtgctcacccgatcgtcgagttgattttgcagtatcgcgagctcagcaaactcaaatcaacctatcttgataggttacctcgtcttgttcatccacgtacgggtcgtttacacacccgcttcaatcaaacggcaacagccaccgggcgcttgtcgtcgagtgacccgaacctccagaatattccagtgcgcacgccgctgggccaacacattcgtaaagcgtttgttgcggaagaaggttggttattacttgcggccgattactcccagatcgaacttcgtgtattggcgcatctctctggcgacgagaatcttaaacgcgtgtttcgcgaaggcaaggatattcacactgaaaccgcagcctggatgttcggggtggacccagccttagtggaccccaagatgcgtcgtgccgccaagaccgtcaactttggcgtactctatggtatgtcagcagcacgtcttagtcaggaattgggcattgactacaaagaagctgaagcgtttatcgagcgctatttccaatcctttccgaaagttcgcgcgtggattgaacgtacgctcgaagaaggtcgcactcgcggctatgtggaaacgttattcgggcgtcgtcgctacgttccagatcttacgtctcgtgtccgctcagtgcgcgaagctgctgagcgtatggcctggaatatgcctgttcagggaacagcggcggacctcatgaagatcgccatggtgaaattgtttccgcgcttgaaacccttaggagcccaccttcttttacaggtgcatgatgaattggtcttggaagtacccgaggatcgcgcagaagaagccaaagcactcgtgaaagaggttatggaaaacgcgtatccgttagatgttccgttggaggtcgaagtgggtgtaggccgtgattggcttgaagcgaaacaagactaatga

SEQ ID NO: 998 - protein, 844 aa, synthetic construct
  REGION 1..844: note = DNA Polymerase Variant
MHHHHHHGGSGMLPLFDLEEPPKRVLLVDGHHLAYRTFYALSLTTSRGEPVQMVYGFARSLLKALKEDGQAVVVVFDAKAPSFRHEAYEAYKAGRAPTPEDFPRQLALVKRLVDLLGLVRLEAPGYEADDVLGTLAKKAEREGMEVCILTGDRDFFQLLSEKVSVLLPDGTLVTPKDVQEKYGVPPERWVDFRALTGDRSDNIPGVAGIGEKTALRLLAEWGSVENLLKNLDRVKPDSLRRKIEAHLEDLRLSLDLARIRTDLPLEVDFKALRRRTPDLEGLRAFLEELELGSLLHEFGLLGGEKPREEAPWPPPEGAFVGFLLSRKEPMWAELLALAAAAEGRVHRATSPVEALADLKEARGFLAKDLAVLALREGCALDPTDDPLLVAYLLDHANTNPERVARRYGGEFTEDAAERALLSERLFQTLFPRLSEKLLWLYQEVERPLSRVLAHMEARGVRLDVPLLEALSFELEKELERLEGEVFRLAGHPFNLNSRDQLEKVLFDELGLTPVTRTEKTGKRSTSAAALEALRGAHPIVELILQYRELSKLKSTYLDRLPRLVHPRTGRLHTRFNQTATATGRLSSSDPNLQNIPVRTPLGQHIRKAFVAEEGWLLLAADYSQIELRVLAHLSGDENLKRVFREGKDIHTETAAWMFGVDPALVDPKMRRAAKTVNFGVLYGMSAARLSQELGIDYKEAEAFIERYFQSFPKVRAWIERTLEEGRTRGYVETLFGRRRYVPDLTSRVRSVREAAERMAWNMPVQGTAADLMKIAMVKLFPRLKPLGAHLLLQVHDELVLEVPEDRAEEAKALVKEVMENAYPLDVPLEVEVGVGRDWLEAKQD

SEQ ID NO: 999 - DNA, 2538 bp, synthetic construct
  misc_feature 1..2538: note = DNA Polymerase Variant
  source 1..2538: mol_type = other DNA
atgcaccatcatcatcatcatggcggtagcggcatgttaccgctgtttgatttggaagaaccaccaaaacgcgtgctgcttgttgacggccatcatctggcgtatcgtaccttctacgcactgagccttacgacctcacgtggtgagcctgtccagatggtgtatgggtttgctcgctccctgctgaaagccctgaaggaagatggtcaagccgtagtagtggttttcgatgcgaaagcaccgtcgtttcgtcacgaagcgtacgaggcctataaagctggccgcgcaccgaccccggaagactttccgcgtcagttagcgctcgtcaaacgcctcgtggatttgctgggattagttcgcttggaagctcctggctacgaggcggacgacgtgctcggtacactggccaagaaagcagaacgtgaaggcatggaggtctgcattcttaccggtgatcgcgatttcttccagctgctgtctgagaaagtgagcgttttgctgcccgatggcacgttagtaaccccgaaagatgtgcaagagaaatatggagttccgccagaacgttgggtggactttcgcgcactgactggtgatcgttcagacaacatcccgggcgttgccgggattggtgaaaagacggcgctgcgcctgctggcagaatggggctcggtggaaaatctgctcaagaaccttgatcgtgtgaaacctgatagcttacgccgcaagatcgaagcccacctggaagacttgcgtctgagtctggatcttgcccgtattcgcaccgatctgccgttggaagtagactttaaagctctgcgtcgtcgcacacccgatttagaggggttacgcgcgttcctcgaagaactggagctgggctccctgctgcatgaattcggtttgttgggcggagagaaaccgcgtgaagaagcaccatggccgccgcccgaaggtgcctttgtcggctttcttctgtcacgcaaagagccaatgtgggcggaactgttagctcttgcagccgccgcggaagggcgtgttcaccgcgcgacctctcctgtcgaggccctcgctgacctcaaagaagcacgtggtttcttggcgaaagatttagccgtgcttgcattacgcgaaggcgttgcgctcgatccgacggacgacccgcttttggtggcttatttgctcgatcatgcgaataccaacccggaacgtgtcgcccgtcgttacggcggcgagtttactgaagatgcggcagaacgcgcgttgcttagcgaacgcctcttccttacgttatttccacgtctttcggagaaattactctggctctatcaggaagtcgaacgtccattgagtcgcgtgcttgcccatatggaggctcgcggtgtgcgcttagatgttccgttgttagaagcactcagcttcgagttggagaaagaactggaacgtcttgaaggcgaagtctttcgtttagcggggcatcccttcaatctcaactctcgcgaccaattggagaaagtgctctttgatgaattaggtttaacccctgtcacgcgtacagagaagaccggcaaacgttccacttcggcagccgccttggaagcacttcgtggtgctcacccgatcgtcgagttgattttgcagtatcgcgagctcagcaaactcaaatcaacctatcttgataggttacctcgtcttgttcatccacgtacgggtcgtttacacacccgcttcaatcaaacggcaacagccaccgggcgcttgtcgtcgagtgacccgaacctccagaatattccagtgcgcacgccgctgggccaacacattcgtaaagcgtttgttgcggaagaaggttggttattacttgcggccgattactcccagatcgaacttcgtgtattggcgcatctctctggcgacgagaatcttaaacgcgtgtttcgcgaaggcaaggatattcacactgaaaccgcagcctggatgttcggggtggacccagccttagtggaccccaagatgcgtcgtgccgccaagaccgtcaactttggcgtactctatggtatgtcagcagcacgtcttagtcaggaattgggcattgactacaaagaagctgaagcgtttatcgagcgctatttccaatcctttccgaaagttcgcgcgtggattgaacgtacgctcgaagaaggtcgcactcgcggctatgtggaaacgttattcgggcgtcgtcgctacgttccagatcttacgtctcgtgtccgctcagtgcgcgaagctgctgagcgtatggcctggaatatgcctgttcagggaacagcggcggacctcatgaagatcgccatggtgaaattgtttccgcgcttgaaacccttaggagcccaccttcttttacaggtgcatgatgaattggtcttggaagtacccgaggatcgcgcagaagaagccaaagcactcgtgaaagaggttatggaaaacgcgtatccgttagatgttccgttggaggtcgaagtgggtgtaggccgtgattggcttgaagcgaaacaagactaatga

SEQ ID NO: 1000 - protein, 844 aa, synthetic construct; identical to SEQ ID NO: 728
  REGION 1..844: note = DNA Polymerase Variant

SEQ ID NO: 1001 - DNA, 2538 bp, synthetic construct
  misc_feature 1..2538: note = DNA Polymerase Variant
  source 1..2538: mol_type = other DNA
atgcaccatcatcatcatcatggcggtagcggcatgttaccgctgtttgatttggaagaaccaccaaaacgcgtgctgcttgttgacggccatcatctggcgtatcgtaccttctacgcactgagccttacgacctcacgtggtgagcctgtccagatggtgtatgggtttgctcgctccctgctgaaagccctgaaggaagatggtcaagccgtagtagtggttttcgatgcgaaagcaccgtcgtttcgtcacgaagcgtacgaggcctataaagctggccgcgcaccgaccccggaagactttccgcgtcagttagcgctcgtcaaacgcctcgtggatttgctgggattagttcgcttggaagctcctggctacgaggcggacgacgtgctcggtacactggccaagaaagcagaacgtgaaggcatggaggtctgcattcttaccggtgatcgcgatttcttccagctgctgtctgagaaagtgagcgttttgctgcccgatggcacgttagtaaccccgaaagatgtgcaagagaaatatggagttccgccagaacgttgggtggactttcgcgcactgactggtgatcgttcagacaacatcccgggcgttgccgggattggtgaaaagacggcgctgcgcctgctggcagaatggggctcggtggaaaatctgctcaagaaccttgatcgtgtgaaacctgatagcttacgccgcaagatcgaagcccacctggaagacttgcgtctgagtctggatcttgcccgtattcgcaccgatctgccgttggaagtagactttaaagctctgcgtcgtcgcacacccgatttagaggggttacgcgcgttcctcgaagaactggagctgggctccctgctgcatgaattcggtttgttgggcggagagaaaccgcgtgaagaagcaccatggccgccgcccgaaggtgcctttgtcggctttcttctgtcacgcaaagagccaatgtgggcggaactgttagctcttgcagccgccgcggaagggcgtgttcaccgcgcgacctctcctgtcgaggccctcgctgacctcaaagaagcacgtggtttcttggcgaaagatttagccgtgcttgcattacgcgaaggcgttgcgctcgatccgacggacgacccgcttttggtggcttatttgctcgatcatgcgaataccaacccggaacgtgtcgcccgtcgttacggcggcgagtttactgaagatgcggcagaaaaggcgttgcttagcgaacgcctcttccagacgttatttccacgtctttcggagaaattactctggctctatcaggaagtcgaacgtccattgagtcgcgtgcttgcccatatggaggctcgcggtgtgcgcttagatgttccgttgttagaagcactcagcttcgagttggagaaagaactggaacgtcttgaaggcgaagtctttcgtttagcggggcatcccttcaatctcaactctcgcgaccaattggagaaagtgctctttgatgaattaggtttaacccctgtcacgcgtacagagaagaccggcaaacgttccacttcggcagccgccttggaagcacttcgtggtgctcacccgatcgtcgagttgattttgcagtatcgcgagctcagcaaactcaaatcaacctatcttgataggttacctcgtcttgttcatccacgtacgggtcgtttacacacccgcttcaatcaaacggcaacagccaccgggcgcttgtcgtcgagtgacccgaacctccagaatattccagtgcgcacgccgctgggccaacacattcgtaaagcgtttgttgcggaagaaggttggttattacttgcggccgattactcccagatcgaacttcgtgtattggcgcatctctctggcgacgagaatcttaaacgcgtgtttcgcgaaggcaaggatattcacactgaaaccgcagcctggatgttcggggtggacccagccttagtggaccccaagatgcgtcgtgccgccaagaccgtcaactttggcgtactctatggtatgtcagcagcacgtcttagtcaggaattgggcattgactacaaagaagctgaagcgtttatcgagcgctatttccaatcctttccgaaagttcgcgcgtggattgaacgtacgctcgaagaaggtcgcactcgcggctatgtggaaacgttattcgggcgtcgtcgctacgttccagatcttacgtctcgtgtccgctcagtgcgcgaagctgctgagcgtatggcctggaatatgcctgttcagggaacagcggcggacctcatgaagatcgccatggtgaaattgtttccgcgcttgaaacccttaggagcccaccttcttttacaggtgcatgatgaattggtcttggaagtacccgaggatcgcgcagaagaagccaaagcactcgtgaaagaggttatggaaaacgcgtatccgttagatgttccgttggaggtcgaagtgggtgtaggccgtgattggcttgaagcgaaacaagactaatga

SEQ ID NO: 1002 - protein, 844 aa, synthetic construct
  REGION 1..844: note = DNA Polymerase Variant
MHHHHHHGGSGMLPLFDLEEPPKRVLLVDGHHLAYRTFYALSLTTSRGEPVQMVYGFARSLLKALKEDGQAVVVVFDAKAPSFRHEAYEAYKAGRAPTPEDFPRQLALVKRLVDLLGLVRLEAPGYEADDVLGTLAKKAEREGMEVCILTGDRDFFQLLSEKVSVLLPDGTLVTPKDVQEKYGVPPERWVDFRALTGDRSDNIPGVAGIGEKTALRLLAEWGSVENLLKNLDRVKPDSLRRKIEAHLEDLRLSLDLARIRTDLPLEVDFKALRRRTPDLEGLRAFLEELELGSLLHEFGLLGGEKPREEAPWPPPEGAFVGFLLSRKEPMWAELLALAAAAEGRVHRATSPVEALADLKEARGFLAKDLAVLALREGVALDPTDDPLLVAYLLDHANTNPERVARRYGGEFTEDAAEKALLSERLFQTLFPRLSEKLLWLYQEVERPLSRVLAHMEARGVRLDVPLLEALSFELEKELERLEGEVFRLAGHPFNLNSRDQLEKVLFDELGLTPVTRTEKTGKRSTSAAALEALRGAHPIVELILQYRELSKLKSTYLDRLPRLVHPRTGRLHTRFNQTATATGRLSSSDPNLQNIPVRTPLGQHIRKAFVAEEGWLLLAADYSQIELRVLAHLSGDENLKRVFREGKDIHTETAAWMFGVDPALVDPKMRRAAKTVNFGVLYGMSAARLSQELGIDYKEAEAFIERYFQSFPKVRAWIERTLEEGRTRGYVETLFGRRRYVPDLTSRVRSVREAAERMAWNMPVQGTAADLMKIAMVKLFPRLKPLGAHLLLQVHDELVLEVPEDRAEEAKALVKEVMENAYPLDVPLEVEVGVGRDWLEAKQD

SEQ ID NO: 1003 - DNA, 2538 bp, synthetic construct
  misc_feature 1..2538: note = DNA Polymerase Variant
  source 1..2538: mol_type = other DNA
atgcaccatcatcatcatcatggcggtagcggcatgttaccgctgtttgatttggaagaaccaccaaaacgcgtgctgcttgttgacggccatcatctggcgtatcgtaccttctacgcactgagccttacgacctcacgtggtgagcctgtccagatggtgtatgggtttgctcgctccctgctgaaagccctgaaggaagatggtcaagccgtagtagtggttttcgatgcgaaagcaccgtcgtttcgtcacgaagcgtacgaggcctataaagctggccgcgcaccgaccccggaagactttccgcgtcagttagcgctcgtcaaacgcctcgtggatttgctgggattagttcgcttggaagctcctggctacgaggcggacgacgtgctcggtacactggccaagaaagcagaacgtgaaggcatggaggtctgcattcttaccggtgatcgcgatttcttccagctgctgtctgagaaagtgagcgttttgctgcccgatggcacgttagtaaccccgaaagatgtgcaagagaaatatggagttccgccagaacgttgggtggactttcgcgcactgactggtgatcgttcagacaacatcccgggcgttgccgggattggtgaaaagacggcgctgcgcctgctggcagaatggggctcggtggaaaatctgctcaagaaccttgatcgtgtgaaacctgatagcttacgccgcaagatcgaagcccacctggaagacttgcgtctgagtctggatcttgcccgtattcgcaccgatctgccgttggaagtagactttaaagctctgcgtcgtcgcacacccgatttagaggggttacgcgcgttcctcgaagaactggagctgggctccctgctgcatgaattcggtttgttgggcggagagaaaccgcgtgaagaagcaccatggccgccgcccgaaggtgcctttgtcggctttcttctgtcacgcaaagagccaatgtgggcggaactgttagctcttgtagccgccgcggaagggcgtgttcaccgcgcgacctctcctgtcgaggccctcgctgacctcaaagaagcacgtggtttcttggcgaaagatttagccgtgcttgcattacgcgaaggcgttgcgctcgatccgacggacgacccgcttttggtggcttatttgctcgatcatgcgaataccaacccggaacgtgtcgcccgtcgttacggcggcgagtttactgaagatgcggcagaacgcgcgttgcttagcgaacgcctcttccagacgttatttccacgtctttcggagaaattactctggctctatggtgaagtcgaacgtccattgagtcgcgtgcttgcccatatggaggctcgcggtgtgcgcttagatgttccgttgttagaagcactcagcttcgagttggagaaagaactggaacgtcttgaaggcgaagtctttcgtttagcggggcatcccttcaatctcaactctcgcgaccaattggagaaagtgctctttgatgaattaggtttaacccctgtcacgcgtacagagaagaccggcaaacgttccacttcggcagccgccttggaagcacttcgtggtgctcacccgatcgtcgagttgattttgcagtatcgcgagctcagcaaactcaaatcaacctatcttgataggttacctcgtcttgttcatccacgtacgggtcgtttacacacccgcttcaatcaaacggcaacagccaccgggcgcttgtcgtcgagtgacccgaacctccagaatattccagtgcgcacgccgctgggccaacacattcgtaaagcgtttgttgcggaagagggttggttattacttgcggccgattactcccagatcgaacttcgtgtattggcgcatctctctggcgacgagaatcttaaacgcgtgtttcgcgaaggcaaggatattcacactgaaaccgcagcctggatgttcggggtggacccggccttagtggaccccaagatgcgtcgtgccgccaagaccgtcaactttggcgtactctatggtatgtcagcagcacgtcttagtcaggaattgggcattgactacaaagaagctgaagcgtttatcgagcgctatttccaatcctttccgaaagttcgcgcgtggattgaacgtacgctcgaagaaggtcgcactcgcggctatgtggaaacgttattcgggcgtcgtcgctacgttccagatcttacgtctcgtgtccgctcagtgcgcgaagctgctgagcgtatggcctggaatatgcctgttcagggaacagcggcggacctcatgaagatcgccatggtgaaattgtttccgcgcttgaaacccttaggagcccaccttcttttacaggtgcatgatgaattggtcttggaagtacccgaggatcgcgcagaagaagccaaagcactcgtgaaagaggttatggaaaacgcgtatccgttagatgttccgttggaggtcgaagtgggtgtaggccgtgattggcttgaagcgaaacaagactaatga

SEQ ID NO: 1004 - protein, 844 aa, synthetic construct
  REGION 1..844: note = DNA Polymerase Variant
MHHHHHHGGSGMLPLFDLEEPPKRVLLVDGHHLAYRTFYALSLTTSRGEPVQMVYGFARSLLKALKEDGQAVVVVFDAKAPSFRHEAYEAYKAGRAPTPEDFPRQLALVKRLVDLLGLVRLEAPGYEADDVLGTLAKKAEREGMEVCILTGDRDFFQLLSEKVSVLLPDGTLVTPKDVQEKYGVPPERWVDFRALTGDRSDNIPGVAGIGEKTALRLLAEWGSVENLLKNLDRVKPDSLRRKIEAHLEDLRLSLDLARIRTDLPLEVDFKALRRRTPDLEGLRAFLEELELGSLLHEFGLLGGEKPREEAPWPPPEGAFVGFLLSRKEPMWAELLALVAAAEGRVHRATSPVEALADLKEARGFLAKDLAVLALREGVALDPTDDPLLVAYLLDHANTNPERVARRYGGEFTEDAAERALLSERLFQTLFPRLSEKLLWLYGEVERPLSRVLAHMEARGVRLDVPLLEALSFELEKELERLEGEVFRLAGHPFNLNSRDQLEKVLFDELGLTPVTRTEKTGKRSTSAAALEALRGAHPIVELILQYRELSKLKSTYLDRLPRLVHPRTGRLHTRFNQTATATGRLSSSDPNLQNIPVRTPLGQHIRKAFVAEEGWLLLAADYSQIELRVLAHLSGDENLKRVFREGKDIHTETAAWMFGVDPALVDPKMRRAAKTVNFGVLYGMSAARLSQELGIDYKEAEAFIERYFQSFPKVRAWIERTLEEGRTRGYVETLFGRRRYVPDLTSRVRSVREAAERMAWNMPVQGTAADLMKIAMVKLFPRLKPLGAHLLLQVHDELVLEVPEDRAEEAKALVKEVMENAYPLDVPLEVEVGVGRDWLEAKQD

SEQ ID NO: 1005 - DNA, 2538 bp, synthetic construct
  misc_feature 1..2538: note = DNA Polymerase Variant
  source 1..2538: mol_type = other DNA
atgcaccatcatcatcatcatggcggtagcggcatgttaccgctgtttgatttggaagaaccaccaaaacgcgtgctgcttgttgacggccatcatctggcgtatcgtaccttctacgcactgagccttacgacctcacgtggtgagcctgtccagatggtgtatgggtttgctcgctccctgctgaaagccctgaaggaagatggtcaagccgtagtagtggttttcgatgcgaaagcaccgtcgtttcgtcacgaagcgtacgaggcctataaagctggccgcgcaccgaccccggaagactttccgcgtcagttagcgctcgtcaaacgcctcgtggatttgctgggattagttcgcttggaagctcctggctacgaggcggacgacgtgctcggtacactggccaagaaagcagaacgtgaaggcatggaggtctgcattcttaccggtgatcgcgatttcttccagctgctgtctgagaaagtgagcgttttgctgcccgatggcacgttagtaaccccgaaagatgtgcaagagaaatatggagttccgccagaacgttgggtggactttcgcgcactgactggtgatcgttcagacaacatcccgggcgttgccgggattggtgaaaagacggcgctgcgcctgctggcagaatggggctcggtggaaaatctgctcaagaaccttgatcgtgtgaaacctgatagcttacgccgcaagatcgaagcccacctggaagacttgcgtctgagtctggatcttgcccgtattcgcaccgatctgccgttggaagtagactttaaagctctgcgtcgtcgcacacccgatttagaggggttacgcgcgttcctcgaagaactggagctgggctccctgctgcatgaattcggtttgttgggcggagagaaaccgcgtgaagaagcaccatggccgccgcccgaaggtgcctttgtcggctttcttctgtcacgcaaagagccaatgtgggcggaactgttagctcttgcagccgccgcggaagggcgtgttcaccgcgcgacctctcctgtcgaggccctcgctgacctcaaagaagcacgtggtttcttggcgaaagatttagccgtgcttgcattacgcgaaggcgttgcgctcgatccgacggacgacccgcttttggtggcttatttgctcgatcatgcgaataccaacccggaacgtgtcgcccgtcgttacggcggcgagtttactgaagatgcggcagaacgcgcgttgcttagcgaacgcctcttccagacgttatttccacgtctttcggagaaattactctggctctatcaggaagtcgaacgtccattgagtcgcgtgcttgcccatatggaggctcgcggtgtgcgcttagatgttccgttgttagaagcactcagcttcgagttggagaaagaactggaacgtcttgaaggcgaagtctttcgtttagcggggcatcccttcaatctcaactctcgcgaccaattggagaaagtgctctttgatgaattaggtttaacccctgtcacgcgtacagagaagaccggcaaacgttccacttcggcagccgccttggaagcacttcgtggtgctcacccgatcgtcgagttgattttgcagtatcgcgagctcagcaaactcaaatcaacctatcttgataggttacctcgtcttgttcatccacgtacgggtcgtttacacacccgcttcaatcaaacggcaacagccaccgggcgcttgtcgtcgagtgacccgaacctccagaatattccagtgcgcacgccgctgggccaacacattcgtaaagcgtttgttgcggaagaaggttggttattacttgcggccgattactcccagatcgaacttcgtgtattggcgcatctctctggcgacgagaatcttaaacgcgtgtttcgcgaaggcaaggatattcacactgaaaccgcagcctggatgttcggggtggacccagccttagtggaccccaagatgcgtcgtgccgccaagaccgtcaactttggcgtactctatggtatgtcagcagcacgtcttagtcaggaattgggcattgactacaaagaagctgaagcgtttatcgagcgctatttccaatcctttccgaaagttcgcgcgtggattgaacgtaatctcgaagaaggtcgcactcgcggctatgtggaaacgttattcgggcgtcgtcgctacgttccagatcttacgtctcgtgtccgctcagtgcgcgaagctgctgagcgtatggcctggaatatgcctgttcagggaacagcggcggacctcatgaagatcgccatggtgaaattgtttccgcgcttgaaacccttaggagcccaccttcttttacaggtgcatgatgaattggtcttggaagtacccgaggatcgcgcagaagaagccaaagcactcgtgaaagaggttatggaaaacgcgtatccgttagatgttccgttggaggtcgaagtgggtgtaggccgtgattggcttgaagcgaaacaagactaatga

SEQ ID NO: 1006 - protein, 844 aa, synthetic construct
  REGION 1..844: note = DNA Polymerase Variant
MHHHHHHGGSGMLPLFDLEEPPKRVLLVDGHHLAYRTFYALSLTTSRGEPVQMVYGFARSLLKALKEDGQAVVVVFDAKAPSFRHEAYEAYKAGRAPTPEDFPRQLALVKRLVDLLGLVRLEAPGYEADDVLGTLAKKAEREGMEVCILTGDRDFFQLLSEKVSVLLPDGTLVTPKDVQEKYGVPPERWVDFRALTGDRSDNIPGVAGIGEKTALRLLAEWGSVENLLKNLDRVKPDSLRRKIEAHLEDLRLSLDLARIRTDLPLEVDFKALRRRTPDLEGLRAFLEELELGSLLHEFGLLGGEKPREEAPWPPPEGAFVGFLLSRKEPMWAELLALAAAAEGRVHRATSPVEALADLKEARGFLAKDLAVLALREGVALDPTDDPLLVAYLLDHANTNPERVARRYGGEFTEDAAERALLSERLFQTLFPRLSEKLLWLYQEVERPLSRVLAHMEARGVRLDVPLLEALSFELEKELERLEGEVFRLAGHPFNLNSRDQLEKVLFDELGLTPVTRTEKTGKRSTSAAALEALRGAHPIVELILQYRELSKLKSTYLDRLPRLVHPRTGRLHTRFNQTATATGRLSSSDPNLQNIPVRTPLGQHIRKAFVAEEGWLLLAADYSQIELRVLAHLSGDENLKRVFREGKDIHTETAAWMFGVDPALVDPKMRRAAKTVNFGVLYGMSAARLSQELGIDYKEAEAFIERYFQSFPKVRAWIERNLEEGRTRGYVETLFGRRRYVPDLTSRVRSVREAAERMAWNMPVQGTAADLMKIAMVKLFPRLKPLGAHLLLQVHDELVLEVPEDRAEEAKALVKEVMENAYPLDVPLEVEVGVGRDWLEAKQD

SEQ ID NO: 1007 - DNA, 2538 bp, synthetic construct
  misc_feature 1..2538: note = DNA Polymerase Variant
  source 1..2538: mol_type = other DNA
atgcaccatcatcatcatcatggcggtagcggcatgttaccgctgtttgatttggaagaaccaccaaaacgcgtgctgcttgttgacggccatcatctggcgtatcgtaccttctacgcactgagccttacgacctcacgtggtgagcctgtccagatggtgtatgggtttgctcgctccctgctgaaagccctgaaggaagatggtcaagccgtagtagtggttttcgatgcgaaagcaccgtcgtttcgtcacgaagcgtacgaggcctataaagctggccgcgcaccgaccccggaagactttccgcgtcagttagcgctcgtcaaacgcctcgtggatttgctgggattagttcgcttggaagctcctggctacgaggcggacgacgtgctcggtacactggccaagaaagcagaacgtgaaggcatggaggtctgcattcttaccggtgatcgcgatttcttccagctgctgtctgagaaagtgagcgttttgctgcccgatggcacgttagtaaccccgaaagatgtgcaagagaaatatggagttccgccagaacgttgggtggactttcgcgcactgactggtgatcgttcagacaacatcccgggcgttgccgggattggtgaaaagacggcgctgcgcctgctggcagaatggggctcggtggaaaatctgctcaagaaccttgatcgtgtgaaacctgatagcttacgccgcaagatcgaagcccacctggaagacttgcgtctgagtctggatcttgcccgtattcgcaccgatctgccgttggaagtagactttaaagctctgcgtcgtcgcacacccgatttagaggggttacgcgcgttcctcgaagaactggagctgggctccctgctgcatgaattcggtttgttgggcggagagaaaccgcgtgaagaagcaccatggccgccgcccgaaggtgcctttgtcggctttcttctgtcacgcaaagagccaatgtgggcggaactgttagctcttgcagccgccgcggaagggcgtgttcaccgcgcgacctctcctgtcgaggccctcgctgacctcaaagaagcacgtggtttcttggcgaaagatttagccgtgcttgcattacgcgaaggcgttgcgctcgatccgacggacgacccgcttttggtggcttatttgctcgatcatgcgaataccaacccggaacgtgtcgcccgtcgttacggcggcgagtttactgaagatgcggcagaacgcgcgttgcttagcgaacgcctcttccagacgttatttccacgtctttcggagaaattactctggctctatcaggaagtcgaacgtccattggcgcgcgtgcttgcccatatggaggctcgcggtgtgcgcttagatgttccgttgttagaagcactcagcttcgagttggagaaagaactggaacgtcttgaaggcgaagtctttcgtttagcggggcatcccttcaatctcaactctcgcgaccaattggagaaagtgctctttgatgaattaggtttaacccctgtcacgcgtacagagaagaccggcaaacgttccacttcggcagccgccttggaagcacttcgtggtgctcacccgatcgtcgagttgattttgcagtatcgcgagctcagcaaactcaaatcaacctatcttgataggttacctcgtcttgttcatccacgtacgggtcgtttacacacccgcttcaatcaaacggcaacagccaccgggcgcttgtcgtcgagtgacccgaacctccagaatattccagtgcgcacgccgctgggccaacacattcgtaaagcgtttgttgcggaagaaggttggttattacttgcggccgattactcccagatcgaacttcgtgtattggcgcatctctctggcgacgagaatcttaaacgcgtgtttcgcgaaggcaaggatattcacactgaaaccgcagcctggatgttcggggtggacccagccttagtggaccccaagatgcgtcgtgccgccaagaccgtcaactttggcgtactctatggtatgtcagcagcacgtcttagtcaggaattgggcattgactacaaagaagctgaagcgtttatcgagcgctatttccaatcctttccgaaagttcgcgcgtggattgaacgtacgctcgaagaaggtcgcactcgcggctatgtggaaacgttattcgggcgtcgtcgctacgttccagatcttacgtctcgtgtccgctcagtgcgcgaagctgctgagcgtatggcctggaatatgcctgttcagggaacagcggcggacctcatgaagatcgccatggtgaaattgtttccgcgcttgaaacccttaggagcccaccttcttttacaggtgcatgatgaattggtcttggaagtacccgaggatcgcgcagaagaagccaaagcactcgtgaaagaggttatggaaaacgcgtatccgttagatgttccgttggaggtcgaagtgggtgtaggccgtgattggcttgaagcgaaacaagactaatga

SEQ ID NO: 1008 - protein, 844 aa, synthetic construct
  REGION 1..844: note = DNA Polymerase Variant
MHHHHHHGGSGMLPLFDLEEPPKRVLLVDGHHLAYRTFYALSLTTSRGEPVQMVYGFARSLLKALKEDGQAVVVVFDAKAPSFRHEAYEAYKAGRAPTPEDFPRQLALVKRLVDLLGLVRLEAPGYEADDVLGTLAKKAEREGMEVCILTGDRDFFQLLSEKVSVLLPDGTLVTPKDVQEKYGVPPERWVDFRALTGDRSDNIPGVAGIGEKTALRLLAEWGSVENLLKNLDRVKPDSLRRKIEAHLEDLRLSLDLARIRTDLPLEVDFKALRRRTPDLEGLRAFLEELELGSLLHEFGLLGGEKPREEAPWPPPEGAFVGFLLSRKEPMWAELLALAAAAEGRVHRATSPVEALADLKEARGFLAKDLAVLALREGVALDPTDDPLLVAYLLDHANTNPERVARRYGGEFTEDAAERALLSERLFQTLFPRLSEKLLWLYQEVERPLARVLAHMEARGVRLDVPLLEALSFELEKELERLEGEVFRLAGHPFNLNSRDQLEKVLFDELGLTPVTRTEKTGKRSTSAAALEALRGAHPIVELILQYRELSKLKSTYLDRLPRLVHPRTGRLHTRFNQTATATGRLSSSDPNLQNIPVRTPLGQHIRKAFVAEEGWLLLAADYSQIELRVLAHLSGDENLKRVFREGKDIHTETAAWMFGVDPALVDPKMRRAAKTVNFGVLYGMSAARLSQELGIDYKEAEAFIERYFQSFPKVRAWIERTLEEGRTRGYVETLFGRRRYVPDLTSRVRSVREAAERMAWNMPVQGTAADLMKIAMVKLFPRLKPLGAHLLLQVHDELVLEVPEDRAEEAKALVKEVMENAYPLDVPLEVEVGVGRDWLEAKQD

SEQ ID NO: 1009 - DNA, 2538 bp, synthetic construct; identical to SEQ ID NO: 679
  misc_feature 1..2538: note = DNA Polymerase Variant
  source 1..2538: mol_type = other DNA

SEQ ID NO: 1010 - protein, 844 aa, synthetic construct; identical to SEQ ID NO: 680
  REGION 1..844: note = DNA Polymerase Variant

SEQ ID NO: 1011 - DNA, 2538 bp, synthetic construct
  misc_feature 1..2538: note = DNA Polymerase Variant
  source 1..2538: mol_type = other DNA
atgcaccatcatcatcatcatggcggtagcggcatgttaccgctgtttgatttggaagaaccaccaaaacgcgtgctgcttgttgacggccatcatctggcgtatcgtaccttctacgcactgagccttacgacctcacgtggtgagcctgtccagatggtgtatgggtttgctcgctccctgctgaaagccctgaaggaagatggtcaagccgtagtagtggttttcgatgcgaaagcaccgtcgtttcgtcacgaagcgtacgaggcctataaagctggccgcgcaccgaccccggaagactttccgcgtcagttagcgctcgtcaaacgcctcgtggatttgctgggattagttcgcttggaagctcctggctacgaggcggacgacgtgctcggtacactggccaagaaagcagaacgtgaaggcatggaggtctgcattcttaccggtgatcgcgatttcttccagctgctgtctgagaaagtgagcgttttgctgcccgatggcacgttagtaaccccgaaagatgtgcaagagaaatatggagttccgccagaacgttgggtggactttcgcgcactgactggtgatcgttcagacaacatcccgggcgttgccgggattggtgaaaagacggcgctgcgcctgctggcagaatggggctcggtggaaaatctgctcaagaaccttgatcgtgtgaaacctgatagcttacgccgcaagatcgaagcccacctggaagacttgcgtctgagtctggatcttgcccgtattcgcaccgatctgccgttggaagtagactttaaagctctgcgtcgtcgcacacccgatttagaggggttacgcgcgttcctcgaagaactggagctgggctccctgctgcatgaattcggtttgttgggcggagagaaaccgcgtgaagaagcaccatggccgccgcccgaaggtgcctttgtcggctttcttctgtcacgcaaagagccaatgtgggcggaactgttagctcttgcagccgccgcggaagggcgtgttcaccgcgcgacctctcctgtcgaggccctcgctgacctcaaagaagcacgtggtttcttggcgaaagatttagccgtgcttgcattacgcgaaggcgttgcgctcgatccgacggacgacccgcttttggtggcttatttgctcgatcatgcgaataccaacccggaacgtgtcgcccgtcgttacggcggcgagtttactgaagatgcggcagaacgcgcgttgcttagcgaacgcctcttccagacgttatttccacgtctttcggagaaattactctggctctatcaggaagtcgaacgtccattggggcgcgtgcttgcccatatggaggctcgcggtgtgcgcttagatgttccgttgttagaagcactcagcttcgagttggagaaagaactggaacgtcttgaaggcgaagtctttcgtttagcggggcatcccttcaatctcaactctcgcgaccaattggagaaagtgctctttgatgaattaggtttaacccctgtcacgcgtacagagaagaccggcaaacgttccacttcggcagccgccttggaagcacttcgtggtgctcacccgatcgtcgagttgattttgcagtatcgcgagctcagcaaactcaaatcaacctatcttgataggttacctcgtcttgttcatccacgtacgggtcgtttacacacccgcttcaatcaaacggcaacagccaccgggcgcttgtcgtcgagtgacccgaacctccagaatattccagtgcgcacgccgctgggccaacacattcgtaaagcgtttgttgcggaagaaggttggttattacttgcggccgattactcccagatcgaacttcgtgtattggcgcatctctctggcgacgagaatcttaaacgcgtgtttcgcgaaggcaaggatattcacactgaaaccgcagcctggatgttcggggtggacccagccttagtggaccccaagatgcgtcgtgccgccaagaccgtcaactttggcgtactctatggtatgtcagcagcacgtcttagtcaggaattgggcattgactacaaagaagctgaagcgtttatcgagcgctatttccaatcctttccgaaagttcgcgcgtggattgaacgtacgctcgaagaaggtcgcactcgcggctatgtggaaacgttattcgggcgtcgtcgctacgttccagatcttacgtctcgtgtccgctcagtgcgcgaagctgctgagcgtatggcctggaatatgcctgttcagggaacagcggcggacctcatgaagatcgccatggtgaaattgtttccgcgcttgaaacccttaggagcccaccttcttttacaggtgcatgatgaattggtcttggaagtacccgaggatcgcgcagaagaagccaaagcactcgtgaaagaggttatggaaaacgcgtatccgttagatgttccgttggaggtcgaagtgggtgtaggccgtgattggcttgaagcgaaacaagactaatga

SEQ ID NO: 1012 - protein, 844 aa, synthetic construct
  REGION 1..844: note = DNA Polymerase Variant
MHHHHHHGGSGMLPLFDLEEPPKRVLLVDGHHLAYRTFYALSLTTSRGEPVQMVYGFARSLLKALKEDGQAVVVVFDAKAPSFRHEAYEAYKAGRAPTPEDFPRQLALVKRLVDLLGLVRLEAPGYEADDVLGTLAKKAEREGMEVCILTGDRDFFQLLSEKVSVLLPDGTLVTPKDVQEKYGVPPERWVDFRALTGDRSDNIPGVAGIGEKTALRLLAEWGSVENLLKNLDRVKPDSLRRKIEAHLEDLRLSLDLARIRTDLPLEVDFKALRRRTPDLEGLRAFLEELELGSLLHEFGLLGGEKPREEAPWPPPEGAFVGFLLSRKEPMWAELLALAAAAEGRVHRATSPVEALADLKEARGFLAKDLAVLALREGVALDPTDDPLLVAYLLDHANTNPERVARRYGGEFTEDAAERALLSERLFQTLFPRLSEKLLWLYQEVERPLGRVLAHMEARGVRLDVPLLEALSFELEKELERLEGEVFRLAGHPFNLNSRDQLEKVLFDELGLTPVTRTEKTGKRSTSAAALEALRGAHPIVELILQYRELSKLKSTYLDRLPRLVHPRTGRLHTRFNQTATATGRLSSSDPNLQNIPVRTPLGQHIRKAFVAEEGWLLLAADYSQIELRVLAHLSGDENLKRVFREGKDIHTETAAWMFGVDPALVDPKMRRAAKTVNFGVLYGMSAARLSQELGIDYKEAEAFIERYFQSFPKVRAWIERTLEEGRTRGYVETLFGRRRYVPDLTSRVRSVREAAERMAWNMPVQGTAADLMKIAMVKLFPRLKPLGAHLLLQVHDELVLEVPEDRAEEAKALVKEVMENAYPLDVPLEVEVGVGRDWLEAKQD

SEQ ID NO: 1013 - DNA, 2538 bp, synthetic construct
  misc_feature 1..2538: note = DNA Polymerase Variant
  source 1..2538: mol_type = other DNA
atgcaccatcatcatcatcatggcggtagcggcatgttaccgctgtttgatttggaagaaccaccaaaacgcgtgctgcttgttgacggccatcatctggcgtatcgtaccttctacgcactgagccttacgacctcacgtggtgagcctgtccagatggtgtatgggtttgctcgctccctgctgaaagccctgaaggaagatggtcaagccgtagtagtggttttcgatgcgaaagcaccgtcgtttcgtcacgaagcgtacgaggcctataaagctggccgcgcaccgaccccggaagactttccgcgtcagttagcgctcgtcaaacgcctcgtggatttgctgggattagttcgcttggaagctcctggctacgaggcggacgacgtgctcggtacactggccaagaaagcagaacgtgaaggcatggaggtctgcattcttaccggtgatcgcgatttcttccagctgctgtctgagaaagtgagcgttttgctgcccgatggcacgttagtaaccccgaaagatgtgcaagagaaatatggagttccgccagaacgttgggtggactttcgcgcactgactggtgatcgttcagacaacatcccgggcgttgccgggattggtgaaaagacggcgctgcgcctgctggcagaatggggctcggtggaaaatctgctcaagaaccttgatcgtgtgaaacctgatagcttacgccgcaagatcgaagcccacctggaagacttgcgtctgagtctggatcttgcccgtattcgcaccgatctgccgttggaagtagactttaaagctctgcgtcgtcgcacacccgatttagaggggttacgcgcgttcctcgaagaactggagctgggctccctgctgcatgaattcggtttgttgggcggagagaaaccgcgtgaagaagcaccatggccgccgcccgaaggtgcctttgtcggctttcttctgtcacgcaaagagccaatgtgggcggaactgttagctcttgcagccgccgcggaagggcgtgttcaccgcgcgacctctcctgtcgaggccctcgctgacctcaaagaagcacgtggtttcttggcgaaagatttagccgtgcttgcattacgcgaaggcgttggcctcgatccgacggacgacccgcttttggtggcttatttgctcgatcatgcgaataccaacccggaacgtgtcgcccgtcgttacggcggcgagtttactgaagatgcggcagaacgcgcgttgcttagcgaacgcctcttccagacgttatttccacgtctttcggagaaattactctggctctatcaggaagtcgaacgtccattgagtcgcgtgcttgcccatatggaggctcgcggtgtgcgcttagatgttccgttgttagaagcactcagcttcgagttggagaaagaactggaacgtcttgaaggcgaagtctttcgtttagcggggcatcccttcaatctcaactctcgcgaccaattggagaaagtgctctttgatgaattaggtttaacccctgtcacgcgtacagagaagaccggcaaacgttccacttcggcagccgccttggaagcacttcgtggtgctcacccgatcgtcgagttgattttgcagtatcgcgagctcagcaaactcaaatcaacctatcttgataggttacctcgtcttgttcatccacgtacgggtcgtttacacacccgcttcaatcaaacggcaacagccaccgggcgcttgtcgtcgagtgacccgaacctccagaatattccagtgcgcacgccgctgggccaacacattcgtaaagcgtttgttgcggaagagggttggttattacttgcggccgattactcccagatcgaacttcgtgtattggcgcatctctctggcgacgagaatcttaaagctgtgtttcgcgaaggcaaggatattcacactgaaaccgcagcctggatgttcggggtggacccagccttagtggaccccaagatgcgtcgtgccgccaagaccgtcaactttggcgtactctatggtatgtcagcagcacgtcttagtcaggaattgggcattgactacaaagaagctgaagcgtttatcgagcgctatttccaatcctttccgaaagttcgcgcgtggattgaacgtacgctcgaagaaggtcgcactcgcggctatgtggaaacgttattcgggcgtcgtcgctacgttccagatcttacgtctcgtgtccgctcagtgcgcgaagctgctgagcgtatggcctggaatatgcctgttcagggaacagcggcggacctcatgaagatcgccatggtgaaattgtttccgcgcttgaaacccttaggagcccaccttcttttacaggtgcatgatgaattggtcttggaagtacccgaggatcgcgcagaagaagccaaagcactcgtgaaagaggttatggaaaacgcgtatccgttagatgttccgttggaggtcgaagtgggtgtaggccgtgattggcttgaagcgaaacaagactaatga

SEQ ID NO: 1014 - protein, 844 aa, synthetic construct
  REGION 1..844: note = DNA Polymerase Variant
MHHHHHHGGSGMLPLFDLEEPPKRVLLVDGHHLAYRTFYALSLTTSRGEPVQMVYGFARSLLKALKEDGQAVVVVFDAKAPSFRHEAYEAYKAGRAPTPEDFPRQLALVKRLVDLLGLVRLEAPGYEADDVLGTLAKKAEREGMEVCILTGDRDFFQLLSEKVSVLLPDGTLVTPKDVQEKYGVPPERWVDFRALTGDRSDNIPGVAGIGEKTALRLLAEWGSVENLLKNLDRVKPDSLRRKIEAHLEDLRLSLDLARIRTDLPLEVDFKALRRRTPDLEGLRAFLEELELGSLLHEFGLLGGEKPREEAPWPPPEGAFVGFLLSRKEPMWAELLALAAAAEGRVHRATSPVEALADLKEARGFLAKDLAVLALREGVGLDPTDDPLLVAYLLDHANTNPERVARRYGGEFTEDAAERALLSERLFQTLFPRLSEKLLWLYQEVERPLSRVLAHMEARGVRLDVPLLEALSFELEKELERLEGEVFRLAGHPFNLNSRDQLEKVLFDELGLTPVTRTEKTGKRSTSAAALEALRGAHPIVELILQYRELSKLKSTYLDRLPRLVHPRTGRLHTRFNQTATATGRLSSSDPNLQNIPVRTPLGQHIRKAFVAEEGWLLLAADYSQIELRVLAHLSGDENLKAVFREGKDIHTETAAWMFGVDPALVDPKMRRAAKTVNFGVLYGMSAARLSQELGIDYKEAEAFIERYFQSFPKVRAWIERTLEEGRTRGYVETLFGRRRYVPDLTSRVRSVREAAERMAWNMPVQGTAADLMKIAMVKLFPRLKPLGAHLLLQVHDELVLEVPEDRAEEAKALVKEVMENAYPLDVPLEVEVGVGRDWLEAKQD

SEQ ID NO: 1015 - DNA, 2538 bp, synthetic construct
  misc_feature 1..2538: note = DNA Polymerase Variant
  source 1..2538: mol_type = other DNA
atgcaccatcatcatcatcatggcggtagcggcatgttaccgctgtttgatttggaagaaccaccaaaacgcgtgctgcttgttgacggccatcatctggcgtatcgtaccttctacgcactgagccttacgacctcacgtggtgagcctgtccagatggtgtatgggtttgctcgctccctgctgaaagccctgaaggaagatggtcaagccgtagtagtggttttcgatgcgaaagcaccgtcgtttcgtcacgaagcgtacgaggcctataaagctggccgcgcaccgaccccggaagactttccgcgtcagttagcgctcgtcaaacgcctcgtggatttgctgggattagttcgcttggaagctcctggctacgaggcggacgacgtgctcggtacactggccaagaaagcagaacgtgaaggcatggaggtctgcattcttaccggtgatcgcgatttcttccagctgctgtctgagaaagtgagcgttttgctgcccgatggcacgttagtaaccccgaaagatgtgcaagagaaatatggagttccgccagaacgttgggtggactttcgcgcactgactggtgatcgttcagacaacatcccgggcgttgccgggattggtgaaaagacggcgctgcgcctgctggcagaatggggctcggtggaaaatctgctcaagaaccttgatcgtgtgaaacctgatagcttacgccgcaagatcgaagcccacctggaagacttgcgtctgagtctggatcttgcccgtattcgcaccgatctgccgttggaagtagactttaaagctctgcgtcgtcgcacacccgatttagaggggttacgcgcgttcctcgaagaactggagctgggctccctgctgcatgaattcggtttgttgggcggagagaaaccgcgtgaagaagcaccatggccgccgcccgaaggtgcctttgtcggctttcttctgtcacgcaaagagccaatgtgggcggaactgttagctcttgcagccgccgcggaagggcgtgttcaccgcgcgacctctcctgtcgaggccctcgctgacctcaaagaagcacgtggtttcttggcgaaagatttagccgtgcttgcattacgcgaaggcgttgcgctcgatccgacggacgacccgcttttggtggcttatttgctcgatcatgcgaataccaacccggaacgtgtcgcccgtcgttacggcggcgtgtttactgaagatgcggcagaacgcgcgttgcttagcgaacgcctcttccagacgttatttccacgtctttcggagaaattactctggctctatcaggaagtcgaacgtccattgagtcgcgtgcttgcccatatggaggctcgcggtgtgcgcttagatgttccgttgttagaagcactcagcttcgagttggagaaagaactggaacgtcttgaaggcgaagtctttcgtttagcggggcatcccttcaatctcaactctcgcgaccaattggagaaagtgctctttgatgaattaggtttaacccctgtcacgcgtacagagaagaccggcaaacgttccacttcggcagccgccttggaagcacttcgtggtgctcacccgatcgtcgagttgattttgcagtatcgcgagctcagcaaactcaaatcaacctatcttgataggttacctcgtcttgttcatccacgtacgggtcgtttacacacccgcttcaatcaaacggcaacagccaccgggcgcttgtcgtcgagtgacccgaacctccagaatattccagtgcgcacgccgctgggccaacacattcgtaaagcgtttgttgcggaagaaggttggttattacttgcggccgattactcccagatcgaacttcgtgtattggcgcatctctctggcgacgagaatcttaaacgcgtgtttcgcgaaggcaaggatattcacactgaaaccgcagcctggatgttcggggtggacccagccttagtggaccccaagatgcgtcgtgccgccaagaccgtcaactttggcgtactctatggtatgtcagcagcacgtcttagtcaggaattgggcattgactacaaagaagctgaagcgtttatcgagcgctatttccaatcctttccgaaagttcgcgcgtggattgaacgtacgctcgaagaaggtcgcactcgcggctatgtggaaacgttattcgggcgtcgtcgctacgttccagatcttacgtctcgtgtccgctcagtgcgcgaagctgctgagcgtatggcctggaatatgcctgttcagggaacagcggcggacctcatgaagatcgccatggtgaaattgtttccgcgcttgaaacccttaggagcccaccttcttttacaggtgcatgatgaattggtcttggaagtacccgaggatcgcgcagaagaagccaaagcactcgtgaaagaggttatggaaaacgcgtatccgttagatgttccgttggaggtcgaagtgggtgtaggccgtgattggcttgaagcgaaacaagactaatga

SEQ ID NO: 1016 - protein, 844 aa, synthetic construct
  REGION 1..844: note = DNA Polymerase Variant
MHHHHHHGGSGMLPLFDLEEPPKRVLLVDGHHLAYRTFYALSLTTSRGEPVQMVYGFARSLLKALKEDGQAVVVVFDAKAPSFRHEAYEAYKAGRAPTPEDFPRQLALVKRLVDLLGLVRLEAPGYEADDVLGTLAKKAEREGMEVCILTGDRDFFQLLSEKVSVLLPDGTLVTPKDVQEKYGVPPERWVDFRALTGDRSDNIPGVAGIGEKTALRLLAEWGSVENLLKNLDRVKPDSLRRKIEAHLEDLRLSLDLARIRTDLPLEVDFKALRRRTPDLEGLRAFLEELELGSLLHEFGLLGGEKPREEAPWPPPEGAFVGFLLSRKEPMWAELLALAAAAEGRVHRATSPVEALADLKEARGFLAKDLAVLALREGVALDPTDDPLLVAYLLDHANTNPERVARRYGGVFTEDAAERALLSERLFQTLFPRLSEKLLWLYQEVERPLSRVLAHMEARGVRLDVPLLEALSFELEKELERLEGEVFRLAGHPFNLNSRDQLEKVLFDELGLTPVTRTEKTGKRSTSAAALEALRGAHPIVELILQYRELSKLKSTYLDRLPRLVHPRTGRLHTRFNQTATATGRLSSSDPNLQNIPVRTPLGQHIRKAFVAEEGWLLLAADYSQIELRVLAHLSGDENLKRVFREGKDIHTETAAWMFGVDPALVDPKMRRAAKTVNFGVLYGMSAARLSQELGIDYKEAEAFIERYFQSFPKVRAWIERTLEEGRTRGYVETLFGRRRYVPDLTSRVRSVREAAERMAWNMPVQGTAADLMKIAMVKLFPRLKPLGAHLLLQVHDELVLEVPEDRAEEAKALVKEVMENAYPLDVPLEVEVGVGRDWLEAKQD

SEQ ID NO: 1017 - DNA, 2538 bp, synthetic construct
  misc_feature 1..2538: note = DNA Polymerase Variant
  source 1..2538: mol_type = other DNA
atgcaccatcatcatcatcatggcggtagcggcatgttaccgctgtttgatttggaagaaccaccaaaacgcgtgctgcttgttgacggccatcatctggcgtatcgtaccttctacgcactgagccttacgacctcacgtggtgagcctgtccagatggtgtatgggtttgctcgctccctgctgaaagccctgaaggaagatggtcaagccgtagtagtggttttcgatgcgaaagcaccgtcgtttcgtcacgaagcgtacgaggcctataaagctggccgcgcaccgaccccggaagactttccgcgtcagttagcgctcgtcaaacgcctcgtggatttgctgggattagttcgcttggaagctcctggctacgaggcggacgacgtgctcggtacactggccaagaaagcagaacgtgaaggcatggaggtctgcattcttaccggtgatcgcgatttcttccagctgctgtctgagaaagtgagcgttttgctgcccgatggcacgttagtaaccccgaaagatgtgcaagagaaatatggagttccgccagaacgttgggtggactttcgcgcactgactggtgatcgttcagacaacatcccgggcgttgccgggattggtgaaaagacggcgctgcgcctgctggcagaatggggctcggtggaaaatctgctcaagaaccttgatcgtgtgaaacctgatagcttacgccgcaagatcgaagcccacctggaagacttgcgtctgagtctggatcttgcccgtattcgcaccgatctgccgttggaagtagactttaaagctctgcgtcgtcgcacacccgatttagaggggttacgcgcgttcctcgaagaactggagctgggctccctgctgcatgaattcggtttgttgggcggagagaaaccgcgtgaagaagcaccatggccgccgcccgaaggtgcctttgtcggctttcttctgtcacgcaaagagccaatgtgggcggaactgttagctcttgcagccgccgcggaagggcgtgttcaccgcgcgacctctcctgtcgaggccctcgctgacctcaaagaagcacgtggtttcttggcgaaagatttagccgtgcttgcattacgcgaaggcgttgcgctcgatccgacggacgacccgcttttggtggcttatttgctcgatcatgcgaataccaacccggaacgtgtcgcccgtcgttacggcggcgagtttactgaagatgcggcagaacgcgcgttgcttagcgaacgcctcttccagacgttatttttgcgtctttcggagaaattactctggctctatcaggaagtcgaacgtccattgagtcgcgtgcttgcccatatggaggctcgcggtgtgcgcttagatgttccgttgttagaagcactcagcttcgagttggagaaagaactggaacgtcttgaaggcgaagtctttcgtttagcggggcatcccttcaatctcaactctcgcgaccaattggagaaagtgctctttgatgaattaggtttaacccctgtcacgcgtacagagaagaccggcaaacgttccacttcggcagccgccttggaagcacttcgtggtgctcacccgatcgtcgagttgattttgcagtatcgcgagctcagcaaactcaaatcaacctatcttgataggttacctcgtcttgttcatccacgtacgggtcgtttacacacccgcttcaatcaaacggcaacagccactgggcgcttgtcgtcgagtgacccgaacctccagaatattccagtgcgcacgccgctgggccaacacattcgtaaagcgtttgttgcggaagaaggttggttattacttgcggccgattactcccagatcgaacttcgtgtattggcgcatctctctggcgacgagaatcttaaacgcgtgtttcgcgaaggcaaggatattcacactgaaaccgcagcctggatgttcggggtggacccagccttagtggaccccaagatgcgtcgtgccgccaagaccgtcaactttggcgtactctatggtatgtcagcagcacgtcttagtcaggaattgggcattgactacaaagaagctgaagcgtttatcgagcgctatttccaatcctttccgaaagttcgcgcgtggattgaacgtacgctcgaagaaggtcgcactcgcggctatgtggaaacgttattcgggcgtcgtcgctacgttccagatcttacgtctcgtgtccgctcagtgcgcgaagctgctgagcgtatggcctggaatatgcctgttcagggaacagcggcggacctcatgaagatcgccatggtgaaattgtttccgcgcttgaaacccttaggagcccaccttcttttacaggtgcatgatgaattggtcttggaagtacccgaggatcgcgcagaagaagccaaagcactcgtgaaagaggttatggaaaacgcgtatccgttagatgttccgttggaggtcgaagtgggtgtaggccgtgattggcttgaagcgaaacaagactaatga

SEQ ID NO: 1018 - protein, 844 aa, synthetic construct
  REGION 1..844: note = DNA Polymerase Variant
MHHHHHHGGSGMLPLFDLEEPPKRVLLVDGHHLAYRTFYALSLTTSRGEPVQMVYGFARSLLKALKEDGQAVVVVFDAKAPSFRHEAYEAYKAGRAPTPEDFPRQLALVKRLVDLLGLVRLEAPGYEADDVLGTLAKKAEREGMEVCILTGDRDFFQLLSEKVSVLLPDGTLVTPKDVQEKYGVPPERWVDFRALTGDRSDNIPGVAGIGEKTALRLLAEWGSVENLLKNLDRVKPDSLRRKIEAHLEDLRLSLDLARIRTDLPLEVDFKALRRRTPDLEGLRAFLEELELGSLLHEFGLLGGEKPREEAPWPPPEGAFVGFLLSRKEPMWAELLALAAAAEGRVHRATSPVEALADLKEARGFLAKDLAVLALREGVALDPTDDPLLVAYLLDHANTNPERVARRYGGEFTEDAAERALLSERLFQTLFLRLSEKLLWLYQEVERPLSRVLAHMEARGVRLDVPLLEALSFELEKELERLEGEVFRLAGHPFNLNSRDQLEKVLFDELGLTPVTRTEKTGKRSTSAAALEALRGAHPIVELILQYRELSKLKSTYLDRLPRLVHPRTGRLHTRFNQTATATGRLSSSDPNLQNIPVRTPLGQHIRKAFVAEEGWLLLAADYSQIELRVLAHLSGDENLKRVFREGKDIHTETAAWMFGVDPALVDPKMRRAAKTVNFGVLYGMSAARLSQELGIDYKEAEAFIERYFQSFPKVRAWIERTLEEGRTRGYVETLFGRRRYVPDLTSRVRSVREAAERMAWNMPVQGTAADLMKIAMVKLFPRLKPLGAHLLLQVHDELVLEVPEDRAEEAKALVKEVMENAYPLDVPLEVEVGVGRDWLEAKQD

SEQ ID NO: 1019 - DNA, 2538 bp, synthetic construct
  misc_feature 1..2538: note = DNA Polymerase Variant
  source 1..2538: mol_type = other DNA
atgcaccatcatcatcatcatggcggtagcggcatgttaccgctgtttgatttggaagaaccaccaaaacgcgtgctgcttgttgacggccatcatctggcgtatcgtaccttctacgcactgagccttacgacctcacgtggtgagcctgtccagatggtgtatgggtttgctcgctccctgctgaaagccctgaaggaagatggtcaagccgtagtagtggttttcgatgcgaaggcaccgtcgtttcgtcacgaagcgtacgaggcctataaagctggccgcgcaccgaccccggaagactttccgcgtcagttagcgctcgtcaaacgcctcgtggatttgctgggattagttcgcttggaagctcctggctacgaggcggacgacgtgctcggtacactggccaagaaagcagaacgtgaaggcatggaggtctgcattcttaccggtgatcgcgatttcttccagctgctgtctgagaaagtgagcgttttgctgcccgatggcacgttagtaaccccgaaagatgtgcaagagaaatatggagttccgccagaacgttgggtggactttcgcgcactgactggtgatcgttcagacaacatcccgggcgttgccgggattggtgaaaagacggcgctgcgcctgctggcagaatggggctcggtggaaaatctgctcaagaaccttgatcgtgtgaaacctgatagcttacgccgcaagatcgaagcccacctggaagacttgcgtctgagtctggatcttgcacgtattcgcaccgatctgccgttggaagtagactttaaagctctgcgtcgtcgcacacccgatttagaggggttacgcgcgttcctcgaagaactggagctgggctccctgctgcatgaattcggtttgttgggcggagagaaaccgcgtgaagaagcaccatggccgccgcccgggggtgcctttgtcggctttcttctgtcacgcaaagagccaatgtgggcggaactgttagctcttgcagccgccgcggaagggcgtgttcaccgcgcgacctctcctgtcgaggccctcgctgacctcaaagaagcacgtggtttcttggcgaaagatttagccgtgcttgcattacgcgaaggcgttgcgctcgatccgacggacgacccgcttttggtggcttatttgctcgatcatgcgaataccaacccggaacgtgtcgcccgtcgttacggcggcgagtttactgaagatgcggcagaacgcgcgttgcttagcgaacgcctcttccagacgttatttccacgtctttcggagaaattactctggctctatcaggaagtcgaacgtccattgagtcgcgtgcttgcccatatggaggctcgcggtgtgcgcttagatgttccgttgttagaagcactcagcttcgagctggaaaaagaactggaacgtcttgaaggcgaagtctttcgtttagcggggcatcccttcaatctcaactctcgcgaccaattggagaaagtgctctttgatgaattaggtttaacccctgtcacgcgtacagagaagaccggcaaacgttccacttcggcagccgccttggaagcacttcgtggtgtgcacccgatcgtcgagttgattttgcagtatcgcgagctcagcaaactcaaatcaacctatcttgataggttacctaagcttgttcatccacgtacgggtcgtttacacacccgcttcaatcaaacggcaacagccaccgggcgcttgtcgtcgagtgacccgaacctccagaatattccagtgcgcacgccgctgggccaacacattcgtaaagcgtttgttgcggaagaaggttggttattacttgcggccgattactcccagatcgaacttcgtgtattggcgcatctctctggcgacgagaatcttaaacgcgtgtttcgcgaaggcaaggatattcacactgaaaccgcagcctggatgttcggggtggacccggccttagtggaccccaagatgcgtcgtgccgccaagaccgtcaactttggcgtactctatggtatgtcagcagcacgtcttagtcaggaattgggcattgactacaaagaagctgaagcgtttatcgagcgctatttccaatcctttccgaaagttcgcgcgtggattgaacgtacgctcgaagaaggtcgcactcgcggctatgtggaaacgttattcgggcgtcgtcgctacgttccagatcttacgtctcgtgtccgctcagtgcgcgaagctgctgagcgtatggcctggaatatgcctgttcagggaacagcggcggacctcatgaagatcgccatggtgaaattgtttccgcgcttgaaacccttaggagcccaccttcttctgcaggtgcatgatgaattggtcttggaagtacccgaggatcgcgcagaagaagccaaagcactcgtgaaagaggttatggaaaacgcgtatccgttagatgttccgttggaggtcgaagtgggtgtaggccgtgattggcttgaagcgaaacaagactaatga

SEQ ID NO: 1020 - protein, 844 aa, synthetic construct
  REGION 1..844: note = DNA Polymerase Variant
MHHHHHHGGSGMLPLFDLEEPPKRVLLVDGHHLAYRTFYALSLTTSRGEPVQMVYGFARSLLKALKEDGQAVVVVFDAKAPSFRHEAYEAYKAGRAPTPEDFPRQLALVKRLVDLLGLVRLEAPGYEADDVLGTLAKKAEREGMEVCILTGDRDFFQLLSEKVSVLLPDGTLVTPKDVQEKYGVPPERWVDFRALTGDRSDNIPGVAGIGEKTALRLLAEWGSVENLLKNLDRVKPDSLRRKIEAHLEDLRLSLDLARIRTDLPLEVDFKALRRRTPDLEGLRAFLEELELGSLLHEFGLLGGEKPREEAPWPPPGGAFVGFLLSRKEPMWAELLALAAAAEGRVHRATSPVEALADLKEARGFLAKDLAVLALREGVALDPTDDPLLVAYLLDHANTNPERVARRYGGEFTEDAAERALLSERLFQTLFPRLSEKLLWLYQEVERPLSRVLAHMEARGVRLDVPLLEALSFELEKELERLEGEVFRLAGHPFNLNSRDQLEKVLFDELGLTPVTRTEKTGKRSTSAAALEALRGVHPIVELILQYRELSKLKSTYLDRLPKLVHPRTGRLHTRFNQTATATGRLSSSDPNLQNIPVRTPLGQHIRKAFVAEEGWLLLAADYSQIELRVLAHLSGDENLKRVFREGKDIHTETAAWMFGVDPALVDPKMRRAAKTVNFGVLYGMSAARLSQELGIDYKEAEAFIERYFQSFPKVRAWIERTLEEGRTRGYVETLFGRRRYVPDLTSRVRSVREAAERMAWNMPVQGTAADLMKIAMVKLFPRLKPLGAHLLLQVHDELVLEVPEDRAEEAKALVKEVMENAYPLDVPLEVEVGVGRDWLEAKQD

SEQ ID NO: 1021 - DNA, 2538 bp, synthetic construct
  misc_feature 1..2538: note = DNA Polymerase Variant
  source 1..2538: mol_type = other DNA
atgcaccatcatcatcatcatggcggtagcggcatgttaccgctgtttgatttggaagaaccaccaaaacgcgtgctgcttgttgacggccatcatctggcgtatcgtaccttctacgcactgagccttacgacctcacgtggtgagcctgtccagatggtgtatgggtttgctcgctccctgctgaaagccctgaaggaagatggtcaagccgtagtagtggttttcgatgcgaaggcaccgtcgtttcgtcacgaagcgtacgaggcctataaagctggccgcgcaccgaccccggaagactttccgcgtcagttagcgctcgtcaaacgcctcgtggatttgctgggattagttcgcttggaagctcctggctacgaggcggacgacgtgctcggtacactggccaagaaagcagaacgtgaaggcatggaggtctgcattcttaccggtgatcgcgatttcttccagctgctgtctgagaaagtgagcgttttgctgcccgatggcacgttagtaaccccgaaagatgtgcaagagaaatatggagttccgccagaacgttgggtggactttcgcgcactgactggtgatcgttcagacaacatcccgggcgttgccgggattggtgaaaagacggcgctgcgcctgctggcagaatggggctcggtggaaaatctgctcaagaaccttgatcgtgtgaaacctgatagcttacgccgcaagatcgaagcccacctggaagacttgcgtctgagtctggatcttgtacgtattcgcaccgatctgccgttggaagtagactttaaagctctgcgtcgtcgcacacccgatttagaggggttacgcgcgttcctcgaagaactggagctgggctccctgctgcatgaattcggtttgttgggcggagagaaaccgcgtgaagaagcaccatggccgccgcccgagggtgcctttgtcggctttcttctgtcacgcaaagagccaatgtgggcggaactgttagctcttgcagccgccgcggaagggcgtgttcaccgcgcgacctctcctgtcgaggccctcgctgacctcaaagaagcacgtggtttcttggcgaaagatttagccgtgcttgcattacgcgaaggcgttgcgctcgatccgacggacgacccgcttttggtggcttatttgctcgatcatgcgaataccaacccggaacgtgtcgcccgtcgttacggcggcgagtttactgaagatgcggcagaacgcgcgttgcttagcgaacgcctcttccagacgttatttccacgtctttcggagaaattactctggctctatcaggaagtcgaacgtccattgagtcgcgtgcttgcccatatggaggctcgcggtgtgcgcttagatgttccgttgttagaagcactcagcttcgagttggagaaagaactggaacgtcttgaaggcgaagtctttcgtttagcggggcatcccttcaatctcaactctcgcgaccaattggagaaagtgctctttgatgaattaggtttaacccctgtcacgcgtacagagaagaccggcaaacgttccacttcggcagccgccttggaagcacttcgtggtgtgcacccgatcgtcgagttgattttgcagtatcgcgagctcagcaaactcaaatcaacctatcttgataggttacctcgtcttgttcatccacgtacgggtcgtttacacacccgcttcaatcaaacggcaacagccaccgggcgcttgtcgtcgagtgacccgaacctccagaatattccagtgcgcacgccgctgggccaacacattcgtaaagcgtttgttgcggaagaaggttggttattacttgcggccgattactcccagatcgaacttcgtgtattggcgcatctctctggcgacgagaatcttaaacgcgtgtttcgcgaaggcaaggatattcacactgaaaccgcagcctggatgttcggggtggacccggccttagtggaccccaagatgcgtcgtgccgccaagaccgtcaactttggcgtactctatggtatgtcagcagcacgtcttagtcaggaattgggcattgactacaaagaagctgaagcgtttatcgagcgctatttccaatcctttccgaaagttcgcgcgtggattgaacgtacgctcgaagaaggtcgcactcgcggctatgtggaaacgttattcgggcgtcgtcgctacgttccagatcttacgtctcgtgtccgctcagtgcgcgaagctgctgagcgtatggcctggaatatgcctgttcagggaacagcggcggacctcatgaagatcgccatggtgaaattgtttccgcgcttgaaacccttaggagcccaccttcttttccaggtgcatgatgaattggtcttggaagtacccgaggatcgcgcagaagaagccaaagcactcgtgaaagaggttatggaaaacgcgtatccgttagatgttccgttggaggtcgaagtgggtgtaggccgtgattggcttgaagcgaaacaagactaatga

SEQ ID NO: 1022 - protein, 844 aa, synthetic construct
  REGION 1..844: note = DNA Polymerase Variant
MHHHHHHGGSGMLPLFDLEEPPKRVLLVDGHHLAYRTFYALSLTTSRGEPVQMVYGFARSLLKALKEDGQAVVVVFDAKAPSFRHEAYEAYKAGRAPTPEDFPRQLALVKRLVDLLGLVRLEAPGYEADDVLGTLAKKAEREGMEVCILTGDRDFFQLLSEKVSVLLPDGTLVTPKDVQEKYGVPPERWVDFRALTGDRSDNIPGVAGIGEKTALRLLAEWGSVENLLKNLDRVKPDSLRRKIEAHLEDLRLSLDLVRIRTDLPLEVDFKALRRRTPDLEGLRAFLEELELGSLLHEFGLLGGEKPREEAPWPPPEGAFVGFLLSRKEPMWAELLALAAAAEGRVHRATSPVEALADLKEARGFLAKDLAVLALREGVALDPTDDPLLVAYLLDHANTNPERVARRYGGEFTEDAAERALLSERLFQTLFPRLSEKLLWLYQEVERPLSRVLAHMEARGVRLDVPLLEALSFELEKELERLEGEVFRLAGHPFNLNSRDQLEKVLFDELGLTPVTRTEKTGKRSTSAAALEALRGVHPIVELILQYRELSKLKSTYLDRLPRLVHPRTGRLHTRFNQTATATGRLSSSDPNLQNIPVRTPLGQHIRKAFVAEEGWLLLAADYSQIELRVLAHLSGDENLKRVFREGKDIHTETAAWMFGVDPALVDPKMRRAAKTVNFGVLYGMSAARLSQELGIDYKEAEAFIERYFQSFPKVRAWIERTLEEGRTRGYVETLFGRRRYVPDLTSRVRSVREAAERMAWNMPVQGTAADLMKIAMVKLFPRLKPLGAHLLFQVHDELVLEVPEDRAEEAKALVKEVMENAYPLDVPLEVEVGVGRDWLEAKQD

SEQ ID NO: 1023 - DNA, 2538 bp, synthetic construct
  misc_feature 1..2538: note = DNA Polymerase Variant
  source 1..2538: mol_type = other DNA
atgcaccatcatcatcatcatggcggtagcggcatgttaccgctgtttgatttggaagaaaacccaaaacgcgtgctgcttgttgacggccatcatctggcgtatcgtaccttctacgcactgagccttacgacctcacgtggtgagcctgtccagatggtgtatgggtttgctcgctccctgctgaaagccctgaaggaagatggtcaagccgtagtagtggttttcgatgcgcgcgcaccgtcgtttcgtcacgaagcgtacgaggcctataaagctggccgcgcaccgaccccggaagactttccgcgtcagttagcgctcgtcaaacgcctcgtggatttgctgggattagttcgcttggaagctcctggctacgaggcggacgacgtgctcggtacactggccaagaaagcagaacgtgaaggcatggaggtctgcattcttaccggtgatcgcgatttcttccagctgctgtctgagaaagtgagcgttttgctgcccgatggcacgttagtaaccccgaaagatgtgcaagagaaatatggagttccgccagaacgttgggtggactttcgcgcactgactggtgatcgttcagacaacatcccgggcgttgccgggattggtgaaaagacggcgctgcgcctgctggcagaatggggctcggtggaaaatctgctcaagaaccttgatcgcgtgaaacctgatagcttacgccgcaagatcgaagcccacctggaagacttgcgtctgagtctggatcttgcccgtattcgcaccgatctgccgttggaagtagactttaaagctctgcgtcgtcgcacacccgatttagaggggttacgcgcgttcctcgaagaactggagctgggctccctgctgcatgaattcggtttgttgggcggagagaaaccgcgtgaagaagcaccatggccgccgcccgaaggtgcctttgtcggctttcttctgtcacgcaaagagccaatgtgggcggaactgttagctcttgcagccgccgcggaagggcgtgttcaccgcgcgacctctcctgtcgaggccctcgctgacctcaaagaagcacgtggtttcttggcgaaagatttagccgtgcttgcattacgcgaaggcgttgcgctcgatccgacggacgacccgcttttggtggcttatttgctcgatcatgcgaataccaacccggaacgtgtcgcccgtcgttacggcggcgagtttactgaagatgcggcagaacgcgcgttgcttagcgaacgcctcttccagacgttatttccacgtctttcggagaaattactctggctctatggtgaagtcgaacgtccattgagtcgcgtgcttgcccatatggaggctcgcggtgtgcgcttagatgttccgttgttagaagcactcagcttcgagttggagaaagaactggaacgtcttgaaggcgaagtctttcgtttagcggggcatcccttcaatctcaactctcgcgaccaattggagaaagtgctctttgatgaattaggtttaacccctgtcacgcgtacagagaagaccggcaaacgttccacttcggcagccgccttggaagcacttcgtggtgctcacccgatcgtcgagttgattttgcagtatcgcgagctcagcaaactcaaatcaacctatcttgataggttacctcgtcttgttcatccacgtacgggtcgtttacacacccgcttcaatcaaacggcaacagccaccgggcgcttgtcgtcgagtgacccgaacctccagaatattccagtgcgcacgccgctgggccaacacattcgtaaagcgtttgttgcggaacatggttggttattacttgcggccgattactcccagatcgaacttcgtgtattggcgcatctctctggcgacgagaatcttaaacgcgtgtttcgcgaaggcaaggatattcacactgaaaccgcagcctggatgttcggggtggacccagccttagtggaccccaagatgcgtcgtgccgccaagaccgtcaactttggcgtactctatggtatgtcagcagcacgtcttagtcaggaattgggcattgactacaaagaagctgaagcgtttatcgagcgctatttccaatcctttccgaaagttcgcgcgtggattgaacgtacgctcgaagaaggtcgcactcgcggctatgtggaaacgttattcgggcgtcgtcgctacgttccagatcttacgtctcgtgtccgctcagtgcgcgaagctgctgagcgtatggcctggaatatgcctgttcagggaacagcggcggacctcatgaagatcgccatggtgaaattgtttccgcgcttgaaacccttaggagcccaccttcttttacaggtgcatgatgaattggtcttggaagtacccgaggatcgcgcagaagaagccaaagcactcgtgaaagaggttatggaaaacgcgtatccgttagatgttccgttggaggtcgaagtgggtgtaggccgtgattggcttgaagcgaaacaagactaatga

SEQ ID NO: 1024 - protein, 844 aa, synthetic construct
  REGION 1..844: note = DNA Polymerase Variant
MHHHHHHGGSGMLPLFDLEENPKRVLLVDGHHLAYRTFYALSLTTSRGEPVQMVYGFARSLLKALKEDGQAVVVVFDARAPSFRHEAYEAYKAGRAPTPEDFPRQLALVKRLVDLLGLVRLEAPGYEADDVLGTLAKKAEREGMEVCILTGDRDFFQLLSEKVSVLLPDGTLVTPKDVQEKYGVPPERWVDFRALTGDRSDNIPGVAGIGEKTALRLLAEWGSVENLLKNLDRVKPDSLRRKIEAHLEDLRLSLDLARIRTDLPLEVDFKALRRRTPDLEGLRAFLEELELGSLLHEFGLLGGEKPREEAPWPPPEGAFVGFLLSRKEPMWAELLALAAAAEGRVHRATSPVEALADLKEARGFLAKDLAVLALREGVALDPTDDPLLVAYLLDHANTNPERVARRYGGEFTEDAAERALLSERLFQTLFPRLSEKLLWLYGEVERPLSRVLAHMEARGVRLDVPLLEALSFELEKELERLEGEVFRLAGHPFNLNSRDQLEKVLFDELGLTPVTRTEKTGKRSTSAAALEALRGAHPIVELILQYRELSKLKSTYLDRLPRLVHPRTGRLHTRFNQTATATGRLSSSDPNLQNIPVRTPLGQHIRKAFVAEHGWLLLAADYSQIELRVLAHLSGDENLKRVFREGKDIHTETAAWMFGVDPALVDPKMRRAAKTVNFGVLYGMSAARLSQELGIDYKEAEAFIERYFQSFPKVRAWIERTLEEGRTRGYVETLFGRRRYVPDLTSRVRSVREAAERMAWNMPVQGTAADLMKIAMVKLFPRLKPLGAHLLLQVHDELVLEVPEDRAEEAKALVKEVMENAYPLDVPLEVEVGVGRDWLEAKQD

SEQ ID NO: 1025 - DNA, 2538 bp, synthetic construct
  misc_feature 1..2538: note = DNA Polymerase Variant
  source 1..2538: mol_type = other DNA
atgcaccatcatcatcatcatggcggtagcggcatgttaccgctgtttgatttggaagaaccaccaaaacgcgtgctgcttgttgacggccatcatctggcgtatcgtaccttctacgcactgagccttacgacctcacgtggtgagcctgtccagatggtgtatgggtttgctcgctccctgctgaaagccctgaaggaagatggtcaagccgtagtagtggttttcgatgcgaaggcaccgtcgtttcgtcacgaagcgtacgaggcctataaagctggccgcgcaccgaccccggaagactttccgcgtcagttagcgctcgtcaaacgcctcgtggatttgctgggattagttcgcttggaagctcctggctacgaggcggacgacgtgctcggtacactggccaagaaagcagaacgtgaaggcatggaggtctgcattcttaccggtgatcgcgatttcttccagctgctgtctgagaaagtgagcgttttgctgcccgatggcacgttagtaaccccgaaagatgtgcaagagaaatatggagttccgccagaacgttgggtggactttcgcgcactgactggtgatcgttcagacaacatcccgggcgttgccgggattggtgaaaagacggcgctgcgcctgctggcagaatggggctcggtggaaaatctgctcaagaaccttgatcgtgtgaaacctgatagcttacgccgcaagatcgaagcccacctggaagacttgcgtctgagtctggatcttgcccgtattcgcaccgatctgccgttggaagtagactttaaagctctgcgtcgtcgcacacccgatttagaggggttacgcgcgttcctcgaagaactggagctgggctccctgctgcatgaattcggtttgttgggcggagagaaaccgcgtgaagaagcaccatggccgccgcccgagggtgcctttgtcggctttcttctgtcacgcaaagagccaatgtgggcggaactgttagctcttgcagccgccgcggaagggcgtgttcaccgcgcgacctctcctgtcgaggccctcgctgacctcaaagaagcacgtggtttcttggcgaaagatttagccgtgcttgcattacgcgaaggcgttgcgctcgatccgacggacgacccgcttttggtggcttatttgctcgatcatgcgaataccaacccggaacgtgtcgcccgtcgttacggcggcgagtttactgaagatgcggcagaacgcgcgttgcttagcgaacgcctcttccagacgttatttccacgtctttcggagaaattactctggctctatcaggaagtcgaacgtccattgagtcgcgtgcttgcccatatggaggctcgcggtgtgcgcttagatgttccgttgttagaagcactcagcttcgagttggagaaagaactggaacgtcttgaaggcgaagtctttcgtttagcggggcatcccttcaatctcaactctcgcgaccaattggagaaagtgctctttgatgaattaggtttaacccctgtcacgcgtacagagaagaccggcaaacgttccacttcggcagccgccttggaagcacttcgtggtgtgcacccgatcgtcgagttgattttgcagtatcgcgagctcagcaaactcaaatcaacctatcttgataggttacctcgtcttgttcatccacgtacgggtcgtttacacacccgcttcaatcaaacggcaacagccaccgggcgcttgtcgtcgagtgacccgaacctccagaatattccagtgcgcacgccgctgggccaacacattcgtaaagcgtttgttgcggaagaaggttggttattacttgcggccgattactcccagatcgaacttcgtgtattggcgcatctctctggcgacgagaatcttaaacgcgtgtttcgcgaaggcaaggatattcacactgaaaccgcagcctggatgttcggggtggacccggccttagtggaccccaagatgcgtcgtgccgccaagaccgtcaactttggcgtactctatggtatgtcagcagcacgtcttagtcaggaattgggcattgactacaaagaagctgaagcgtttatcgagcgctatttccaatcctttccgaaagttcgcgcgtggattgaacgtacgctcgaagaaggtcgcactcgcggctatgtggaaacgttattcgggcgtcgtcgctacgttccagatcttacgtctcgtgtccgctcagtgcgcgaagctgctgagcgtatggcctggaatatgcctgttcagggaacagcggcggacctcatgaagatcgccatggtgaaattgtttccgcgcttgaaacccttaggagcccaccttcttttacaggtgcatgatgaattggtcttggaagtacccgaggatcgcgcagaagaagccaaagcactcgtgaaagaggttatggaaaacgcgtatccgttagatgttccgttggaggtcgaagtgggtgtaggccgtgattggcttgaagcgaaacaagactaatga

SEQ ID NO: 1026 - protein, 844 aa, synthetic construct; identical to SEQ ID NO: 686
  REGION 1..844: note = DNA Polymerase Variant

SEQ ID NO: 1027 - DNA, 2538 bp, synthetic construct
  misc_feature 1..2538: note = DNA Polymerase Variant
  source 1..2538: mol_type = other DNA
atgcaccatcatcatcatcatggcggtagcggcatgttaccgctgtttgatttggaagaaccaccaaaacgcgtgctgcttgttgacggccatcatctggcgtatcgtaccttctacgcactgagccttacgacctcacgtggtgagcctgtccagatggtgtatgggtttgctcgctccctgctgaaagccctgaaggaagatggtcaagccgtagtagtggttttcgatgcgaaggcaccgtcgtttcgtcacgaagcgtacgaggcctataaagctggccgcgcaccgaccccggaagactttccgcgtcagttagcgctcgtcaaacgcctcgtggatttgctgggattagttcgcttggaagctcctggctacgaggcggacgacgtgctcggtacactggccaagaaagcagaacgtgaaggcatggaggtctgcattcttaccggtgatcgcgatttcttccagctgctgtctgagaaagtgagcgttttgctgcccgatggcacgttagtaaccccgaaagatgtgcaagagaaatatggagttccgccagaacgttgggtggactttcgcgcactgactggtgatcgttcagacaacatcccgggcgttgccgggattggtgaaaagacggcgctgcgcctgctggcagaatggggctcggtggaaaatctgctcaagaaccttgatcgtgtgaaacctgatagcttacgccgcaagatcgaagcccacctggaagacttgcgtctgagtctggatcttgtacgtattcgcaccgatctgccgttggaagtagactttaaagctctgcgtcgtcgcacacccgatttagaggggttacgcgcgttcctcgaagaactggagctgggctccctgctgcatgaattcggtttgttgggcggagagaaaccgcgtgaagaagcaccatggccgccgcccgagggtgcctttgtcggctttcttctgtcacgcaaagagccaatgtgggcggaactgttagctcttgcagccgccgcggaagggcgtgttcaccgcgcgacctctcctgtcgaggccctcgctgacctcaaagaagcacgtggtttcttggcgaaagatttagccgtgcttgcattacgcgaaggcgttgcgctcgatccgacggacgacccgcttttggtggcttatttgctcgatcatgcgaataccaacccggaacgtgtcgcccgtcgttacggcggcgagtttactgaagatgcggcagaacgcgcgttgcttagcgaacgcctcttccagacgttatttccacgtctttcggagaaattactctggctctatcaggaagtcgaacgtccattgagtcgcgtgcttgcccatatggaggctcgcggtgtgcgcttagatgttccgttgttagaagcactcagcttcgagttggagaaagaactggaacgtcttgaaggcgaagtctttcgtttagcggggcatcccttcaatctcaactctcgcgaccaattggagaaagtgctctttgatgaattaggtttaacccctgtcacgcgtacagagaagaccggcaaacgttccacttcggcagccgccttggaagcacttcgtggtgtgcacccgatcgtcgagttgattttgcagtatcgcgagctcagcaaactcaaatcaacctatcttgataggttacctcgtcttgttcatccacgtacgggtcgtttacacacccgcttcaatcaaacggcaacagccaccgggcgcttgtcgtcgagtgacccgaacctccagaatattccagtgcgcacgccgctgggccaacacattcgtaaagcgtttgttgcggaagaaggttggttattacttgcggccgattactcccagatcgaacttcgtgtattggcgcatctctctggcgacgagaatcttaaacgcgtgtttcgcgaaggcaaggatattcacactgaaaccgcagcctggatgttcggggtggactcggccttagtggaccccaagatgcgtcgtgccgccaagaccgtcaactttggcgtactctatggtatgtcagcagcacgtcttagtcaggaattgggcattgactacaaagaagctgaagcgtttatcgagcgctatttccaatcctttccgaaagttcgcgcgtggattgaacgtacgctcgaagaaggtcgcactcgcggctatgtggaaacgttattcgggcgtcgtcgctacgttccagatcttacgtctcgtgtccgctcagtgcgcgaagctgctgagcgtatggcctggaatatgcctgttcagggaacagcggcggacctcatgaagatcgccatggtgaaattgtttccgcgcttgaaacccttaggagcccaccttcttttccaggtgcatgatgaattggtcttggaagtacccgaggatcgcgcagaagaagccaaagcactcgtgaaagaggttatggaaaacgcgtatccgttagatgttccgttggaggtcgaagtgggtgtaggccgtgattggcttgaagcgaaacaagactaatga

SEQ ID NO: 1028 - protein, 844 aa, synthetic construct
  REGION 1..844: note = DNA Polymerase Variant
MHHHHHHGGSGMLPLFDLEEPPKRVLLVDGHHLAYRTFYALSLTTSRGEPVQMVYGFARSLLKALKEDGQAVVVVFDAKAPSFRHEAYEAYKAGRAPTPEDFPRQLALVKRLVDLLGLVRLEAPGYEADDVLGTLAKKAEREGMEVCILTGDRDFFQLLSEKVSVLLPDGTLVTPKDVQEKYGVPPERWVDFRALTGDRSDNIPGVAGIGEKTALRLLAEWGSVENLLKNLDRVKPDSLRRKIEAHLEDLRLSLDLVRIRTDLPLEVDFKALRRRTPDLEGLRAFLEELELGSLLHEFGLLGGEKPREEAPWPPPEGAFVGFLLSRKEPMWAELLALAAAAEGRVHRATSPVEALADLKEARGFLAKDLAVLALREGVALDPTDDPLLVAYLLDHANTNPERVARRYGGEFTEDAAERALLSERLFQTLFPRLSEKLLWLYQEVERPLSRVLAHMEARGVRLDVPLLEALSFELEKELERLEGEVFRLAGHPFNLNSRDQLEKVLFDELGLTPVTRTEKTGKRSTSAAALEALRGVHPIVELILQYRELSKLKSTYLDRLPRLVHPRTGRLHTRFNQTATATGRLSSSDPNLQNIPVRTPLGQHIRKAFVAEEGWLLLAADYSQIELRVLAHLSGDENLKRVFREGKDIHTETAAWMFGVDSALVDPKMRRAAKTVNFGVLYGMSAARLSQELGIDYKEAEAFIERYFQSFPKVRAWIERTLEEGRTRGYVETLFGRRRYVPDLTSRVRSVREAAERMAWNMPVQGTAADLMKIAMVKLFPRLKPLGAHLLFQVHDELVLEVPEDRAEEAKALVKEVMENAYPLDVPLEVEVGVGRDWLEAKQD

SEQ ID NO: 1029 - DNA, 2538 bp, synthetic construct
  misc_feature 1..2538: note = DNA Polymerase Variant
  source 1..2538: mol_type = other DNA
atgcaccatcatcatcatcatggcggtagcggcatgttaccgctgtttgatttggaagaaccaccaaaacgcgtgctgcttgttgacggccatcatctggcgtatcgtaccttctacgcactgagccttacgacctcacgtggtgagcctgtccagatggtgtatgggtttgctcgctccctgctgaaagccctgaaggaagatggtcaagccgtagtagtggttttcgatgcgaaagcaccgtcgtttcgtcacgaagcgtacgaggcctataaagctggccgcgcaccgaccccggaagactttccgcgtcagttagcgctcgtcaaacgcctcgtggatttgctgggattagttcgcttggaagctcctggctacgaggcggacgacgtgctcggtacactggccaagaaagcagaacgtgaaggcatggaggtctgcattcttaccggtgatcgcgatttcttccagctgctgtctgagaaagtgagcgttttgctgcccgatggcacgttagtaaccccgaaagatgtgcaagagaaatatggagttccgccagaacgttgggtggactttcgcgcactgactggtgatcgttcagacaacatcccgggcgttgccgggattggtgaaaagacggcgctgcgcctgctggcagaatggggctcggtggaaaatctgctcaagaaccttgatcgtgtgaaacctgatagcttacgccgcaagatcgaagcccacctggaagacttgcgtctgagtctggatcttgcccgtattcgcaccgatctgccgttggaagtagactttaaagctctgcgtcgtcgcacacccgatttagaggggttacgcgcgttcctcgaagaactggagctgggctccctgctgcatgaattcggtttgttgggcggagagaaaccgcgtgaagaagcaccatggccgccgcccgaaggtgcctttgtcggctttcttctgtcacgcaaagagccaatgtgggcggaactgttagctcttgcagccgccgcggaagggcgtgttcaccgcgcgacctctcctgtcgaggccctcgctgacctcaaagaagcacgtggtttcttggcgaaagatttagccgtgcttgcattacgcgaaggcgttgcgctcgatccgacggacgacccgcttttggtggcttatttgctcgatcatgcgaataccaacccggaacgtgtcgcccgtcgttacggcggcgagtttactgaagatgcggcagaacgcgcgttgcttagcgaacgcctcttccagacgttatttgtgcgtctttcggagaaattactctggctctatcaggaagtcgaacgtccattgagtcgcgtgcttgcccatatggaggctcgcggtgtgcgcttagatgttccgttgttagaagcactcagcttcgagttggagaaagaactggaacgtcttgaaggcgaagtctttcgtttagcggggcatcccttcaatctcaactctcgcgaccaattggagaaagtgctctttgatgaattaggtttaacccctgtcacgcgtacagagaagaccggcaaacgttccacttcggcagccgccttggaagcacttcgtggtgctcacccgatcgtcgagttgattttgcagtatcgcgagctcagcaaactcaaatcaacctatcttgataggttacctcgtcttgttcatccacgtacgggtcgtttacacacccgcttcaatcaaacggcaacagccaccgggcgcttgtcgtcgagtgacccgaacctccagaatattccagtgcgcacgccgctgggccaacacattcgtaaagcgtttgttgcggaagaaggttggttattacttgcggccgattactcccagatcgaacttcgtgtattggcgcatctctctggcgacgagaatcttaaacgcgtgtttcgcgaaggcaaggatattcacactgaaaccgcagcctggatgttcggggtggacccagccttagtggaccccaagatgcgtcgtgccgccaagaccgtcaactttggcgtactctatggtatgtcagcagcacgtcttagtcaggaattgggcattgactacaaagaagctgaagcgtttatcgagcgctatttccaatcctttccgaaagttcgcgcgtggattgaacgtacgctcgaagaaggtcgcactcgcggctatgtggaaacgttattcgggcgtcgtcgctacgttccagatcttacgtctcgtgtccgctcagtgcgcgaagctgctgagcgtatggcctggaatatgcctgttcagggaacagcggcggacctcatgaagatcgccatggtgaaattgtttccgcgcttgaaacccttaggagcccaccttcttttacaggtgcatgatgaattggtcttggaagtacccgaggatcgcgcagaagaagccaaagcactcgtgaaagaggttatggaaaacgcgtatccgttagatgttccgttggaggtcgaagtgggtgtaggccgtgattggcttgaagcgaaacaagactaatga

SEQ ID NO: 1030 - protein, 844 aa, synthetic construct
  REGION 1..844: note = DNA Polymerase Variant
MHHHHHHGGSGMLPLFDLEEPPKRVLLVDGHHLAYRTFYALSLTTSRGEPVQMVYGFARSLLKALKEDGQAVVVVFDAKAPSFRHEAYEAYKAGRAPTPEDFPRQLALVKRLVDLLGLVRLEAPGYEADDVLGTLAKKAEREGMEVCILTGDRDFFQLLSEKVSVLLPDGTLVTPKDVQEKYGVPPERWVDFRALTGDRSDNIPGVAGIGEKTALRLLAEWGSVENLLKNLDRVKPDSLRRKIEAHLEDLRLSLDLARIRTDLPLEVDFKALRRRTPDLEGLRAFLEELELGSLLHEFGLLGGEKPREEAPWPPPEGAFVGFLLSRKEPMWAELLALAAAAEGRVHRATSPVEALADLKEARGFLAKDLAVLALREGVALDPTDDPLLVAYLLDHANTNPERVARRYGGEFTEDAAERALLSERLFQTLFVRLSEKLLWLYQEVERPLSRVLAHMEARGVRLDVPLLEALSFELEKELERLEGEVFRLAGHPFNLNSRDQLEKVLFDELGLTPVTRTEKTGKRSTSAAALEALRGAHPIVELILQYRELSKLKSTYLDRLPRLVHPRTGRLHTRFNQTATATGRLSSSDPNLQNIPVRTPLGQHIRKAFVAEEGWLLLAADYSQIELRVLAHLSGDENLKRVFREGKDIHTETAAWMFGVDPALVDPKMRRAAKTVNFGVLYGMSAARLSQELGIDYKEAEAFIERYFQSFPKVRAWIERTLEEGRTRGYVETLFGRRRYVPDLTSRVRSVREAAERMAWNMPVQGTAADLMKIAMVKLFPRLKPLGAHLLLQVHDELVLEVPEDRAEEAKALVKEVMENAYPLDVPLEVEVGVGRDWLEAKQD

SEQ ID NO: 1031 - DNA, 2538 bp, synthetic construct
  misc_feature 1..2538: note = DNA Polymerase Variant
  source 1..2538: mol_type = other DNA
atgcaccatcatcatcatcatggcggtagcggcatgttaccgctgtttgatttggaagaaccaccaaaacgcgtgctgcttgttgacggccatcatctggcgtatcgtaccttctacgcactgagccttacgacctcacgtggtgagcctgtccagatggtgtatgggtttgctcgctccctgctgaaagccctgaaggaagatggtcaagccgtagtagtggttttcgatgcgaaagcaccgtcgtttcgtcacgaagcgtacgaggcctataaagctggccgcgcaccgaccccggaagactttccgcgtcagttagcgctcgtcaaacgcctcgtggatttgctgggattagttcgcttggaagctcctggctacgaggcggacgacgtgctcggtacactggccaagaaagcagaacgtgaaggcatggaggtctgcattcttaccggtgatcgcgatttcttccagctgctgtctgagaaagtgagcgttttgctgcccgatggcacgttagtaaccccgaaagatgtgcaagagaaatatggagttccgccagaacgttgggtggactttcgcgcactgactggtgatcgttcagacaacatcccgggcgttgccgggattggtgaaaagacggcgctgcgcctgctggcagaatggggctcggtggaaaatctgctcaagaaccttgatcgtgtgaaacctgatagcttacgccgcaagatcgaagcccacctggaagacttgcgtctgagtctggatcttgcccgtattcgcaccgatctgccgttggaagtagactttaaagctctgcgtcgtcgcacacccgatttagaggggttacgcgcgttcctcgaagaactggagctgggctccctgctgcatgaattcggtttgttgggcggagagaaaccgcgtgaagaagcaccatggccgccgcccgaaggtgcctttgtcggctttcttctgtcacgcaaagagccaatgtgggcggaactgttagctcttgcagccgccgcggaagggcgtgttcaccgcgcgacctctcctgtcgaggccctcgctgacctcaaagaagcacctggtttcttggcgaaagatttagccgtgcttgcattacgcgaaggcgttgcgctcgatccgacggacgacccgcttttggtggcttatttgctcgatcatgcgaataccaacccggaacgtgtcgcccgtcgttacggcggcgagtttactgaagatgcggcagaacgcgcgttgcttagcgaacgcctcttccagacgttatttccacgtctttcggagaaattactctggctctatcaggaagtcgaacgtccattgagtcgcgtgcttgcccatatggaggctcgcggtgtgcgcttagatgttccgttgttagaagcactcagcttcgagttggagaaagaactggaacgtcttgaaggcgaagtctttcgtttagcggggcatcccttcaatctcaactctcgcgaccaattggagaaagtgctctttgatgaattaggtttaacccctgtcacgcgtacagagaagaccggcaaacgttccacttcggcagccgccttggaagcacttcgtggtgctcacccgatcgtcgagttgattttgcagtatcgcgagctcagcaaactcaaatcaacctatcttgataggttacctcgtcttgttcatccacgtacgggtcgtttacacacccgcttcaatcaaacggcaacagccaccgggcgcttgtcgtcgagtgacccgaacctccagaatattccagtgcgcacgccgctgggccaacacattcgtaaagcgtttgttgcggaagaaggttggttattacttgcggccgattactcccagatcgaacttcgtgtattggcgcatctctctggcgacgagaatcttaaacgcgtgtttcgcgaaggcaaggatattcacactgaaaccgcagcctggatgttcggggtggacccagccttagtggaccccaagatgcgtcgtgccgccaagaccgtcaactttggcgtactctatggtatgtcagcagcacgtcttagtcaggaattgggcattgactacaaagaagctgaagcgtttatcgagcgctatttccaatcctttccgaaagttcgcgcgtggattgaacgtacgctcgaagaaggtcgcactcgcggctatgtggaaacgttattcgggcgtcgtcgctacgttccagatcttacgtctcgtgtccgctcagtgcgcgaagctgctgagcgtatggcctggaatatgcctgttcagggaacagcggcggacctcatgaagatcgccatggtgaaattgtttccgcgcttgaaacccttaggagcccaccttcttttacaggtgcatgatgaattggtcttggaagtacccgaggatcgcgcagaagaagccaaagcactcgtgaaagaggttatggaaaacgcgtatccgttagatgttccgttggaggtcgaagtgggtgtaggccgtgattggcttgaagcgaaacaagactaatga

SEQ ID NO: 1032 - protein, 844 aa, synthetic construct
  REGION 1..844: note = DNA Polymerase Variant
MHHHHHHGGSGMLPLFDLEEPPKRVLLVDGHHLAYRTFYALSLTTSRGEPVQMVYGFARSLLKALKEDGQAVVVVFDAKAPSFRHEAYEAYKAGRAPTPEDFPRQLALVKRLVDLLGLVRLEAPGYEADDVLGTLAKKAEREGMEVCILTGDRDFFQLLSEKVSVLLPDGTLVTPKDVQEKYGVPPERWVDFRALTGDRSDNIPGVAGIGEKTALRLLAEWGSVENLLKNLDRVKPDSLRRKIEAHLEDLRLSLDLARIRTDLPLEVDFKALRRRTPDLEGLRAFLEELELGSLLHEFGLLGGEKPREEAPWPPPEGAFVGFLLSRKEPMWAELLALAAAAEGRVHRATSPVEALADLKEAPGFLAKDLAVLALREGVALDPTDDPLLVAYLLDHANTNPERVARRYGGEFTEDAAERALLSERLFQTLFPRLSEKLLWLYQEVERPLSRVLAHMEARGVRLDVPLLEALSFELEKELERLEGEVFRLAGHPFNLNSRDQLEKVLFDELGLTPVTRTEKTGKRSTSAAALEALRGAHPIVELILQYRELSKLKSTYLDRLPRLVHPRTGRLHTRFNQTATATGRLSSSDPNLQNIPVRTPLGQHIRKAFVAEEGWLLLAADYSQIELRVLAHLSGDENLKRVFREGKDIHTETAAWMFGVDPALVDPKMRRAAKTVNFGVLYGMSAARLSQELGIDYKEAEAFIERYFQSFPKVRAWIERTLEEGRTRGYVETLFGRRRYVPDLTSRVRSVREAAERMAWNMPVQGTAADLMKIAMVKLFPRLKPLGAHLLLQVHDELVLEVPEDRAEEAKALVKEVMENAYPLDVPLEVEVGVGRDWLEAKQD

SEQ ID NO: 1033 - DNA, 2538 bp, synthetic construct
  misc_feature 1..2538: note = DNA Polymerase Variant
  source 1..2538: mol_type = other DNA
atgcaccatcatcatcatcatggcggtagcggcatgttaccgctgtttgatttggaagaaccaccaaaacgcgtgctgcttgttgacggccatcatctggcgtatcgtaccttctacgcactgagccttacgacctcacgtggtgagcctgtccagatggtgtatgggtttgctcgctccctgctgaaagccctgaaggaagatggtcaagccgtagtagtggttttcgatgcgaaggcaccgtcgtttcgtcacgaagcgtacgaggcctataaagctggccgcgcaccgaccccggaagactttccgcgtcagttagcgctcgtcaaacgcctcgtggatttgctgggattagttcgcttggaagctcctggctacgaggcggacgacgtgctcggtacactggccaagaaagcagaacgtgaaggcatggaggtctgcattcttaccggtgatcgcgatttcttccagctgctgtctgagaaagtgagcgttttgctgcccgatggcacgttagtaaccccgaaagatgtgcaagagaaatatggagttccgccagaacgttgggtggactttcgcgcactgactggtgatcgttcagacaacatcccgggcgttgccgggattggtgaaaagacggcgctgcgcctgctggcagaatggggctcggtggaaaatctgctcaagaaccttgatcgtgtgaaacctgatagcttacgccgcaagatcgaagcccacctggaagacttgcgtctgagtctggatcttgtacgtattcgcaccgatctgccgttggaagtagactttaaagctctgcgtcgtcgcacacccgatttagaggggttacgcgcgttcctcgaagaactggagctgggctccctgctgcatgaattcggtttgttgggcggagagaaaccgcgtgaagaagcaccatggccgccgcccgagggtgcctttgtcggctttcttctgtcacgcaaagagccaatgtgggcggaactgttagctcttgcagccgccgcggaagggcgtgttcaccgcgcgacctctcctgtcgaggccctcgctgacctcaaagaagcacgtggtttcttggcgaaagatttagccgtgcttgcattacgcgaaggcgttgcgctcgatccgacggacgacccgcttttggtggcttatttgctcgatcatgcgaataccaacccggaacgtgtcgcccgtcgttacggcggcgagtttactgaagatgcggcagaacgcgcgttgcttagcgaacgcctcttccagacgttatttccacgtctttcggagaaattactctggctctatcaggaagtcgaacgtccattgagtcgcgtgcttgcccatatggaggctcgcggtgtgcgcttagatgttccgttgttagaagcactcagcttcgaggcggaaaaagaactggaacgtcttgaaggcgaagtctttcgtttagcggggcatcccttcaatctcaactctcgcgaccaattggagaaagtgctctttgatgaattaggtttaacccctgtcacgcgtacagagaagaccggcaaacgttccacttcggcagcctccttggaagcacttcgtggtgtgcacccgatcgtcgagttgattttgcagtatcgcgagctcagcaaactcaaatcaacctatcttgataggttacctcgtcttgttcatccacgtacgggtcgtttacacacccgcttcaatcaaacggcaacagccaccgggcgcttgtcgtcgagtgacccgaacctccagaatattccagtgcgcacgccgctgggccaacacattcgtaaagcgtttgttgcggaagaaggttggttattacttgcggccgattactcccagatcgaacttcgtgtattggcgcatctctctggcgacgagaatcttaaacgcgtgtttcgcgaaggcaaggatattcacactgaaaccgcagcctggatgttcggggtggactcggccttagtggaccccaagatgcgtcgtgccgccaagaccgtcaactttggcgtactctatggtatgtcagcagcacgtcttagtcaggaattgggcattgactacaaagaagctgaagcgtttatcgagcgctatttccaatcctttccgaaagttcgcgcgtggattgaacgtacgctcgaagaaggtcgcactcgcggctatgtggaaacgttattcgggcgtcgtcgctacgttccagatcttacgtctcgtgtccgctcagtgcgcgaagctgctgagcgtatggcctggaatatgcctgttcagggaacagcggcggacctcatgaagatcgccatggtgaaattgtttccgcgcttgaaacccttaggagcccaccttcttctgcaggtgcatgatgaattggtcttggaagtacccgaggatcgcgcagaagaagccaaagcactcgtgaaagaggttatggaaaacgcgtatccgttagatgttccgttggaggtcgaagtgggtgtaggccgtgattggcttgaagcgaaacaagactaatga

SEQ ID NO: 1034 - protein, 844 aa, synthetic construct
  REGION 1..844: note = DNA Polymerase Variant
MHHHHHHGGSGMLPLFDLEEPPKRVLLVDGHHLAYRTFYALSLTTSRGEPVQMVYGFARSLLKALKEDGQAVVVVFDAKAPSFRHEAYEAYKAGRAPTPEDFPRQLALVKRLVDLLGLVRLEAPGYEADDVLGTLAKKAEREGMEVCILTGDRDFFQLLSEKVSVLLPDGTLVTPKDVQEKYGVPPERWVDFRALTGDRSDNIPGVAGIGEKTALRLLAEWGSVENLLKNLDRVKPDSLRRKIEAHLEDLRLSLDLVRIRTDLPLEVDFKALRRRTPDLEGLRAFLEELELGSLLHEFGLLGGEKPREEAPWPPPEGAFVGFLLSRKEPMWAELLALAAAAEGRVHRATSPVEALADLKEARGFLAKDLAVLALREGVALDPTDDPLLVAYLLDHANTNPERVARRYGGEFTEDAAERALLSERLFQTLFPRLSEKLLWLYQEVERPLSRVLAHMEARGVRLDVPLLEALSFEAEKELERLEGEVFRLAGHPFNLNSRDQLEKVLFDELGLTPVTRTEKTGKRSTSAASLEALRGVHPIVELILQYRELSKLKSTYLDRLPRLVHPRTGRLHTRFNQTATATGRLSSSDPNLQNIPVRTPLGQHIRKAFVAEEGWLLLAADYSQIELRVLAHLSGDENLKRVFREGKDIHTETAAWMFGVDSALVDPKMRRAAKTVNFGVLYGMSAARLSQELGIDYKEAEAFIERYFQSFPKVRAWIERTLEEGRTRGYVETLFGRRRYVPDLTSRVRSVREAAERMAWNMPVQGTAADLMKIAMVKLFPRLKPLGAHLLLQVHDELVLEVPEDRAEEAKALVKEVMENAYPLDVPLEVEVGVGRDWLEAKQD

SEQ ID NO: 1035 - DNA, 2538 bp, synthetic construct
  misc_feature 1..2538: note = DNA Polymerase Variant
  source 1..2538: mol_type = other DNA
atgcaccatcatcatcatcatggcggtagcggcatgttaccgctgtttgatttggaagaaccaccaaaacgcgtgctgcttgttgacggccatcatctggcgtatcgtaccttctacgcactgagccttacgacctcacgtggtgagcctgtccagatggtgtatgggtttgctcgctccctgctgaaagccctgaaggaagatggtcaagccgtagtagtggttttcgatgcgaaagcaccgtcgtttcgtcacgaagcgtacgaggcctataaagctggccgcgcaccgaccccggaagactttccgcgtcagttagcgctcgtcaaacgcctcgtggatttgctgggattagttcgcttggaagctcctggctacgaggcggacgacgtgctcggtacactggccaagaaagcagaacgtgaaggcatggaggtctgcattcttaccggtgatcgcgatttcttccagctgctgtctgagaaagtgagcgttttgctgcccgatggcacgttagtaaccccgaaagatgtgcaagagaaatatggagttccgccagaacgttgggtggactttcgcgcactgactggtgatcgttcagacaacatcccgggcgttgccgggattggtgaaaagacggcgctgcgcctgctggcagaatggggctcggtggaaaatctgctcaagaaccttgatcgtgtgaaacctgatagcttacgccgcaagatcgaagcccacctggaagacttgcgtctgagtctggatcttgcccgtattcgcaccgatctgccgttggaagtagactttaaagctctgcgtcgtcgcacacccgatttagaggggttacgcgcgttcctcgaagaactggagctgggctccctgctgcatgaattcggtttgttgggcggagagaaaccgcgtgaagaagcaccatggccgccgcccgaaggtgcctttgtcggctttcttctgtcacgcaaagagccaatgtgggcggaactgttagctcttgcagccgccgcggaagggcgtgttcaccgcgcgacctctcctgtcgaggccctcgctgacctcaaagaagcacgtggtttcttggcgaaagatttagccgtgcttgcattacgcgaaggcgttgcgctcgattctacggacgacccgcttttggtggcttatttgctcgatcatgcgaataccaacccggaacgtgtcgcccgtcgttacggcggcgagtttactgaagatgcggcagaacgcgcgttgcttagcgaacgcctcttccagacgttatttccacgtctttcggagaaattactctggctctatcaggaagtcgaacgtccattgagtcgcgtgcttgcccatatggaggctcgcggtgtgcgcttagatgttccgttgttagaagcactcagcttcgagttggagaaagaactggaacgtcttgaaggcgaagtctttcgtttagcggggcatcccttcaatctcaactctcgcgaccaattggagaaagtgctctttgatgaattaggtttaacccctgtcacgcgtacagagaagaccggcaaacgttccacttcggcagccgccttggaagcacttcgtggtgctcacccgatcgtcgagttgattttgcagtatcgcgagctcagcaaactcaaatcaacctatcttgataggttacctcgtcttgttcatccacgtacgggtcgtttacacacccgcttcaatcaaacggcaacagccaccgggcgcttgtcgtcgagtgacccgaacctccagaatattccagtgcgcacgccgctgggccaacacattcgtaaagcgtttgttgcggaagaaggttggttattacttgcggccgattactcccagatcgaacttcgtgtattggcgcatctctctggcgacgagaatcttaaacgcgtgtttcgcgaaggcaaggatattcacactgaaaccgcagcctggatgttcggggtggacccagccttagtggaccccaagatgcgtcgtgccgccaagaccgtcaactttggcgtactctatggtatgtcagcagcacgtcttagtcaggaattgggcattgactacaaagaagctgaagcgtttatcgagcgctatttccaatcctttccgaaagttcgcgcgtggattgaacgtacgctcgaagaaggtcgcactcgcggctatgtggaaacgttattcgggcgtcgtcgctacgttccagatcttacgtctcgtgtccgctcagtgcgcgaagctgctgagcgtatggcctggaatatgcctgttcagggaacagcggcggacctcatgaagatcgccatggtgaaattgtttccgcgcttgaaacccttaggagcccaccttcttttacaggtgcatgatgaattggtcttggaagtacccgaggatcgcgcagaagaagccaaagcactcgtgaaagaggttatggaaaacgcgtatccgttagatgttccgttggaggtcgaagtgggtgtaggccgtgattggcttgaagcgaaacaagactaatga

SEQ ID NO: 1036 - protein, 844 aa, synthetic construct
  REGION 1..844: note = DNA Polymerase Variant
MHHHHHHGGSGMLPLFDLEEPPKRVLLVDGHHLAYRTFYALSLTTSRGEPVQMVYGFARSLLKALKEDGQAVVVVFDAKAPSFRHEAYEAYKAGRAPTPEDFPRQLALVKRLVDLLGLVRLEAPGYEADDVLGTLAKKAEREGMEVCILTGDRDFFQLLSEKVSVLLPDGTLVTPKDVQEKYGVPPERWVDFRALTGDRSDNIPGVAGIGEKTALRLLAEWGSVENLLKNLDRVKPDSLRRKIEAHLEDLRLSLDLARIRTDLPLEVDFKALRRRTPDLEGLRAFLEELELGSLLHEFGLLGGEKPREEAPWPPPEGAFVGFLLSRKEPMWAELLALAAAAEGRVHRATSPVEALADLKEARGFLAKDLAVLALREGVALDSTDDPLLVAYLLDHANTNPERVARRYGGEFTEDAAERALLSERLFQTLFPRLSEKLLWLYQEVERPLSRVLAHMEARGVRLDVPLLEALSFELEKELERLEGEVFRLAGHPFNLNSRDQLEKVLFDELGLTPVTRTEKTGKRSTSAAALEALRGAHPIVELILQYRELSKLKSTYLDRLPRLVHPRTGRLHTRFNQTATATGRLSSSDPNLQNIPVRTPLGQHIRKAFVAEEGWLLLAADYSQIELRVLAHLSGDENLKRVFREGKDIHTETAAWMFGVDPALVDPKMRRAAKTVNFGVLYGMSAARLSQELGIDYKEAEAFIERYFQSFPKVRAWIERTLEEGRTRGYVETLFGRRRYVPDLTSRVRSVREAAERMAWNMPVQGTAADLMKIAMVKLFPRLKPLGAHLLLQVHDELVLEVPEDRAEEAKALVKEVMENAYPLDVPLEVEVGVGRDWLEAKQD

SEQ ID NO: 1037 - DNA, 2538 bp, synthetic construct
  misc_feature 1..2538: note = DNA Polymerase Variant
  source 1..2538: mol_type = other DNA
atgcaccatcatcatcatcatggcggtagcggcatgttaccgctgtttgatttggaagaaccaccaaaacgcgtgctgcttgttgacggccatcatctggcgtatcgtaccttctacgcactgagccttacgacctcacgtggtgagcctgtccagatggtgtatgggtttgctcgctccctgctgaaagccctgaaggaagatggtcaagccgtagtagtggttttcgatgcgaaagcaccgtcgtttcgtcacgaagcgtacgaggcctataaagctggccgcgcaccgaccccggaagactttccgcgtcagttagcgctcgtcaaacgcctcgtggatttgctgggattagttcgcttggaagctcctggctacgaggcggacgacgtgctcggtacactggccaagaaagcagaacgtgaaggcatggaggtctgcattcttaccggtgatcgcgatttcttccagctgctgtctgagaaagtgagcgttttgctgcccgatggcacgttagtaaccccgaaagatgtgcaagagaaatatggagttccgccagaacgttgggtggactttcgcgcactgactggtgatcgttcagacaacatcccgggcgttgccgggattggtgaaaagacggcgctgcgcctgctggcagaatggggctcggtggaaaatctgctcaagaaccttgatcgtgtgaaacctgatagcttacgccgcaagatcgaagcccacctggaagacttgcgtctgagtctggatcttgcccgtattcgcaccgatctgccgttggaagtagactttaaagctctgcgtcgtcgcacacccgatttagaggggttacgcgcgttcctcgaagaactggagctgggctccctgctgcatgaattcggtttgttgggcggagagaaaccgcgtgaagaagcaccatggccgccgcccgaaggtgcctttgtcggctttcttctgtcacgcaaagagccaatgtgggcggaactgttagctcttgcagccgccgcggaagggcgtgttcaccgcgcgacctctcctgtcgaggccctcgctgacctcaaagaagcacgtggtttcttggcgaaagatttagccgtgcttgcattacgcgaaggcgttgcgctcgatccgacggacgacccgcttttggtggcttatttgctcgatcatgcgaataccaacccggaacgtgtcgcccgtcgttacggcggcgagtttgtggaagatgcggcagaacgcgcgttgcttagcgaacgcctcttccagacgttatttccacgtctttcggagaaattactctggctctatcaggaagtcgaacgtccattgagtcgcgtgcttgcccatatggaggctcgcggtgtgcgcttagatgttccgttgttagaagcactcagcttcgagttggagaaagaactggaacgtcttgaaggcgaagtctttcgtttagcggggcatcccttcaatctcaactctcgcgaccaattggagaaagtgctctttgatgaattaggtttaacccctgtcacgcgtacagagaagaccggcaaacgttccacttcggcagccgccttggaagcacttcgtggtgctcacccgatcgtcgagttgattttgcagtatcgcgagctcagcaaactcaaatcaacctatcttgataggttacctcgtcttgttcatccacgtacgggtcgtttacacacccgcttcaatcaaacggcaacagccaccgggcgcttgtcgtcgagtgacccgaacctccagaatattccagtgcgcacgccgctgggccaacacattcgtaaagcgtttgttgcggaagaaggttggttattacttgcggccgattactcccagatcgaacttcgtgtattggcgcatctctctggcgacgagaatcttaaacgcgtgtttcgcgaaggcaaggatattcacactgaaaccgcagcctggatgttcggggtggacccagccttagtggaccccaagatgcgtcgtgccgccaagaccgtcaactttggcgtactctatggtatgtcagcagcacgtcttagtcaggaattgggcattgactacaaagaagctgaagcgtttatcgagcgctatttccaatcctttccgaaagttcgcgcgtggattgaacgtacgctcgaagaaggtcgcactcgcggctatgtggaaacgttattcgggcgtcgtcgctacgttccagatcttacgtctcgtgtccgctcagtgcgcgaagctgctgagcgtatggcctggaatatgcctgttcagggaacagcggcggacctcatgaagatcgccatggtgaaattgtttccgcgcttgaaacccttaggagcccaccttcttttacaggtgcatgatgaattggtcttggaagtacccgaggatcgcgcagaagaagccaaagcactcgtgaaagaggttatggaaaacgcgtatccgttagatgttccgttggaggtcgaagtgggtgtaggccgtgattggcttgaagcgaaacaagactaatga

SEQ ID NO: 1038 - protein, 844 aa, synthetic construct
  REGION 1..844: note = DNA Polymerase Variant
MHHHHHHGGSGMLPLFDLEEPPKRVLLVDGHHLAYRTFYALSLTTSRGEPVQMVYGFARSLLKALKEDGQAVVVVFDAKAPSFRHEAYEAYKAGRAPTPEDFPRQLALVKRLVDLLGLVRLEAPGYEADDVLGTLAKKAEREGMEVCILTGDRDFFQLLSEKVSVLLPDGTLVTPKDVQEKYGVPPERWVDFRALTGDRSDNIPGVAGIGEKTALRLLAEWGSVENLLKNLDRVKPDSLRRKIEAHLEDLRLSLDLARIRTDLPLEVDFKALRRRTPDLEGLRAFLEELELGSLLHEFGLLGGEKPREEAPWPPPEGAFVGFLLSRKEPMWAELLALAAAAEGRVHRATSPVEALADLKEARGFLAKDLAVLALREGVALDPTDDPLLVAYLLDHANTNPERVARRYGGEFVEDAAERALLSERLFQTLFPRLSEKLLWLYQEVERPLSRVLAHMEARGVRLDVPLLEALSFELEKELERLEGEVFRLAGHPFNLNSRDQLEKVLFDELGLTPVTRTEKTGKRSTSAAALEALRGAHPIVELILQYRELSKLKSTYLDRLPRLVHPRTGRLHTRFNQTATATGRLSSSDPNLQNIPVRTPLGQHIRKAFVAEEGWLLLAADYSQIELRVLAHLSGDENLKRVFREGKDIHTETAAWMFGVDPALVDPKMRRAAKTVNFGVLYGMSAARLSQELGIDYKEAEAFIERYFQSFPKVRAWIERTLEEGRTRGYVETLFGRRRYVPDLTSRVRSVREAAERMAWNMPVQGTAADLMKIAMVKLFPRLKPLGAHLLLQVHDELVLEVPEDRAEEAKALVKEVMENAYPLDVPLEVEVGVGRDWLEAKQD

SEQ ID NO: 1039 - DNA, 2538 bp, synthetic construct
  misc_feature 1..2538: note = DNA Polymerase Variant
  source 1..2538: mol_type = other DNA
atgcaccatcatcatcatcatggcggtagcggcatgttaccgctgtttgatttggaagaaccaccaaaacgcgtgctgcttgttgacggccatcatctggcgtatcgtaccttctacgcactgagccttacgacctcacgtggtgagcctgtccagatggtgtatgggtttgctcgctccctgctgaaagccctgaaggaagatggtcaagccgtagtagtggttttcgatgcgaaagcaccgtcgtttcgtcacgaagcgtacgaggcctataaagctggccgcgcaccgaccccggaagactttccgcgtcagttagcgctcgtcaaacgcctcgtggatttgctgggattagttcgcttggaagctcctggctacgaggcggacgacgtgctcggtacactggccaagaaagcagaacgtgaaggcatggaggtctgcattcttaccggtgatcgcgatttcttccagctgctgtctgagaaagtgagcgttttgctgcccgatggcacgttagtaaccccgaaagatgtgcaagagaaatatggagttccgccagaacgttgggtggactttcgcgcactgactggtgatcgttcagacaacatcccgggcgttgccgggattggtgaaaagacggcgctgcgcctgctggcagaatggggctcggtggaaaatctgctcaagaaccttgatcgtgtgaaacctgatagcttacgccgcaagatcgaagcccacctggaagacttgcgtctgagtctggatcttgcccgtattcgcaccgatctgccgttggaagtagactttaaagctctgcgtcgtcgcacacccgatttagaggggttacgcgcgttcctcgaagaactggagctgggctccctgctgcatgaattcggtttgttgggcggagagaaaccgcgtgaagaagcaccatggccgccgcccgaaggtgcctttgtcggctttcttctgtcacgcaaagagccaatgtgggcggaactgttagctcttgcagccgccgcggaagggcgtgttcaccgcgcgacctctcctgtcgaggccctcgctgacctcaaagaagcacgtggtttcttggcgaaagatttagccgtgcttgcattacgcgaaggcgttgcgctcgatccgacggacgacccgcttttggtggcttatttgctcgatcatgcgaataccaacccggaacgtgtcgcccgtcgttacggcggcgagtttactgaagatgcggcagaacgcgcgttgcttagcgaacgcctcttccagacgttatttccacgtctttcggagaaattactctggctctatcaggaagtcgaacgtagtttgagtcgcgtgcttgcccatatggaggctcgcggtgtgcgcttagatgttccgttgttagaagcactcagcttcgagttggagaaagaactggaacgtcttgaaggcgaagtctttcgtttagcggggcatcccttcaatctcaactctcgcgaccaattggagaaagtgctctttgatgaattaggtttaacccctgtcacgcgtacagagaagaccggcaaacgttccacttcggcagccgccttggaagcacttcgtggtgctcacccgatcgtcgagttgattttgcagtatcgcgagctcagcaaactcaaatcaacctatcttgataggttacctcgtcttgttcatccacgtacgggtcgtttacacacccgcttcaatcaaacggcaacagccaccgggcgcttgtcgtcgagtgacccgaacctccagaatattccagtgcgcacgccgctgggccaacacattcgtaaagcgtttgttgcggaagaaggttggttattacttgcggccgattactcccagatcgaacttcgtgtattggcgcatctctctggcgacgagaatcttaaacgcgtgtttcgcgaaggcaaggatattcacactgaaaccgcagcctggatgttcggggtggacccagccttagtggaccccaagatgcgtcgtgccgccaagaccgtcaactttggcgtactctatggtatgtcagcagcacgtcttagtcaggaattgggcattgactacaaagaagctgaagcgtttatcgagcgctatttccaatcctttccgaaagttcgcgcgtggattgaacgtacgctcgaagaaggtcgcactcgcggctatgtggaaacgttattcgggcgtcgtcgctacgttccagatcttacgtctcgtgtccgctcagtgcgcgaagctgctgagcgtatggcctggaatatgcctgttcagggaacagcggcggacctcatgaagatcgccatggtgaaattgtttccgcgcttgaaacccttaggagcccaccttcttttacaggtgcatgatgaattggtcttggaagtacccgaggatcgcgcagaagaagccaaagcactcgtgaaagaggttatggaaaacgcgtatccgttagatgttccgttggaggtcgaagtgggtgtaggccgtgattggcttgaagcgaaacaagactaatga

SEQ ID NO: 1040 - protein, 844 aa, synthetic construct
  REGION 1..844: note = DNA Polymerase Variant
MHHHHHHGGSGMLPLFDLEEPPKRVLLVDGHHLAYRTFYALSLTTSRGEPVQMVYGFARSLLKALKEDGQAVVVVFDAKAPSFRHEAYEAYKAGRAPTPEDFPRQLALVKRLVDLLGLVRLEAPGYEADDVLGTLAKKAEREGMEVCILTGDRDFFQLLSEKVSVLLPDGTLVTPKDVQEKYGVPPERWVDFRALTGDRSDNIPGVAGIGEKTALRLLAEWGSVENLLKNLDRVKPDSLRRKIEAHLEDLRLSLDLARIRTDLPLEVDFKALRRRTPDLEGLRAFLEELELGSLLHEFGLLGGEKPREEAPWPPPEGAFVGFLLSRKEPMWAELLALAAAAEGRVHRATSPVEALADLKEARGFLAKDLAVLALREGVALDPTDDPLLVAYLLDHANTNPERVARRYGGEFTEDAAERALLSERLFQTLFPRLSEKLLWLYQEVERSLSRVLAHMEARGVRLDVPLLEALSFELEKELERLEGEVFRLAGHPFNLNSRDQLEKVLFDELGLTPVTRTEKTGKRSTSAAALEALRGAHPIVELILQYRELSKLKSTYLDRLPRLVHPRTGRLHTRFNQTATATGRLSSSDPNLQNIPVRTPLGQHIRKAFVAEEGWLLLAADYSQIELRVLAHLSGDENLKRVFREGKDIHTETAAWMFGVDPALVDPKMRRAAKTVNFGVLYGMSAARLSQELGIDYKEAEAFIERYFQSFPKVRAWIERTLEEGRTRGYVETLFGRRRYVPDLTSRVRSVREAAERMAWNMPVQGTAADLMKIAMVKLFPRLKPLGAHLLLQVHDELVLEVPEDRAEEAKALVKEVMENAYPLDVPLEVEVGVGRDWLEAKQD

SEQ ID NO: 1041 - DNA, 2538 bp, synthetic construct
  misc_feature 1..2538: note = DNA Polymerase Variant
  source 1..2538: mol_type = other DNA
atgcaccatcatcatcatcatggcggtagcggcatgttaccgctgtttgatttggaagaaccaccaaaacgcgtgctgcttgttgacggccatcatctggcgtatcgtaccttctacgcactgagccttacgacctcacgtggtgagcctgtccagatggtgtatgggtttgctcgctccctgctgaaagccctgaaggaagatggtcaagccgtagtagtggttttcgatgcgcgtgcaccgtcgtttcgtcacgaagcgtacgaggcctataaagctggccgcgcaccgaccccggaagactttccgcgtcagttagcgctcgtcaaacgcctcgtggatttgctgggattagttcgcttggaagctcctggctacgaggcggacgacgtgctcggtacactggccaagaaagcagaacgtgaaggcatggaggtctgcattcttaccggtgatcgcgatttcttccagctgctgtctgagaaagtgagcgttttgctgcccgatggcacgttagtaaccccgaaagatgtgcaagagaaatatggagttccgccagaacgttgggtggactttcgcgcactgactggtgatcgttcagacaacatcccgggcgttgccgggattggtgaaaagacggcgctgcgcctgctggcagaatggggctcggtggaaaatctgctcaagaaccttgatcgtgtgaaacctgatagcttacgccgcaagatcgaagcccacctggaagacttgcgtctgagtctggatcttgtacgtattcgcaccgatctgccgttggaagtagactttaaagctctgcgtcgtcgcacacccgatttagaggggttacgcgcgttcctcgaagaactggagctgggctccctgctgcatgaattcggtttgttgggcggagagaaaccgcgtgaagaagcaccatggccgccgcccgagggtgcctttgtcggctttcttctgtcacgcaaagagccaatgtgggcggaactgttagctcttgcagccgccgcggaagggcgtgttcaccgcgcgacctctcctgtcgaggccctcgctgacctcaaagaagcacgtggtttcttggcgaaagatttagccgtgcttgcattacgcgaaggcgttgcgctcgatccgacggacgacccgcttttggtggcttatttgctcgatcatgcgaataccaacccggaacgtgtcgcccgtcgttacggcggcgagtttactgaagatgcggcagaacgcgcgttgcttagcgaacgcctcttccagacgttatttccacgtctttcggagaaattactctggctctatcaggaagtcgaacgtccattgagtcgcgtgcttgcccatatggaggctcgcggtgtgcgcttagatgttccgttgttagaagcactcagcttcgagttggagaaagaactggaacgtcttgaaggcgaagtctttcgtttagcggggcatcccttcaatctcaactctcgcgaccaattggagaaagtgctctttgatgaattaggtttaacccctgtcacgcgtacagagaagaccggcaaacgttccacttcggcagccgccttggaagcacttcgtggtgtgcacccgatcgtcgagttgattttgcagtatcgcgagctcagcaaactcaaatcaacctatcttgataggttacctcgtcttgttcatccacgtacgggtcgtttacacacccgcttcaatcaaacggcaacagccaccgggcgcttgtcgtcgagtgacccgaacctccagaatattccagtgcgcacgccgctgggccaacacattcgtaaagcgtttgttgcggaagaaggttggttattacttgcggccgattactcccagatcgaacttcgtgtattggcgcatctctctggcgacgagaatcttaaacgcgtgtttcgcgaaggcaaggatattcacactgaaaccgcagcctggatgttcggggtggactcggccttagtggaccccaagatgcgtcgtgccgccaagaccgtcaactttggcgtactctatggtatgtcagcagcacgtcttagtcaggaattgggcattgactacaaagtagctgaagcgtttatcgagcgctatttccaatcctttccgaaagttcgcgcgtggattgaacgtacgctcgaagaaggtcgcactcgcggctatgtggaaacgttattcgggcgtcgtcgctacgttccagatcttacgtctcgtgtccgctcagtgcgcgaagctgctgagcgtatggcctggaatatgcctgttcagggaacagcggcggacctcatgaagatcgccatggtgaaattgtttccgcgcttgaaacccttaggagcccaccttcttttacaggtgcatgatgaattggtcttggaagtacccgaggatcgcgcagaagaagccaaagcactcgtgaaagaggttatggaaaacgcgtatccgttagatgttccgttggaggtcgaagtgggtgtaggccgtgattggcttgaagcgaaacaagactaatga

SEQ ID NO: 1042 - protein, 844 aa, synthetic construct
  REGION 1..844: note = DNA Polymerase Variant
MHHHHHHGGSGMLPLFDLEEPPKRVLLVDGHHLAYRTFYALSLTTSRGEPVQMVYGFARSLLKALKEDGQAVVVVFDARAPSFRHEAYEAYKAGRAPTPEDFPRQLALVKRLVDLLGLVRLEAPGYEADDVLGTLAKKAEREGMEVCILTGDRDFFQLLSEKVSVLLPDGTLVTPKDVQEKYGVPPERWVDFRALTGDRSDNIPGVAGIGEKTALRLLAEWGSVENLLKNLDRVKPDSLRRKIEAHLEDLRLSLDLVRIRTDLPLEVDFKALRRRTPDLEGLRAFLEELELGSLLHEFGLLGGEKPREEAPWPPPEGAFVGFLLSRKEPMWAELLALAAAAEGRVHRATSPVEALADLKEARGFLAKDLAVLALREGVALDPTDDPLLVAYLLDHANTNPERVARRYGGEFTEDAAERALLSERLFQTLFPRLSEKLLWLYQEVERPLSRVLAHMEARGVRLDVPLLEALSFELEKELERLEGEVFRLAGHPFNLNSRDQLEKVLFDELGLTPVTRTEKTGKRSTSAAALEALRGVHPIVELILQYRELSKLKSTYLDRLPRLVHPRTGRLHTRFNQTATATGRLSSSDPNLQNIPVRTPLGQHIRKAFVAEEGWLLLAADYSQIELRVLAHLSGDENLKRVFREGKDIHTETAAWMFGVDSALVDPKMRRAAKTVNFGVLYGMSAARLSQELGIDYKVAEAFIERYFQSFPKVRAWIERTLEEGRTRGYVETLFGRRRYVPDLTSRVRSVREAAERMAWNMPVQGTAADLMKIAMVKLFPRLKPLGAHLLLQVHDELVLEVPEDRAEEAKALVKEVMENAYPLDVPLEVEVGVGRDWLEAKQD

SEQ ID NO: 1043 - DNA, 2538 bp, synthetic construct
  misc_feature 1..2538: note = DNA Polymerase Variant
  source 1..2538: mol_type = other DNA
atgcaccatcatcatcatcatggcggtagcggcatgttaccgctgtttgatttggaagaaccaccaaaacgcgtgctgcttgttgacggccatcatctggcgtatcgtaccttctacgcactgagccttacgacctcacgtggtgagcctgtccagatggtgtatgggtttgctcgctccctgctgaaagccctgaaggaagatggtcaagccgtagtagtggttttcgatgcgaaagcaccgtcgtttcgtcacgaagcgtacgaggcctataaagctggccgcgcaccgaccccggaagactttccgcgtcagttagcgctcgtcaaacgcctcgtggatttgctgggattagttcgcttggaagctcctggctacgaggcggacgacgtgctcggtacactggccaagaaagcagaacgtgaaggcatggaggtctgcattcttaccggtgatcgcgatttcttccagctgctgtctgagaaagtgagcgttttgctgcccgatggcacgttagtaaccccgaaagatgtgcaagagaaatatggagttccgccagaacgttgggtggactttcgcgcactgactggtgatcgttcagacaacatcccgggcgttgccgggattggcgaaaagacggcgctgcgcctgctggcagaatggggctcggtggaaaatctgctcaagaaccttgatcgtgtgaaacctgatagcttacgccgcaagatcgaagcccacctggaagacttgcgtctgagtctggatcttgcccgtattcgcaccgatctgccgttggaagtagactttaaagctctgcgtcgtcgcacacccgatttagaggggttacgcgcgttcctcgaagaactggagctgggctccctgctgcatgaattcggtttgttgggcggagagaaaccgcgtgaagaagcaccatggccgccgcccgaaggtgcctttgtcggctttcttctgtcacgcaaagagccaatgtgggcggaactgttagctcttgcagccgccgcggaagggcgtgttcaccgcgcgacctctcctgtcgaggccctcgctgacctcaaagaagcacgtggtttcttggcgaaagatttagccgtgcttgcattacgcgaaggcgttgcgctcgatccgacggacgacccgcttttggtggcttatactctcgatcatgcgaataccaacccggaacgtgtcgcccgtcgttacggcggcgagtttactgaagatgcggcagaacgcgcgttgcttagcgaacgcctcttccagacgttatttccacgtctttcggagaaattactctggctctatcaggaagtcgaacgtccattgagtcgcgtgcttgcccatatggaggctcgcggtgtgcgcttagatgttccgttgttagaagcactcagcttcgagttggagaaagaactggaacgtcttgaaggcgaagtctttcgtttagcggggcatcccttcaatctcaactctcgcgaccaattggagaaagtgctctttgatgaattaggtttaacccctgtcacgcgtacagagaagaccggcaaacgttccacttcggcagccgccttggaagcacttcgtggtgctcacccgatcgtcgagttgattttgcagtatcgcgagctcagcaaactcaaatcaacctatcttgataggttacctcgtcttgttcatccacgtacgggtcgtttacacacccgcttcaatcaaacggcaacagccaccgggcgcttgtcgtcgagtgacccgaacctccagaatattccagtgcgcacgccgctgggccaacacattcgtaaagcgtttgttgcggaagaaggttggttattacttgcggccgattactcccagatcgaacttcgtgtattggcgcatctctctggcgacgagaatcttaaacgcgtgtttcgcgaaggcaaggatattcacactgaaaccgcagcctggatgttcggggtggacccagccttagtggaccccaagatgcgtcgtgccgccaagaccgtcaactttggcgtactctatggtatgtcagcagcacgtcttagtcaggaattgggcattgactacaaagaagctgaagcgtttatcgagcgctatttccaatcctttccgaaagttcgcgcgtggattgaacgtacgctcgaagaaggtcgcactcgcggctatgtggaaacgttattcgggcgtcgtcgctacgttccagatcttacgtctcgtgtccgctcagtgcgcgaagctgctgagcgtatggcctggaatatgcctgttcagggaacagcggcggacctcatgaagatcgccatggtgaaattgtttccgcgcttgaaacccttaggagcccaccttcttttacaggtgcatgatgaattggtcttggaagtacccgaggatcgcgcagaagaagccaaagcactcgtgaaagaggttatggaaaacgcgtatccgttagatgttccgttggaggtcgaagtgggtgtaggccgtgattggcttgaagcgaaacaagactaatga

SEQ ID NO: 1044 - protein, 844 aa, synthetic construct; identical to SEQ ID NO: 806
  REGION 1..844: note = DNA Polymerase Variant

SEQ ID NO: 1045 - DNA, 2538 bp, synthetic construct
  misc_feature 1..2538: note = DNA Polymerase Variant
  source 1..2538: mol_type = other DNA
atgcaccatcatcatcatcatggcggtagcggcatgttaccgctgtttgatttggaagaaccaccaaaacgcgtgctgcttgttgacggccatcatctggcgtatcgtaccttctacgcactgagccttacgacctcacgtggtgagcctgtccagatggtgtatgggtttgctcgctccctgctgaaagccctgaaggaagatggtcaagccgtagtagtggttttcgatgcgaaagcaccgtcgtttcgtcacgaagcgtacgaggcctataaagctggccgcgcaccgaccccggaagactttccgcgtcagttagcgctcgtcaaacgcctcgtggatttgctgggattagttcgcttggaagctcctggctacgaggcggacgacgtgctcggtacactggccaagaaagcagaacgtgaaggcatggaggtctgcattcttaccggtgatcgcgatttcttccagctgctgtctgagaaagtgagcgttttgctgcccgatggcacgttagtaaccccgaaagatgtgcaagagaaatatggagttccgccagaacgttgggtggactttcgcgcactgactggtgatcgttcagacaacatcccgggcgttgccgggattggtgaaaagacggcgctgcgcctgctggcagaatggggctcggtggaaaatctgctcaagaaccttgatcgtgtgaaacctgatagcttacgccgcaagatcgaagcccacctggaagacttgcgtctgagtctggatcttgcccgtattcgcaccgatctgccgttggaagtagactttaaagctctgcgtcgtcgcacacccgatttagaggggttacgcgcgttcctcgaagaactggagctgggctccctgctgcatgaattcggtttgttgggcggagagaaaccgcgtgaagaagcaccatggccgccgcccgaaggtgcctttgtcggctttcttctgtcacgcaaagagccaatgtgggcggaactgttagctcttgcagccgccgcggaagggcgtgttcaccgcgcgacctctcctgtcgaggccctcgctgacctcaaagaagcacgtggtttcttggcgaaagatttagccgtgcttgcattacgcgaaggcgttgcgctcgatccgacggacgacccgcttttggtggcttatttgctcgatcatgcgaataccaacccggaacgtgtcgcccgtcgttacggcggcgagtttactgaagatgcggcagaacgcgcgttgcttagcgaacgcctcttccagacgttatttccacgtctttcggagaaattactctggctctatcaggaagtcgaacgtccattgagtcgcgtgcttgcccatatggaggctcgcggtgtgagtttagatgttccgttgttagaagcactcagcttcgagttggagaaagaactggaacgtcttgaaggcgaagtctttcgtttagcggggcatcccttcaatctcaactctcgcgaccaattggagaaagtgctctttgatgaattaggtttaacccctgtcacgcgtacagagaagaccggcaaacgttccacttcggcagccgccttggaagcacttcgtggtgctcacccgatcgtcgagttgattttgcagtatcgcgagctcagcaaactcaaatcaacctatcttgataggttacctcgtcttgttcatccacgtacgggtcgtttacacacccgcttcaatcaaacggcaacagccaccgggcgcttgtcgtcgagtgacccgaacctccagaatattccagtgcgcacgccgctgggccaacacattcgtaaagcgtttgttgcggaagaaggttggttattacttgcggccgattactcccagatcgaacttcgtgtattggcgcatctctctggcgacgagaatcttaaacgcgtgtttcgcgaaggcaaggatattcacactgaaaccgcagcctggatgttcggggtggacccagccttagtggaccccaagatgcgtcgtgccgccaagaccgtcaactttggcgtactctatggtatgtcagcagcacgtcttagtcaggaattgggcattgactacaaagaagctgaagcgtttatcgagcgctatttccaatcctttccgaaagttcgcgcgtggattgaacgtacgctcgaagaaggtcgcactcgcggctatgtggaaacgttattcgggcgtcgtcgctacgttccagatcttacgtctcgtgtccgctcagtgcgcgaagctgctgagcgtatggcctggaatatgcctgttcagggaacagcggcggacctcatgaagatcgccatggtgaaattgtttccgcgcttgaaacccttaggagcccaccttcttttacaggtgcatgatgaattggtcttggaagtacccgaggatcgcgcagaagaagccaaagcactcgtgaaagaggttatggaaaacgcgtatccgttagatgttccgttggaggtcgaagtgggtgtaggccgtgattggcttgaagcgaaacaagactaatga

SEQ ID NO: 1046 - protein, 844 aa, synthetic construct
  REGION 1..844: note = DNA Polymerase Variant
MHHHHHHGGSGMLPLFDLEEPPKRVLLVDGHHLAYRTFYALSLTTSRGEPVQMVYGFARSLLKALKEDGQAVVVVFDAKAPSFRHEAYEAYKAGRAPTPEDFPRQLALVKRLVDLLGLVRLEAPGYEADDVLGTLAKKAEREGMEVCILTGDRDFFQLLSEKVSVLLPDGTLVTPKDVQEKYGVPPERWVDFRALTGDRSDNIPGVAGIGEKTALRLLAEWGSVENLLKNLDRVKPDSLRRKIEAHLEDLRLSLDLARIRTDLPLEVDFKALRRRTPDLEGLRAFLEELELGSLLHEFGLLGGEKPREEAPWPPPEGAFVGFLLSRKEPMWAELLALAAAAEGRVHRATSPVEALADLKEARGFLAKDLAVLALREGVALDPTDDPLLVAYLLDHANTNPERVARRYGGEFTEDAAERALLSERLFQTLFPRLSEKLLWLYQEVERPLSRVLAHMEARGVSLDVPLLEALSFELEKELERLEGEVFRLAGHPFNLNSRDQLEKVLFDELGLTPVTRTEKTGKRSTSAAALEALRGAHPIVELILQYRELSKLKSTYLDRLPRLVHPRTGRLHTRFNQTATATGRLSSSDPNLQNIPVRTPLGQHIRKAFVAEEGWLLLAADYSQIELRVLAHLSGDENLKRVFREGKDIHTETAAWMFGVDPALVDPKMRRAAKTVNFGVLYGMSAARLSQELGIDYKEAEAFIERYFQSFPKVRAWIERTLEEGRTRGYVETLFGRRRYVPDLTSRVRSVREAAERMAWNMPVQGTAADLMKIAMVKLFPRLKPLGAHLLLQVHDELVLEVPEDRAEEAKALVKEVMENAYPLDVPLEVEVGVGRDWLEAKQD

SEQ ID NO: 1047 - DNA, 2538 bp, synthetic construct
  misc_feature 1..2538: note = DNA Polymerase Variant
  source 1..2538: mol_type = other DNA
atgcaccatcatcatcatcatggcggtagcggcatgttaccgctgtttgatttggaagaaccaccaaaacgcgtgctgcttgttgacggccatcatctggcgtatcgtaccttctacgcactgagccttacgacctcacgtggtgagcctgtccagatggtgtatgggtttgctcgctccctgctgaaagccctgaaggaagatggtcaagccgtagtagtggttttcgatgcgaaagcaccgtcgtttcgtcacgaagcgtacgaggcctataaagctggccgcgcaccgaccccggaagactttccgcgtcagttagcgctcgtcaaacgcctcgtggatttgctgggattagttcgcttggaagctcctggctacgaggcggacgacgtgctcggtacactggccaagaaagcagaacgtgaaggcatggaggtctgcattcttaccggtgatcgcgatttcttccagctgctgtctgagaaagtgagcgttttgctgcccgatggcacgttagtaaccccgaaagatgtgcaagagaaatatggagttccgccagaacgttgggtggactttcgcgcactgactggtgatcgttcagacaacatcccgggcgttgccgggattggtgaaaagacggcgctgcgcctgctggcagaatggggctcggtggaaaatctgctcaagaaccttgatcgtgtgaaacctgatagcttacgccgcaagatcgaagcccacctggaagacttgcgtctgagtctggatcttgcccgtattcgcaccgatctgccgttggaagtagactttaaagctctgcgtcgtcgcacacccgatttagaggggttacgcgcgttcctcgaagaactggagctgggctccctgctgcatgaattcggtttgttgggcggagagaaaccgcgtgaagaagcaccatggccgccgcccgaaggtgcctttgtcggctttcttctgtcacgcaaagagccaatgtgggcggaactgttagctcttgcagccgccgcggaagggcgtgttcaccgcgcgacctctcctgtcgaggccctcgctgacctcaaagaagcacgtggtttcttggcgaaagatttagccgtgcttgcattacgcgaaggcgttgcgctcgatccgacggacgacccgcttttggtggcttatttgctcgatcatgcgaataccaacccggaacgtgtcgcccgtcgttacggcggcgagtttcaggaagatgcggcagaacgcgcgttgcttagcgaacgcctcttccagacgttatttccacgtctttcggagaaattactctggctctatcaggaagtcgaacgtccattgagtcgcgtgcttgcccatatggaggctcgcggtgtgcgcttagatgttccgttgttagaagcactcagcttcgagttggagaaagaactggaacgtcttgaaggcgaagtctttcgtttagcggggcatcccttcaatctcaactctcgcgaccaattggagaaagtgctctttgatgaattaggtttaacccctgtcacgcgtacagagaagaccggcaaacgttccacttcggcagccgccttggaagcacttcgtggtgctcacccgatcgtcgagttgattttgcagtatcgcgagctcagcaaactcaaatcaacctatcttgataggttacctcgtcttgttcatccacgtacgggtcgtttacacacccgcttcaatcaaacggcaacagccactgggcgcttgtcgtcgagtgacccgaacctccagaatattccagtgcgcacgccgctgggccaacacattcgtaaagcgtttgttgcggaagaaggttggttattacttgcggccgattactcccagatcgaacttcgtgtattggcgcatctctctggcgacgagaatcttaaacgcgtgtttcgcgaaggcaaggatattcacactgaaaccgcagcctggatgttcggggtggacccagccttagtggaccccaagatgcgtcgtgccgccaagaccgtcaactttggcgtactctatggtatgtcagcagcacgtcttagtcaggaattgggcattgactacaaagaagctgaagcgtttatcgagcgctatttccaatcctttccgaaagttcgcgcgtggattgaacgtacgctcgaagaaggtcgcactcgcggctatgtggaaacgttattcgggcgtcgtcgctacgttccagatcttacgtctcgtgtccgctcagtgcgcgaagctgctgagcgtatggcctggaatatgcctgttcagggaacagcggcggacctcatgaagatcgccatggtgaaattgttcccgcgcttgaaacccttaggagcccaccttcttttacaggtgcatgatgaattggtcttggaagtacccgaggatcgcgcagaagaagccaaagcactcgtgaaagaggttatggaaaacgcgtatccgttagatgttccgttggaggtcgaagtgggtgtaggccgtgattggcttgaagcgaaacaagactaatga

SEQ ID NO: 1048 - protein, 844 aa, synthetic construct
  REGION 1..844: note = DNA Polymerase Variant
MHHHHHHGGSGMLPLFDLEEPPKRVLLVDGHHLAYRTFYALSLTTSRGEPVQMVYGFARSLLKALKEDGQAVVVVFDAKAPSFRHEAYEAYKAGRAPTPEDFPRQLALVKRLVDLLGLVRLEAPGYEADDVLGTLAKKAEREGMEVCILTGDRDFFQLLSEKVSVLLPDGTLVTPKDVQEKYGVPPERWVDFRALTGDRSDNIPGVAGIGEKTALRLLAEWGSVENLLKNLDRVKPDSLRRKIEAHLEDLRLSLDLARIRTDLPLEVDFKALRRRTPDLEGLRAFLEELELGSLLHEFGLLGGEKPREEAPWPPPEGAFVGFLLSRKEPMWAELLALAAAAEGRVHRATSPVEALADLKEARGFLAKDLAVLALREGVALDPTDDPLLVAYLLDHANTNPERVARRYGGEFQEDAAERALLSERLFQTLFPRLSEKLLWLYQEVERPLSRVLAHMEARGVRLDVPLLEALSFELEKELERLEGEVFRLAGHPFNLNSRDQLEKVLFDELGLTPVTRTEKTGKRSTSAAALEALRGAHPIVELILQYRELSKLKSTYLDRLPRLVHPRTGRLHTRFNQTATATGRLSSSDPNLQNIPVRTPLGQHIRKAFVAEEGWLLLAADYSQIELRVLAHLSGDENLKRVFREGKDIHTETAAWMFGVDPALVDPKMRRAAKTVNFGVLYGMSAARLSQELGIDYKEAEAFIERYFQSFPKVRAWIERTLEEGRTRGYVETLFGRRRYVPDLTSRVRSVREAAERMAWNMPVQGTAADLMKIAMVKLFPRLKPLGAHLLLQVHDELVLEVPEDRAEEAKALVKEVMENAYPLDVPLEVEVGVGRDWLEAKQD

SEQ ID NO: 1049 - DNA, 2538 bp, synthetic construct
  misc_feature 1..2538: note = DNA Polymerase Variant
  source 1..2538: mol_type = other DNA
atgcaccatcatcatcatcatggcggtagcggcatgttaccgctgtttgatttggaagaaccaccaaaacgcgtgctgcttgttgacggccatcatctggcgtatcgtaccttctacgcactgagccttacgacctcacgtggtgagcctgtccagatggtgtatgggtttgctcgctccctgctgaaagccctgaaggaagatggtcaagccgtagtagtggttttcgatgcgaaggcaccgtcgtttcgtcacgaagcgtacgaggcctataaagctggccgcgcaccgaccccggaagactttccgcgtcagttagcgctcgtcaaacgcctcgtggatttgctgggattagttcgcttggaagctcctggctacgaggcggacgacgtgctcggtacactggccaagaaagcagaacgtgaaggcatggaggtctgcattcttaccggtgatcgcgatttcttccagctgctgtctgagaaagtgagcgttttgctgcccgatggcacgttagtaaccccgaaagatgtgcaagagaaatatggagttccgccagaacgttgggtggactttcgcgcactgactggtgatcgttcagacaacatcccgggcgttgccgggattggtgaaaagacggcgctgcgcctgctggcagaatggggctcggtggaaaatctgctcaagaaccttgatcgtgtgaaacctgatagcttacgccgcaagatcgaagcccacctggaagacttgcgtctgagtctggatcttgtacgtattcgcaccgatctgccgttggaagtagactttaaagctctgcgtcgtcgcacacccgatttagaggggttacgcgcgttcctcgaagaactggagctgggctccctgctgcatgaattcggtttgttgggcggagagaaaccgcgtgaagaagcaccatggccgccgcccgggggtgcctttgtcggctttcttctgtcacgcaaagagccaatgtgggcggaactgttagctcttgcagccgccgcggaagggcgtgttcaccgcgcgacctctcctgtcgaggccctcgctgacctcaaagaagcacgtggtttcttggcgaaagatttagccgtgcttgcattacgcgaaggcgttgcgctcgatccgacggacgacccgcttttggtggcttatttgctcgatcatgcgaataccaacccggaacgtgtcgcccgtcgttacggcggcgagtttactgaagatgcggcagaacgcgcgttgcttagcgaacgcctcttccagacgttatttccacgtctttcggagaaattactctggctctatcaggaagtcgaacgtccattgagtcgcgtgcttgcccatatggaggctcgcggtgtgcgcttagatgttccgttgttagaagcactcagcttcgagctggcaaaagaactggaacgtcttgaaggcgaagtctttcgtttagcggggcatcccttcaatctcaactctcgcgaccaattggagaaagtgctctttgatgaattaggtttaacccctgtcacgcgtacagagaagaccggcaaacgttccacttcggcagccgccttggaagcacttcgtggtgtgcacccgatcgtcgagttgattttgcagtatcgcgagctcagcaaactcaaatcaacctatcttgataggttacctcgtcttgttcatccacgtacgggtcgtttacacacccgcttcaatcaaacggcaacagccaccgggcgcttgtcgtcgagtgacccgaacctccagaatattccagtgcgcacgccgctgggccaacacattcgtaaagcgtttgttgcggaagaaggttggttattacttgcggccgattactcccagatcgaacttcgtgtattggcgcatctctctggcgacgagaatcttaaacgcgtgtttcgcgaaggcaaggatattcacactgaaaccgcagcctggatgttcggggtggacccggccttagtggaccccaagatgcgtcgtgccgccaagaccgtcaactttggcgtactctatggtatgtcagcagcacgtcttagtcaggaattgggcattgactacaaagaagctgaagcgtttatcgagcgctatttccaatcctttccgaaagttcgcgcgtggattgaacgtacgctcgaagaaggtcgcactcgcggctatgtggaaacgttattcgggcgtcgtcgctacgttccagatcttacgtctcgtgtccgctcagtgcgcgaagctgctgagcgtatggcctggaatatgcctgttcagggaacagcggcggacctcatgaagatcgccatggtgaaattgtttccgcgcttgaaacccttaggagcccaccttcttttccaggtgcatgatgaattggtcttggaagtacccgaggatcgcgcagaagaagccaaagcactcgtgaaagaggttatggaaaacgcgtatccgttagatgttccgttggaggtcgaagtgggtgtaggccgtgattggcttgaagcgaaacaagactaatga

SEQ ID NO: 1050 - protein, 844 aa, synthetic construct
  REGION 1..844: note = DNA Polymerase Variant
MHHHHHHGGSGMLPLFDLEEPPKRVLLVDGHHLAYRTFYALSLTTSRGEPVQMVYGFARSLLKALKEDGQAVVVVFDAKAPSFRHEAYEAYKAGRAPTPEDFPRQLALVKRLVDLLGLVRLEAPGYEADDVLGTLAKKAEREGMEVCILTGDRDFFQLLSEKVSVLLPDGTLVTPKDVQEKYGVPPERWVDFRALTGDRSDNIPGVAGIGEKTALRLLAEWGSVENLLKNLDRVKPDSLRRKIEAHLEDLRLSLDLVRIRTDLPLEVDFKALRRRTPDLEGLRAFLEELELGSLLHEFGLLGGEKPREEAPWPPPGGAFVGFLLSRKEPMWAELLALAAAAEGRVHRATSPVEALADLKEARGFLAKDLAVLALREGVALDPTDDPLLVAYLLDHANTNPERVARRYGGEFTEDAAERALLSERLFQTLFPRLSEKLLWLYQEVERPLSRVLAHMEARGVRLDVPLLEALSFELAKELERLEGEVFRLAGHPFNLNSRDQLEKVLFDELGLTPVTRTEKTGKRSTSAAALEALRGVHPIVELILQYRELSKLKSTYLDRLPRLVHPRTGRLHTRFNQTATATGRLSSSDPNLQNIPVRTPLGQHIRKAFVAEEGWLLLAADYSQIELRVLAHLSGDENLKRVFREGKDIHTETAAWMFGVDPALVDPKMRRAAKTVNFGVLYGMSAARLSQELGIDYKEAEAFIERYFQSFPKVRAWIERTLEEGRTRGYVETLFGRRRYVPDLTSRVRSVREAAERMAWNMPVQGTAADLMKIAMVKLFPRLKPLGAHLLFQVHDELVLEVPEDRAEEAKALVKEVMENAYPLDVPLEVEVGVGRDWLEAKQD

SEQ ID NO: 1051 - DNA, 2538 bp, synthetic construct
  misc_feature 1..2538: note = DNA Polymerase Variant
  source 1..2538: mol_type = other DNA
atgcaccatcatcatcatcatggcggtagcggcatgttaccgctgtttgatttggaagaaccaccaaaacgcgtgctgcttgttgacggccatcatctggcgtatcgtaccttctacgcactgagccttacgacctcacgtggtgagcctgtccagatggtgtatgggtttgctcgctccctgctgaaagccctgaaggaagatggtcaagccgtagtagtggttttcgatgcgaaagcaccgtcgtttcgtcacgaagcgtacgaggcctataaagctggccgcgcaccgaccccggaagactttccgcgtcagttagcgctcgtcaaacgcctcgtggatttgctgggattagttcgcttggaagctcctggctacgaggcggacgacgtgctcggtacactggccaagaaagcagaacgtgaaggcatggaggtctgcattcttaccggtgatcgcgatttcttccagctgctgtctgagaaagtgagcgttttgctgcccgatggcacgttagtaaccccgaaagatgtgcaagagaaatatggagttccgccagaacgttgggtggactttcgcgcactgactggtgatcgttcagacaacatcccgggcgttgccgggattggtgaaaagacggcgctgcgcctgctggcagaatggggctcggtggaaaatctgctcaagaaccttgatcgtgtgaaacctgatagcttacgccgcaagatcgaagcccacctggaagacttgcgtctgagtctggatcttgcccgtattcgcaccgatctgccgttggaagtagactttaaagctctgcgtcgtcgcacacccgatttagaggggttacgcgcgttcctcgaagaactggagctgggctccctgctgcatgaattcggtttgttgggcggagagaaaccgcgtgaagaagcaccatggccgccgcccgaaggtgcctttgtcggctttcttctgtcacgcaaagagccaatgtgggcggaactgttagctcttgcagccgccgcggaagggcgtgttcaccgcgcgacctctcctgtcgaggccctcgctgacctcaaagaagcacgtggtttcttggcgaaagatttagccgtgcttgcattacgcgaaggcgttgcgctcgatccgacggacgacccgcttttggtggcttatttgctcgatcatgcgaataccaacccggaacgtgtcgcccgtcgttacggcggcgagtttactgaagatgcggcagaacgcgcgttgcttagcgaacgcctcttccagacgttatttccacgtctttcggagaaattatcttggctctatcaggaagtcgaacgtccattgagtcgcgtgcttgcccatatggaggctcgcggtgtgcgcttagatgttccgttgttagaagcactcagcttcgagttggagaaagaactggaacgtcttgaaggcgaagtctttcgtttagcggggcatcccttcaatctcaactctcgcgaccaattggagaaagtgctctttgatgaattaggtttaacccctgtcacgcgtacagagaagaccggcaaacgttccacttcggcagccgccttggaagcacttcgtggtgctcacccgatcgtcgagttgattttgcagtatcgcgagctcagcaaactcaaatcaacctatcttgataggttacctcgtcttgttcatccacgtacgggtcgtttacacacccgcttcaatcaaacggcaacagccaccgggcgcttgtcgtcgagtgacccgaacctccagaatattccagtgcgcacgccgctgggccaacacattcgtaaagcgtttgttgcggaagaaggttggttattacttgcggccgattactcccagatcgaacttcgtgtattggcgcatctctctggcgacgagaatcttaaacgcgtgtttcgcgaaggcaaggatattcacactgaaaccgcagcctggatgttcggggtggacccagccttagtggaccccaagatgcgtcgtgccgccaagaccgtcaactttggcgtactctatggtatgtcagcagcacgtcttagtcaggaattgggcattgactacaaagaagctgaagcgtttatcgagcgctatttccaatcctttccgaaagttcgcgcgtggattgaacgtacgctcgaagaaggtcgcactcgcggctatgtggaaacgttattcgggcgtcgtcgctacgttccagatcttacgtctcgtgtccgctcagtgcgcgaagctgctgagcgtatggcctggaatatgcctgttcagggaacagcggcggacctcatgaagatcgccatggtgaaattgtttccgcgcttgaaacccttaggagcccaccttcttttacaggtgcatgatgaattggtcttggaagtacccgaggatcgcgcagaagaagccaaagcactcgtgaaagaggttatggaaaacgcgtatccgttagatgttccgttggaggtcgaagtgggtgtaggccgtgattggcttgaagcgaaacaagactaatga

SEQ ID NO: 1052 - protein, 844 aa, synthetic construct
  REGION 1..844: note = DNA Polymerase Variant
MHHHHHHGGSGMLPLFDLEEPPKRVLLVDGHHLAYRTFYALSLTTSRGEPVQMVYGFARSLLKALKEDGQAVVVVFDAKAPSFRHEAYEAYKAGRAPTPEDFPRQLALVKRLVDLLGLVRLEAPGYEADDVLGTLAKKAEREGMEVCILTGDRDFFQLLSEKVSVLLPDGTLVTPKDVQEKYGVPPERWVDFRALTGDRSDNIPGVAGIGEKTALRLLAEWGSVENLLKNLDRVKPDSLRRKIEAHLEDLRLSLDLARIRTDLPLEVDFKALRRRTPDLEGLRAFLEELELGSLLHEFGLLGGEKPREEAPWPPPEGAFVGFLLSRKEPMWAELLALAAAAEGRVHRATSPVEALADLKEARGFLAKDLAVLALREGVALDPTDDPLLVAYLLDHANTNPERVARRYGGEFTEDAAERALLSERLFQTLFPRLSEKLSWLYQEVERPLSRVLAHMEARGVRLDVPLLEALSFELEKELERLEGEVFRLAGHPFNLNSRDQLEKVLFDELGLTPVTRTEKTGKRSTSAAALEALRGAHPIVELILQYRELSKLKSTYLDRLPRLVHPRTGRLHTRFNQTATATGRLSSSDPNLQNIPVRTPLGQHIRKAFVAEEGWLLLAADYSQIELRVLAHLSGDENLKRVFREGKDIHTETAAWMFGVDPALVDPKMRRAAKTVNFGVLYGMSAARLSQELGIDYKEAEAFIERYFQSFPKVRAWIERTLEEGRTRGYVETLFGRRRYVPDLTSRVRSVREAAERMAWNMPVQGTAADLMKIAMVKLFPRLKPLGAHLLLQVHDELVLEVPEDRAEEAKALVKEVMENAYPLDVPLEVEVGVGRDWLEAKQD

SEQ ID NO: 1053 - DNA, 2538 bp, synthetic construct
  misc_feature 1..2538: note = DNA Polymerase Variant
  source 1..2538: mol_type = other DNA
atgcaccatcatcatcatcatggcggtagcggcatgttaccgctgtttgatttggaagaaccaccaaaacgcgtgctgcttgttgacggccatcatctggcgtatcgtaccttctacgcactgagccttacgacctcacgtggtgagcctgtccagatggtgtatgggtttgctcgctccctgctgaaagccctgaaggaagatggtcaagccgtagtagtggttttcgatgcgaaagcaccgtcgtttcgtcacgaagcgtacgaggcctataaagctggccgcgcaccgaccccggaagactttccgcgtcagttagcgctcgtcaaacgcctcgtggatttgctgggattagttcgcttggaagctcctggctacgaggcggacgacgtgctcggtacactggccaagaaagcagaacgtgaaggcatggaggtctgcattcttaccggtgatcgcgatttcttccagctgctgtctgagaaagtgagcgttttgctgcccgatggcacgttagtaaccccgaaagatgtgcaagagaaatatggagttccgccagaacgttgggtggactttcgcgcactgactggtgatcgttcagacaacatcccgggcgttgccgggattggtgaaaagacggcgctgcgcctgctggcagaatggggctcggtggaaaatctgctcaagaaccttgatcgtgtgaaacctgatagcttacgccgcaagatcgaagcccacctggaagacttgcgtctgagtctggatcttgcccgtattcgcaccgatctgccgttggaagtagactttaaagctctgcgtcgtcgcacacccgatttagaggggttacgcgcgttcctcgaagaactggagctgggctccctgctgcatgaattcggtttgttgggcggagagaaaccgcgtgaagaagcaccatggccgccgcccgaaggtgcctttgtcggctttcttctgtcacgcaaagagccaatgtgggcggaactgttagctcttgcagccgccgcggaagggcgtgttcaccgcgcgacctctcctgtcgaggccctcgctgacctcaaagaagcacgtggtttcttggcgaaagatttagccgtgcttgcattacgcgaaggcgttgcgctcgatccgacggacgacccgctttgtgtggcttatttgctcgatcatgcgaataccaacccggaacgtgtcgcccgtcgttacggcggcgagtttactgaagatgcggcagaacgcgcgttgcttagcgaacgcctcttccagacgttatttccacgtctttcggagaaattactctggctctatcaggaagtcgaacgtccattgagtcgcgtgcttgcccatatggaggctcgcggtgtgcgcttagatgttccgttgttagaagcactcagcttcgagttggagaaagaactggaacgtcttgaaggcgaagtctttcgtttagcggggcatcccttcaatctcaactctcgcgaccaattggagaaagtgctctttgatgaattaggtttaacccctgtcacgcgtacagagaagaccggcaaacgttccacttcggcagccgccttggaagcacttcgtggtgctcacccgatcgtcgagttgattttgcagtatcgcgagctcagcaaactcaaatcaacctatcttgataggttacctcgtcttgttcatccacgtacgggtcgtttacacacccgcttcaatcaaacggcaacagccaccgggcgcttgtcgtcgagtgacccgaacctccagaatattccagtgcgcacgccgctgggccaacacattcgtaaagcgtttgttgcggaagaaggttggttattacttgcggccgattactcccagatcgaacttcgtgtattggcgcatctctctggcgacgagaatcttaaacgcgtgtttcgcgaaggcaaggatattcacactgaaaccgcagcctggatgttcggggtggacccagccttagtggaccccaagatgcgtcgtgccgccaagaccgtcaactttggcgtactctatggtatgtcagcagcacgtcttagtcaggaattgggcattgactacaaagaagctgaagcgtttatcgagcgctatttccaatcctttccgaaagttcgcgcgtggattgaacgtacgctcgaagaaggtcgcactcgcggctatgtggaaacgttattcgggcgtcgtcgctacgttccagatcttacgtctcgtgtccgctcagtgcgcgaagctgctgagcgtatggcctggaatatgcctgttcagggaacagcggcggacctcatgaagatcgccatggtgaaattgtttccgcgcttgaaacccttaggagcccaccttcttttacaggtgcatgatgaattggtcttggaagtacccgaggatcgcgcagaagaagccaaagcactcgtgaaagaggttatggaaaacgcgtatccgttagatgttccgttggaggtcgaagtgggtgtaggccgtgattggcttgaagcgaaacaagactaatga

SEQ ID NO: 1054 - protein, 844 aa, synthetic construct
  REGION 1..844: note = DNA Polymerase Variant
MHHHHHHGGSGMLPLFDLEEPPKRVLLVDGHHLAYRTFYALSLTTSRGEPVQMVYGFARSLLKALKEDGQAVVVVFDAKAPSFRHEAYEAYKAGRAPTPEDFPRQLALVKRLVDLLGLVRLEAPGYEADDVLGTLAKKAEREGMEVCILTGDRDFFQLLSEKVSVLLPDGTLVTPKDVQEKYGVPPERWVDFRALTGDRSDNIPGVAGIGEKTALRLLAEWGSVENLLKNLDRVKPDSLRRKIEAHLEDLRLSLDLARIRTDLPLEVDFKALRRRTPDLEGLRAFLEELELGSLLHEFGLLGGEKPREEAPWPPPEGAFVGFLLSRKEPMWAELLALAAAAEGRVHRATSPVEALADLKEARGFLAKDLAVLALREGVALDPTDDPLCVAYLLDHANTNPERVARRYGGEFTEDAAERALLSERLFQTLFPRLSEKLLWLYQEVERPLSRVLAHMEARGVRLDVPLLEALSFELEKELERLEGEVFRLAGHPFNLNSRDQLEKVLFDELGLTPVTRTEKTGKRSTSAAALEALRGAHPIVELILQYRELSKLKSTYLDRLPRLVHPRTGRLHTRFNQTATATGRLSSSDPNLQNIPVRTPLGQHIRKAFVAEEGWLLLAADYSQIELRVLAHLSGDENLKRVFREGKDIHTETAAWMFGVDPALVDPKMRRAAKTVNFGVLYGMSAARLSQELGIDYKEAEAFIERYFQSFPKVRAWIERTLEEGRTRGYVETLFGRRRYVPDLTSRVRSVREAAERMAWNMPVQGTAADLMKIAMVKLFPRLKPLGAHLLLQVHDELVLEVPEDRAEEAKALVKEVMENAYPLDVPLEVEVGVGRDWLEAKQD

SEQ ID NO: 1055 - DNA, 2538 bp, synthetic construct
  misc_feature 1..2538: note = DNA Polymerase Variant
  source 1..2538: mol_type = other DNA
atgcaccatcatcatcatcatggcggtagcggcatgttaccgctgtttgatttggaagaaccaccaaaacgcgtgctgcttgttgacggccatcatctggcgtatcgtaccttctacgcactgagccttacgacctcacgtggtgagcctgtccagatggtgtatgggtttgctcgctccctgctgaaagccctgaaggaagatggtcaagccgtagtagtggttttcgatgcgaaagcaccgtcgtttcgtcacgaagcgtacgaggcctataaagctggccgcgcaccgaccccggaagactttccgcgtcagttagcgctcgtcaaacgcctcgtggatttgctgggattagttcgcttggaagctcctggctacgaggcggacgacgtgctcggtacactggccaagaaagcagaacgtgaaggcatggaggtctgcattcttaccggtgatcgcgatttcttccagctgctgtctgagaaagtgagcgttttgctgcccgatggcacgttagtaaccccgaaagatgtgcaagagaaatatggagttccgccagaacgttgggtggactttcgcgcactgactggtgatcgttcagacaacatcccgggcgttgccgggattggtgaaaagacggcgctgcgcctgctggcagaatggggctcggtggaaaatctgctcaagaaccttgatcgtgtgaaacctgatagcttacgccgcaagatcgaagcccacctggaagacttgcgtctgagtctggatcttgcccgtattcgcaccgatctgccgttggaagtagactttaaagctctgcgtcgtcgcacacccgatttagaggggttacgcgcgttcctcgaagaactggagctgggctccctgctgcatgaattcggtttgttgggcggagagaaaccgcgtgaagaagcaccatggccgccgcccgaaggtgcctttgtcggctttcttctgtcacgcaaagagccaatgtgggcggaactgttagctcttgcagccgccgcggaagggcgtgttcaccgcgcgacctctcctgtcgaggccctcgctgacctcaaagaagcacgtggtttcttggcgaaagatttagccgtgcttgcattacgcgaaggcgttgcgatcgatccgacggacgacccgcttttggtggcttatttgctcgatcatgcgaataccaacccggaacgtgtcgcccgtcgttacggcggcgagtttactgaagatgcggcagaacgcgcgttgcttagcgaacgcctcttccagacgttatttccacgtctttcggagaaattactctggctctatcaggaagtcgaacgtccattgagtcgcgtgcttgccttgatggaggctcgcggtgtgcgcttagatgttccgttgttagaagcactcagcttcgagttggagaaagaactggaacgtcttgaaggcgaagtctttcgtttagcggggcatcccttcaatctcaactctcgcgaccaattggagaaagtgctctttgatgaattaggtttaacccctgtcacgcgtacagagaagaccggcaaacgttccacttcggcagccgccttggaagcacttcgtggtgctcacccgatcgtcgagttgattttgcagtatcgcgagctcagcaaactcaaatcaacctatcttgataggttacctcgtcttgttcatccacgtacgggtcgtttacacacccgcttcaatcaaacggcaacagccaccgggcgcttgtcgtcgagtgacccgaacctccagaatattccagtgcgcacgccgctgggccaacacattcgtaaagcgtttgttgcggaagaaggttggttattacttgcggccgattactcccagatcgaacttcgtgtattggcgcatctctctggcgacgagaatcttaaacgcgtgtttcgcgaaggcaaggatattcacactgaaaccgcagcctggatgttcggggtggacccagccttagtggaccccaagatgcgtcgtgccgccaagaccgtcaactttggcgtactctatggtatgtcagcagcacgtcttagtcaggaattgggcattgactacaaagaagctgaagcgtttatcgagcgctatttccaatcctttccgaaagttcgcgcgtggattgaacgtacgctcgaagaaggtcgcactcgcggctatgtggaaacgttattcgggcgtcgtcgctacgttccagatcttacgtctcgtgtccgctcagtgcgcgaagctgctgagcgtatggcctggaatatgcctgttcagggaacagcggcggacctcatgaagatcgccatggtgaaattgtttccgcgcttgaaacccttaggagcccaccttcttttacaggtgcatgatgaattggtcttggaagtacccgaggatcgcgcagaagaagccaaagcactcgtgaaagaggttatggaaaacgcgtatccgttagatgttccgttggaggtcgaagtgggtgtaggccgtgattggcttgaagcgaaacaagactaatga

SEQ ID NO: 1056 - protein, 844 aa, synthetic construct
  REGION 1..844: note = DNA Polymerase Variant
MHHHHHHGGSGMLPLFDLEEPPKRVLLVDGHHLAYRTFYALSLTTSRGEPVQMVYGFARSLLKALKEDGQAVVVVFDAKAPSFRHEAYEAYKAGRAPTPEDFPRQLALVKRLVDLLGLVRLEAPGYEADDVLGTLAKKAEREGMEVCILTGDRDFFQLLSEKVSVLLPDGTLVTPKDVQEKYGVPPERWVDFRALTGDRSDNIPGVAGIGEKTALRLLAEWGSVENLLKNLDRVKPDSLRRKIEAHLEDLRLSLDLARIRTDLPLEVDFKALRRRTPDLEGLRAFLEELELGSLLHEFGLLGGEKPREEAPWPPPEGAFVGFLLSRKEPMWAELLALAAAAEGRVHRATSPVEALADLKEARGFLAKDLAVLALREGVAIDPTDDPLLVAYLLDHANTNPERVARRYGGEFTEDAAERALLSERLFQTLFPRLSEKLLWLYQEVERPLSRVLALMEARGVRLDVPLLEALSFELEKELERLEGEVFRLAGHPFNLNSRDQLEKVLFDELGLTPVTRTEKTGKRSTSAAALEALRGAHPIVELILQYRELSKLKSTYLDRLPRLVHPRTGRLHTRFNQTATATGRLSSSDPNLQNIPVRTPLGQHIRKAFVAEEGWLLLAADYSQIELRVLAHLSGDENLKRVFREGKDIHTETAAWMFGVDPALVDPKMRRAAKTVNFGVLYGMSAARLSQELGIDYKEAEAFIERYFQSFPKVRAWIERTLEEGRTRGYVETLFGRRRYVPDLTSRVRSVREAAERMAWNMPVQGTAADLMKIAMVKLFPRLKPLGAHLLLQVHDELVLEVPEDRAEEAKALVKEVMENAYPLDVPLEVEVGVGRDWLEAKQD

SEQ ID NO: 1057 - DNA, 2538 bp, synthetic construct
  misc_feature 1..2538: note = DNA Polymerase Variant
  source 1..2538: mol_type = other DNA
atgcaccatcatcatcatcatggcggtagcggcatgttaccgctgtttgatttggaagaaccaccaaaacgcgtgctgcttgttgacggccatcatctggcgtatcgtaccttctacgcactgagccttacgacctcacgtggtgagcctgtccagatggtgtatgggtttgctcgctccctgctgaaagccctgaaggaagatggtcaagccgtagtagtggttttcgatgcgaaagcaccgtcgtttcgtcacgaagcgtacgaggcctataaagctggccgcgcaccgaccccggaagactttccgcgtcagttagcgctcgtcaaacgcctcgtggatttgctgggattagttcgcttggaagctcctggctacgaggcggacgacgtgctcggtacactggccaagaaagcagaacgtgaaggcatggaggtctgcattcttaccggtgatcgcgatttcttccagctgctgtctgagaaagtgagcgttttgctgcccgatggcacgttagtaaccccgaaagatgtgcaagagaaatatggagttccgccagaacgttgggtggactttcgcgcactgactggtgatcgttcagacaacatcccgggcgttgccgggattggtgaaaagacggcgctgcgcctgctggcagaatggggctcggtggaaaatctgctcaagaaccttgatcgtgtgaaacctgatagcttacgccgcaagatcgaagcccacctggaagacttgcgtctgagtctggatcttgcccgtattcgcaccgatctgccgttggaagtagactttaaagctctgcgtcgtcgcacacccgatttagaggggttacgcgcgttcctcgaagaactggagctgggctccctgctgcatgaattcggtttgttgggcggagagaaaccgcgtgaagaagcaccatggccgccgcccgaaggtgcctttgtcggctttcttctgtcacgcaaagagccaatgtgggcggaactgttagctcttgcagccgccgcggaagggcgtgttcaccgcgcgacctctcctgtcgaggccctcgctgacctcaaagaagcacgtggtttcttggcgaaagatttagccgtgcttgcattacgcgaaggcgttgcgctcgatccgacggacgacccgcttttggtggcttatttgctcgatcatgcgaataccaacccggaacgtgtcgcccgtcgttacggcggcgagtttactgaagatgcggcagaacgcgcgttgcttagcgaacgcctcttccagacgttatttccacgtctttcggagaaattactctggctctatcaggaagtcgaacgtcggttgagtcgcgtgcttgcccatatggaggctcgcggtgtgcgcttagatgttccgttgttagaagcactcagcttcgagttggagaaagaactggaacgtcttgaaggcgaagtctttcgtttagcggggcatcccttcaatctcaactctcgcgaccaattggagaaagtgctctttgatgaattaggtttaacccctgtcacgcgtacagagaagaccggcaaacgttccacttcggcagccgccttggaagcacttcgtggtgctcacccgatcgtcgagttgattttgcagtatcgcgagctcagcaaactcaaatcaacctatcttgataggttacctcgtcttgttcatccacgtacgggtcgtttacacacccgcttcaatcaaacggcaacagccaccgggcgcttgtcgtcgagtgacccgaacctccagaatattccagtgcgcacgccgctgggccaacacattcgtaaagcgtttgttgcggaagaaggttggttattacttgcggccgattactcccagatcgaacttcgtgtattggcgcatctctctggcgacgagaatcttaaacgcgtgtttcgcgaaggcaaggatattcacactgaaaccgcagcctggatgttcggggtggacccagccttagtggaccccaagatgcgtcgtgccgccaagaccgtcaactttggcgtactctatggtatgtcagcagcacgtcttagtcaggaattgggcattgactacaaagaagctgaagcgtttatcgagcgctatttccaatcctttccgaaagttcgcgcgtggattgaacgtacgctcgaagaaggtcgcactcgcggctatgtggaaacgttattcgggcgtcgtcgctacgttccagatcttacgtctcgtgtccgctcagtgcgcgaagctgctgagcgtatggcctggaatatgcctgttcagggaacagcggcggacctcatgaagatcgccatggtgaaattgtttccgcgcttgaaacccttaggagcccaccttcttttacaggtgcatgatgaattggtcttggaagtacccgaggatcgcgcagaagaagccaaagcactcgtgaaagaggttatggaaaacgcgtatccgttagatgttccgttggaggtcgaagtgggtgtaggccgtgattggcttgaagcgaaacaagactaatga

SEQ ID NO: 1058 - protein, 844 aa, synthetic construct; identical to SEQ ID NO: 766
  REGION 1..844: note = DNA Polymerase Variant

SEQ ID NO: 1059 - DNA, 2538 bp, synthetic construct
  misc_feature 1..2538: note = DNA Polymerase Variant
  source 1..2538: mol_type = other DNA
atgcaccatcatcatcatcatggcggtagcggcatgttaccgctgtttgatttggaagaaaacccaaaacgcgtgctgcttgttgacggccatcatctggcgtatcgtaccttctacgcactgagccttacgacctcacgtggtgagcctgtccagatggtgtatgggtttgctcgctccctgctgaaagccctgaaggaagatggtcaagccgtagtagtggttttcgatgcgcgcgcaccgtcgtttcgtcacgaagcgtacgaggcctataaagctggccgcgcaccgaccccggaagactttccgcgtcagttagcgctcgtcaaacgcctcgtggatttgctgggattagttcgcttggaagctcctggctacgaggcggacgacgtgctcggtacactggccaagaaagcagaacgtgaaggcatggaggtctgcattcttaccggtgatcgcgatttcttccagctgctgtctgagaaagtgagcgttttgctgcccgatggcacgttagtaaccccgaaagatgtgcaagagaaatatggagttccgccagaacgttgggtggactttcgcgcactgactggtgatcgttcagacaacatcccgggcgttgccgggattggtgaaaagacggcgctgcgcctgctggcagaatggggctcggtggaaaatctgctcaagaaccttgataaagtgaaacctgatagcttacgccgcaagatcgaagcccacctggaagacttgcgtctgagtctggatcttgcccgtattcgcaccgatctgccgttggaagtagactttaaagctctgcgtcgtcgcacacccgatttagaggggttacgcgcgttcctcgaagaactggagctgggctccctgctgcatgaattcggtttgttgggcaccgagaaaccacgtgaagaagcaccatggccgccgcccgaaggtgcctttgtcggctttcttctgtcacgcaaagagccaatgtgggcggaactgttagctcttgcagccgccgcggaagggcgtgttcaccgcgcgacctctcctgtcgaggccctcgctgacctcaaagaagcacgtggtttcttggcgaaagatttagccgtgcttgcattacgcgaaggcgttgccctcgatccgacggacgacccgcttttggtggcttatttgctcgatcatgcgaataccaacccggaacgtgtcgcccgtcgttacggcggcgagtttactgaagatgcggcagaacgcgcgttgcttagcgaacgcctcttccagacgttatttccacgtctttcggagaaattactctggctctatcaagaagtcgaacgtccattgagtcgcgtgcttgcccatatggaggctcgcggtgtgcgcttagatgttccgttgttagaagcactcagcttcgagttggagaaagaactggaacgtcttgaaggcgaagtctttcgtttagcggggcatcccttcaatctcaactctcgcgaccaattggagaaagtgctctttgatgaattaggtttaacccctgtcacgcgtacagagaagaccggcaaacgttccacttcggcagccgccttggaagcacttcgtggtgctcacccgatcgtcgagttgattttgcagtatcgcgagctcagcaaactcaaatcaacctatcttgataggttacctcgtcttgttcatccacgtacgggtcgtttacacacccgcttcaatcaaacggcaacagccaccgggcgcttgtcgtcgagtgacccgaacctccagaatattccagtgcgcacgccgctgggccaacacattcgtaaagcgtttgttgcggaacatggttggttattacttgcggccgattactcccagatcgaacttcgtgtattggcgcatctctctggcgacgagaatcttaaacgtgtgtttcgcgaaggcaaggatattcacactgaaaccgcagcctggatgttcggggtggacccggccttagtggaccccaagatgcgtcgtgccgccaagaccgtcaactttggcgtactctatggtatgtcagcagcacgtcttagtcaggaattgggcattgactacaaagtggctgaagcgtttatcgagcgctatttccaatcctttccgaaagttcgcgcgtggattgaacgtacgctcgaagaaggtcgcactcgcggctatgtggaaacgttattcgggcgtcgtcgctacgttccagatcttacgtctcgtgtccgctcagtgcgcgaagctgctgagcgtatggcctggaatatgcctgttcagggaacagcggcggacctcatgaagatcgccatggtgaaattgtttccgcgcttgaaacccttaggagcccaccttcttttacaggtgcatgatgaattggtcttggaagtacccgaggatcgcgcagagaaagccaaagcgctcgtgaaagaggttatggaaaacgcgtatccgttagatgttccgttggaggtcgaagtgggtgtaggccgtgattggcttgaagcgaaacaagactaatga

SEQ ID NO: 1060 - protein, 844 aa, synthetic construct
  REGION 1..844: note = DNA Polymerase Variant
MHHHHHHGGSGMLPLFDLEENPKRVLLVDGHHLAYRTFYALSLTTSRGEPVQMVYGFARSLLKALKEDGQAVVVVFDARAPSFRHEAYEAYKAGRAPTPEDFPRQLALVKRLVDLLGLVRLEAPGYEADDVLGTLAKKAEREGMEVCILTGDRDFFQLLSEKVSVLLPDGTLVTPKDVQEKYGVPPERWVDFRALTGDRSDNIPGVAGIGEKTALRLLAEWGSVENLLKNLDKVKPDSLRRKIEAHLEDLRLSLDLARIRTDLPLEVDFKALRRRTPDLEGLRAFLEELELGSLLHEFGLLGTEKPREEAPWPPPEGAFVGFLLSRKEPMWAELLALAAAAEGRVHRATSPVEALADLKEARGFLAKDLAVLALREGVALDPTDDPLLVAYLLDHANTNPERVARRYGGEFTEDAAERALLSERLFQTLFPRLSEKLLWLYQEVERPLSRVLAHMEARGVRLDVPLLEALSFELEKELERLEGEVFRLAGHPFNLNSRDQLEKVLFDELGLTPVTRTEKTGKRSTSAAALEALRGAHPIVELILQYRELSKLKSTYLDRLPRLVHPRTGRLHTRFNQTATATGRLSSSDPNLQNIPVRTPLGQHIRKAFVAEHGWLLLAADYSQIELRVLAHLSGDENLKRVFREGKDIHTETAAWMFGVDPALVDPKMRRAAKTVNFGVLYGMSAARLSQELGIDYKVAEAFIERYFQSFPKVRAWIERTLEEGRTRGYVETLFGRRRYVPDLTSRVRSVREAAERMAWNMPVQGTAADLMKIAMVKLFPRLKPLGAHLLLQVHDELVLEVPEDRAEKAKALVKEVMENAYPLDVPLEVEVGVGRDWLEAKQD

SEQ ID NO: 1061 - DNA, 2538 bp, synthetic construct
  misc_feature 1..2538: note = DNA Polymerase Variant
  source 1..2538: mol_type = other DNA
atgcaccatcatcatcatcatggcggtagcggcatgttaccgctgtttgatttggaagaaccaccaaaacgcgtgctgcttgttgacggccatcatctggcgtatcgtaccttctacgcactgagccttacgacctcacgtggtgagcctgtccagatggtgtatgggtttgctcgctccctgctgaaagccctgaaggaagatggtcaagccgtagtagtggttttcgatgcgaaagcaccgtcgtttcgtcacgaagcgtacgaggcctataaagctggccgcgcaccgaccccggaagactttccgcgtcagttagcgctcgtcaaacgcctcgtggatttgctgggattagttcgcttggaagctcctggctacgaggcggacgacgtgctcggtacactggccaagaaagcagaacgtgaaggcatggaggtctgcattcttaccggtgatcgcgatttcttccagctgctgtctgagaaagtgagcgttttgctgcccgatggcacgttagtaaccccgaaagatgtgcaagagaaatatggagttccgccagaacgttgggtggactttcgcgcactgactggtgatcgttcagacaacatcccgggcgttgccgggattggtgaaaagacggcgctgcgcctgctggcagaatggggctcggtggaaaatctgctcaagaaccttgatcgtgtgaaacctgatagcttacgccgcaagatcgaagcccacctggaagacttgcgtctgagtctggatcttgcccgtattcgcaccgatctgccgttggaagtagactttaaagctctgcgtcgtcgcacacccgatttagaggggttacgcgcgttcctcgaagaactggagctgggctccctgctgcatgaattcggtttgttgggcggagagaaaccgcgtgaagaagcaccatggccgccgcccgaaggtgcctttgtcggctttcttctgtcacgcaaagagccaatgtgggcggaactgttagctcttgcagccgccgcggaagggcgtgttcaccgcgcgacctctcctgtcgaggccctcgctgacctcaaagaagcacgtggtttcttggcgaaagatttagccgtgcttgcattacgcgaaggcgttgcgctcgatccgacggacgacccgcttttggtggcttatttgctcgatcatgcgaataccaacccggaacgtgtcgcccgtcgttacggcggcgagtttactgaagatgcggcagaacgcgcgttgcttagcgaacgcctcttccagacgttatttccacgtctttcggagaaattactctggctctatcaggaagtcgaacgtccattgagtcgcgtgcttgcccatatggaggctcgcggtgtgcgcttagatgttccgttgttagaagcactcagcttcgagttggagaaagaactggaacgtcttgaaggcgaagtctttcgtttagcggggcatcccttcaatctcaactctcgcgaccaattggagaaagtgctctttgatgaattaggtttaacccctgtcacgcgtacagagaagaccggcaaacgttccacttcggcagccgccttggaagcacttcgtggtgctcacccgatcgtcgagttgattttgcagtatcgcgagctcagcaaactcaaatcaacctatcttgataggttacctcgtcttgttcatccacgtacgggtcgtttacacacccgcttcaatcaaacggcaacagccaccgggcgcttgtcgtcgagtgacccgaacctccagaatattccagtgcgcacgccgctgggccaacacattcgtaaagcgtttgttgcggaagaaggttggttattacttgcggccgattactcccagatcgaacttcgtgtattggcgcatctctctggcgacgagaatcttaaacgcgtgtttcgcgaaggcaaggatattcacactgaaaccgcagcctggatgttcggggtggacccagccttagtggaccccaagatgcgtcgtgccgccaagaccgtcaactttggcgtactctatggtatgtcagcagcacgtcttagtcaggaattgggcattgactacaaagaagctgaagcgtttatcgagcgctatttccaatcctttccgaaagttcgcgcgtggattgaacgtacgctcgaatttggtcgcactcgcggctatgtggaaacgttattcgggcgtcgtcgctacgttccagatcttacgtctcgtgtccgctcagtgcgcgaagctgctgagcgtatggcctggaatatgcctgttcagggaacagcggcggacctcatgaagatcgccatggtgaaattgtttccgcgcttgaaacccttaggagcccaccttcttttacaggtgcatgatgaattggtcttggaagtacccgaggatcgcgcagaagaagccaaagcactcgtgaaagaggttatggaaaacgcgtatccgttagatgttccgttggaggtcgaagtgggtgtaggccgtgattggcttgaagcgaaacaagactaatga

SEQ ID NO: 1062 - protein, 844 aa, synthetic construct
  REGION 1..844: note = DNA Polymerase Variant
MHHHHHHGGSGMLPLFDLEEPPKRVLLVDGHHLAYRTFYALSLTTSRGEPVQMVYGFARSLLKALKEDGQAVVVVFDAKAPSFRHEAYEAYKAGRAPTPEDFPRQLALVKRLVDLLGLVRLEAPGYEADDVLGTLAKKAEREGMEVCILTGDRDFFQLLSEKVSVLLPDGTLVTPKDVQEKYGVPPERWVDFRALTGDRSDNIPGVAGIGEKTALRLLAEWGSVENLLKNLDRVKPDSLRRKIEAHLEDLRLSLDLARIRTDLPLEVDFKALRRRTPDLEGLRAFLEELELGSLLHEFGLLGGEKPREEAPWPPPEGAFVGFLLSRKEPMWAELLALAAAAEGRVHRATSPVEALADLKEARGFLAKDLAVLALREGVALDPTDDPLLVAYLLDHANTNPERVARRYGGEFTEDAAERALLSERLFQTLFPRLSEKLLWLYQEVERPLSRVLAHMEARGVRLDVPLLEALSFELEKELERLEGEVFRLAGHPFNLNSRDQLEKVLFDELGLTPVTRTEKTGKRSTSAAALEALRGAHPIVELILQYRELSKLKSTYLDRLPRLVHPRTGRLHTRFNQTATATGRLSSSDPNLQNIPVRTPLGQHIRKAFVAEEGWLLLAADYSQIELRVLAHLSGDENLKRVFREGKDIHTETAAWMFGVDPALVDPKMRRAAKTVNFGVLYGMSAARLSQELGIDYKEAEAFIERYFQSFPKVRAWIERTLEFGRTRGYVETLFGRRRYVPDLTSRVRSVREAAERMAWNMPVQGTAADLMKIAMVKLFPRLKPLGAHLLLQVHDELVLEVPEDRAEEAKALVKEVMENAYPLDVPLEVEVGVGRDWLEAKQD

SEQ ID NO: 1063 - DNA, 2538 bp, synthetic construct
  misc_feature 1..2538: note = DNA Polymerase Variant
  source 1..2538: mol_type = other DNA
atgcaccatcatcatcatcatggcggtagcggcatgttaccgctgtttgatttggaagaaccaccaaaacgcgtgctgcttgttgacggccatcatctggcgtatcgtaccttctacgcactgagccttacgacctcacgtggtgagcctgtccagatggtgtatgggtttgctcgctccctgctgaaagccctgaaggaagatggtcaagccgtagtagtggttttcgatgcgaaagcaccgtcgtttcgtcacgaagcgtacgaggcctataaagctggccgcgcaccgaccccggaagactttccgcgtcagttagcgctcgtcaaacgcctcgtggatttgctgggattagttcgcttggaagctcctggctacgaggcggacgacgtgctcggtacactggccaagaaagcagaacgtgaaggcatggaggtctgcattcttaccggtgatcgcgatttcttccagctgctgtctgagaaagtgagcgttttgctgcccgatggcacgttagtaaccccgaaagatgtgcaagagaaatatggagttccgccagaacgttgggtggactttcgcgcactgactggtgatcgttcagacaacatcccgggcgttgccgggattggtgaaaagacggcgctgcgcctgctggcagaatggggctcggtggaaaatctgctcaagaaccttgatcgtgtgaaacctgatagcttacgccgcaagatcgaagcccacctggaagacttgcgtctgagtctggatcttgcccgtattcgcaccgatctgccgttggaagtagactttaaagctctgcgtcgtcgcacacccgatttagaggggttacgcgcgttcctcgaagaactggagctgggctccctgctgcatgaattcggtttgttgggcggagagaaaccgcgtgaagaagcaccatggccgccgcccgaaggtgcctttgtcggctttcttctgtcacgcaaagagccaatgtgggcggaactgttagctcttgcagccgccgcggaagggcgtgttcaccgcgcgacctctcctgtcgaggccctcgctgacctcaaagaagcacgtggtttcttggcgaaagatttagccgtgcttgcattacgcgaaggcgttgcgctcgatccgacggacgacccgcttttggtggcttatttgctcgatcatgcgaataccaacccggaacgtgtcgcccgtcgttacggcggcgagtttactgaagatgcggcagaacgcgcgttgcttagcgaacgcctcttccagacgttatttccacgtctttcggagaaattactctggctctatcaggaagtcgaacgtccattgagtcgcgtgcttgcccatatggaggctcgcggtgtgcagttagatgttccgttgttagaagcactcagcttcgagttggagaaagaactggaacgtcttgaaggcgaagtctttcgtttagcggggcatcccttcaatctcaactctcgcgaccaattggagaaagtgctctttgatgaattaggtttaacccctgtcacgcgtacagagaagaccggcaaacgttccacttcggcagccgccttggaagcacttcgtggtgctcacccgatcgtcgagttgattttgcagtatcgcgagctcagcaaactcaaatcaacctatcttgataggttacctcgtcttgttcatccacgtacgggtcgtttacacacccgcttcaatcaaacggcaacagccaccgggcgcttgtcgtcgagtgacccgaacctccagaatattccagtgcgcacgccgctgggccaacacattcgtaaagcgtttgttgcggaagaaggttggttattacttgcggccgattactcccagatcgaacttcgtgtattggcgcatctctctggcgacgagaatcttaaacgcgtgtttcgcgaaggcaaggatattcacactgaaaccgcagcctggatgttcggggtggacccagccttagtggaccccaagatgcgtcgtgccgccaagaccgtcaactttggcgtactctatggtatgtcagcagcacgtcttagtcaggaattgggcattgactacaaagaagctgaagcgtttatcgagcgctatttccaatcctttccgaaagttcgcgcgtggattgaacgtacgctcgaagaaggtcgcactcgcggctatgtggaaacgttattcgggcgtcgtcgctacgttccagatcttacgtctcgtgtccgctcagtgcgcgaagctgctgagcgtatggcctggaatatgcctgttcagggaacagcggcggacctcatgaagatcgccatggtgaaattgtttccgcgcttgaaacccttaggagcccaccttcttttacaggtgcatgatgaattggtcttggaagtacccgaggatcgcgcagaagaagccaaagcactcgtgaaagaggttatggaaaacgcgtatccgttagatgttccgttggaggtcgaagtgggtgtaggccgtgattggcttgaagcgaaacaagactaatga

SEQ ID NO: 1064 - protein, 844 aa, synthetic construct
  REGION 1..844: note = DNA Polymerase Variant
MHHHHHHGGSGMLPLFDLEEPPKRVLLVDGHHLAYRTFYALSLTTSRGEPVQMVYGFARSLLKALKEDGQAVVVVFDAKAPSFRHEAYEAYKAGRAPTPEDFPRQLALVKRLVDLLGLVRLEAPGYEADDVLGTLAKKAEREGMEVCILTGDRDFFQLLSEKVSVLLPDGTLVTPKDVQEKYGVPPERWVDFRALTGDRSDNIPGVAGIGEKTALRLLAEWGSVENLLKNLDRVKPDSLRRKIEAHLEDLRLSLDLARIRTDLPLEVDFKALRRRTPDLEGLRAFLEELELGSLLHEFGLLGGEKPREEAPWPPPEGAFVGFLLSRKEPMWAELLALAAAAEGRVHRATSPVEALADLKEARGFLAKDLAVLALREGVALDPTDDPLLVAYLLDHANTNPERVARRYGGEFTEDAAERALLSERLFQTLFPRLSEKLLWLYQEVERPLSRVLAHMEARGVQLDVPLLEALSFELEKELERLEGEVFRLAGHPFNLNSRDQLEKVLFDELGLTPVTRTEKTGKRSTSAAALEALRGAHPIVELILQYRELSKLKSTYLDRLPRLVHPRTGRLHTRFNQTATATGRLSSSDPNLQNIPVRTPLGQHIRKAFVAEEGWLLLAADYSQIELRVLAHLSGDENLKRVFREGKDIHTETAAWMFGVDPALVDPKMRRAAKTVNFGVLYGMSAARLSQELGIDYKEAEAFIERYFQSFPKVRAWIERTLEEGRTRGYVETLFGRRRYVPDLTSRVRSVREAAERMAWNMPVQGTAADLMKIAMVKLFPRLKPLGAHLLLQVHDELVLEVPEDRAEEAKALVKEVMENAYPLDVPLEVEVGVGRDWLEAKQD

SEQ ID NO: 1065 - DNA, 2538 bp, synthetic construct
  misc_feature 1..2538: note = DNA Polymerase Variant
  source 1..2538: mol_type = other DNA
atgcaccatcatcatcatcatggcggtagcggcatgttaccgctgtttgatttggaagaagcaccaaaacgcgtgctgcttgttgacggccatcatctggcgtatcgtaccttctacgcactgagccttacgacctcacgtggtgagcctgtccagatggtgtatgggtttgctcgctccctgctgaaagccctgaaggaagatggtcaagccgtagtagtggttttcgatgcgcgcgcaccgtcgtttcgtcacgaagcgtacgaggcctataaagctggccgcgcaccgaccccggaagactttccgcgtcagttagcgctcgtcaaacgcctcgtggatttgctgggattagttcgcttggaagctcctggctacgaggcggacgacgtgctcggtacactggccaagaaagcagaacgtgaaggcatggaggtctgcattcttaccggtgatcgcgatttcttccagctgctgtctgagaaagtgagcgttttgctgcccgatggcacgttagtaaccccgaaagatgtgcaagagaaatatggagttccgccagaacgttgggtggactttcgcgcactgactggtgatcgttcagacaacatcccgggcgttgccgggattggtgaaaagacggcgctgcgcctgctggcagaatggggctcggtggaaaatctgctcaagaaccttgatcgtgtgaaacctgatagcttacgccgcaagatcgaagcccacctggaagacttgcgtctgagtctggatcttgcccgtattcgcaccgatctgccgttggaagtagactttaaagctctgcgtcgtcgcacacccgatttagaggggttacgcgcgttcctcgaagaactggagctgggctccctgctgcatgaattcggtttgttgggcggagagaaaccgcgtgaagaagcaccatggccgccgcccgaaggtgcctttgtcggctttcttctgtcacgcaaagagccaatgtgggcggaactgttagctcttgtagccgccgcggaagggcgtgttcaccgcgcgacctctcctgtcgaggccctcgctgacctcaaagaagcacgcggtttcttggcgaaagatttagccgtgcttgcattacgcgaaggcgttgcgctcgatccgacggacgacccgcttttggtggcttatttgctcgatcatgcgaataccaacccggaacgtgtcgcccgtcgttacggcggcgagtttactgaagatgcggcagaacgcgcgttgcttagcgaacgcctcttccagacgttatttccacgtctttcggagaaattactctggctctatcaggaagtcgaacgtccattgagtcgcgtgcttgcccatatggaggctcgcggtgtgcgcttagatgttccgttgttagaagcactcagcttcgagttggagaaagaactggaacgtcttgaaggcgaagtctttcgtttagcggggcatcccttcaatctcaactctcgcgaccaattggagaaagtgctctttgatgaattaggtttaacccctgtcacgcgtacagagaagaccggcaaacgttccacttcggcagccgccttggaagcacttcgtggtgctcacccgatcgtcgagttgattttgcagtatcgcgagctcagcaaactcaaatcaacctatcttgataggttacctcgtcttgttcatccacgtacgggtcgtttacacacccgcttcaatcaaacggcaacagccaccgggcgcttgtcgtcgagtgacccgaacctccagaatattccagtgcgcacgccgctgggccaacacattcgtaaagcgtttgttgcggaacatggttggttattacttgcggccgattactcccagatcgaacttcgtgtattggcgcatctctctggcgacgagaatcttaaacgcgtgtttcgcgaaggcaaggatattcacactgaaaccgcagcctggatgttcggggtggacccagccttagtggaccccaagatgcgtcgtgccgccaagaccgtcaactttggcgtactctatggtatgtcagcagcacgtcttagtcaggaattgggcattgactacaaagaagctgaagcgtttatcgagcgctatttccaatcctttccgaaagttcgcgcgtggattgaacgtacgctcgaagaaggtcgcactcgcggctatgtggaaacgttattcgggcgtcgtcgctacgttccagatcttacgtctcgtgtccgctcagtgcgcgaagctgctgagcgtatggcctggaatatgcctgttcagggaacagcggcggacctcatgaagatcgccatggtgaaattgtttccgcgcttgaaacccttaggagcccaccttcttttacaggtgcatgatgaattggtcttggaagtacccgaggatcgcgcagaagaagccaaagcactcgtgaaagaggttatggaaaacgcgtatccgttagatgttccgttggaggtcgaagtgggtgtaggccgtgattggcttgaagcgaaacaagactaatga

SEQ ID NO: 1066 - protein, 844 aa, synthetic construct
  REGION 1..844: note = DNA Polymerase Variant
MHHHHHHGGSGMLPLFDLEEAPKRVLLVDGHHLAYRTFYALSLTTSRGEPVQMVYGFARSLLKALKEDGQAVVVVFDARAPSFRHEAYEAYKAGRAPTPEDFPRQLALVKRLVDLLGLVRLEAPGYEADDVLGTLAKKAEREGMEVCILTGDRDFFQLLSEKVSVLLPDGTLVTPKDVQEKYGVPPERWVDFRALTGDRSDNIPGVAGIGEKTALRLLAEWGSVENLLKNLDRVKPDSLRRKIEAHLEDLRLSLDLARIRTDLPLEVDFKALRRRTPDLEGLRAFLEELELGSLLHEFGLLGGEKPREEAPWPPPEGAFVGFLLSRKEPMWAELLALVAAAEGRVHRATSPVEALADLKEARGFLAKDLAVLALREGVALDPTDDPLLVAYLLDHANTNPERVARRYGGEFTEDAAERALLSERLFQTLFPRLSEKLLWLYQEVERPLSRVLAHMEARGVRLDVPLLEALSFELEKELERLEGEVFRLAGHPFNLNSRDQLEKVLFDELGLTPVTRTEKTGKRSTSAAALEALRGAHPIVELILQYRELSKLKSTYLDRLPRLVHPRTGRLHTRFNQTATATGRLSSSDPNLQNIPVRTPLGQHIRKAFVAEHGWLLLAADYSQIELRVLAHLSGDENLKRVFREGKDIHTETAAWMFGVDPALVDPKMRRAAKTVNFGVLYGMSAARLSQELGIDYKEAEAFIERYFQSFPKVRAWIERTLEEGRTRGYVETLFGRRRYVPDLTSRVRSVREAAERMAWNMPVQGTAADLMKIAMVKLFPRLKPLGAHLLLQVHDELVLEVPEDRAEEAKALVKEVMENAYPLDVPLEVEVGVGRDWLEAKQD

SEQ ID NO: 1067 - DNA, 2538 bp, synthetic construct
  misc_feature 1..2538: note = DNA Polymerase Variant
  source 1..2538: mol_type = other DNA
atgcaccatcatcatcatcatggcggtagcggcatgttaccgctgtttgatttggaagaaccaccaaaacgcgtgctgcttgttgacggccatcatctggcgtatcgtaccttctacgcactgagccttacgacctcacgtggtgagcctgtccagatggtgtatgggtttgctcgctccctgctgaaagccctgaaggaagatggtcaagccgtagtagtggttttcgatgcgcgtgcaccgtcgtttcgtcacgaagcgtacgaggcctataaagctggccgcgcaccgaccccggaagactttccgcgtcagttagcgctcgtcaaacgcctcgtggatttgctgggattagttcgcttggaagctcctggctacgaggcggacgacgtgctcggtacactggccaagaaagcagaacgtgaaggcatggaggtctgcattcttaccggtgatcgcgatttcttccagctgctgtctgagaaagtgagcgttttgctgcccgatggcacgttagtaaccccgaaagatctgcaagagaaatatggagttccgccagaacgttgggtggactttcgcgcactgactggtgatcgttcagacaacatcccgggcgttgccgggattggtgaaaagacggcgctgcgcctgctggcagaatggggctcggtggaaaatctgctcaagaaccttgatcgtgtgaaacctgatagcttacgccgcaagatcgaagcccacctggaagacttgcgtctgagtctggatcttgcacgtattcgcaccgatctgccgttggaagtagactttaaagctctgcgtcgtcgcacacccgatttagaggggttacgcgcgttcctcgaagaactggagctgggctccctgctgcatgaattcggtttgttgggcggagagaaaccgcgtgaagaagcaccatggccgccgcccgagggtgcctttgtcggctttcttctgtcacgcaaagagccaatgtgggcggaactgttagctcttgcagccgccgcggaagggcgtgttcaccgcgcgacctctcctgtcgaggccctcgctgacctcaaagaagcacgtggtttcttggcgaaagatttagccgtgcttgcattacgcgaaggcgttgcgctcgatccgacggacgacccgcttttggtggcttatttgctcgatcatgcgaataccaacccggaacgtgtcgcccgtcgttacggcggcgagtttactgaagatgcggcagaacgcgcgttgcttagcgaacgcctcttccagacgttatttccacgtctttcggagaaattactctggctctatcaggaagtcgaacgtccattgagtcgcgtgcttgcccatatggaggctcgcggtgtgcgcttagatgttccgttgttagaagcactcagcttcgagttggaaaaagaactggaacgtcttgaaggcgaagtctttcgtttagcggggcatcccttcaatctcaactctcgcgaccaattggagaaagtgctctttgatgaattaggtttaacccctgtcacgcgtacagagaagaccggcaaacgttccacttcggcagccgccttggaagcacttcgtggtgtgcacccgatcgtcgagttgattttgcagtatcgcgagctcagcaaactcaaatcaacctatcttgataggttacctcgtcttgttcatccacgtacgggtcgtttacacacccgcttcaatcaaacggcaacagccaccgggcgcttgtcgtcgagtgacccgaacctccagaatattccagtgcgcacgccgctgggccaacacattcgtaaagcgtttgttgcggaagaaggttggttattacttgcggccgattactcccagatcgaacttcgtgtattggcgcatctctctggcgacgagaatcttaaacgcgtgtttcgcgaaggcaaggatattcacactgaaaccgcagcctggatgttcggggtggacccggccttagtggaccccaagatgcgtcgtgccgccaagaccgtcaactttggcgtactctatggtatgtcagcagcacgtcttagtcaggaattgggcattgactacaaagaagctgaagcgtttatcgagcgctatttccaatcctttccgaaagttcgcgcgtggattgaacgtacgctcgaagaaggtcgcactcgcggctatgtggaaacgttattcgggcgtcgtcgctacgttccagatcttacgtctcgtgtccgctcagtgcgcgaagctgctgagcgtatggcctggaatatgcctgttcagggaacagcggcggacctcatgaagatcgccatggtgaaattgtttccgcgcttgaaacccttaggagcccaccttcttttccaggtgcatgatgaattggtcttggaagtacccgaggatcgcgcagaagaagccaaagcactcgtgaaagaggttatggaaaacgcgtatccgttagatgttccgttggaggtcgaagtgggtgtaggccgtgattggcttgaagcgaaacaagactaatga

SEQ ID NO: 1068 - protein, 844 aa, synthetic construct
  REGION 1..844: note = DNA Polymerase Variant
MHHHHHHGGSGMLPLFDLEEPPKRVLLVDGHHLAYRTFYALSLTTSRGEPVQMVYGFARSLLKALKEDGQAVVVVFDARAPSFRHEAYEAYKAGRAPTPEDFPRQLALVKRLVDLLGLVRLEAPGYEADDVLGTLAKKAEREGMEVCILTGDRDFFQLLSEKVSVLLPDGTLVTPKDLQEKYGVPPERWVDFRALTGDRSDNIPGVAGIGEKTALRLLAEWGSVENLLKNLDRVKPDSLRRKIEAHLEDLRLSLDLARIRTDLPLEVDFKALRRRTPDLEGLRAFLEELELGSLLHEFGLLGGEKPREEAPWPPPEGAFVGFLLSRKEPMWAELLALAAAAEGRVHRATSPVEALADLKEARGFLAKDLAVLALREGVALDPTDDPLLVAYLLDHANTNPERVARRYGGEFTEDAAERALLSERLFQTLFPRLSEKLLWLYQEVERPLSRVLAHMEARGVRLDVPLLEALSFELEKELERLEGEVFRLAGHPFNLNSRDQLEKVLFDELGLTPVTRTEKTGKRSTSAAALEALRGVHPIVELILQYRELSKLKSTYLDRLPRLVHPRTGRLHTRFNQTATATGRLSSSDPNLQNIPVRTPLGQHIRKAFVAEEGWLLLAADYSQIELRVLAHLSGDENLKRVFREGKDIHTETAAWMFGVDPALVDPKMRRAAKTVNFGVLYGMSAARLSQELGIDYKEAEAFIERYFQSFPKVRAWIERTLEEGRTRGYVETLFGRRRYVPDLTSRVRSVREAAERMAWNMPVQGTAADLMKIAMVKLFPRLKPLGAHLLFQVHDELVLEVPEDRAEEAKALVKEVMENAYPLDVPLEVEVGVGRDWLEAKQD

SEQ ID NO: 1069 - DNA, 2538 bp, synthetic construct
  misc_feature 1..2538: note = DNA Polymerase Variant
  source 1..2538: mol_type = other DNA
atgcaccatcatcatcatcatggcggtagcggcatgttaccgctgtttgatttggaagaaccaccaaaacgcgtgctgcttgttgacggccatcatctggcgtatcgtaccttctacgcactgagccttacgacctcacgtggtgagcctgtccagatggtgtatgggtttgctcgctccctgctgaaagccctgaaggaagatggtcaagccgtagtagtggttttcgatgcgaaagcaccgtcgtttcgtcacgaagcgtacgaggcctataaagctggccgcgcaccgaccccggaagactttccgcgtcagttagcgctcgtcaaacgcctcgtggatttgctgggattagttcgcttggaagctcctggctacgaggcggacgacgtgctcggtacactggccaagaaagcagaacgtgaaggcatggaggtctgcattcttaccggtgatcgcgatttcttccagctgctgtctgagaaagtgagcgttttgctgcccgatggcacgttagtaaccccgaaagatgtgcaagagaaatatggagttccgccagaacgttgggtggactttcgcgcactgactggtgatcgttcagacaacatcccgggcgttgccgggattggtgaaaagacggcgctgcgcctgctggcagaatggggctcggtggaaaatctgctcaagaaccttgatcgtgtgaaacctgatagcttacgccgcaagatcgaagcccacctggaagacttgcgtctgagtctggatcttgcccgtattcgcaccgatctgccgttggaagtagactttaaagctctgcgtcgtcgcacacccgatttagaggggttacgcgcgttcctcgaagaactggagctgggctccctgctgcatgaattcggtttgttgggcggagagaaaccgcgtgaagaagcaccatggccgccgcccgaaggtgcctttgtcggctttcttctgtcacgcaaagagccaatgtgggcggaactgttagctcttgcagccgccgcggaagggcgtgttcaccgcgcgacctctcctgtcgaggccctcgctgacctcaaagaagcacgtggtttcttggcgaaagatttagccgtgcttgcattacgcgaaggcgttgcgctcgatccgacggacgacccgcttttggtggcttatttgctcgatcatgcgaataccaacccggaacgtgtcgcccgtcgttacggcggcgagtttactgaagatgcggcagaacgcgcgttgcttagcgaacgcctcttccagacgttatttccacgtctttcggagaaattactctggctctatcaggaagtcgaacgtccattgagtcgcgtgcttgcccatatggaggctcgcggtgtgcgcttagatgttccgttgttagaagcactcagcttcgagttggagaaagaactggaacgtcttgaaggcgaagtctttcgtttagcggggcatcccttcaatctcaactctcgcgaccaattggagaaagtgctctttgatgaattaggtttaacccctgtcacgcgtacagagaagaccggcaaacgttccacttcggcagccgccttggaagcacttcgtggtgctcacccgatcgtcgagttgattttgcagtatcgcgagctcagcaaactcaaatcaacctatcttgataggttacctcgtcttgttcatccacgtacgggtcgtttacacacccgcttcaatcaaacggcaacagccaccgggcgcttgtcgtcgagtgacccgaacctccagaatattccagtgcgcacgccgctgggccaacacattcgtaaagcgtttgttgcggaagaaggttggttattacttgcggccgattactcccagatcgaacttcgtgtattggcgcatctctctggcgacgagaatcttaaacgcgtgtttcgcgaaggcaaggatattcacactgaaaccgcagcctggatgttcggggtggacccagccttagtggaccccaagatgcgtcgtgccgccaagaccgtcaactttggcgtactctatggtatgtcagcagcacgtcttagtcaggaattgggcattgactacaaagaagctgaagcgtttatcgagcgctatttccaatcctttccgaaagttcatgcgtggattgaacgtacgctcgaagaaggtcgcactcgcggctatgtggaaacgttattcgggcgtcgtcgctacgttccagatcttacgtctcgtgtccgctcagtgcgcgaagctgctgagcgtatggcctggaatatgcctgttcagggaacagcggcggacctcatgaagatcgccatggtgaaattgtttccgcgcttgaaacccttaggagcccaccttcttttacaggtgcatgatgaattggtcttggaagtacccgaggatcgcgcagaagaagccaaagcactcgtgaaagaggttatggaaaacgcgtatccgttagatgttccgttggaggtcgaagtgggtgtaggccgtgattggcttgaagcgaaacaagactaatga

SEQ ID NO: 1070 - protein, 844 aa, synthetic construct
  REGION 1..844: note = DNA Polymerase Variant
MHHHHHHGGSGMLPLFDLEEPPKRVLLVDGHHLAYRTFYALSLTTSRGEPVQMVYGFARSLLKALKEDGQAVVVVFDAKAPSFRHEAYEAYKAGRAPTPEDFPRQLALVKRLVDLLGLVRLEAPGYEADDVLGTLAKKAEREGMEVCILTGDRDFFQLLSEKVSVLLPDGTLVTPKDVQEKYGVPPERWVDFRALTGDRSDNIPGVAGIGEKTALRLLAEWGSVENLLKNLDRVKPDSLRRKIEAHLEDLRLSLDLARIRTDLPLEVDFKALRRRTPDLEGLRAFLEELELGSLLHEFGLLGGEKPREEAPWPPPEGAFVGFLLSRKEPMWAELLALAAAAEGRVHRATSPVEALADLKEARGFLAKDLAVLALREGVALDPTDDPLLVAYLLDHANTNPERVARRYGGEFTEDAAERALLSERLFQTLFPRLSEKLLWLYQEVERPLSRVLAHMEARGVRLDVPLLEALSFELEKELERLEGEVFRLAGHPFNLNSRDQLEKVLFDELGLTPVTRTEKTGKRSTSAAALEALRGAHPIVELILQYRELSKLKSTYLDRLPRLVHPRTGRLHTRFNQTATATGRLSSSDPNLQNIPVRTPLGQHIRKAFVAEEGWLLLAADYSQIELRVLAHLSGDENLKRVFREGKDIHTETAAWMFGVDPALVDPKMRRAAKTVNFGVLYGMSAARLSQELGIDYKEAEAFIERYFQSFPKVHAWIERTLEEGRTRGYVETLFGRRRYVPDLTSRVRSVREAAERMAWNMPVQGTAADLMKIAMVKLFPRLKPLGAHLLLQVHDELVLEVPEDRAEEAKALVKEVMENAYPLDVPLEVEVGVGRDWLEAKQD

SEQ ID NO: 1071 - DNA, 2538 bp, synthetic construct
  misc_feature 1..2538: note = DNA Polymerase Variant
  source 1..2538: mol_type = other DNA
atgcaccatcatcatcatcatggcggtagcggcatgttaccgctgtttgatttggaagaaccaccaaaacgcgtgctgcttgttgacggccatcatctggcgtatcgtaccttctacgcactgagccttacgacctcacgtggtgagcctgtccagatggtgtatgggtttgctcgctccctgctgaaagccctgaaggaagatggtcaagccgtagtagtggttttcgatgcgaaagcaccgtcgtttcgtcacgaagcgtacgaggcctataaagctggccgcgcaccgaccccggaagactttccgcgtcagttagcgctcgtcaaacgcctcgtggatttgctgggattagttcgcttggaagctcctggctacgaggcggacgacgtgctcggtacactggccaagaaagcagaacgtgaaggcatggaggtctgcattcttaccggtgatcgcgatttcttccagctgctgtctgagaaagtgagcgttttgctgcccgatggcacgttagtaaccccgaaagatgtgcaagagaaatatggagttccgccagaacgttgggtggactttcgcgcactgactggtgatcgttcagacaacatcccgggcgttgccgggattggtgaaaagacggcgctgcgcctgctggcagaatggggctcggtggaaaatctgctcaagaaccttgatcgtgtgaaacctgatagcttacgccgcaagatcgaagcccacctggaagacttgcgtctgagtctggatcttgcccgtattcgcaccgatctgccgttggaagtagactttaaagctctgcgtcgtcgcacacccgatttagaggggttacgcgcgttcctcgaagaactggagctgggctccctgctgcatgaattcggtttgttgggcggagagaaaccgcgtgaagaagcaccatggccgccgcccgaaggtgcctttgtcggctttcttctgtcacgcaaagagccaatgtgggcggaactgttagctcttgcagccgccgcggaagggcgtgttcaccgcgcgacctctcctgtcgaggccctcgctgacctcaaagaagcacgtggtttcttggcgaaagatttagccgtgcttgcattacgcgaaggcgttgcgctcgatccgacggacgacccgcttttggtgacgtatttgctcgatcatgcgaataccaacccggaacgtgtcgcccgtcgttacggcggcgagtttactgaagatgcggcagaacgcgcgttgcttagcgaacgcctcttccagacgttatttccacgtctttcggagaaattactctggctctatcaggaagtcgaacgtccattgagtcgcgtgcttgcccatatggaggctcgcggtgtgcgcttagatgttccgttgttagaagcactcagcttcgagttggagaaagaactggaacgtcttgaaggcgaagtctttcgtttagcggggcatcccttcaatctcaactctcgcgaccaattggagaaagtgctctttgatgaattaggtttaacccctgtcacgcgtacagagaagaccggcaaacgttccacttcggcagccgccttggaagcacttcgtggtgctcacccgatcgtcgagttgattttgcagtatcgcgagctcagcaaactcaaatcaacctatcttgataggttacctcgtcttgttcatccacgtacgggtcgtttacacacccgcttcaatcaaacggcaacagccaccgggcgcttgtcgtcgagtgacccgaacctccagaatattccagtgcgcacgccgctgggccaacacattcgtaaagcgtttgttgcggaagaaggttggttattacttgcggccgattactcccagatcgaacttcgtgtattggcgcatctctctggcgacgagaatcttaaacgcgtgtttcgcgaaggcaaggatattcacactgaaaccgcagcctggatgttcggggtggacccagccttagtggaccccaagatgcgtcgtgccgccaagaccgtcaactttggcgtactctatggtatgtcagcagcacgtcttagtcaggaattgggcattgactacaaagaagctgaagcgtttatcgagcgctatttccaatcctttccgaaagttcgcgcgtggattgaacgtacgctcgaagaaggtcgcactcgcggctatgtggaaacgttattcgggcgtcgtcgctacgttccagatcttacgtctcgtgtccgctcagtgcgcgaagctgctgagcgtatggcctggaatatgcctgttcagggaacagcggcggacctcatgaagatcgccatggtgaaattgtttccgcgcttgaaacccttaggagcccaccttcttttacaggtgcatgatgaattggtcttggaagtacccgaggatcgcgcagaagaagccaaagcactcgtgaaagaggttatggaaaacgcgtatccgttagatgttccgttggaggtcgaagtgggtgtaggccgtgattggcttgaagcgaaacaagactaatga

SEQ ID NO: 1072 - protein, 844 aa, synthetic construct
  REGION 1..844: note = DNA Polymerase Variant
MHHHHHHGGSGMLPLFDLEEPPKRVLLVDGHHLAYRTFYALSLTTSRGEPVQMVYGFARSLLKALKEDGQAVVVVFDAKAPSFRHEAYEAYKAGRAPTPEDFPRQLALVKRLVDLLGLVRLEAPGYEADDVLGTLAKKAEREGMEVCILTGDRDFFQLLSEKVSVLLPDGTLVTPKDVQEKYGVPPERWVDFRALTGDRSDNIPGVAGIGEKTALRLLAEWGSVENLLKNLDRVKPDSLRRKIEAHLEDLRLSLDLARIRTDLPLEVDFKALRRRTPDLEGLRAFLEELELGSLLHEFGLLGGEKPREEAPWPPPEGAFVGFLLSRKEPMWAELLALAAAAEGRVHRATSPVEALADLKEARGFLAKDLAVLALREGVALDPTDDPLLVTYLLDHANTNPERVARRYGGEFTEDAAERALLSERLFQTLFPRLSEKLLWLYQEVERPLSRVLAHMEARGVRLDVPLLEALSFELEKELERLEGEVFRLAGHPFNLNSRDQLEKVLFDELGLTPVTRTEKTGKRSTSAAALEALRGAHPIVELILQYRELSKLKSTYLDRLPRLVHPRTGRLHTRFNQTATATGRLSSSDPNLQNIPVRTPLGQHIRKAFVAEEGWLLLAADYSQIELRVLAHLSGDENLKRVFREGKDIHTETAAWMFGVDPALVDPKMRRAAKTVNFGVLYGMSAARLSQELGIDYKEAEAFIERYFQSFPKVRAWIERTLEEGRTRGYVETLFGRRRYVPDLTSRVRSVREAAERMAWNMPVQGTAADLMKIAMVKLFPRLKPLGAHLLLQVHDELVLEVPEDRAEEAKALVKEVMENAYPLDVPLEVEVGVGRDWLEAKQD

SEQ ID NO: 1073 - DNA, 2538 bp, synthetic construct
  misc_feature 1..2538: note = DNA Polymerase Variant
  source 1..2538: mol_type = other DNA
atgcaccatcatcatcatcatggcggtagcggcatgttaccgctgtttgatttggaagaaccaccaaaacgcgtgctgcttgttgacggccatcatctggcgtatcgtaccttctacgcactgagccttacgacctcacgtggtgagcctgtccagatggtgtatgggtttgctcgctccctgctgaaagccctgaaggaagatggtcaagccgtagtagtggttttcgatgcgaaagcaccgtcgtttcgtcacgaagcgtacgaggcctataaagctggccgcgcaccgaccccggaagactttccgcgtcagttagcgctcgtcaaacgcctcgtggatttgctgggattagttcgcttggaagctcctggctacgaggcggacgacgtgctcggtacactggccaagaaagcagaacgtgaaggcatggaggtctgcattcttaccggtgatcgcgatttcttccagctgctgtctgagaaagtgagcgttttgctgcccgatggcacgttagtaaccccgaaagatgtgcaagagaaatatggagttccgccagaacgttgggtggactttcgcgcactgactggtgatcgttcagacaacatcccgggcgttgccgggattggtgaaaagacggcgctgcgcctgctggcagaatggggctcggtggaaaatctgctcaagaaccttgatcgtgtgaaacctgatagcttacgccgcaagatcgaagcccacctggaagacttgcgtctgagtctggatcttgcccgtattcgcaccgatctgccgttggaagtagactttaaagctctgcgtcgtcgcacacccgatttagaggggttacgcgcgttcctcgaagaactggagctgggctccctgctgcatgaattcggtttgttgggcggagagaaaccgcgtgaagaagcaccatggccgccgcccgaaggtgcctttgtcggctttcttctgtcacgcaaagagccaatgtgggcggaactgttagctcttgcagccgccgcggaagggcgtgttcaccgcgcgacctctcctgtcgaggccctcgctgacctcaaagaagcacgtggtttcttggcgaaagatttagccgtgcttgcattacgcgaaggcgttgcgctcgatccgacggacgacccgcttttggtggcttatttgctcgatcatgcgaataccaacccggaacgtgtcgcccgtcgttacggcggcgagtttactgaagatgcggcagaacgcgcgttgcttagcgaacgcctcttccagacgttatttccacgtctttcggagaaattactctggctctatcaggaagtcgaacgtccattggggcgcgtgcttgcccatatggaggctcgcggtgtgcgcttagatgttccgttgttagaagcactcagcttcgagttggagaaagaactggaacgtcttgaaggcgaagtctttcgtttagcggggcatcccttcaatctcaactctcgcgaccaattggagaaagtgctctttgatgaattaggtttaacccctgtcacgcgtacagagaagaccggcaaacgttccacttcggcagccgccttggaagcacttcgtggtgctcacccgatcgtcgagttgattttgcagtatcgcgagctcagcaaactcaaatcaacctatcttgataggttacctcgtcttgttcatccacgtacgggtcgtttacacacccgcttcaatcaaacggcaacagccaccgggcgcttgtcgtcgagtgacccgaacctccagaatattccagtgcgcacgccgctgggccaacacattcgtaaagcgtttgttgcggaagaaggttggttattacttgcggccgattactcccagatcgaacttcgtgtattggcgcatctctctggcgacgagaatcttaaacgcgtgtttcgcgaaggcaaggatattcacactgaaaccgcagcctggatgttcggggtggacccagccttagtggaccccaagatgcgtcgtgccgccaagaccgtcaactttggcgtactctatggtatgtcagcagcacgtcttagtcaggaattgggcattgactacaaagaagctgaagcgtttatcgagcgctatttccaatcctttccgaaagttcgcgcgtggattgaacgtacgctcgaagaaggtcgcactcgcggctatgtggaaacgttattcgggcgtcgtcgctacgttccagatcttacgtctagtgtccgctcagtgcgcgaagctgctgagcgtatggcctggaatatgcctgttcagggaacagcggcggacctcatgaagatcgccatggtgaaattgtttccgcgcttgaaacccttaggagcccaccttcttttacaggtgcatgatgaattggtcttggaagtacccgaggatcgcgcagaagaagccaaagcactcgtgaaagaggttatggaaaacgcgtatccgttagatgttccgttggaggtcgaagtgggtgtaggccgtgattggcttgaagcgaaacaagactaatga

SEQ ID NO: 1074 - protein, 844 aa, synthetic construct
  REGION 1..844: note = DNA Polymerase Variant
MHHHHHHGGSGMLPLFDLEEPPKRVLLVDGHHLAYRTFYALSLTTSRGEPVQMVYGFARSLLKALKEDGQAVVVVFDAKAPSFRHEAYEAYKAGRAPTPEDFPRQLALVKRLVDLLGLVRLEAPGYEADDVLGTLAKKAEREGMEVCILTGDRDFFQLLSEKVSVLLPDGTLVTPKDVQEKYGVPPERWVDFRALTGDRSDNIPGVAGIGEKTALRLLAEWGSVENLLKNLDRVKPDSLRRKIEAHLEDLRLSLDLARIRTDLPLEVDFKALRRRTPDLEGLRAFLEELELGSLLHEFGLLGGEKPREEAPWPPPEGAFVGFLLSRKEPMWAELLALAAAAEGRVHRATSPVEALADLKEARGFLAKDLAVLALREGVALDPTDDPLLVAYLLDHANTNPERVARRYGGEFTEDAAERALLSERLFQTLFPRLSEKLLWLYQEVERPLGRVLAHMEARGVRLDVPLLEALSFELEKELERLEGEVFRLAGHPFNLNSRDQLEKVLFDELGLTPVTRTEKTGKRSTSAAALEALRGAHPIVELILQYRELSKLKSTYLDRLPRLVHPRTGRLHTRFNQTATATGRLSSSDPNLQNIPVRTPLGQHIRKAFVAEEGWLLLAADYSQIELRVLAHLSGDENLKRVFREGKDIHTETAAWMFGVDPALVDPKMRRAAKTVNFGVLYGMSAARLSQELGIDYKEAEAFIERYFQSFPKVRAWIERTLEEGRTRGYVETLFGRRRYVPDLTSSVRSVREAAERMAWNMPVQGTAADLMKIAMVKLFPRLKPLGAHLLLQVHDELVLEVPEDRAEEAKALVKEVMENAYPLDVPLEVEVGVGRDWLEAKQD

SEQ ID NO: 1075 - DNA, 2538 bp, synthetic construct
  misc_feature 1..2538: note = DNA Polymerase Variant
  source 1..2538: mol_type = other DNA
atgcaccatcatcatcatcatggcggtagcggcatgttaccgctgtttgatttggaagaaccaccaaaacgcgtgctgcttgttgacggccatcatctggcgtatcgtaccttctacgcactgagccttacgacctcacgtggtgagcctgtccagatggtgtatgggtttgctcgctccctgctgaaagccctgaaggaagatggtcaagccgtagtagtggttttcgatgcgaaagcaccgtcgtttcgtcacgaagcgtacgaggcctataaagctggccgcgcaccgaccccggaagactttccgcgtcagttagcgctcgtcaaacgcctcgtggatttgctgggattagttcgcttggaagctcctggctacgaggcggacgacgtgctcggtacactggccaagaaagcagaacgtgaaggcatggaggtctgcattcttaccggtgatcgcgatttcttccagctgctgtctgagaaagtgagcgttttgctgcccgatggcacgttagtaaccccgaaagatgtgcaagagaaatatggagttccgccagaacgttgggtggactttcgcgcactgactggtgatcgttcagacaacatcccgggcgttgccgggattggtgaaaagacggcgctgcgcctgctggcagaatggggctcggtggaaaatctgctcaagaaccttgatcgtgtgaaacctgatagcttacgccgcaagatcgaagcccacctggaagacttgcgtctgagtctggatcttgcccgtattcgcaccgatctgccgttggaagtagactttaaagctctgcgtcgtcgcacacccgatttagaggggttacgcgcgttcctcgaagaactggagctgggctccctgctgcatgaattcggtttgttgggcggagagaaaccgcgtgaagaagcaccatggccgccgcccgaaggtgcctttgtcggctttcttctgtcacgcaaagagccaatgtgggcggaactgttagctcttgcagccgccgcggaagggcgtgttcaccgcgcgacctctcctgtcgaggccctcgctgacctcaaagaagcacgtggtttcttggcgaaagatttagccgtgcttgcattacgcgaaggcgttgcgctcgatccgacggacgacccgcttttggtggcttatttgctcgatcatgcgaataccaacccggaacgtgtcgcccgtcgttacggcggcgagtttactgaagatgcggcagaacgcgcgttgcttagcgaacgcctcttccagacgttatttccacgtctttcggagaaattactctggctctatcaggaagtcgaacgtccattggttcgcgtgcttgcccatatggaggctcgcggtgtgcgcttagatgttccgttgttagaagcactcagcttcgagttggagaaagaactggaacgtcttgaaggcgaagtctttcgtttagcggggcatcccttcaatctcaactctcgcgaccaattggagaaagtgctctttgatgaattaggtttaacccctgtcacgcgtacagagaagaccggcaaacgttccacttcggcagccgccttggaagcacttcgtggtgctcacccgatcgtcgagttgattttgcagtatcgcgagctcagcaaactcaaatcaacctatcttgataggttacctcgtcttgttcatccacgtacgggtcgtttacacacccgcttcaatcaaacggcaacagccaccgggcgcttgtcgtcgagtgacccgaacctccagaatattccagtgcgcacgccgctgggccaacacattcgtaaagcgtttgttgcggaagaaggttggttattacttgcggccgattactcccagatcgaacttcgtgtattggcgcatctctctggcgacgagaatcttaaacgcgtgtttcgcgaaggcaaggatattcacactgaaaccgcagcctggatgttcggggtggacccagccttagtggaccccaagatgcgtcgtgccgccaagaccgtcaactttggcgtactctatggtatgtcagcagcacgtcttagtcaggaattgggcattgactacaaagaagctgaagcgtttatcgagcgctatttccaatcctttccgaaagttcgcgcgtggattgaacgtacgctcgaagaaggtcgcactcgcggctatgtggaaacgttattcgggcgtcgtcgctacgttccagatcttacgtctcgtgtccgctcagtgcgcgaagctgctgagcgtatggcctggaatatgcctgttcagggaacagcggcggacctcatgaagatcgccatggtgaaattgtttccgcgcttgaaacccttaggagcccaccttcttttacaggtgcatgatgaattggtcttggaagtacccgaggatcgcgcagaagaagccaaagcactcgtgaaagaggttatggaaaacgcgtatccgttagatgttccgttggaggtcgaagtgggtgtaggccgtgattggcttgaagcgaaacaagactaatga

SEQ ID NO: 1076 - protein, 844 aa, synthetic construct
  REGION 1..844: note = DNA Polymerase Variant
MHHHHHHGGSGMLPLFDLEEPPKRVLLVDGHHLAYRTFYALSLTTSRGEPVQMVYGFARSLLKALKEDGQAVVVVFDAKAPSFRHEAYEAYKAGRAPTPEDFPRQLALVKRLVDLLGLVRLEAPGYEADDVLGTLAKKAEREGMEVCILTGDRDFFQLLSEKVSVLLPDGTLVTPKDVQEKYGVPPERWVDFRALTGDRSDNIPGVAGIGEKTALRLLAEWGSVENLLKNLDRVKPDSLRRKIEAHLEDLRLSLDLARIRTDLPLEVDFKALRRRTPDLEGLRAFLEELELGSLLHEFGLLGGEKPREEAPWPPPEGAFVGFLLSRKEPMWAELLALAAAAEGRVHRATSPVEALADLKEARGFLAKDLAVLALREGVALDPTDDPLLVAYLLDHANTNPERVARRYGGEFTEDAAERALLSERLFQTLFPRLSEKLLWLYQEVERPLVRVLAHMEARGVRLDVPLLEALSFELEKELERLEGEVFRLAGHPFNLNSRDQLEKVLFDELGLTPVTRTEKTGKRSTSAAALEALRGAHPIVELILQYRELSKLKSTYLDRLPRLVHPRTGRLHTRFNQTATATGRLSSSDPNLQNIPVRTPLGQHIRKAFVAEEGWLLLAADYSQIELRVLAHLSGDENLKRVFREGKDIHTETAAWMFGVDPALVDPKMRRAAKTVNFGVLYGMSAARLSQELGIDYKEAEAFIERYFQSFPKVRAWIERTLEEGRTRGYVETLFGRRRYVPDLTSRVRSVREAAERMAWNMPVQGTAADLMKIAMVKLFPRLKPLGAHLLLQVHDELVLEVPEDRAEEAKALVKEVMENAYPLDVPLEVEVGVGRDWLEAKQD

SEQ ID NO: 1077 - DNA, 2538 bp, synthetic construct
  misc_feature 1..2538: note = DNA Polymerase Variant
  source 1..2538: mol_type = other DNA
atgcaccatcatcatcatcatggcggtagcggcatgttaccgctgtttgatttggaagaaccaccaaaacgcgtgctgcttgttgacggccatcatctggcgtatcgtaccttctacgcactgagccttacgacctcacgtggtgagcctgtccagatggtgtatgggtttgctcgctccctgctgaaagccctgaaggaagatggtcaagccgtagtagtggttttcgatgcgaaagcaccgtcgtttcgtcacgaagcgtacgaggcctataaagctggccgcgcaccgaccccggaagactttccgcgtcagttagcgctcgtcaaacgcctcgtggatttgctgggattagttcgcttggaagctcctggctacgaggcggacgacgtgctcggtacactggccaagaaagcagaacgtgaaggcatggaggtctgcattcttaccggtgatcgcgatttcttccagctgctgtctgagaaagtgagcgttttgctgcccgatggcacgttagtaaccccgaaagatgtgcaagagaaatatggagttccgccagaacgttgggtggactttcgcgcactgactggtgatcgttcagacaacatcccgggcgttgccgggattggtgaaaagacggcgctgcgcctgctggcagaatggggctcggtggaaaatctgctcaagaaccttgatcgtgtgaaacctgatagcttacgccgcaagatcgaagcccacctggaagacttgcgtctgagtctggatcttgcccgtattcgcaccgatctgccgttggaagtagactttaaagctctgcgtcgtcgcacacccgatttagaggggttacgcgcgttcctcgaagaactggagctgggctccctgctgcatgaattcggtttgttgggcggagagaaaccgcgtgaagaagcaccatggccgccgcccgaaggtgcctttgtcggctttcttctgtcacgcaaagagccaatgtgggcggaactgttagctcttgcagccgccgcggaagggcgtgttcaccgcgcgacctctcctgtcgaggccctcgctgacctcaaagaagcacgtggtttcttggcgaaagatttagccgtgcttgcaagtcgcgaaggcgttgcgctcgatccgacggacgacccgcttttggtggcttatttgctcgatcatgcgaataccaacccggaacgtgtcgcccgtcgttacggcggcgagtttactgaagatgcggcagaacgcgcgttgcttagcgaacgcctcttccagacgttatttccacgtctttcggagaaattactctggctctatcaggaagtcgaacgtccattgagtcgcgtgcttgcccatatggaggctcgcggtgtgcgcttagatgttccgttgttagaagcactcagcttcgagttggagaaagaactggaacgtcttgaaggcgaagtctttcgtttagcggggcatcccttcaatctcaactctcgcgaccaattggagaaagtgctctttgatgaattaggtttaacccctgtcacgcgtacagagaagaccggcaaacgttccacttcggcagccgccttggaagcacttcgtggtgctcacccgatcgtcgagttgattttgcagtatcgcgagctcagcaaactcaaatcaacctatcttgataggttacctcgtcttgttcatccacgtacgggtcgtttacacacccgcttcaatcaaacggcaacagccaccgggcgcttgtcgtcgagtgacccgaacctccagaatattccagtgcgcacgccgctgggccaacacattcgtaaagcgtttgttgcggaagaaggttggttattacttgcggccgattactcccagatcgaacttcgtgtattggcgcatctctctggcgacgagaatcttaaacgcgtgtttcgcgaaggcaaggatattcacactgaaaccgcagcctggatgttcggggtggacccagccttagtggaccccaagatgcgtcgtgccgccaagaccgtcaactttggcgtactctatggtatgtcagcagcacgtcttagtcaggaattgggcattgactacaaagaagctgaagcgtttatcgagcgctatttccaatcctttccgaaagttcgcgcgtggattgaacgtacgctcgaagaaggtcgcactcgcggctatgtggaaacgttattcgggcgtcgtcgctacgttccagatcttacgtctcgtgtccgctcagtgcgcgaagctgctgagcgtatggcctggaatatgcctgttcagggaacagcggcggacctcatgaagatcgccatggtgaaattgtttccgcgcttgaaacccttaggagcccaccttcttttacaggtgcatgatgaattggtcttggaagtacccgaggatcgcgcagaagaagccaaagcactcgtgaaagaggttatggaaaacgcgtatccgttagatgttccgttggaggtcgaagtgggtgtaggccgtgattggcttgaagcgaaacaagactaatga

SEQ ID NO: 1078 - protein, 844 aa, synthetic construct
  REGION 1..844: note = DNA Polymerase Variant
MHHHHHHGGSGMLPLFDLEEPPKRVLLVDGHHLAYRTFYALSLTTSRGEPVQMVYGFARSLLKALKEDGQAVVVVFDAKAPSFRHEAYEAYKAGRAPTPEDFPRQLALVKRLVDLLGLVRLEAPGYEADDVLGTLAKKAEREGMEVCILTGDRDFFQLLSEKVSVLLPDGTLVTPKDVQEKYGVPPERWVDFRALTGDRSDNIPGVAGIGEKTALRLLAEWGSVENLLKNLDRVKPDSLRRKIEAHLEDLRLSLDLARIRTDLPLEVDFKALRRRTPDLEGLRAFLEELELGSLLHEFGLLGGEKPREEAPWPPPEGAFVGFLLSRKEPMWAELLALAAAAEGRVHRATSPVEALADLKEARGFLAKDLAVLASREGVALDPTDDPLLVAYLLDHANTNPERVARRYGGEFTEDAAERALLSERLFQTLFPRLSEKLLWLYQEVERPLSRVLAHMEARGVRLDVPLLEALSFELEKELERLEGEVFRLAGHPFNLNSRDQLEKVLFDELGLTPVTRTEKTGKRSTSAAALEALRGAHPIVELILQYRELSKLKSTYLDRLPRLVHPRTGRLHTRFNQTATATGRLSSSDPNLQNIPVRTPLGQHIRKAFVAEEGWLLLAADYSQIELRVLAHLSGDENLKRVFREGKDIHTETAAWMFGVDPALVDPKMRRAAKTVNFGVLYGMSAARLSQELGIDYKEAEAFIERYFQSFPKVRAWIERTLEEGRTRGYVETLFGRRRYVPDLTSRVRSVREAAERMAWNMPVQGTAADLMKIAMVKLFPRLKPLGAHLLLQVHDELVLEVPEDRAEEAKALVKEVMENAYPLDVPLEVEVGVGRDWLEAKQD

SEQ ID NO: 1079 - DNA, 2538 bp, synthetic construct
  misc_feature 1..2538: note = DNA Polymerase Variant
  source 1..2538: mol_type = other DNA
atgcaccatcatcatcatcatggcggtagcggcatgttaccgctgtttgatttggaagaaccaccaaaacgcgtgctgcttgttgacggccatcatctggcgtatcgtaccttctacgcactgagccttacgacctcacgtggtgagcctgtccagatggtgtatgggtttgctcgctccctgctgaaagccctgaaggaagatggtcaagccgtagtagtggttttcgatgcgaaagcaccgtcgtttcgtcacgaagcgtacgaggcctataaagctggccgcgcaccgaccccggaagactttccgcgtcagttagcgctcgtcaaacgcctcgtggatttgctgggattagttcgcttggaagctcctggctacgaggcggacgacgtgctcggtacactggccaagaaagcagaacgtgaaggcatggaggtctgcattcttaccggtgatcgcgatttcttccagctgctgtctgagaaagtgagcgttttgctgcccgatggcacgttagtaaccccgaaagatgtgcaagagaaatatggagttccgccagaacgttgggtggactttcgcgcactgactggtgatcgttcagacaacatcccgggcgttgccgggattggtgaaaagacggcgctgcgcctgctggcagaatggggctcggtggaaaatctgctcaagaaccttgatcgtgtgaaacctgatagcttacgccgcaagatcgaagcccacctggaagacttgcgtctgagtctggatcttgcccgtattcgcaccgatctgccgttggaagtagactttaaagctctgcgtcgtcgcacacccgatttagaggggttacgcgcgttcctcgaagaactggagctgggctccctgctgcatgaattcggtttgttgggcggagagaaaccgcgtgaagaagcaccatggccgccgcccgaaggtgcctttgtcggctttcttctgtcacgcaaagagccaatgtgggcggaactgttagctcttgcagccgccgcggaagggcgtgttcaccgcgcgacctctcctgtcgaggccctcgctgacctcaaagaagcatcgggtttcttggcgaaagatttagccgtgcttgcattacgcgaaggcgttgcgctcgatccgacggacgacccgcttttggtggcttatttgctcgatcatgcgaataccaacccggaacgtgtcgcccgtcgttacggcggcgagtttactgaagatgcggcagaacgcgcgttgcttagcgaacgcctcttccagacgttatttccacgtctttcggagaaattactctggctctatcaggaagtcgaacgtccattgagtcgcgtgcttgcccatatggaggctcgcggtgtgcgcttagatgttccgttgttagaagcactcagcttcgagttggagaaagaactggaacgtcttgaaggcgaagtctttcgtttagcggggcatcccttcaatctcaactctcgcgaccaattggagaaagtgctctttgatgaattaggtttaacccctgtcacgcgtacagagaagaccggcaaacgttccacttcggcagccgccttggaagcacttcgtggtgctcacccgatcgtcgagttgattttgcagtatcgcgagctcagcaaactcaaatcaacctatcttgataggttacctcgtcttgttcatccacgtacgggtcgtttacacacccgcttcaatcaaacggcaacagccaccgggcgcttgtcgtcgagtgacccgaacctccagaatattccagtgcgcacgccgctgggccaacacattcgtaaagcgtttgttgcggaagaaggttggttattacttgcggccgattactcccagatcgaacttcgtgtattggcgcatctctctggcgacgagaatcttaaacgcgtgtttcgcgaaggcaaggatattcacactgaaaccgcagcctggatgttcggggtggacccagccttagtggaccccaagatgcgtcgtgccgccaagaccgtcaactttggcgtactctatggtatgtcagcagcacgtcttagtcaggaattgggcattgactacaaagaagctgaagcgtttatcgagcgctatttccaatcctttccgaaagttcgcgcgtggattgaacgtacgctcgaagaaggtcgcactcgcggctatgtggaaacgttattcgggcgtcgtcgctacgttccagatcttacgtctcgtgtccgctcagtgcgcgaagctgctgagcgtatggcctggaatatgcctgttcagggaacagcggcggacctcatgaagatcgccatggtgaaattgtttccgcgcttgaaacccttaggagcccaccttcttttacaggtgcatgatgaattggtcttggaagtacccgaggatcgcgcagaagaagccaaagcactcgtgaaagaggttatggaaaacgcgtatccgttagatgttccgttggaggtcgaagtgggtgtaggccgtgattggcttgaagcgaaacaagactaatga

SEQ ID NO: 1080 - protein, 844 aa, synthetic construct
  REGION 1..844: note = DNA Polymerase Variant
MHHHHHHGGSGMLPLFDLEEPPKRVLLVDGHHLAYRTFYALSLTTSRGEPVQMVYGFARSLLKALKEDGQAVVVVFDAKAPSFRHEAYEAYKAGRAPTPEDFPRQLALVKRLVDLLGLVRLEAPGYEADDVLGTLAKKAEREGMEVCILTGDRDFFQLLSEKVSVLLPDGTLVTPKDVQEKYGVPPERWVDFRALTGDRSDNIPGVAGIGEKTALRLLAEWGSVENLLKNLDRVKPDSLRRKIEAHLEDLRLSLDLARIRTDLPLEVDFKALRRRTPDLEGLRAFLEELELGSLLHEFGLLGGEKPREEAPWPPPEGAFVGFLLSRKEPMWAELLALAAAAEGRVHRATSPVEALADLKEASGFLAKDLAVLALREGVALDPTDDPLLVAYLLDHANTNPERVARRYGGEFTEDAAERALLSERLFQTLFPRLSEKLLWLYQEVERPLSRVLAHMEARGVRLDVPLLEALSFELEKELERLEGEVFRLAGHPFNLNSRDQLEKVLFDELGLTPVTRTEKTGKRSTSAAALEALRGAHPIVELILQYRELSKLKSTYLDRLPRLVHPRTGRLHTRFNQTATATGRLSSSDPNLQNIPVRTPLGQHIRKAFVAEEGWLLLAADYSQIELRVLAHLSGDENLKRVFREGKDIHTETAAWMFGVDPALVDPKMRRAAKTVNFGVLYGMSAARLSQELGIDYKEAEAFIERYFQSFPKVRAWIERTLEEGRTRGYVETLFGRRRYVPDLTSRVRSVREAAERMAWNMPVQGTAADLMKIAMVKLFPRLKPLGAHLLLQVHDELVLEVPEDRAEEAKALVKEVMENAYPLDVPLEVEVGVGRDWLEAKQD

SEQ ID NO: 1081 - DNA, 2538 bp, synthetic construct
  misc_feature 1..2538: note = DNA Polymerase Variant
  source 1..2538: mol_type = other DNA
atgcaccatcatcatcatcatggcggtagcggcatgttaccgctgtttgatttggaagaagcaccaaaacgcgtgctgcttgttgacggccatcatctggcgtatcgtaccttctacgcactgagccttacgacctcacgtggtgagcctgtccagatggtgtatgggtttgctcgctccctgctgaaagccctgaaggaagatggtcaagccgtagtagtggttttcgatgcgcgcgcaccgtcgtttcgtcacgaagcgtacgaggcctataaagctggccgcgcaccgaccccggaagactttccgcgtcagttagcgctcgtcaaacgcctcgtggatttgctgggattagttcgcttggaagctcctggctacgaggcggacgacgtgctcggtacactggccaagaaagcagaacgtgaaggcatggaggtctgcattcttaccggtgatcgcgatttcttccagctgctgtctgagaaagtgagcgttttgctgcccgatggcacgttagtaaccccgaaagatgtgcaagagaaatatggagttccgccagaacgttgggtggactttcgcgcactgactggtgatcgttcagacaacatcccgggcgttgccgggattggtgaaaagacggcgctgcgcctgctggcagaatggggctcggtggaaaatctgctcaagaaccttgatcgcgtgaaacctgatagcttacgccgcaagatcgaagcccacctggaagacttgcgtctgagtctggatcttgcccgtattcgcaccgatctgccgttggaagtagactttaaagctctgcgtcgtcgcacacccgatttagaggggttacgcgcgttcctcgaagaactggagctgggctccctgctgcatgaattcggtttgttgggcggagagaaaccgcgtgaagaagcaccatggccgccgcccgaaggtgcctttgtcggctttcttctgtcacgcaaagagccaatgtgggcggaactgttagctcttgcagccgccgcggaagggcgtgttcaccgcgcgacctctcctgtcgaggccctcgctgacctcaaagaagcacgtggtttcttggcgaaagatttagccgtgcttgcattacgcgaaggcgttggcctcgatccgacggacgacccgcttttggtggcttatttgctcgatcatgcgaataccaacccggaacgtgtcgcccgtcgttacggcggcgagtttactgaagatgcggcagaacgcgcgttgcttagcgaacgcctcttccagacgttatttccacgtctttcggagaaattactctggctctatcaggaagtcgaacgtccattgagtcgcgtgcttgcccatatggaggctcgcggtgtgcgcttagatgttccgttgttagaagcactcagcttcgagttggagaaagaactggaacgtcttgaaggcgaagtctttcgtttagcggggcatcccttcaatctcaactctcgcgaccaattggagaaagtgctctttgatgaattaggtttaacccctgtcacgcgtacagagaagaccggcaaacgttccacttcggcagccgccttggaagcacttcgtggtgctcacccgatcgtcgagttgattttgcagtatcgcgagctcagcaaactcaaatcaacctatcttgataggttacctcgtcttgttcatccacgtacgggtcgtttacacacccgcttcaatcaaacggcaacagccaccgggcgcttgtcgtcgagtgacccgaacctccagaatattccagtgcgcacgccgctgggccaacacattcgtaaagcgtttgttgcggaacatggttggttattacttgcggccgattactcccagatcgaacttcgtgtattggcgcatctctctggcgacgagaatcttaaacgcgtgtttcgcgaaggcaaggatattcacactgaaaccgcagcctggatgttcggggtggacccggccttagtggaccccaagatgcgtcgtgccgccaagaccgtcaactttggcgtactctatggtatgtcagcagcacgtcttagtcaggaattgggcattgactacaaagaagctgaagcgtttatcgagcgctatttccaatcctttccgggtgttcgcgcgtggattgaacgtacgctcgaagaaggtcgcactcgcggctatgtggaaacgttattcgggcgtcgtcgctacgttccagatcttacgtctcgtgtccgctcagtgcgcgaagctgctgagcgtatggcctggaatatgcctgttcagggaacagcggcggacctcatgaagatcgccatggtgaaattgtttccgcgcttgaaacccttaggagcccaccttcttttacaggtgcatgatgaattggtcttggaagtacccgaggatcgcgcagaagaagccaaagcactcgtgaaagaggttatggaaaacgcgtatccgttagatgttccgttggaggtcgaagtgggtgtaggccgtgattggcttgaagcgaaacaagactaatga

SEQ ID NO: 1082 - protein, 844 aa, synthetic construct
  REGION 1..844: note = DNA Polymerase Variant
MHHHHHHGGSGMLPLFDLEEAPKRVLLVDGHHLAYRTFYALSLTTSRGEPVQMVYGFARSLLKALKEDGQAVVVVFDARAPSFRHEAYEAYKAGRAPTPEDFPRQLALVKRLVDLLGLVRLEAPGYEADDVLGTLAKKAEREGMEVCILTGDRDFFQLLSEKVSVLLPDGTLVTPKDVQEKYGVPPERWVDFRALTGDRSDNIPGVAGIGEKTALRLLAEWGSVENLLKNLDRVKPDSLRRKIEAHLEDLRLSLDLARIRTDLPLEVDFKALRRRTPDLEGLRAFLEELELGSLLHEFGLLGGEKPREEAPWPPPEGAFVGFLLSRKEPMWAELLALAAAAEGRVHRATSPVEALADLKEARGFLAKDLAVLALREGVGLDPTDDPLLVAYLLDHANTNPERVARRYGGEFTEDAAERALLSERLFQTLFPRLSEKLLWLYQEVERPLSRVLAHMEARGVRLDVPLLEALSFELEKELERLEGEVFRLAGHPFNLNSRDQLEKVLFDELGLTPVTRTEKTGKRSTSAAALEALRGAHPIVELILQYRELSKLKSTYLDRLPRLVHPRTGRLHTRFNQTATATGRLSSSDPNLQNIPVRTPLGQHIRKAFVAEHGWLLLAADYSQIELRVLAHLSGDENLKRVFREGKDIHTETAAWMFGVDPALVDPKMRRAAKTVNFGVLYGMSAARLSQELGIDYKEAEAFIERYFQSFPGVRAWIERTLEEGRTRGYVETLFGRRRYVPDLTSRVRSVREAAERMAWNMPVQGTAADLMKIAMVKLFPRLKPLGAHLLLQVHDELVLEVPEDRAEEAKALVKEVMENAYPLDVPLEVEVGVGRDWLEAKQD

SEQ ID NO: 1083 - DNA, 2538 bp, synthetic construct
  misc_feature 1..2538: note = DNA Polymerase Variant
  source 1..2538: mol_type = other DNA
atgcaccatcatcatcatcatggcggtagcggcatgttaccgctgtttgatttggaagaaccaccaaaacgcgtgctgcttgttgacggccatcatctggcgtatcgtaccttctacgcactgagccttacgacctcacgtggtgagcctgtccagatggtgtatgggtttgctcgctccctgctgaaagccctgaaggaagatggtcaagccgtagtagtggttttcgatgcgcgtgcaccgtcgtttcgtcacgaagcgtacgaggcctataaagctggccgcgcaccgaccccggaagactttccgcgtcagttagcgctcgtcaaacgcctcgtggatttgctgggattagttcgcttggaagctcctggctacgaggcggacgacgtgctcggtacactggccaagaaagcagaacgtgaaggcatggaggtctgcattcttaccggtgatcgcgatttcttccagctgctgtctgagaaagtgagcgttttgctgcccgatggcacgttagtaaccccgaaagatgtgcaagagaaatatggagttccgccagaacgttgggtggactttcgcgcactgactggtgatcgttcagacaacatcccgggcgttgccgggattggtgaaaagacggcgctgcgcctgctggcagaatggggctcggtggaaaatctgctcaagaaccttgatcgtgtgaaacctgatagcttacgccgcaagatcgaagcccacctggaagacttgcgtctgagtctggatcttgcacgtattcgcaccgatctgccgttggaagtagactttaaagctctgcgtcgtcgcacacccgatttagaggggttacgcgcgttcctcgaagaactggagctgggctccctgctgcatgaattcggtttgttgggcggagagaaaccgcgtgaagaagcaccatggccgccgcccgggggtgcctttgtcggctttcttctgtcacgcaaagagccaatgtgggcggaactgttagctcttgcagccgccgcggaagggcgtgttcaccgcgcgacctctcctgtcgaggccctcgctgacctcaaagaagcacgtggtttcttggcgaaagatttagccgtgcttgcattacgcgaaggcgttgcgctcgatccgacggacgacccgcttttggtggcttatttgctcgatcatgcgaataccaacccggaacgtgtcgcccgtcgttacggcggcgagtttactgaagatgcggcagaacgcgcgttgcttagcgaacgcctcttccagacgttatttccacgtctttcggagaaattactctggctctatcaggaagtcgaacgtccattgagtcgcgtgcttgcccatatggaggctcgcggtgtgcgcttagatgttccgttgttagaagcactcagcttcgagctggaaaaagaactggaacgtcttgaaggcgaagtctttcgtttagcggggcatcccttcaatctcaactctcgcgaccaattggagaaagtgctctttgatgaattaggtttaacccctgtcacgcgtacagagaagaccggcaaacgttccacttcggcagccgccttggaagcacttcgtggtgtgcacccgatcgtcgagttgattttgcagtatcgcgagctcagcaaactcaaatcaacctatcttgataggttacctcgtcttgttcatccacgtacgggtcgtttacacacccgcttcaatcaaacggcaacagccaccgggcgcttgtcgtcgagtgacccgaacctccagaatattccagtgcgcacgccgctgggccaacacattcgtaaagcgtttgttgcggaagaaggttggttattacttgcggccgattactcccagatcgaacttcgtgtattggcgcatctctctggcgacgagaatcttaaacgcgtgtttcgcgaaggcaaggatattcacactgaaaccgcagcctggatgttcggggtggactcggccttagtggaccccaagatgcgtcgtgccgccaagaccgtcaactttggcgtactctatggtatgtcagcagcacgtcttagtcaggaattgggcattgactacaaagtagctgaagcgtttatcgagcgctatttccaatcctttccgaaagttcgcgcgtggattgaacgtacgctcgaagaaggtcgcactcgcggctatgtggaaacgttattcgggcgtcgtcgctacgttccagatcttacgtctcgtgtccgctcagtgcgcgaagctgctgagcgtatggcctggaatatgcctgttcagggaacagcggcggacctcatgaagatcgccatggtgaaattgtttccgcgcttgaaacccttaggagcccaccttcttctgcaggtgcatgatgaattggtcttggaagtacccgaggatcgcgcagaagaagccaaagcactcgtgaaagaggttatggaaaacgcgtatccgttagatgttccgttggaggtcgaagtgggtgtaggccgtgattggcttgaagcgaaacaagactaatga

SEQ ID NO: 1084 - protein, 844 aa, synthetic construct
  REGION 1..844: note = DNA Polymerase Variant
MHHHHHHGGSGMLPLFDLEEPPKRVLLVDGHHLAYRTFYALSLTTSRGEPVQMVYGFARSLLKALKEDGQAVVVVFDARAPSFRHEAYEAYKAGRAPTPEDFPRQLALVKRLVDLLGLVRLEAPGYEADDVLGTLAKKAEREGMEVCILTGDRDFFQLLSEKVSVLLPDGTLVTPKDVQEKYGVPPERWVDFRALTGDRSDNIPGVAGIGEKTALRLLAEWGSVENLLKNLDRVKPDSLRRKIEAHLEDLRLSLDLARIRTDLPLEVDFKALRRRTPDLEGLRAFLEELELGSLLHEFGLLGGEKPREEAPWPPPGGAFVGFLLSRKEPMWAELLALAAAAEGRVHRATSPVEALADLKEARGFLAKDLAVLALREGVALDPTDDPLLVAYLLDHANTNPERVARRYGGEFTEDAAERALLSERLFQTLFPRLSEKLLWLYQEVERPLSRVLAHMEARGVRLDVPLLEALSFELEKELERLEGEVFRLAGHPFNLNSRDQLEKVLFDELGLTPVTRTEKTGKRSTSAAALEALRGVHPIVELILQYRELSKLKSTYLDRLPRLVHPRTGRLHTRFNQTATATGRLSSSDPNLQNIPVRTPLGQHIRKAFVAEEGWLLLAADYSQIELRVLAHLSGDENLKRVFREGKDIHTETAAWMFGVDSALVDPKMRRAAKTVNFGVLYGMSAARLSQELGIDYKVAEAFIERYFQSFPKVRAWIERTLEEGRTRGYVETLFGRRRYVPDLTSRVRSVREAAERMAWNMPVQGTAADLMKIAMVKLFPRLKPLGAHLLLQVHDELVLEVPEDRAEEAKALVKEVMENAYPLDVPLEVEVGVGRDWLEAKQD

SEQ ID NO: 1085 - DNA, 2538 bp, synthetic construct; identical to SEQ ID NO: 817
  misc_feature 1..2538: note = DNA Polymerase Variant
  source 1..2538: mol_type = other DNA

SEQ ID NO: 1086 - protein, 844 aa, synthetic construct; identical to SEQ ID NO: 818
  REGION 1..844: note = DNA Polymerase Variant

SEQ ID NO: 1087 - DNA, 2538 bp, synthetic construct
  misc_feature 1..2538: note = DNA Polymerase Variant
  source 1..2538: mol_type = other DNA
atgcaccatcatcatcatcatggcggtagcggcatgttaccgctgtttgatttggaagaaccaccaaaacgcgtgctgcttgttgacggccatcatctggcgtatcgtaccttctacgcactgagccttacgacctcacgtggtgagcctgtccagatggtgtatgggtttgctcgctccctgctgaaagccctgaaggaagatggtcaagccgtagtagtggttttcgatgcgaaagcaccgtcgtttcgtcacgaagcgtacgaggcctataaagctggccgcgcaccgaccccggaagactttccgcgtcagttagcgctcgtcaaacgcctcgtggatttgctgggattagttcgcttggaagctcctggctacgaggcggacgacgtgctcggtacactggccaagaaagcagaacgtgaaggcatggaggtctgcattcttaccggtgatcgcgatttcttccagctgctgtctgagaaagtgagcgttttgctgcccgatggcacgttagtaaccccgaaagatgtgcaagagaaatatggagttccgccagaacgttgggtggactttcgcgcactgactggtgatcgttcagacaacatcccgggcgttgccgggattggtgaaaagacggcgctgcgcctgctggcagaatggggctcggtggaaaatctgctcaagaaccttgatcgtgtgaaacctgatagcttacgccgcaagatcgaagcccacctggaagacttgcgtctgagtctggatcttgcccgtattcgcaccgatctgccgttggaagtagactttaaagctctgcgtcgtcgcacacccgatttagaggggttacgcgcgttcctcgaagaactggagctgggctccctgctgcatgaattcggtttgttgggcggagagaaaccgcgtgaagaagcaccatggccgccgcccgaaggtgcctttgtcggctttcttctgtcacgcaaagagccaatgtgggcggaactgttagctcttgcagccgccgcggaagggcgtgttcaccgcgcgacctctcctgtcgaggccctcgctgacctcaaagaagcacgtggtttcttggcgaaagatttagccgtgcttgcattacgcgaaggcgttgcgctcgatccgacggacgacccgcttttggtggcttatttgctcgatcatgcgaataccaacccggaacgtgtcgcccgtcgttacggcggcgagtttactgaagatgcggcatggcgcgcgttgcttagcgaacgcctcttccagacgttatttccacgtctttcggagaaattactctggctctatcaggaagtcgaacgtccattgagtcgcgtgcttgcccatatggaggctcgcggtgtgcgcttagatgttccgttgttagaagcactcagcttcgagttggagaaagaactggaacgtcttgaaggcgaagtctttcgtttagcggggcatcccttcaatctcaactctcgcgaccaattggagaaagtgctctttgatgaattaggtttaacccctgtcacgcgtacagagaagaccggcaaacgttccacttcggcagccgccttggaagcacttcgtggtgctcacccgatcgtcgagttgattttgcagtatcgcgagctcagcaaactcaaatcaacctatcttgataggttacctcgtcttgttcatccacgtacgggtcgtttacacacccgcttcaatcaaacggcaacagccaccgggcgcttgtcgtcgagtgacccgaacctccagaatattccagtgcgcacgccgctgggccaacacattcgtaaagcgtttgttgcggaagaaggttggttattacttgcggccgattactcccagatcgaacttcgtgtattggcgcatctctctggcgacgagaatcttaaacgcgtgtttcgcgaaggcaaggatattcacactgaaaccgcagcctggatgttcggggtggacccagccttagtggaccccaagatgcgtcgtgccgccaagaccgtcaactttggcgtactctatggtatgtcagcagcacgtcttagtcaggaattgggcattgactacaaagaagctgaagcgtttatcgagcgctatttccaatcctttccgaaagttcgcgcgtggattgaacgtacgctcgaagaaggtcgcactcgcggctatgtggaaacgttattcgggcgtcgtcgctacgttccagatcttacgtctcgtgtccgctcagtgcgcgaagctgctgagcgtatggcctggaatatgcctgttcagggaacagcggcggacctcatgaagatcgccatggtgaaattgtttccgcgcttgaaacccttaggagcccaccttcttttacaggtgcatgatgaattggtcttggaagtacccgaggatcgcgcagaagaagccaaagcactcgtgaaagaggttatggaaaacgcgtatccgttagatgttccgttggaggtcgaagtgggtgtaggccgtgattggcttgaagcgaaacaagactaatga

SEQ ID NO: 1088 - protein, 844 aa, synthetic construct
  REGION 1..844: note = DNA Polymerase Variant
MHHHHHHGGSGMLPLFDLEEPPKRVLLVDGHHLAYRTFYALSLTTSRGEPVQMVYGFARSLLKALKEDGQAVVVVFDAKAPSFRHEAYEAYKAGRAPTPEDFPRQLALVKRLVDLLGLVRLEAPGYEADDVLGTLAKKAEREGMEVCILTGDRDFFQLLSEKVSVLLPDGTLVTPKDVQEKYGVPPERWVDFRALTGDRSDNIPGVAGIGEKTALRLLAEWGSVENLLKNLDRVKPDSLRRKIEAHLEDLRLSLDLARIRTDLPLEVDFKALRRRTPDLEGLRAFLEELELGSLLHEFGLLGGEKPREEAPWPPPEGAFVGFLLSRKEPMWAELLALAAAAEGRVHRATSPVEALADLKEARGFLAKDLAVLALREGVALDPTDDPLLVAYLLDHANTNPERVARRYGGEFTEDAAWRALLSERLFQTLFPRLSEKLLWLYQEVERPLSRVLAHMEARGVRLDVPLLEALSFELEKELERLEGEVFRLAGHPFNLNSRDQLEKVLFDELGLTPVTRTEKTGKRSTSAAALEALRGAHPIVELILQYRELSKLKSTYLDRLPRLVHPRTGRLHTRFNQTATATGRLSSSDPNLQNIPVRTPLGQHIRKAFVAEEGWLLLAADYSQIELRVLAHLSGDENLKRVFREGKDIHTETAAWMFGVDPALVDPKMRRAAKTVNFGVLYGMSAARLSQELGIDYKEAEAFIERYFQSFPKVRAWIERTLEEGRTRGYVETLFGRRRYVPDLTSRVRSVREAAERMAWNMPVQGTAADLMKIAMVKLFPRLKPLGAHLLLQVHDELVLEVPEDRAEEAKALVKEVMENAYPLDVPLEVEVGVGRDWLEAKQD

SEQ ID NO: 1089 - DNA, 2538 bp, synthetic construct
  misc_feature 1..2538: note = DNA Polymerase Variant
  source 1..2538: mol_type = other DNA
atgcaccatcatcatcatcatggcggtagcggcatgttaccgctgtttgatttggaagaaccaccaaaacgcgtgctgcttgttgacggccatcatctggcgtatcgtaccttctacgcactgagccttacgacctcacgtggtgagcctgtccagatggtgtatgggtttgctcgctccctgctgaaagccctgaaggaagatggtcaagccgtagtagtggttttcgatgcgaaagcaccgtcgtttcgtcacgaagcgtacgaggcctataaagctggccgcgcaccgaccccggaagactttccgcgtcagttagcgctcgtcaaacgcctcgtggatttgctgggattagttcgcttggaagctcctggctacgaggcggacgacgtgctcggtacactggccaagaaagcagaacgtgaaggcatggaggtctgcattcttaccggtgatcgcgatttcttccagctgctgtctgagaaagtgagcgttttgctgcccgatggcacgttagtaaccccgaaagatgtgcaagagaaatatggagttccgccagaacgttgggtggactttcgcgcactgactggtgatcgttcagacaacatcccgggcgttgccgggattggtgaaaagacggcgctgcgcctgctggcagaatggggctcggtggaaaatctgctcaagaaccttgatcgtgtgaaacctgatagcttacgccgcaagatcgaagcccacctggaagacttgcgtctgagtctggatcttgcccgtattcgcaccgatctgccgttggaagtagactttaaagctctgcgtcgtcgcacacccgatttagaggggttacgcgcgttcctcgaagaactggagctgggctccctgctgcatgaattcggtttgttgggcggagagaaaccgcgtgaagaagcaccatggccgccgcccgaaggtgcctttgtcggctttcttctgtcacgcaaagagccaatgtgggcggaactgttagctcttgcagccgccgcggaagggcgtgttcaccgcgcgacctctcctgtcgaggccctcgctgacctcaaagaagcacgtggtttcttggcgaaagatttagccgtgcttgcattacgctttggcgttgcgctcgatccgacggacgacccgcttttggtggcttatttgctcgatcatgcgaataccaacccggaacgtgtcgcccgtcgttacggcggcgagtttactgaagatgcggcagaacgcgcgttgcttagcgaacgcctcttccagacgttatttccacgtctttcggagaaattactctggctctatcaggaagtcgaacgtccattgagtcgcgtgcttgcccatatggaggctcgcggtgtgcgcttagatgttccgttgttagaagcactcagcttcgagttggagaaagaactggaacgtcttgaaggcgaagtctttcgtttagcggggcatcccttcaatctcaactctcgcgaccaattggagaaagtgctctttgatgaattaggtttaacccctgtcacgcgtacagagaagaccggcaaacgttccacttcggcagccgccttggaagcacttcgtggtgctcacccgatcgtcgagttgattttgcagtatcgcgagctcagcaaactcaaatcaacctatcttgataggttacctcgtcttgttcatccacgtacgggtcgtttacacacccgcttcaatcaaacggcaacagccaccgggcgcttgtcgtcgagtgacccgaacctccagaatattccagtgcgcacgccgctgggccaacacattcgtaaagcgtttgttgcggaagaaggttggttattacttgcggccgattactcccagatcgaacttcgtgtattggcgcatctctctggcgacgagaatcttaaacgcgtgtttcgcgaaggcaaggatattcacactgaaaccgcagcctggatgttcggggtggacccagccttagtggaccccaagatgcgtcgtgccgccaagaccgtcaactttggcgtactctatggtatgtcagcagcacgtcttagtcaggaattgggcattgactacaaagaagctgaagcgtttatcgagcgctatttccaatcctttccgaaagttcgcgcgtggattgaacgtacgctcgaagaaggtcgcactcgcggctatgtggaaacgttattcgggcgtcgtcgctacgttccagatcttacgtctcgtgtccgctcagtgcgcgaagctgctgagcgtatggcctggaatatgcctgttcagggaacagcggcggacctcatgaagatcgccatggtgaaattgtttccgcgcttgaaacccttaggagcccaccttcttttacaggtgcatgatgaattggtcttggaagtacccgaggatcgcgcagaagaagccaaagcactcgtgaaagaggttatggaaaacgcgtatccgttagatgttccgttggaggtcgaagtgggtgtaggccgtgattggcttgaagcgaaacaagactaatga

SEQ ID NO: 1090 - protein, 844 aa, synthetic construct
  REGION 1..844: note = DNA Polymerase Variant
MHHHHHHGGSGMLPLFDLEEPPKRVLLVDGHHLAYRTFYALSLTTSRGEPVQMVYGFARSLLKALKEDGQAVVVVFDAKAPSFRHEAYEAYKAGRAPTPEDFPRQLALVKRLVDLLGLVRLEAPGYEADDVLGTLAKKAEREGMEVCILTGDRDFFQLLSEKVSVLLPDGTLVTPKDVQEKYGVPPERWVDFRALTGDRSDNIPGVAGIGEKTALRLLAEWGSVENLLKNLDRVKPDSLRRKIEAHLEDLRLSLDLARIRTDLPLEVDFKALRRRTPDLEGLRAFLEELELGSLLHEFGLLGGEKPREEAPWPPPEGAFVGFLLSRKEPMWAELLALAAAAEGRVHRATSPVEALADLKEARGFLAKDLAVLALRFGVALDPTDDPLLVAYLLDHANTNPERVARRYGGEFTEDAAERALLSERLFQTLFPRLSEKLLWLYQEVERPLSRVLAHMEARGVRLDVPLLEALSFELEKELERLEGEVFRLAGHPFNLNSRDQLEKVLFDELGLTPVTRTEKTGKRSTSAAALEALRGAHPIVELILQYRELSKLKSTYLDRLPRLVHPRTGRLHTRFNQTATATGRLSSSDPNLQNIPVRTPLGQHIRKAFVAEEGWLLLAADYSQIELRVLAHLSGDENLKRVFREGKDIHTETAAWMFGVDPALVDPKMRRAAKTVNFGVLYGMSAARLSQELGIDYKEAEAFIERYFQSFPKVRAWIERTLEEGRTRGYVETLFGRRRYVPDLTSRVRSVREAAERMAWNMPVQGTAADLMKIAMVKLFPRLKPLGAHLLLQVHDELVLEVPEDRAEEAKALVKEVMENAYPLDVPLEVEVGVGRDWLEAKQD

SEQ ID NO: 1091 - DNA, 2538 bp, synthetic construct
  misc_feature 1..2538: note = DNA Polymerase Variant
  source 1..2538: mol_type = other DNA
atgcaccatcatcatcatcatggcggtagcggcatgttaccgctgtttgatttggaagaaccaccaaaacgcgtgctgcttgttgacggccatcatctggcgtatcgtaccttctacgcactgagccttacgacctcacgtggtgagcctgtccagatggtgtatgggtttgctcgctccctgctgaaagccctgaaggaagatggtcaagccgtagtagtggttttcgatgcgaaagcaccgtcgtttcgtcacgaagcgtacgaggcctataaagctggccgcgcaccgaccccggaagactttccgcgtcagttagcgctcgtcaaacgcctcgtggatttgctgggattagttcgcttggaagctcctggctacgaggcggacgacgtgctcggtacactggccaagaaagcagaacgtgaaggcatggaggtctgcattcttaccggtgatcgcgatttcttccagctgctgtctgagaaagtgagcgttttgctgcccgatggcacgttagtaaccccgaaagatgtgcaagagaaatatggagttccgccagaacgttgggtggactttcgcgcactgactggtgatcgttcagacaacatcccgggcgttgccgggattggtgaaaagacggcgctgcgcctgctggcagaatggggctcggtggaaaatctgctcaagaaccttgatcgtgtgaaacctgatagcttacgccgcaagatcgaagcccacctggaagacttgcgtctgagtctggatcttgcccgtattcgcaccgatctgccgttggaagtagactttaaagctctgcgtcgtcgcacacccgatttagaggggttacgcgcgttcctcgaagaactggagctgggctccctgctgcatgaattcggtttgttgggcggagagaaaccgcgtgaagaagcaccatggccgccgcccgaaggtgcctttgtcggctttcttctgtcacgcaaagagccaatgtgggcggaactgttagctcttgcagccgccgcggaagggcgtgttcaccgcgcgacctctcctgtcgaggccctcgctgacctcaaagaagcacgtggtttcttggcgaaagatttagccgtgcttgcattacgcgaaggcgttgcgctcgatccgacggacgacccgcttttggtggcttatttgcgtgatcatgcgaataccaacccggaacgtgtcgcccgtcgttacggcggcgagtttactgaagatgcggcagaacgcgcgttgcttagcgaacgcctcttccagacgttatttccacgtctttcggagaaattactctggctctatcaggaagtcgaacgtccattgagtcgcgtgcttgcccatatggaggctcgcggtgtgcgcttagatgttccgttgttagaagcactcagcttcgagttggagaaagaactggaacgtcttgaaggcgaagtctttcgtttagcggggcatcccttcaatctcaactctcgcgaccaattggagaaagtgctctttgatgaattaggtttaacccctgtcacgcgtacagagaagaccggcaaacgttccacttcggcagccgccttggaagcacttcgtggtgctcacccgatcgtcgagttgattttgcagtatcgcgagctcagcaaactcaaatcaacctatcttgataggttacctcgtcttgttcatccacgtacgggtcgtttacacacccgcttcaatcaaacggcaacagccaccgggcgcttgtcgtcgagtgacccgaacctccagaatattccagtgcgcacgccgctgggccaacacattcgtaaagcgtttgttgcggaagaaggttggttattacttgcggccgattactcccagatcgaacttcgtgtattggcgcatctctctggcgacgagaatcttaaacgcgtgtttcgcgaaggcaaggatattcacactgaaaccgcagcctggatgttcggggtggacccagccttagtggaccccaagatgcgtcgtgccgccaagaccgtcaactttggcgtactctatggtatgtcagcagcacgtcttagtcaggaattgggcattgactacaaagaagctgaagcgtttatcgagcgctatttccaatcctttccgaaagttcgcgcgtggattgaacgtacgctcgaagaaggtcgcactcgcggctatgtggaaacgttattcgggcgtcgtcgctacgttccagatcttacgtctcgtgtccgctcagtgcgcgaagctgctgagcgtatggcctggaatatgcctgttcagggaacagcggcggacctcatgaagatcgccatggtgaaattgtttccgcgcttgaaacccttaggagcccaccttcttttacaggtgcatgatgaattggtcttggaagtacccgaggatcgcgcagaagaagccaaagcactcgtgaaagaggttatggaaaacgcgtatccgttagatgttccgttggaggtcgaagtgggtgtaggccgtgattggcttgaagcgaaacaagactaatga

SEQ ID NO: 1092 - protein, 844 aa, synthetic construct
  REGION 1..844: note = DNA Polymerase Variant
MHHHHHHGGSGMLPLFDLEEPPKRVLLVDGHHLAYRTFYALSLTTSRGEPVQMVYGFARSLLKALKEDGQAVVVVFDAKAPSFRHEAYEAYKAGRAPTPEDFPRQLALVKRLVDLLGLVRLEAPGYEADDVLGTLAKKAEREGMEVCILTGDRDFFQLLSEKVSVLLPDGTLVTPKDVQEKYGVPPERWVDFRALTGDRSDNIPGVAGIGEKTALRLLAEWGSVENLLKNLDRVKPDSLRRKIEAHLEDLRLSLDLARIRTDLPLEVDFKALRRRTPDLEGLRAFLEELELGSLLHEFGLLGGEKPREEAPWPPPEGAFVGFLLSRKEPMWAELLALAAAAEGRVHRATSPVEALADLKEARGFLAKDLAVLALREGVALDPTDDPLLVAYLRDHANTNPERVARRYGGEFTEDAAERALLSERLFQTLFPRLSEKLLWLYQEVERPLSRVLAHMEARGVRLDVPLLEALSFELEKELERLEGEVFRLAGHPFNLNSRDQLEKVLFDELGLTPVTRTEKTGKRSTSAAALEALRGAHPIVELILQYRELSKLKSTYLDRLPRLVHPRTGRLHTRFNQTATATGRLSSSDPNLQNIPVRTPLGQHIRKAFVAEEGWLLLAADYSQIELRVLAHLSGDENLKRVFREGKDIHTETAAWMFGVDPALVDPKMRRAAKTVNFGVLYGMSAARLSQELGIDYKEAEAFIERYFQSFPKVRAWIERTLEEGRTRGYVETLFGRRRYVPDLTSRVRSVREAAERMAWNMPVQGTAADLMKIAMVKLFPRLKPLGAHLLLQVHDELVLEVPEDRAEEAKALVKEVMENAYPLDVPLEVEVGVGRDWLEAKQD

SEQ ID NO: 1093 - DNA, 2538 bp, synthetic construct
  misc_feature 1..2538: note = DNA Polymerase Variant
  source 1..2538: mol_type = other DNA
atgcaccatcatcatcatcatggcggtagcggcatgttaccgctgtttgatttggaagaaaacccaaaacgcgtgctgcttgttgacggccatcatctggcgtatcgtaccttctacgcactgagccttacgacctcacgtggtgagcctgtccagatggtgtatgggtttgctcgctccctgctgaaagccctgaaggaagatggtcaagccgtagtagtggttttcgatgcgaaagcaccgtcgtttcgtcacgaagcgtacgaggcctataaagctggccgcgcaccgaccccggaagactttccgcgtcagttagcgctcgtcaaacgcctcgtggatttgctgggattagttcgcttggaagctcctggctacgaggcggacgacgtgctcggtacactggccaagaaagcagaacgtgaaggcatggaggtctgcattcttaccggtgatcgcgatttcttccagctgctgtctgagaaagtgagcgttttgctgcccgatggcacgttagtaaccccgaaagatgtgcaagagaaatatggagttccgccagaacgttgggtggactttcgcgcactgactggtgatcgttcagacaacatcccgggcgttgccgggattggtgaaaagacggcgctgcgcctgctggcagaatggggctcggtggaaaatctgctcaagaaccttgatcgtgtgaaacctgatagcttacgccgcaagatcgaagcccacctggaagacttgcgtctgagtctggatcttgcccgtattcgcaccgatctgccgttggaagtagactttaaagctctgcgtcgtcgcacacccgatttagaggggttacgcgcgttcctcgaagaactggagctgggctccctgctgcatgaattcggtttgttgggcggagagaaaccgcgtgaagaagcaccatggccgccgcccgaaggtgcctttgtcggctttcttctgtcacgcaaagagccaatgtgggcggaactgttagctcttgcagccgccgcggaagggcgtgttcaccgcgcgacctctcctgtcgaggccctcgctgacctcaaagaagcacgcggtttcttggcgaaagatttagccgtgcttgcattacgcgaaggcgttgcgctcgatccgacggacgacccgcttttggtggcttatttgctcgatcatgcgaataccaacccggaacgtgtcgcccgtcgttacggcggcgagtttactgaagatgcggcagaacgcgcgttgcttagcgaacgcctcttccagacgttatttccacgtctttcggagaaattactctggctctatcaggaagtcgaacgtccattgagtcgcgtgcttgcccatatggaggctcgcggtgtgcgcttagatgttccgttgttagaagcactcagcttcgagttggagaaagaactggaacgtcttgaaggcgaagtctttcgtttagcggggcatcccttcaatctcaactctcgcgaccaattggagaaagtgctctttgatgaattaggtttaacccctgtcacgcgtacagagaagaccggcaaacgttccacttcggcagccgccttggaagcacttcgtggtgctcacccgatcgtcgagttgattttgcagtatcgcgagctcagcaaactcaaatcaacctatcttgataggttacctaagcttgttcatccacgtacgggtcgtttacacacccgcttcaatcaaacggcaacagccaccgggcgcttgtcgtcgagtgacccgaacctccagaatattccagtgcgcacgccgctgggccaacacattcgtaaagcgtttgttgcggaagagggttggttattacttgcggccgattactcccagatcgaacttcgtgtattggcgcatctctctggcgacgagaatcttaaacgcgtgtttcgcgaaggcaaggatattcacactgaaaccgcagcctggatgttcggggtggactcggccttagtggaccccaagatgcgtcgtgccgccaagaccgtcaactttggcgtactctatggtatgtcagcagcacgtcttagtcaggaattgggcattgactacaaagaagctgaagcgtttatcgagcgctatttccaatcctttccgaaagttcgcgcgtggattgaacgtacgctcgaagaaggtcgcactcgcggctatgtggaaacgttattcgggcgtcgtcgctacgttccagatcttacgtctcgtgtccgctcagtgcgcgaagctgctgagcgtatggcctggaatatgcctgttcagggaacagcggcggacctcatgaagatcgccatggtgaaattgtttccgcgcttgaaacccttaggagcccaccttcttttacaggtgcatgatgaattggtcttggaagtacccgaggatcgcgcagaagaagccaaagcactcgtgaaagaggttatggaaaacgcgtatccgttagatgttccgttggaggtcgaagtgggtgtaggccgtgattggcttgaagcgaaacaagactaatga

SEQ ID NO: 1094 - protein, 844 aa, synthetic construct
  REGION 1..844: note = DNA Polymerase Variant
MHHHHHHGGSGMLPLFDLEENPKRVLLVDGHHLAYRTFYALSLTTSRGEPVQMVYGFARSLLKALKEDGQAVVVVFDAKAPSFRHEAYEAYKAGRAPTPEDFPRQLALVKRLVDLLGLVRLEAPGYEADDVLGTLAKKAEREGMEVCILTGDRDFFQLLSEKVSVLLPDGTLVTPKDVQEKYGVPPERWVDFRALTGDRSDNIPGVAGIGEKTALRLLAEWGSVENLLKNLDRVKPDSLRRKIEAHLEDLRLSLDLARIRTDLPLEVDFKALRRRTPDLEGLRAFLEELELGSLLHEFGLLGGEKPREEAPWPPPEGAFVGFLLSRKEPMWAELLALAAAAEGRVHRATSPVEALADLKEARGFLAKDLAVLALREGVALDPTDDPLLVAYLLDHANTNPERVARRYGGEFTEDAAERALLSERLFQTLFPRLSEKLLWLYQEVERPLSRVLAHMEARGVRLDVPLLEALSFELEKELERLEGEVFRLAGHPFNLNSRDQLEKVLFDELGLTPVTRTEKTGKRSTSAAALEALRGAHPIVELILQYRELSKLKSTYLDRLPKLVHPRTGRLHTRFNQTATATGRLSSSDPNLQNIPVRTPLGQHIRKAFVAEEGWLLLAADYSQIELRVLAHLSGDENLKRVFREGKDIHTETAAWMFGVDSALVDPKMRRAAKTVNFGVLYGMSAARLSQELGIDYKEAEAFIERYFQSFPKVRAWIERTLEEGRTRGYVETLFGRRRYVPDLTSRVRSVREAAERMAWNMPVQGTAADLMKIAMVKLFPRLKPLGAHLLLQVHDELVLEVPEDRAEEAKALVKEVMENAYPLDVPLEVEVGVGRDWLEAKQD

SEQ ID NO: 1095 - DNA, 2538 bp, synthetic construct
  misc_feature 1..2538: note = DNA Polymerase Variant
  source 1..2538: mol_type = other DNA
atgcaccatcatcatcatcatggcggtagcggcatgttaccgctgtttgatttggaagaaccaccaaaacgcgtgctgcttgttgacggccatcatctggcgtatcgtaccttctacgcactgagccttacgacctcacgtggtgagcctgtccagatggtgtatgggtttgctcgctccctgctgaaagccctgaaggaagatggtcaagccgtagtagtggttttcgatgcgcgtgcaccgtcgtttcgtcacgaagcgtacgaggcctataaagctggccgcgcaccgaccccggaagactttccgcgtcagttagcgctcgtcaaacgcctcgtggatttgctgggattagttcgcttggaagctcctggctacgaggcggacgacgtgctcggtacactggccaagaaagcagaacgtgaaggcatggaggtctgcattcttaccggtgatcgcgatttcttccagctgctgtctgagaaagtgagcgttttgctgcccgatggcacgttagtaaccccgaaagatgtgcaagagaaatatggagttccgccagaacgttgggtggactttcgcgcactgactggtgatcgttcagacaacatcccgggcgttgccgggattggtgaaaagacggcgctgcgcctgctggcagaatggggctcggtggaaaatctgctcaagaaccttgatcgtgtgaaacctgatagcttacgccgcaagatcgaagcccacctggaagacttgcgtctgagtctggatcttgtacgtattcgcaccaatctgccgttggaagtagactttaaagctctgcgtcgtcgcacacccgatttagaggggttacgcgcgttcctcgaagaactggagctgggctccctgctgcatgaattcggtttgttgggcggagagaaaccgcgtgaagaagcaccatggccgccgcccgagggtgcctttgtcggctttcttctgtcacgcaaagagccaatgtgggcggaactgttagctcttgcagccgccgcggaagggcgtgttcaccgcgcgacctctcctgtcgaggccctcgctgacctcaaagaagcacgtggtttcttggcgaaagatttagccgtgcttgcattacgcgaaggcgttgcgctcgatccgacggacgacccgcttttggtggcttatttgctcgatcatgcgaataccaacccggaacgtgtcgcccgtcgttacggcggcgagtttactgaagatgcggcagaacgcgcgttgcttagcgaacgcctcttccagacgttatttccacgtctttcggagaaattactctggctctatcaggaagtcgaacgtccattgagtcgcgtgcttgcccatatggaggctcgcggtgtgcgcttagatgttccgttgttagaagcactcagcttcgagctggaaaaagaactggaacgtcttgaaggcgaagtctttcgtttagcggggcatcccttcaatctcaactctcgcgaccaattggagaaagtgctctttgatgaattaggtttaacccctgtcacgcgtacagagaagaccggcaaacgttccacttcggcagccgccttggaagcacttcgtggtgtgcacccgatcgtcgagttgattttgcagtatcgcgagctcagcaaactcaaatcaacctatcttgataggttacctaagcttgttcatccacgtacgggtcgtttacacacccgcttcaatcaaacggcaacagccaccgggcgcttgtcgtcgagtgacccgaacctccagaatattccagtgcgcacgccgctgggccaacacattcgtaaagcgtttgttgcggaagaaggttggttattacttgcggccgattactcccagatcgaacttcgtgtattggcgcatctctctggcgacgagaatcttaaacgcgtgtttcgcgaaggcaaggatattcacactgaaaccgcagcctggatgttcggggtggacccggccttagtggaccccaagatgcgtcgtgccgccaagaccgtcaactttggcgtactctatggtatgtcagcagcacgtcttagtcaggaattgggcattgactacaaagtagctgaagcgtttatcgagcgctatttccaatcctttccgaaagttcgcgcgtggattgaacgtacgctcgaagaaggtcgcactcgcggctatgtggaaacgttattcgggcgtcgtcgctacgttccagatcttacgtctcgtgtccgctcagtgcgcgaagctgctgagcgtatggcctggaatatgcctgttcagggaacagcggcggacctcatgaagatcgccatggtgaaattgtttccgcgcttgaaacccttaggagcccaccttcttctgcaggtgcatgatgaattggtcttggaagtacccgaggatcgcgcagaagaagccaaagcactcgtgaaagaggttatggaaaacgcgtatccgttagatgttccgttggaggtcgaagtgggtgtaggccgtgattggcttgaagcgaaacaagactaatga

SEQ ID NO: 1096 - protein, 844 aa, synthetic construct
  REGION 1..844: note = DNA Polymerase Variant
MHHHHHHGGSGMLPLFDLEEPPKRVLLVDGHHLAYRTFYALSLTTSRGEPVQMVYGFARSLLKALKEDGQAVVVVFDARAPSFRHEAYEAYKAGRAPTPEDFPRQLALVKRLVDLLGLVRLEAPGYEADDVLGTLAKKAEREGMEVCILTGDRDFFQLLSEKVSVLLPDGTLVTPKDVQEKYGVPPERWVDFRALTGDRSDNIPGVAGIGEKTALRLLAEWGSVENLLKNLDRVKPDSLRRKIEAHLEDLRLSLDLVRIRTNLPLEVDFKALRRRTPDLEGLRAFLEELELGSLLHEFGLLGGEKPREEAPWPPPEGAFVGFLLSRKEPMWAELLALAAAAEGRVHRATSPVEALADLKEARGFLAKDLAVLALREGVALDPTDDPLLVAYLLDHANTNPERVARRYGGEFTEDAAERALLSERLFQTLFPRLSEKLLWLYQEVERPLSRVLAHMEARGVRLDVPLLEALSFELEKELERLEGEVFRLAGHPFNLNSRDQLEKVLFDELGLTPVTRTEKTGKRSTSAAALEALRGVHPIVELILQYRELSKLKSTYLDRLPKLVHPRTGRLHTRFNQTATATGRLSSSDPNLQNIPVRTPLGQHIRKAFVAEEGWLLLAADYSQIELRVLAHLSGDENLKRVFREGKDIHTETAAWMFGVDPALVDPKMRRAAKTVNFGVLYGMSAARLSQELGIDYKVAEAFIERYFQSFPKVRAWIERTLEEGRTRGYVETLFGRRRYVPDLTSRVRSVREAAERMAWNMPVQGTAADLMKIAMVKLFPRLKPLGAHLLLQVHDELVLEVPEDRAEEAKALVKEVMENAYPLDVPLEVEVGVGRDWLEAKQD

SEQ ID NO: 1097 - DNA, 2538 bp, synthetic construct
  misc_feature 1..2538: note = DNA Polymerase Variant
  source 1..2538: mol_type = other DNA
atgcaccatcatcatcatcatggcggtagcggcatgttaccgctgtttgatttggaagaaccaccaaaacgcgtgctgcttgttgacggccatcatctggcgtatcgtaccttctacgcactgagccttacgacctcacgtggtgagcctgtccagatggtgtatgggtttgctcgctccctgctgaaagccctgaaggaagatggtcaagccgtagtagtggttttcgatgcgaaagcaccgtcgtttcgtcacgaagcgtacgaggcctataaagctggccgcgcaccgaccccggaagactttccgcgtcagttagcgctcgtcaaacgcctcgtggatttgctgggattagttcgcttggaagctcctggctacgaggcggacgacgtgctcggtacactggccaagaaagcagaacgtgaaggcatggaggtctgcattcttaccggtgatcgcgatttcttccagctgctgtctgagaaagtgagcgttttgctgcccgatggcacgttagtaaccccgaaagatgtgcaagagaaatatggagttccgccagaacgttgggtggactttcgcgcactgactggtgatcgttcagacaacatcccgggcgttgccgggattggtgaaaagacggcgctgcgcctgctggcagaatggggctcggtggaaaatctgctcaagaaccttgatcgtgtgaaacctgatagcttacgccgcaagatcgaagcccacctggaagacttgcgtctgagtctggatcttgcccgtattcgcaccgatctgccgttggaagtagactttaaagctctgcgtcgtcgcacacccgatttagaggggttacgcgcgttcctcgaagaactggagctgggctccctgctgcatgaattcggtttgttgggcggagagaaaccgcgtgaagaagcaccatggccgccgcccgaaggtgcctttgtcggctttcttctgtcacgcaaagagccaatgtgggcggaactgttagctcttgcagccgccgcggaagggcgtgttcaccgcgcgacctctcctgtcgaggccctcgctgacctcaaagaagcacgtggtttcttggcgaaagatttagccgtgcttgcattacgcgaaggcgttgcgctcgatccgacggacgacccgcttttggtggcttatttgctcgatcatgcgaataccaacccggaacgtgtcgcccgtcgttacggcggcgagtttactgaagatgcggcagaacgcgcgttgcttagcgaacgcctcttccagacgttatttccacgtctttcggagaaattactctggctctatcaggaagtcgaacgtccattgagtcgcgtgcttgcccatatggaggctcgcggtgtgcgcttagatgttccgttgttagaagcactcagcttcgagttggagaaagaactggaacgtcttgaaggcgaagtctttcgtttagcggggcatcccttcaatctcaactctcgcgaccaattggagaaagtgctctttgatgaattaggtttaacccctgtcacgcgtacagagaagaccggcaaacgttccacttcggcagccgccttggaagcacttcgtggtgctcacccgatcgtcgagttgattttgcagtatcgcgagctcagcaaactcaaatcaacctatcttgataggttacctcgtcttgttcatccacgtacgggtcgtttacacacccgcttcaatcaaacggcaacagccaccgggcgcttgtcgtcgagtgacccgaacctccagaatattccagtgcgcacgccgctgggccaacacattcgtaaagcgtttgttgcggaagaaggttggttattacttgcggccgattactcccagatcgaacttcgtgtattggcgcatctctctggcgacgagaatcttaaacgcgtgtttcgcgaaggcaaggatattcacactgaaaccgcagcctggatgttcggggtggacccagccttagtggaccccaagatgcgtcgtgccgccaagaccgtcaactttggcgtactctatggtatgtcagcagcacgtcttagtcaggaattgggcattgactacaaagaagctgaagcgtttatcgagcgctatttccaatcctttccgaaagttcgcgcgtggcaggaacgtacgctcgaagaaggtcgcactcgcggctatgtggaaacgttattcgggcgtcgtcgctacgttccagatcttacgtctcgtgtccgctcagtgcgcgaagctgctgagcgtatggcctggaatatgcctgttcagggaacagcggcggacctcatgaagatcgccatggtgaaattgtttccgcgcttgaaacccttaggagcccaccttcttttacaggtgcatgatgaattggtcttggaagtacccgaggatcgcgcagaagaagccaaagcactcgtgaaagaggttatggaaaacgcgtatccgttagatgttccgttggaggtcgaagtgggtgtaggccgtgattggcttgaagcgaaacaagactaatga

SEQ ID NO: 1098 - protein, 844 aa, synthetic construct
  REGION 1..844: note = DNA Polymerase Variant
MHHHHHHGGSGMLPLFDLEEPPKRVLLVDGHHLAYRTFYALSLTTSRGEPVQMVYGFARSLLKALKEDGQAVVVVFDAKAPSFRHEAYEAYKAGRAPTPEDFPRQLALVKRLVDLLGLVRLEAPGYEADDVLGTLAKKAEREGMEVCILTGDRDFFQLLSEKVSVLLPDGTLVTPKDVQEKYGVPPERWVDFRALTGDRSDNIPGVAGIGEKTALRLLAEWGSVENLLKNLDRVKPDSLRRKIEAHLEDLRLSLDLARIRTDLPLEVDFKALRRRTPDLEGLRAFLEELELGSLLHEFGLLGGEKPREEAPWPPPEGAFVGFLLSRKEPMWAELLALAAAAEGRVHRATSPVEALADLKEARGFLAKDLAVLALREGVALDPTDDPLLVAYLLDHANTNPERVARRYGGEFTEDAAERALLSERLFQTLFPRLSEKLLWLYQEVERPLSRVLAHMEARGVRLDVPLLEALSFELEKELERLEGEVFRLAGHPFNLNSRDQLEKVLFDELGLTPVTRTEKTGKRSTSAAALEALRGAHPIVELILQYRELSKLKSTYLDRLPRLVHPRTGRLHTRFNQTATATGRLSSSDPNLQNIPVRTPLGQHIRKAFVAEEGWLLLAADYSQIELRVLAHLSGDENLKRVFREGKDIHTETAAWMFGVDPALVDPKMRRAAKTVNFGVLYGMSAARLSQELGIDYKEAEAFIERYFQSFPKVRAWQERTLEEGRTRGYVETLFGRRRYVPDLTSRVRSVREAAERMAWNMPVQGTAADLMKIAMVKLFPRLKPLGAHLLLQVHDELVLEVPEDRAEEAKALVKEVMENAYPLDVPLEVEVGVGRDWLEAKQD

SEQ ID NO: 1099 - DNA, 2538 bp, synthetic construct
  misc_feature 1..2538: note = DNA Polymerase Variant
  source 1..2538: mol_type = other DNA
atgcaccatcatcatcatcatggcggtagcggcatgttaccgctgtttgatttggaagaaccaccaaaacgcgtgctgcttgttgacggccatcatctggcgtatcgtaccttctacgcactgagccttacgacctcacgtggtgagcctgtccagatggtgtatgggtttgctcgctccctgctgaaagccctgaaggaagatggtcaagccgtagtagtggttttcgatgcgaaggcaccgtcgtttcgtcacgaagcgtacgaggcctataaagctggccgcgcaccgaccccggaagactttccgcgtcagttagcgctcgtcaaacgcctcgtggatttgctgggattagttcgcttggaagctcctggctacgaggcggacgacgtgctcggtacactggccaagaaagcagaacgtgaaggcatggaggtctgcattcttaccggtgatcgcgatttcttccagctgctgtctgagaaagtgagcgttttgctgcccgatggcacgttagtaaccccgaaagatgtgcaagagaaatatggagttccgccagaacgttgggtggactttcgcgcactgactggtgatcgttcagacaacatcccgggcgttgccgggattggtgaaaagacggcgctgcgcctgctggcagaatggggctcggtggaaaatctgctcaagaaccttgatcgtgtgaaacctgatagcttacgccgcaagatcgaagcccacctggaagacttgcgtctgagtctggatcttgcccgtattcgcaccgatctgccgttggaagtagactttaaagctctgcgtcgtcgcacacccgatttagaggggttacgcgcgttcctcgaagaactggagctgggctccctgctgcatgaattcggtttgttgggcggagagaaaccgcgtgaagaagcaccatggccgccgcccgaaggtgcctttgtcggctttcttctgtcacgcaaagagccaatgtgggcggaactgttagctcttgcagccgccgcggaagggcgtgttcaccgcgcgacctctcctgtcgaggccctcgctgacctcaaagaagcacgtggtttcttggcgaaagatttagccgtgcttgcattacgcgaaggcgttgcgctcgatccgacggacgacccgcttttggtggcttatttgctcgatagcgcgaataccaacccggaacgtgtcgcccgtcgttacggcggcgagtttactgaagatgcggcagaacgcgcgttgcttagcgaacgcctcttccagacgttatttccacgtctttcggagaaattactctggctctatcaggaagtcgaacgtccattgagtcgcgtgcttgcccatatggaggctcgcggtgtgcgcttagatgttccgttgttagaagcactcagcttcgagctggcaaaagaactggaacgtcttgaaggcgaagtctttcgtttagcggggcatcccttcaatctcaactctcgcgaccaattggagaaagtgctctttgatgaattaggtttaacccctgtcacgcgtacagagaagaccggcaaacgttccacttcggcagccgccttggaagcacttcgtggtgtgcacccgatcgtcgagttgattttgcagtatcgcgagctcagcaaactcaaatcaacctatcttgataggttacctaagcttgttcatccacgtacgggtcgtttacacacccgcttcaatcaaacggcaacagccaccgggcgcttgtcgtcgagtgacccgaacctccagaatattccagtgcgcacgccgctgggccaacacattcgtaaagcgtttgttgcggaagaaggttggttattacttgcggccgattactcccagatcgaacttcgtgtattggcgcatctctctggcgacgagaatcttaaacgcgtgtttcgcgaaggcaaggatattcacactgaaaccgcagcctggatgttcggggtggactcggccttagtggaccccaagatgcgtcgtgccgccaagaccgtcaactttggcgtactctatggtatgtcagcagcacgtcttagtcaggaattgggcattgactacaaagtagctgaagcgtttatcgagcgctatttccaatcctttccgaaagttcgcgcgtggattgaacgtacgctcgaagaaggtcgcactcgcggctatgtggaaacgttattcgggcgtcgtcgctacgttccagatcttacgtctcgtgtccgctcagtgcgcgaagctgctgagcgtatggcctggaatatgcctgttcagggaacagcggcggacctcatgaagatcgccatggtgaaattgtttccgcgcttgaaacccttaggagcccaccttcttctgcaggtgcatgatgaattggtcttggaagtacccgaggatcgcgcagaagaagccaaagcactcgtgaaagaggttatggaaaacgcgtatccgttagatgttccgttggaggtcgaagtgggtgtaggccgtgattggcttgaagcgaaacaagactaatga

SEQ ID NO: 1100 - protein, 844 aa, synthetic construct
  REGION 1..844: note = DNA Polymerase Variant
MHHHHHHGGSGMLPLFDLEEPPKRVLLVDGHHLAYRTFYALSLTTSRGEPVQMVYGFARSLLKALKEDGQAVVVVFDAKAPSFRHEAYEAYKAGRAPTPEDFPRQLALVKRLVDLLGLVRLEAPGYEADDVLGTLAKKAEREGMEVCILTGDRDFFQLLSEKVSVLLPDGTLVTPKDVQEKYGVPPERWVDFRALTGDRSDNIPGVAGIGEKTALRLLAEWGSVENLLKNLDRVKPDSLRRKIEAHLEDLRLSLDLARIRTDLPLEVDFKALRRRTPDLEGLRAFLEELELGSLLHEFGLLGGEKPREEAPWPPPEGAFVGFLLSRKEPMWAELLALAAAAEGRVHRATSPVEALADLKEARGFLAKDLAVLALREGVALDPTDDPLLVAYLLDSANTNPERVARRYGGEFTEDAAERALLSERLFQTLFPRLSEKLLWLYQEVERPLSRVLAHMEARGVRLDVPLLEALSFELAKELERLEGEVFRLAGHPFNLNSRDQLEKVLFDELGLTPVTRTEKTGKRSTSAAALEALRGVHPIVELILQYRELSKLKSTYLDRLPKLVHPRTGRLHTRFNQTATATGRLSSSDPNLQNIPVRTPLGQHIRKAFVAEEGWLLLAADYSQIELRVLAHLSGDENLKRVFREGKDIHTETAAWMFGVDSALVDPKMRRAAKTVNFGVLYGMSAARLSQELGIDYKVAEAFIERYFQSFPKVRAWIERTLEEGRTRGYVETLFGRRRYVPDLTSRVRSVREAAERMAWNMPVQGTAADLMKIAMVKLFPRLKPLGAHLLLQVHDELVLEVPEDRAEEAKALVKEVMENAYPLDVPLEVEVGVGRDWLEAKQD

SEQ ID NO: 1101 - DNA, 2538 bp, synthetic construct
  misc_feature 1..2538: note = DNA Polymerase Variant
  source 1..2538: mol_type = other DNA
atgcaccatcatcatcatcatggcggtagcggcatgttaccgctgtttgatttggaagaaccaccaaaacgcgtgctgcttgttgacggccatcatctggcgtatcgtaccttctacgcactgagccttacgacctcacgtggtgagcctgtccagatggtgtatgggtttgctcgctccctgctgaaagccctgaaggaagatggtcaagccgtagtagtggttttcgatgcgaaagcaccgtcgtttcgtcacgaagcgtacgaggcctataaagctggccgcgcaccgaccccggaagactttccgcgtcagttagcgctcgtcaaacgcctcgtggatttgctgggattagttcgcttggaagctcctggctacgaggcggacgacgtgctcggtacactggccaagaaagcagaacgtgaaggcatggaggtctgcattcttaccggtgatcgcgatttcttccagctgctgtctgagaaagtgagcgttttgctgcccgatggcacgttagtaaccccgaaagatgtgcaagagaaatatggagttccgccagaacgttgggtggactttcgcgcactgactggtgatcgttcagacaacatcccgggcgttgccgggattggtgaaaagacggcgctgcgcctgctggcagaatggggctcggtggaaaatctgctcaagaaccttgatcgtgtgaaacctgatagcttacgccgcaagatcgaagcccacctggaagacttgcgtctgagtctggatcttgcccgtattcgcaccgatctgccgttggaagtagactttaaagctctgcgtcgtcgcacacccgatttagaggggttacgcgcgttcctcgaagaactggagctgggctccctgctgcatgaattcggtttgttgggcggagagaaaccgcgtgaagaagcaccatggccgccgcccgaaggtgcctttgtcggctttcttctgtcacgcaaagagccaatgtgggcggaactgttagctcttgcagccgccgcggaagggcgtgttcaccgcgcgacctctcctgtcgaggccctcgctgacctcaaagaagcacgtggtttcttggcgaaagatttagccgtgcttgcattacgcgaaggcgttgcgctcgatccgacggacgacccgcttttggtggcttatttgctcgatcatgcgaataccaacccggaacgtgtcgcccgtcgttacggcggcgagtttactgaagatgcggcagaacgcgcgttgcttagcgaacgcctcttccagacgttatttccacgtctttcggagaaattactctggctctatcaggaagtcgaacgtccattgctgcgcgtgcttgcccatatggaggctcgcggtgtgcgcttagatgttccgttgttagaagcactcagcttcgagttggagaaagaactggaacgtcttgaaggcgaagtctttcgtttagcggggcatcccttcaatctcaactctcgcgaccaattggagaaagtgctctttgatgaattaggtttaacccctgtcacgcgtacagagaagaccggcaaacgttccacttcggcagccgccttggaagcacttcgtggtgctcacccgatcgtcgagttgattttgcagtatcgcgagctcagcaaactcaaatcaacctatcttgataggttacctcgtcttgttcatccacgtacgggtcgtttacacacccgcttcaatcaaacggcaacagccaccgggcgcttgtcgtcgagtgacccgaacctccagaatattccagtgcgcacgccgctgggccaacacattcgtaaagcgtttgttgcggaagaaggttggttattacttgcggccgattactcccagatcgaacttcgtgtattggcgcatctctctggcgacgagaatcttaaacgcgtgtttcgcgaaggcaaggatattcacactgaaaccgcagcctggatgttcggggtggacccagccttagtggaccccaagatgcgtcgtgccgccaagaccgtcaactttggcgtactctatggtatgtcagcagcacgtcttagtcaggaattgggcattgactacaaagaagctgaagcgtttatcgagcgctatttccaatcctttccgaaagttcgcgcgtggattgaacgtacgctcgaagaaggtcgcactcgcggctatgtggaaacgttattcgggcgtcgtcgctacgttccagatcttacgtctcgtgtccgctcagtgcgcgaagctgctgagcgtatggcctggaatatgcctgttcagggaacagcggcggacctcatgaagatcgccatggtgaaattgtttccgcgcttgaaacccttaggagcccaccttcttttacaggtgcatgatgaattggtcttggaagtacccgaggatcgcgcagaagaagccaaagcactcgtgaaagaggttatggaaaacgcgtatccgttagatgttccgttggaggtcgaagtgggtgtaggccgtgattggcttgaagcgaaacaagactaatga

SEQ ID NO: 1102 - protein, 844 aa, synthetic construct
  REGION 1..844: note = DNA Polymerase Variant
MHHHHHHGGSGMLPLFDLEEPPKRVLLVDGHHLAYRTFYALSLTTSRGEPVQMVYGFARSLLKALKEDGQAVVVVFDAKAPSFRHEAYEAYKAGRAPTPEDFPRQLALVKRLVDLLGLVRLEAPGYEADDVLGTLAKKAEREGMEVCILTGDRDFFQLLSEKVSVLLPDGTLVTPKDVQEKYGVPPERWVDFRALTGDRSDNIPGVAGIGEKTALRLLAEWGSVENLLKNLDRVKPDSLRRKIEAHLEDLRLSLDLARIRTDLPLEVDFKALRRRTPDLEGLRAFLEELELGSLLHEFGLLGGEKPREEAPWPPPEGAFVGFLLSRKEPMWAELLALAAAAEGRVHRATSPVEALADLKEARGFLAKDLAVLALREGVALDPTDDPLLVAYLLDHANTNPERVARRYGGEFTEDAAERALLSERLFQTLFPRLSEKLLWLYQEVERPLLRVLAHMEARGVRLDVPLLEALSFELEKELERLEGEVFRLAGHPFNLNSRDQLEKVLFDELGLTPVTRTEKTGKRSTSAAALEALRGAHPIVELILQYRELSKLKSTYLDRLPRLVHPRTGRLHTRFNQTATATGRLSSSDPNLQNIPVRTPLGQHIRKAFVAEEGWLLLAADYSQIELRVLAHLSGDENLKRVFREGKDIHTETAAWMFGVDPALVDPKMRRAAKTVNFGVLYGMSAARLSQELGIDYKEAEAFIERYFQSFPKVRAWIERTLEEGRTRGYVETLFGRRRYVPDLTSRVRSVREAAERMAWNMPVQGTAADLMKIAMVKLFPRLKPLGAHLLLQVHDELVLEVPEDRAEEAKALVKEVMENAYPLDVPLEVEVGVGRDWLEAKQD

SEQ ID NO: 1103 - DNA, 2538 bp, synthetic construct
  misc_feature 1..2538: note = DNA Polymerase Variant
  source 1..2538: mol_type = other DNA
atgcaccatcatcatcatcatggcggtagcggcatgttaccgctgtttgatttggaagaaccaccaaaacgcgtgctgcttgttgacggccatcatctggcgtatcgtaccttctacgcactgagccttacgacctcacgtggtgagcctgtccagatggtgtatgggtttgctcgctccctgctgaaagccctgaaggaagatggtcaagccgtagtagtggttttcgatgcgaaagcaccgtcgtttcgtcacgaagcgtacgaggcctataaagctggccgcgcaccgaccccggaagactttccgcgtcagttagcgctcgtcaaacgcctcgtggatttgctgggattagttcgcttggaagctcctggctacgaggcggacgacgtgctcggtacactggccaagaaagcagaacgtgaaggcatggaggtctgcattcttaccggtgatcgcgatttcttccagctgctgtctgagaaagtgagcgttttgctgcccgatggcacgttagtaaccccgaaagatgtgcaagagaaatatggagttccgccagaacgttgggtggactttcgcgcactgactggtgatcgttcagacaacatcccgggcgttgccgggattggtgaaaagacggcgctgcgcctgctggcagaatggggctcggtggaaaatctgctcaagaaccttgatcgtgtgaaacctgatagcttacgccgcaagatcgaagcccacctggaagacttgcgtctgagtctggatcttgcccgtattcgcaccgatctgccgttggaagtagactttaaagctctgcgtcgtcgcacacccgatttagaggggttacgcgcgttcctcgaagaactggagctgggctccctgctgcatgaattcggtttgttgggcggagagaaaccgcgtgaagaagcaccatggccgccgcccgaaggtgcctttgtcggctttcttctgtcacgcaaagagccaatgtgggcggaactgttagctcttgcagccgccgcggaagggcgtgttcaccgcgcgacctctcctgtcgaggccctcgctgacctcaaagaagcacgtggtttcttggcgaaagatttagccgtgcttgcattacgcgaaggcgttgcgctcgatccgacggacgacccgcttatggtggcttatttgctcgatcatgcgaataccaacccggaacgtgtcgcccgtcgttacggcggcgagtttactgaagatgcggcagaacgcgcgttgcttagcgaacgcctcttccagacgttatttccacgtctttcggagaaattactctggctctatcaggaagtcgaacgtccattgagtcgcgtgcttgcccatatggaggctcgcggtgtgcgcttagatgttccgttgttagaagcactcagcttcgagttggagaaagaactggaacgtcttgaaggcgaagtctttcgtttagcggggcatcccttcaatctcaactctcgcgaccaattggagaaagtgctctttgatgaattaggtttaacccctgtcacgcgtacagagaagaccggcaaacgttccacttcggcagccgccttggaagcacttcgtggtgctcacccgatcgtcgagttgattttgcagtatcgcgagctcagcaaactcaaatcaacctatcttgataggttacctcgtcttgttcatccacgtacgggtcgtttacacacccgcttcaatcaaacggcaacagccaccgggcgcttgtcgtcgagtgacccgaacctccagaatattccagtgcgcacgccgctgggccaacacattcgtaaagcgtttgttgcggaagaaggttggttattacttgcggccgattactcccagatcgaacttcgtgtattggcgcatctctctggcgacgagaatcttaaacgcgtgtttcgcgaaggcaaggatattcacactgaaaccgcagcctggatgttcggggtggacccagccttagtggaccccaagatgcgtcgtgccgccaagaccgtcaactttggcgtactctatggtatgtcagcagcacgtcttagtcaggaattgggcattgactacaaagaagctgaagcgtttatcgagcgctatttccaatcctttccgaaagttcgcgcgtggattgaacgtacgctcgaagaaggtcgcactcgcggctatgtggaaacgttattcgggcgtcgtcgctacgttccagatcttacgtctcgtgtccgctcagtgcgcgaagctgctgagcgtatggcctggaatatgcctgttcagggaacagcggcggacctcatgaagatcgccatggtgaaattgtttccgcgcttgaaacccttaggagcccaccttcttttacaggtgcatgatgaattggtcttggaagtacccgaggatcgcgcagaagaagccaaagcactcgtgaaagaggttatggaaaacgcgtatccgttagatgttccgttggaggtcgaagtgggtgtaggccgtgattggcttgaagcgaaacaagactaatga

SEQ ID NO: 1104 - protein, 844 aa, synthetic construct
  REGION 1..844: note = DNA Polymerase Variant
MHHHHHHGGSGMLPLFDLEEPPKRVLLVDGHHLAYRTFYALSLTTSRGEPVQMVYGFARSLLKALKEDGQAVVVVFDAKAPSFRHEAYEAYKAGRAPTPEDFPRQLALVKRLVDLLGLVRLEAPGYEADDVLGTLAKKAEREGMEVCILTGDRDFFQLLSEKVSVLLPDGTLVTPKDVQEKYGVPPERWVDFRALTGDRSDNIPGVAGIGEKTALRLLAEWGSVENLLKNLDRVKPDSLRRKIEAHLEDLRLSLDLARIRTDLPLEVDFKALRRRTPDLEGLRAFLEELELGSLLHEFGLLGGEKPREEAPWPPPEGAFVGFLLSRKEPMWAELLALAAAAEGRVHRATSPVEALADLKEARGFLAKDLAVLALREGVALDPTDDPLMVAYLLDHANTNPERVARRYGGEFTEDAAERALLSERLFQTLFPRLSEKLLWLYQEVERPLSRVLAHMEARGVRLDVPLLEALSFELEKELERLEGEVFRLAGHPFNLNSRDQLEKVLFDELGLTPVTRTEKTGKRSTSAAALEALRGAHPIVELILQYRELSKLKSTYLDRLPRLVHPRTGRLHTRFNQTATATGRLSSSDPNLQNIPVRTPLGQHIRKAFVAEEGWLLLAADYSQIELRVLAHLSGDENLKRVFREGKDIHTETAAWMFGVDPALVDPKMRRAAKTVNFGVLYGMSAARLSQELGIDYKEAEAFIERYFQSFPKVRAWIERTLEEGRTRGYVETLFGRRRYVPDLTSRVRSVREAAERMAWNMPVQGTAADLMKIAMVKLFPRLKPLGAHLLLQVHDELVLEVPEDRAEEAKALVKEVMENAYPLDVPLEVEVGVGRDWLEAKQD

SEQ ID NO: 1105 - DNA, 2538 bp, synthetic construct
  misc_feature 1..2538: note = DNA Polymerase Variant
  source 1..2538: mol_type = other DNA
atgcaccatcatcatcatcatggcggtagcggcatgttaccgctgtttgatttggaagaaccaccaaaacgcgtgctgcttgttgacggccatcatctggcgtatcgtaccttctacgcactgagccttacgacctcacgtggtgagcctgtccagatggtgtatgggtttgctcgctccctgctgaaagccctgaaggaagatggtcaagccgtagtagtggttttcgatgcgcgcgcaccgtcgtttcgtcacgaagcgtacgaggcctataaagctggccgcgcaccgaccccggaagactttccgcgtcagttagcgctcgtcaaacgcctcgtggatttgctgggattagttcgcttggaagctcctggctacgaggcggacgacgtgctcggtacactggccaagaaagcagaacgtgaaggcatggaggtctgcattcttaccggtgatcgcgatttcttccagctgctgtctgagaaagtgagcgttttgctgcccgatggcacgttagtaaccccgaaagatgtgcaagagaaatatggagttccgccagaacgttgggtggactttcgcgcactgactggtgatcgttcagacaacatcccgggcgttgccgggattggtgaaaagacggcgctgcgcctgctggcagaatggggctcggtggaaaatctgctcaagaaccttgataaagtgaaacctgatagcttacgccgcaagatcgaagcccacctggaagacttgcgtctgagtctggatcttgcccgtattcgcaccgatctgccgttggaagtagactttaaagctctgcgtcgtcgcacacccgatttagaggggttacgcgcgttcctcgaagaactggagctgggctccctgctgcatgaattcggtttgttgggcggagagaaaccgcgtgaagaagcaccatggccgccgcccgaaggtgcctttgtcggctttcttctgtcacgcaaagagccaatgtgggcggaactgttagctcttgtagccgccgcggaagggcgtgttcaccgcgcgacctctcctgtcgaggccctcgctgacctcggggaagcacgtggtttcttggcgaaagatttagccgtgcttgcattacgcgaaggcgttggcctcgatccgacggacgacccgcttttggtggcttatttgctcgatcatgcgaataccaacccggaacgtgtcgcccgtcgttacggcggcgagtttactgaagatgcggcagaacgcgcgttgcttagcgaacgcctcttccagacgttatttccacgtctttcggagaaattactctggctctatggtgaagtcgaacgtccattgagtcgcgtgcttgcccatatggaggctcgcggtgtgcgcttagatgttccgttgttagaagcactcagcttcgagttggagaaagaactggaacgtcttgaaggcgaagtctttcgtttagcggggcatcccttcaatctcaactctcgcgaccaattggagaaagtgctctttgatgaattaggtttaacccctgtcacgcgtacagagaagaccggcaaacgttccacttcggcagccgccttggaagcacttcgtggtgctcacccgatcgtcgagttgattttgcagtatcgcgagctcagcaaactcaaatcaacctatcttgataggttacctaagcttgttcatccacgtacgggtcgtttacacacccgcttcaatcaaacggcaacagccaccgggcgcttgtcgtcgagtgacccgaacctccagaatattccagtgcgcacgccgctgggccaacacattcgtaaagcgtttgttgcggaacatggttggttattacttgcggccgattactcccagatcgaacttcgtgtattggcgcatctctctggcgacgagaatcttaaacgtgtgtttcgcgaaggcaaggatattcacactgaaaccgcagcctggatgttcggggtggacccagccttagtggaccccaagatgcgtcgtgccgccaagaccgtcaactttggcgtactctatggtatgtcagcagcacgtcttagtcaggaattgggcattgactacaaagaagctgaagcgtttatcgagcgctatttccaatcctttccgaaagttcgcgcgtggattgaacgtacgctcgaagaaggtcgcactcgcggctatgtggaaacgttattcgggcgtcgtcgctacgttccagatcttacgtctcgtgtccgctcagtgcgcgaagctgctgagcgtatggcctggaatatgcctgttcagggaacagcggcggacctcatgaagatcgccatggtgaaattgtttccgcgcttgaaacccttaggagcccaccttcttttacaggtgcatgatgaattggtcttggaagtacccgaggatcgcgcagaggaagccaaatcgctcgtgaaagaggttatggaaaacgcgtatccgttagatgttccgttggaggtcgaagtgggtgtaggccgtgattggcttgaagcgaaacaagactaatga

SEQ ID NO: 1106 - protein, 844 aa, synthetic construct
  REGION 1..844: note = DNA Polymerase Variant
MHHHHHHGGSGMLPLFDLEEPPKRVLLVDGHHLAYRTFYALSLTTSRGEPVQMVYGFARSLLKALKEDGQAVVVVFDARAPSFRHEAYEAYKAGRAPTPEDFPRQLALVKRLVDLLGLVRLEAPGYEADDVLGTLAKKAEREGMEVCILTGDRDFFQLLSEKVSVLLPDGTLVTPKDVQEKYGVPPERWVDFRALTGDRSDNIPGVAGIGEKTALRLLAEWGSVENLLKNLDKVKPDSLRRKIEAHLEDLRLSLDLARIRTDLPLEVDFKALRRRTPDLEGLRAFLEELELGSLLHEFGLLGGEKPREEAPWPPPEGAFVGFLLSRKEPMWAELLALVAAAEGRVHRATSPVEALADLGEARGFLAKDLAVLALREGVGLDPTDDPLLVAYLLDHANTNPERVARRYGGEFTEDAAERALLSERLFQTLFPRLSEKLLWLYGEVERPLSRVLAHMEARGVRLDVPLLEALSFELEKELERLEGEVFRLAGHPFNLNSRDQLEKVLFDELGLTPVTRTEKTGKRSTSAAALEALRGAHPIVELILQYRELSKLKSTYLDRLPKLVHPRTGRLHTRFNQTATATGRLSSSDPNLQNIPVRTPLGQHIRKAFVAEHGWLLLAADYSQIELRVLAHLSGDENLKRVFREGKDIHTETAAWMFGVDPALVDPKMRRAAKTVNFGVLYGMSAARLSQELGIDYKEAEAFIERYFQSFPKVRAWIERTLEEGRTRGYVETLFGRRRYVPDLTSRVRSVREAAERMAWNMPVQGTAADLMKIAMVKLFPRLKPLGAHLLLQVHDELVLEVPEDRAEEAKSLVKEVMENAYPLDVPLEVEVGVGRDWLEAKQD

SEQ ID NO: 1107 - DNA, 2538 bp, synthetic construct
  misc_feature 1..2538: note = DNA Polymerase Variant
  source 1..2538: mol_type = other DNA
atgcaccatcatcatcatcatggcggtagcggcatgttaccgctgtttgatttggaagaaccaccaaaacgcgtgctgcttgttgacggccatcatctggcgtatcgtaccttctacgcactgagccttacgacctcacgtggtgagcctgtccagatggtgtatgggtttgctcgctccctgctgaaagccctgaaggaagatggtcaagccgtagtagtggttttcgatgcgaaagcaccgtcgtttcgtcacgaagcgtacgaggcctataaagctggccgcgcaccgaccccggaagactttccgcgtcagttagcgctcgtcaaacgcctcgtggatttgctgggattagttcgcttggaagctcctggctacgaggcggacgacgtgctcggtacactggccaagaaagcagaacgtgaaggcatggaggtctgcattcttaccggtgatcgcgatttcttccagctgctgtctgagaaagtgagcgttttgctgcccgatggcacgttagtaaccccgaaagatgtgcaagagaaatatggagttccgccagaacgttgggtggactttcgcgcactgactggtgatcgttcagacaacatcccgggcgttgccgggattggtgaaaagacggcgctgcgcctgctggcagaatggggctcggtggaaaatctgctcaagaaccttgataaagtgaaacctgatagcttacgccgcaagatcgaagcccacctggaagacttgcgtctgagtctggatcttgcccgtattcgcaccgatctgccgttggaagtagactttaaagctctgcgtcgtcgcacacccgatttagaggggttacgcgcgttcctcgaagaactggagctgggctccctgctgcatgaattcggtttgttgggcggggagaaaccgcgtgaagaagcaccatggccgccgcccgaaggtgcctttgtcggctttcttctgtcacgcaaagagccaatgtgggcggaactgttagctcttgcagccgccgcggaagggcgtgttcaccgcgcgacctctcctgtcgaggccctcgctgacctcaaagaagcacgtggtttcttggcgaaagatttagccgtgcttgcattacgcgaaggcgttgcgctcgatccgacggacgacccgcttttggtggcttatttgctcgatcatgcgaataccaacccggaacgtgtcgcccgtcgttacggcggcgagtttactgaagatgcggcagaacgcgcgttgcttagcgaacgcctcttccagacgttatttccacgtctttcggagaaattactctggctctatcaggaagtcgaacgtccattgagtcgcgtgcttgcccatatggaggctcgcggtgtgcgcttagatgttccgttgttagaagcactcagcttcgagttggagaaagaactggaacgtcttgaaggcgaagtctttcgtttagcggggcatcccttcaatctcaactctcgcgaccaattggagaaagtgctctttgatgaattaggtttaacccctgtcacgcgtacagagaagaccggcaaacgttccacttcggcagccgccttggaagcacttcgtggtgctcacccgatcgtcgagttgattttgcagtatcgcgagctcagcaaactcaaatcaacctatcttgataggttacctcgtcttgttcatccacgtacgggtcgtttacacacccgcttcaatcaaacggcaacagccaccgggcgcttgtcgtcgagtgacccgaacctccagaatattccagtgcgcacgccgctgggccaacacattcgtaaagcgtttgttgcggaagaaggttggttattacttgcggccgattactcccagatcgaacttcgtgtattggcgcatctctctggcgacgagaatcttaaacgcgtgtttcgcgaaggcaaggatattcacactgaaaccgcagcctggatgttcggggtggacccagccttagtggaccccaagatgcgtcgtgccgccaagaccgtcaactttggcgtactctatggtatgtcagcagcacgtcttagtcaggaattgggcattgactacaaagaggctgaagcgtttatcgagcgctatttccaatcctttccgaaagttcgcgcgtggattgaacgtacgctcgaagaaggtcgcactcgcggctatgtggaaacgttattcgggcgtcgtcgctacgttccagatcttacgtctcgtgtccgctcagtgcgcgaagctgctgagcgtatggcctggaatatgcctgttcagggaacagcggcggacctcatgaagatcgccatggtgaaattgtttccgcgcttgaaacccttaggagcccaccttcttttacaggtgcatgatgaattggtcttggaagtacccgaggatcgcgcagaagaagccaaagcactcgtgaaagaggttatggaaaacgcgtatccgttagatgttccgttggaggtcgaagtgggtgtaggccgtgattggcttgaagcgaaacaagactaatga

SEQ ID NO: 1108 - protein, 844 aa, synthetic construct
  REGION 1..844: note = DNA Polymerase Variant
MHHHHHHGGSGMLPLFDLEEPPKRVLLVDGHHLAYRTFYALSLTTSRGEPVQMVYGFARSLLKALKEDGQAVVVVFDAKAPSFRHEAYEAYKAGRAPTPEDFPRQLALVKRLVDLLGLVRLEAPGYEADDVLGTLAKKAEREGMEVCILTGDRDFFQLLSEKVSVLLPDGTLVTPKDVQEKYGVPPERWVDFRALTGDRSDNIPGVAGIGEKTALRLLAEWGSVENLLKNLDKVKPDSLRRKIEAHLEDLRLSLDLARIRTDLPLEVDFKALRRRTPDLEGLRAFLEELELGSLLHEFGLLGGEKPREEAPWPPPEGAFVGFLLSRKEPMWAELLALAAAAEGRVHRATSPVEALADLKEARGFLAKDLAVLALREGVALDPTDDPLLVAYLLDHANTNPERVARRYGGEFTEDAAERALLSERLFQTLFPRLSEKLLWLYQEVERPLSRVLAHMEARGVRLDVPLLEALSFELEKELERLEGEVFRLAGHPFNLNSRDQLEKVLFDELGLTPVTRTEKTGKRSTSAAALEALRGAHPIVELILQYRELSKLKSTYLDRLPRLVHPRTGRLHTRFNQTATATGRLSSSDPNLQNIPVRTPLGQHIRKAFVAEEGWLLLAADYSQIELRVLAHLSGDENLKRVFREGKDIHTETAAWMFGVDPALVDPKMRRAAKTVNFGVLYGMSAARLSQELGIDYKEAEAFIERYFQSFPKVRAWIERTLEEGRTRGYVETLFGRRRYVPDLTSRVRSVREAAERMAWNMPVQGTAADLMKIAMVKLFPRLKPLGAHLLLQVHDELVLEVPEDRAEEAKALVKEVMENAYPLDVPLEVEVGVGRDWLEAKQD

SEQ ID NO: 1109 - DNA, 2538 bp, synthetic construct
  misc_feature 1..2538: note = DNA Polymerase Variant
  source 1..2538: mol_type = other DNA
atgcaccatcatcatcatcatggcggtagcggcatgttaccgctgtttgatttggaagaaccaccaaaacgcgtgctgcttgttgacggccatcatctggcgtatcgtaccttctacgcactgagccttacgacctcacgtggtgagcctgtccagatggtgtatgggtttgctcgctccctgctgaaagccctgaaggaagatggtcaagccgtagtagtggttttcgatgcgaaagcaccgtcgtttcgtcacgaagcgtacgaggcctataaagctggccgcgcaccgaccccggaagactttccgcgtcagttagcgctcgtcaaacgcctcgtggatttgctgggattagttcgcttggaagctcctggctacgaggcggacgacgtgctcggtacactggccaagaaagcagaacgtgaaggcatggaggtctgcattcttaccggtgatcgcgatttcttccagctgctgtctgagaaagtgagcgttttgctgcccgatggcacgttagtaaccccgaaagatgtgcaagagaaatatggagttccgccagaacgttgggtggactttcgcgcactgactggtgatcgttcagacaacatcccgggcgttgccgggattggtgaaaagacggcgctgcgcctgctggcagaatggggctcggtggaaaatctgctcaagaaccttgatcgtgtgaaacctgatagcttacgccgcaagatcgaagcccacctggaagacttgcgtctgagtctggatcttgcccgtattcgcaccgatctgccgttggaagtagactttaaagctctgcgtcgtcgcacacccgatttagaggggttacgcgcgttcctcgaagaactggagctgggctccctgctgcatgaattcggtttgttgggcggagagaaaccgcgtgaagaagcaccatggccgccgcccgaaggtgcctttgtcggctttcttctgtcacgcaaagagccaatgtgggcggaactgttagctcttgcagccgccgcggaagggcgtgttcaccgcgcgacctctcctgtcgaggccctcgctgacctcaaagaagcacgtggtttcttggcgaaagatttagcccttcttgcattacgcgaaggcgttgcgctcgatccgacggacgacccgcttttggtggcttatttgctcgatcatgcgaataccaacccggaacgtgtcgcccgtcgttacggcggcgagtttactgaagatgcggcagaacgcgcgttgcttagcgaacgcctcttccagacgttatttccacgtctttcggagaaattactctggctctatcaggaagtcgaacgtccattgagtcgcgtgcttgcccatatggaggctcgcggtgtgcgcttagatgttccgttgttagaagcactcagcttcgagttggagaaagaactggaacgtcttgaaggcgaagtctttcgtttagcggggcatcccttcaatctcaactctcgcgaccaattggagaaagtgctctttgatgaattaggtttaacccctgtcacgcgtacagagaagaccggcaaacgttccacttcggcagccgccttggaagcacttcgtggtgctcacccgatcgtcgagttgattttgcagtatcgcgagctcagcaaactcaaatcaacctatcttgataggttacctcgtcttgttcatccacgtacgggtcgtttacacacccgcttcaatcaaacggcaacagccaccgggcgcttgtcgtcgagtgacccgaacctccagaatattccagtgcgcacgccgctgggccaacacattcgtaaagcgtttgttgcggaagaaggttggttattacttgcggccgattactcccagatcgaacttcgtgtattggcgcatctctctggcgacgagaatcttaaacgcgtgtttcgcgaaggcaaggatattcacactgaaaccgcagcctggatgttcggggtggacccagccttagtggaccccaagatgcgtcgtgccgccaagaccgtcaactttggcgtactctatggtatgtcagcagcacgtcttagtcaggaattgggcattgactacaaagaagctgaagcgtttatcgagcgctatttccaatcctttccgaaagttcgcgcgtggattgaacgtacgctcgaagaaggtcgcactcgcggctatgtggaaacgttattcgggcgtcgtcgctacgttccagatcttacgtctcgtgtccgctcagtgcgcgaagctgctgagcgtatggcctggaatatgcctgttcagggaacagcggcggacctcatgaagatcgccatggtgaaattgtttccgcgcttgaaacccttaggagcccaccttcttttacaggtgcatgatgaattggtcttggaagtacccgaggatcgcgcagaagaagccaaagcactcgtgaaagaggttatggaaaacgcgtatccgttagatgttccgttggaggtcgaagtgggtgtaggccgtgattggcttgaagcgaaacaagactaatga

SEQ ID NO: 1110 - protein, 844 aa, synthetic construct
  REGION 1..844: note = DNA Polymerase Variant
MHHHHHHGGSGMLPLFDLEEPPKRVLLVDGHHLAYRTFYALSLTTSRGEPVQMVYGFARSLLKALKEDGQAVVVVFDAKAPSFRHEAYEAYKAGRAPTPEDFPRQLALVKRLVDLLGLVRLEAPGYEADDVLGTLAKKAEREGMEVCILTGDRDFFQLLSEKVSVLLPDGTLVTPKDVQEKYGVPPERWVDFRALTGDRSDNIPGVAGIGEKTALRLLAEWGSVENLLKNLDRVKPDSLRRKIEAHLEDLRLSLDLARIRTDLPLEVDFKALRRRTPDLEGLRAFLEELELGSLLHEFGLLGGEKPREEAPWPPPEGAFVGFLLSRKEPMWAELLALAAAAEGRVHRATSPVEALADLKEARGFLAKDLALLALREGVALDPTDDPLLVAYLLDHANTNPERVARRYGGEFTEDAAERALLSERLFQTLFPRLSEKLLWLYQEVERPLSRVLAHMEARGVRLDVPLLEALSFELEKELERLEGEVFRLAGHPFNLNSRDQLEKVLFDELGLTPVTRTEKTGKRSTSAAALEALRGAHPIVELILQYRELSKLKSTYLDRLPRLVHPRTGRLHTRFNQTATATGRLSSSDPNLQNIPVRTPLGQHIRKAFVAEEGWLLLAADYSQIELRVLAHLSGDENLKRVFREGKDIHTETAAWMFGVDPALVDPKMRRAAKTVNFGVLYGMSAARLSQELGIDYKEAEAFIERYFQSFPKVRAWIERTLEEGRTRGYVETLFGRRRYVPDLTSRVRSVREAAERMAWNMPVQGTAADLMKIAMVKLFPRLKPLGAHLLLQVHDELVLEVPEDRAEEAKALVKEVMENAYPLDVPLEVEVGVGRDWLEAKQD

SEQ ID NO: 1111 - DNA, 2538 bp, synthetic construct
  misc_feature 1..2538: note = DNA Polymerase Variant
  source 1..2538: mol_type = other DNA
atgcaccatcatcatcatcatggcggtagcggcatgttaccgctgtttgatttggaagaaccaccaaaacgcgtgctgcttgttgacggccatcatctggcgtatcgtaccttctacgcactgagccttacgacctcacgtggtgagcctgtccagatggtgtatgggtttgctcgctccctgctgaaagccctgaaggaagatggtcaagccgtagtagtggttttcgatgcgaaagcaccgtcgtttcgtcacgaagcgtacgaggcctataaagctggccgcgcaccgaccccggaagactttccgcgtcagttagcgctcgtcaaacgcctcgtggatttgctgggattagttcgcttggaagctcctggctacgaggcggacgacgtgctcggtacactggccaagaaagcagaacgtgaaggcatggaggtctgcattcttaccggtgatcgcgatttcttccagctgctgtctgagaaagtgagcgttttgctgcccgatggcacgttagtaaccccgaaagatgtgcaagagaaatatggagttccgccagaacgttgggtggactttcgcgcactgactggtgatcgttcagacaacatcccgggcgttgccgggattggtgaaaagacggcgctgcgcctgctggcagaatggggctcggtggaaaatctgctcaagaaccttgatcgtgtgaaacctgatagcttacgccgcaagatcgaagcccacctggaagacttgcgtctgagtctggatcttgcccgtattcgcaccgatctgccgttggaagtagactttaaagctctgcgtcgtcgcacacccgatttagaggggttacgcgcgttcctcgaagaactggagctgggctccctgctgcatgaattcggtttgttgggcggagagaaaccgcgtgaagaagcaccatggccgccgcccgaaggtgcctttgtcggctttcttctgtcacgcaaagagccaatgtgggcggaactgttagctcttgcagccgccgcggaagggcgtgttcaccgcgcgacctctcctgtcgaggccctcgctgacctcaaagaagcacgtggtttcttggcgaaagatttagccgtgcttgcattacgctcgggcgttgcgctcgatccgacggacgacccgcttttggtggcttatttgctcgatcatgcgaataccaacccggaacgtgtcgcccgtcgttacggcggcgagtttactgaagatgcggcagaacgcgcgttgcttagcgaacgcctcttccagacgttatttccacgtctttcggagaaattactctggctctatcaggaagtcgaacgtccattgagtcgcgtgcttgcccatatggaggctcgcggtgtgcgcttagatgttccgttgttagaagcactcagcttcgagttggagaaagaactggaacgtcttgaaggcgaagtctttcgtttagcggggcatcccttcaatctcaactctcgcgaccaattggagaaagtgctctttgatgaattaggtttaacccctgtcacgcgtacagagaagaccggcaaacgttccacttcggcagccgccttggaagcacttcgtggtgctcacccgatcgtcgagttgattttgcagtatcgcgagctcagcaaactcaaatcaacctatcttgataggttacctcgtcttgttcatccacgtacgggtcgtttacacacccgcttcaatcaaacggcaacagccaccgggcgcttgtcgtcgagtgacccgaacctccagaatattccagtgcgcacgccgctgggccaacacattcgtaaagcgtttgttgcggaagaaggttggttattacttgcggccgattactcccagatcgaacttcgtgtattggcgcatctctctggcgacgagaatcttaaacgcgtgtttcgcgaaggcaaggatattcacactgaaaccgcagcctggatgttcggggtggacccagccttagtggaccccaagatgcgtcgtgccgccaagaccgtcaactttggcgtactctatggtatgtcagcagcacgtcttagtcaggaattgggcattgactacaaagaagctgaagcgtttatcgagcgctatttccaatcctttccgaaagttcgcgcgtggattgaacgtacgctcgaagaaggtcgcactcgcggctatgtggaaacgttattcgggcgtcgtcgctacgttccagatcttacgtctcgtgtccgctcagtgcgcgaagctgctgagcgtatggcctggaatatgcctgttcagggaacagcggcggacctcatgaagatcgccatggtgaaattgtttccgcgcttgaaacccttaggagcccaccttcttttacaggtgcatgatgaattggtcttggaagtacccgaggatcgcgcagaagaagccaaagcactcgtgaaagaggttatggaaaacgcgtatccgttagatgttccgttggaggtcgaagtgggtgtaggccgtgattggcttgaagcgaaacaagactaatga

SEQ ID NO: 1112 - protein, 844 aa, synthetic construct
  REGION 1..844: note = DNA Polymerase Variant
MHHHHHHGGSGMLPLFDLEEPPKRVLLVDGHHLAYRTFYALSLTTSRGEPVQMVYGFARSLLKALKEDGQAVVVVFDAKAPSFRHEAYEAYKAGRAPTPEDFPRQLALVKRLVDLLGLVRLEAPGYEADDVLGTLAKKAEREGMEVCILTGDRDFFQLLSEKVSVLLPDGTLVTPKDVQEKYGVPPERWVDFRALTGDRSDNIPGVAGIGEKTALRLLAEWGSVENLLKNLDRVKPDSLRRKIEAHLEDLRLSLDLARIRTDLPLEVDFKALRRRTPDLEGLRAFLEELELGSLLHEFGLLGGEKPREEAPWPPPEGAFVGFLLSRKEPMWAELLALAAAAEGRVHRATSPVEALADLKEARGFLAKDLAVLALRSGVALDPTDDPLLVAYLLDHANTNPERVARRYGGEFTEDAAERALLSERLFQTLFPRLSEKLLWLYQEVERPLSRVLAHMEARGVRLDVPLLEALSFELEKELERLEGEVFRLAGHPFNLNSRDQLEKVLFDELGLTPVTRTEKTGKRSTSAAALEALRGAHPIVELILQYRELSKLKSTYLDRLPRLVHPRTGRLHTRFNQTATATGRLSSSDPNLQNIPVRTPLGQHIRKAFVAEEGWLLLAADYSQIELRVLAHLSGDENLKRVFREGKDIHTETAAWMFGVDPALVDPKMRRAAKTVNFGVLYGMSAARLSQELGIDYKEAEAFIERYFQSFPKVRAWIERTLEEGRTRGYVETLFGRRRYVPDLTSRVRSVREAAERMAWNMPVQGTAADLMKIAMVKLFPRLKPLGAHLLLQVHDELVLEVPEDRAEEAKALVKEVMENAYPLDVPLEVEVGVGRDWLEAKQD

SEQ ID NO: 1113 - DNA, 2538 bp, synthetic construct
  misc_feature 1..2538: note = DNA Polymerase Variant
  source 1..2538: mol_type = other DNA
atgcaccatcatcatcatcatggcggtagcggcatgttaccgctgtttgatttggaagaaccaccaaaacgcgtgctgcttgttgacggccatcatctggcgtatcgtaccttctacgcactgagccttacgacctcacgtggtgagcctgtccagatggtgtatgggtttgctcgctccctgctgaaagccctgaaggaagatggtcaagccgtagtagtggttttcgatgcgaaagcaccgtcgtttcgtcacgaagcgtacgaggcctataaagctggccgcgcaccgaccccggaagactttccgcgtcagttagcgctcgtcaaacgcctcgtggatttgctgggattagttcgcttggaagctcctggctacgaggcggacgacgtgctcggtacactggccaagaaagcagaacgtgaaggcatggaggtctgcattcttaccggtgatcgcgatttcttccagctgctgtctgagaaagtgagcgttttgctgcccgatggcacgttagtaaccccgaaagatgtgcaagagaaatatggagttccgccagaacgttgggtggactttcgcgcactgactggtgatcgttcagacaacatcccgggcgttgccgggattggtgaaaagacggcgctgcgcctgctggcagaatggggctcggtggaaaatctgctcaagaaccttgatcgtgtgaaacctgatagcttacgccgcaagatcgaagcccacctggaagacttgcgtctgagtctggatcttgcacgtattcgcaccgatctgccgttggaagtagactttaaagctctgcgtcgtcgcacacccgatttagaggggttacgcgcgttcctcgaagaactggagctgggctccctgctgcatgaattcggtttgttgggcggagagaaaccgcgtgaagaagcaccatggccgccgcccgggggtgcctttgtcggctttcttctgtcacgcaaagagccaatgtgggcggaactgttagctcttgcagccgccgcggaagggcgtgttcaccgcgcgacctctcctgtcgaggccctcgctgacctcaaagaagcacgtggtttcttggcgaaagatttagccgtgcttgcattacgcgaaggcgttgcgctcgatccgacggacgacccgcttttggtggcttatttgctcgatcatgcgaataccaacccggaacgtgtcgcccgtcgttacggcggcgagtttactgaagatgcggcagaacgcgcgttgcttagcgaacgcctcttccagacgttatttccacgtctttcggagaaattactctggctctatcaggaagtcgaacgtccattgagtcgcgtgcttgcccatatggaggctcgcggtgtgcgcttagatgttccgttgttagaagcactcagcttcgagctggcaaaagaactggaacgtcttgaaggcgaagtctttcgtttagcggggcatcccttcaatctcaactctcgcgaccaattggagaaagtgctctttgatgaattaggtttaacccctgtcacgcgtacagagaagaccggcaaacgttccacttcggcagccgccttggaagcacttcgtggtgcgcacccgatcgtcgagttgattttgcagtatcgcgagctcagcaaactcaaatcaacctatcttgataggttacctaagcttgttcatccacgtacgggtcgtttacacacccgcttcaatcaaacggcaacagccaccgggcgcttgtcgtcgagtgacccgaacctccagaatattccagtgcgcacgccgctgggccaacacattcgtaaagcgtttgttgcggaagaaggttggttattacttgcggccgattactcccagatcgaacttcgtgtattggcgcatctctctggcgacgagaatcttaaacgcgtgtttcgcgaaggcaaggatattcacactgaaaccgcagcctggatgttcggggtggactcggccttagtggaccccaagatgcgtcgtgccgccaagaccgtcaactttggcgtactctatggtatgtcagcagcacgtcttagtcaggaattgggcattgactacaaagaagctgaagcgtttatcgagcgctatttccaatcctttccgaaagttcgcgcgtggattgaacgtacgctcgaagaaggtcgcactcgcggctatgtggaaacgttattcgggcgtcgtcgctacgttccagatcttacgtctcgtgtccgctcagtgcgcgaagctgctgagcgtatggcctggaatatgcctgttcagggaacagcggcggacctcatgaagatcgccatggtgaaattgtttccgcgcttgaaacccttaggagcccaccttcttttccaggtgcatgatgaattggtcttggaagtacccgaggatcgcgcagaagaagccaaagcactcgtgaaagaggttatggaaaacgcgtatccgttagatgttccgttggaggtcgaagtgggtgtaggccgtgattggcttgaagcgaaacaagactaatga

SEQ ID NO: 1114 - protein, 844 aa, synthetic construct
  REGION 1..844: note = DNA Polymerase Variant
MHHHHHHGGSGMLPLFDLEEPPKRVLLVDGHHLAYRTFYALSLTTSRGEPVQMVYGFARSLLKALKEDGQAVVVVFDAKAPSFRHEAYEAYKAGRAPTPEDFPRQLALVKRLVDLLGLVRLEAPGYEADDVLGTLAKKAEREGMEVCILTGDRDFFQLLSEKVSVLLPDGTLVTPKDVQEKYGVPPERWVDFRALTGDRSDNIPGVAGIGEKTALRLLAEWGSVENLLKNLDRVKPDSLRRKIEAHLEDLRLSLDLARIRTDLPLEVDFKALRRRTPDLEGLRAFLEELELGSLLHEFGLLGGEKPREEAPWPPPGGAFVGFLLSRKEPMWAELLALAAAAEGRVHRATSPVEALADLKEARGFLAKDLAVLALREGVALDPTDDPLLVAYLLDHANTNPERVARRYGGEFTEDAAERALLSERLFQTLFPRLSEKLLWLYQEVERPLSRVLAHMEARGVRLDVPLLEALSFELAKELERLEGEVFRLAGHPFNLNSRDQLEKVLFDELGLTPVTRTEKTGKRSTSAAALEALRGAHPIVELILQYRELSKLKSTYLDRLPKLVHPRTGRLHTRFNQTATATGRLSSSDPNLQNIPVRTPLGQHIRKAFVAEEGWLLLAADYSQIELRVLAHLSGDENLKRVFREGKDIHTETAAWMFGVDSALVDPKMRRAAKTVNFGVLYGMSAARLSQELGIDYKEAEAFIERYFQSFPKVRAWIERTLEEGRTRGYVETLFGRRRYVPDLTSRVRSVREAAERMAWNMPVQGTAADLMKIAMVKLFPRLKPLGAHLLFQVHDELVLEVPEDRAEEAKALVKEVMENAYPLDVPLEVEVGVGRDWLEAKQD

SEQ ID NO: 1115 - DNA, 2538 bp, synthetic construct
  misc_feature 1..2538: note = DNA Polymerase Variant
  source 1..2538: mol_type = other DNA
atgcaccatcatcatcatcatggcggtagcggcatgttaccgctgtttgatttggaagaaccaccaaaacgcgtgctgcttgttgacggccatcatctggcgtatcgtaccttctacgcactgagccttacgacctcacgtggtgagcctgtccagatggtgtatgggtttgctcgctccctgctgaaagccctgaaggaagatggtcaagccgtagtagtggttttcgatgcgaaagcaccgtcgtttcgtcacgaagcgtacgaggcctataaagctggccgcgcaccgaccccggaagactttccgcgtcagttagcgctcgtcaaacgcctcgtggatttgctgggattagttcgcttggaagctcctggctacgaggcggacgacgtgctcggtacactggccaagaaagcagaacgtgaaggcatggaggtctgcattcttaccggtgatcgcgatttcttccagctgctgtctgagaaagtgagcgttttgctgcccgatggcacgttagtaaccccgaaagatgtgcaagagaaatatggagttccgccagaacgttgggtggactttcgcgcactgactggtgatcgttcagacaacatcccgggcgttgccgggattggtgaaaagacggcgctgcgcctgctggcagaatggggctcggtggaaaatctgctcaagaaccttgatcgtgtgaaacctgatagcttacgccgcaagatcgaagcccacctggaagacttgcgtctgagtctggatcttgcccgtattcgcaccgatctgccgttggaagtagactttaaagctctgcgtcgtcgcacacccgatttagaggggttacgcgcgttcctcgaagaactggagctgggctccctgctgcatgaattcggtttgttgggcggagagaaaccgcgtgaagaagcaccatggccgccgcccgaaggtgcctttgtcggctttcttctgtcacgcaaagagccaatgtgggcggaactgttagctcttgcagccgccgcggaagggcgtgttcaccgcgcgacctctcctgtcgaggccctcgctgacctcaaagaagcacgtggtttcttggcgaaagatttagccgtgcttgcattacgcgaaggcgttgcgctcgatccgacggacgacccgcttttggtggcttatttgctcgatcatgcgaataccaacccggaacgtgtcgcccgtcgttacggcggcgagtttactgaagatgcggcagaacgcgcgttgcttagcgaacgcctcttccagacgttatttccacgtctttcggagaaattactctggctctatcaggaagtcgaacgtccattgagtcgcgtgcttgcccatatggaggctcgcggtgtgcgcttagatgttccgttgttagaagcactcagcttcgagttggagaaagaactggaacgtcttgaaggcgaagtctttcgtttagcggggcatcccttcaatctcaactctcgcgaccaattggagaaagtgctctttgatgaattaggtttaacccctgtcacgcgtacagagaagaccggcaaacgttccacttcggcagccgccttggaagcacttcgtggtgctcacccgatcgtcgagttgattttgcagtatcgcgagctcagcaaactcaaatcaacctatcttgataggttacctcgtcttgttcatccacgtacgggtcgtttacacacccgcttcaatcaaacggcaacagccaccgggcgcttgtcgtcgagtgacccgaacctccagaatattccagtgcgcacgccgctgggccaacacattcgtaaagcgtttgttgcggaagaaggttggttattacttgcggccgattactcccagatcgaacttcgtgtattggcgcatctctctggcgacgagaatcttaaacgcgtgtttcgcgaaggcaaggatattcacactgaaaccgcagcctggatgttcggggtggacccagccttagtggaccccaagatgcgtcgtgccgccaagaccgtcaactttggcgtactctatggtatgtcagcagcacgtcttagtcaggaattgggcattgactacaaagaagctgaatcgtttatcgagcgctatttccaatcctttccgaaagttcgcgcgtggattgaacgtacgctcgaagaaggtcgcactcgcggctatgtggaaacgttattcgggcgtcgtcgctacgttccagatcttacgtctcgtgtccgctcagtgcgcgaagctgctgagcgtatggcctggaatatgcctgttcagggaacagcggcggacctcatgaagatcgccatggtgaaattgtttccgcgcttgaaacccttaggagcccaccttcttttacaggtgcatgatgaattggtcttggaagtacccgaggatcgcgcagaagaagccaaagcactcgtgaaagaggttatggaaaacgcgtatccgttagatgttccgttggaggtcgaagtgggtgtaggccgtgattggcttgaagcgaaacaagactaatga

SEQ ID NO: 1116 - protein, 844 aa, synthetic construct
  REGION 1..844: note = DNA Polymerase Variant
MHHHHHHGGSGMLPLFDLEEPPKRVLLVDGHHLAYRTFYALSLTTSRGEPVQMVYGFARSLLKALKEDGQAVVVVFDAKAPSFRHEAYEAYKAGRAPTPEDFPRQLALVKRLVDLLGLVRLEAPGYEADDVLGTLAKKAEREGMEVCILTGDRDFFQLLSEKVSVLLPDGTLVTPKDVQEKYGVPPERWVDFRALTGDRSDNIPGVAGIGEKTALRLLAEWGSVENLLKNLDRVKPDSLRRKIEAHLEDLRLSLDLARIRTDLPLEVDFKALRRRTPDLEGLRAFLEELELGSLLHEFGLLGGEKPREEAPWPPPEGAFVGFLLSRKEPMWAELLALAAAAEGRVHRATSPVEALADLKEARGFLAKDLAVLALREGVALDPTDDPLLVAYLLDHANTNPERVARRYGGEFTEDAAERALLSERLFQTLFPRLSEKLLWLYQEVERPLSRVLAHMEARGVRLDVPLLEALSFELEKELERLEGEVFRLAGHPFNLNSRDQLEKVLFDELGLTPVTRTEKTGKRSTSAAALEALRGAHPIVELILQYRELSKLKSTYLDRLPRLVHPRTGRLHTRFNQTATATGRLSSSDPNLQNIPVRTPLGQHIRKAFVAEEGWLLLAADYSQIELRVLAHLSGDENLKRVFREGKDIHTETAAWMFGVDPALVDPKMRRAAKTVNFGVLYGMSAARLSQELGIDYKEAESFIERYFQSFPKVRAWIERTLEEGRTRGYVETLFGRRRYVPDLTSRVRSVREAAERMAWNMPVQGTAADLMKIAMVKLFPRLKPLGAHLLLQVHDELVLEVPEDRAEEAKALVKEVMENAYPLDVPLEVEVGVGRDWLEAKQD

SEQ ID NO: 1117 - DNA, 2538 bp, synthetic construct
  misc_feature 1..2538: note = DNA Polymerase Variant
  source 1..2538: mol_type = other DNA
atgcaccatcatcatcatcatggcggtagcggcatgttaccgctgtttgatttggaagaaccaccaaaacgcgtgctgcttgttgacggccatcatctggcgtatcgtaccttctacgcactgagccttacgacctcacgtggtgagcctgtccagatggtgtatgggtttgctcgctccctgctgaaagccctgaaggaagatggtcaagccgtagtagtggttttcgatgcgcgtgcaccgtcgtttcgtcacgaagcgtacgaggcctataaagctggccgcgcaccgaccccggaagactttccgcgtcagttagcgctcgtcaaacgcctcgtggatttgctgggattagttcgcttggaagctcctggctacgaggcggacgacgtgctcggtacactggccaagaaagcagaacgtgaaggcatggaggtctgcattcttaccggtgatcgcgatttcttccagctgctgtctgagaaagtgagcgttttgctgcccgatggcacgttagtaaccccgaaagatgtgcaagagaaatatggagttccgccagaacgttgggtggactttcgcgcactgactggtgatcgttcagacaacatcccgggcgttgccgggattggtgaaaagacggcgctgcgcctgctggcagaatggggctcggtggaaaatctgctcaagaaccttgatcgtgtgaaacctgatagcttacgccgcaagatcgaagcccacctggaagacttgcgtctgagtctggatcttgtacgtattcgcaccgatctgccgttggaagtagactttaaagctctgcgtcgtcgcacacccgatttagaggggttacgcgcgttcctcgaagaactggagctgggctccctgctgcatgaattcggtttgttgggcggagagaaaccgcgtgaagaagcaccatggccgccgcccgggggtgcctttgtcggctttcttctgtcacgcaaagagccaatgtgggcggaactgttagctcttgcagccgccgcggaagggcgtgttcaccgcgcgacctctcctgtcgaggccctcgctgacctcaaagaagcacgtggtttcttggcgaaagatttagccgtgcttgcattacgcgaaggcgttgcgctcgatccgacggacgacccgcttttggtggcttatttgctcgatcatgcgaataccaacccggaacgtgtcgcccgtcgttacggcggcgagtttactgaagatgcggcagaacgcgcgttgcttagcgaacgcctcttccagacgttatttccacgtctttcggagaaattactctggctctatcaggaagtcgaacgtccattgagtcgcgtgcttgcccatatggaggctcgcggtgtgcgcttagatgttccgttgttagaagcactcagcttcgagctggaaaaagaactggaacgtcttgaaggcgaagtctttcgtttagcggggcatcccttcaatctcaactctcgcgaccaattggagaaagtgctctttgatgaattaggtttaacccctgtcacgcgtacagagaagaccggcaaacgttccacttcggcagccgccttggaagcacttcgtggtgctcacccgatcgtcgagttgattttgcagtatcgcgagctcagcaaactcaaatcaacctatcttgataggttacctcgtcttgttcatccacgtacgggtcgtttacacacccgcttcaatcaaacggcaacagccaccgggcgcttgtcgtcgagtgacccgaacctccagaatattccagtgcgcacgccgctgggccaacacattcgtaaagcgtttgttgcggaagaaggttggttattacttgcggccgattactcccagatcgaacttcgtgtattggcgcatctctctggcgacgagaatcttaaacgcgtgtttcgcgaaggcaaggatattcacactgaaaccgcagcctggatgttcggggtggacccagccttagtggaccccaagatgcgtcgtgccgccaagaccgtcaactttggcgtactctatggtatgtcagcagcacgtcttagtcaggaattgggcattgactacaaagaagctgaagcgtttatcgagcgctatttccaatcctttccgaaagttcgcgcgtggattgaacgtacgctcgaagaaggtcgcactcgcggctatgtggaaacgttattcgggcgtcgtcgctacgttccagatcttacgtctcgtgtccgctcagtgcgcgaagctgctgagcgtatggcctggaatatgcctgttcagggaacagcggcggacctcatgaagatcgccatggtgaaattgtttccgcgcttgaaacccttaggagcccaccttcttttccaggtgcatgatgaattggtcttggaagtacccgaggatcgcgcagaagaagccaaagcactcgtgaaagaggttatggaaaacgcgtatccgttagatgttccgttggaggtcgaagtgggtgtaggccgtgattggcttgaagcgaaacaagactaatga

SEQ ID NO: 1118 - protein, 844 aa, synthetic construct
  REGION 1..844: note = DNA Polymerase Variant
MHHHHHHGGSGMLPLFDLEEPPKRVLLVDGHHLAYRTFYALSLTTSRGEPVQMVYGFARSLLKALKEDGQAVVVVFDARAPSFRHEAYEAYKAGRAPTPEDFPRQLALVKRLVDLLGLVRLEAPGYEADDVLGTLAKKAEREGMEVCILTGDRDFFQLLSEKVSVLLPDGTLVTPKDVQEKYGVPPERWVDFRALTGDRSDNIPGVAGIGEKTALRLLAEWGSVENLLKNLDRVKPDSLRRKIEAHLEDLRLSLDLVRIRTDLPLEVDFKALRRRTPDLEGLRAFLEELELGSLLHEFGLLGGEKPREEAPWPPPGGAFVGFLLSRKEPMWAELLALAAAAEGRVHRATSPVEALADLKEARGFLAKDLAVLALREGVALDPTDDPLLVAYLLDHANTNPERVARRYGGEFTEDAAERALLSERLFQTLFPRLSEKLLWLYQEVERPLSRVLAHMEARGVRLDVPLLEALSFELEKELERLEGEVFRLAGHPFNLNSRDQLEKVLFDELGLTPVTRTEKTGKRSTSAAALEALRGAHPIVELILQYRELSKLKSTYLDRLPRLVHPRTGRLHTRFNQTATATGRLSSSDPNLQNIPVRTPLGQHIRKAFVAEEGWLLLAADYSQIELRVLAHLSGDENLKRVFREGKDIHTETAAWMFGVDPALVDPKMRRAAKTVNFGVLYGMSAARLSQELGIDYKEAEAFIERYFQSFPKVRAWIERTLEEGRTRGYVETLFGRRRYVPDLTSRVRSVREAAERMAWNMPVQGTAADLMKIAMVKLFPRLKPLGAHLLFQVHDELVLEVPEDRAEEAKALVKEVMENAYPLDVPLEVEVGVGRDWLEAKQD

SEQ ID NO: 1119 - DNA, 2538 bp, synthetic construct
  misc_feature 1..2538: note = DNA Polymerase Variant
  source 1..2538: mol_type = other DNA
atgcaccatcatcatcatcatggcggtagcggcatgttaccgctgtttgatttggaagaaccaccaaaacgcgtgctgcttgttgacggccatcatctggcgtatcgtaccttctacgcactgagccttacgacctcacgtggtgagcctgtccagatggtgtatgggtttgctcgctccctgctgaaagccctgaaggaagatggtcaagccgtagtagtggttttcgatgcgaaagcaccgtcgtttcgtcacgaagcgtacgaggcctataaagctggccgcgcaccgaccccggaagactttccgcgtcagttagcgctcgtcaaacgcctcgtggatttgctgggattagttcgcttggaagctcctggctacgaggcggacgacgtgctcggtacactggccaagaaagcagaacgtgaaggcatggaggtctgcattcttaccggtgatcgcgatttcttccagctgctgtctgagaaagtgagcgttttgctgcccgatggcacgttagtaaccccgaaagatgtgcaagagaaatatggagttccgccagaacgttgggtggactttcgcgcactgactggtgatcgttcagacaacatcccgggcgttgccgggattggtgaaaagacggcgctgcgcctgctggcagaatggggctcggtggaaaatctgctcaagaaccttgatcgtgtgaaacctgatagcttacgccgcaagatcgaagcccacctggaagacttgcgtctgagtctggatcttgcccgtattcgcaccgatctgccgttggaagtagactttaaagctctgcgtcgtcgcacacccgatttagaggggttacgcgcgttcctcgaagaactggagctgggctccctgctgcatgaattcggtttgttgggcggagagaaaccgcgtgaagaagcaccatggccgccgcccgaaggtgcctttgtcggctttcttctgtcacgcaaagagccaatgtgggcggaactgttagctcttgcagccgccgcggaagggcgtgttcaccgcgcgacctctcctgtcgaggccctcgctgacctcaaagaagcacgtggtttcttggcgaaagatttagccgtgcttggtttacgcgaaggcgttgcgctcgatccgacggacgacccgcttttggtggcttatttgctcgatcatgcgaataccaacccggaacgtgtcgcccgtcgttacggcggcgagtttactgaagatgcggcagaacgcgcgttgcttagcgaacgcctcttccagacgttatttccacgtctttcggagaaattactctggctctatcaggaagtcgaacgtccattgagtcgcgtgcttgcccatatggaggctcgcggtgtgcgcttagatgttccgttgttagaagcactcagcttcgagttggagaaagaactggaacgtcttgaaggcgaagtctttcgtttagcggggcatcccttcaatctcaactctcgcgaccaattggagaaagtgctctttgatgaattaggtttaacccctgtcacgcgtacagagaagaccggcaaacgttccacttcggcagccgccttggaagcacttcgtggtgctcacccgatcgtcgagttgattttgcagtatcgcgagctcagcaaactcaaatcaacctatcttgataggttacctcgtcttgttcatccacgtacgggtcgtttacacacccgcttcaatcaaacggcaacagccaccgggcgcttgtcgtcgagtgacccgaacctccagaatattccagtgcgcacgccgctgggccaacacattcgtaaagcgtttgttgcggaagaaggttggttattacttgcggccgattactcccagatcgaacttcgtgtattggcgcatctctctggcgacgagaatcttaaacgcgtgtttcgcgaaggcaaggatattcacactgaaaccgcagcctggatgttcggggtggacccagccttagtggaccccaagatgcgtcgtgccgccaagaccgtcaactttggcgtactctatggtatgtcagcagcacgtcttagtcaggaattgggcattgactacaaagaagctgaagcgtttatcgagcgctatttccaatcctttccgaaagttcgcgcgtggattgaacgtacgctcgaagaaggtcgcactcgcggctatgtggaaacgttattcgggcgtcgtcgctacgttccagatcttacgtctcgtgtccgctcagtgcgcgaagctgctgagcgtatggcctggaatatgcctgttcagggaacagcggcggacctcatgaagatcgccatggtgaaattgtttccgcgcttgaaacccttaggagcccaccttcttttacaggtgcatgatgaattggtcttggaagtacccgaggatcgcgcagaagaagccaaagcactcgtgaaagaggttatggaaaacgcgtatccgttagatgttccgttggaggtcgaagtgggtgtaggccgtgattggcttgaagcgaaacaagactaatga

SEQ ID NO: 1120 - protein, 844 aa, synthetic construct
  REGION 1..844: note = DNA Polymerase Variant
MHHHHHHGGSGMLPLFDLEEPPKRVLLVDGHHLAYRTFYALSLTTSRGEPVQMVYGFARSLLKALKEDGQAVVVVFDAKAPSFRHEAYEAYKAGRAPTPEDFPRQLALVKRLVDLLGLVRLEAPGYEADDVLGTLAKKAEREGMEVCILTGDRDFFQLLSEKVSVLLPDGTLVTPKDVQEKYGVPPERWVDFRALTGDRSDNIPGVAGIGEKTALRLLAEWGSVENLLKNLDRVKPDSLRRKIEAHLEDLRLSLDLARIRTDLPLEVDFKALRRRTPDLEGLRAFLEELELGSLLHEFGLLGGEKPREEAPWPPPEGAFVGFLLSRKEPMWAELLALAAAAEGRVHRATSPVEALADLKEARGFLAKDLAVLGLREGVALDPTDDPLLVAYLLDHANTNPERVARRYGGEFTEDAAERALLSERLFQTLFPRLSEKLLWLYQEVERPLSRVLAHMEARGVRLDVPLLEALSFELEKELERLEGEVFRLAGHPFNLNSRDQLEKVLFDELGLTPVTRTEKTGKRSTSAAALEALRGAHPIVELILQYRELSKLKSTYLDRLPRLVHPRTGRLHTRFNQTATATGRLSSSDPNLQNIPVRTPLGQHIRKAFVAEEGWLLLAADYSQIELRVLAHLSGDENLKRVFREGKDIHTETAAWMFGVDPALVDPKMRRAAKTVNFGVLYGMSAARLSQELGIDYKEAEAFIERYFQSFPKVRAWIERTLEEGRTRGYVETLFGRRRYVPDLTSRVRSVREAAERMAWNMPVQGTAADLMKIAMVKLFPRLKPLGAHLLLQVHDELVLEVPEDRAEEAKALVKEVMENAYPLDVPLEVEVGVGRDWLEAKQD

SEQ ID NO: 1121 - DNA, 2538 bp, synthetic construct
  misc_feature 1..2538: note = DNA Polymerase Variant
  source 1..2538: mol_type = other DNA
atgcaccatcatcatcatcatggcggtagcggcatgttaccgctgtttgatttggaagaaccaccaaaacgcgtgctgcttgttgacggccatcatctggcgtatcgtaccttctacgcactgagccttacgacctcacgtggtgagcctgtccagatggtgtatgggtttgctcgctccctgctgaaagccctgaaggaagatggtcaagccgtagtagtggttttcgatgcgaaagcaccgtcgtttcgtcacgaagcgtacgaggcctataaagctggccgcgcaccgaccccggaagactttccgcgtcagttagcgctcgtcaaacgcctcgtggatttgctgggattagttcgcttggaagctcctggctacgaggcggacgacgtgctcggtacactggccaagaaagcagaacgtgaaggcatggaggtctgcattcttaccggtgatcgcgatttcttccagctgctgtctgagaaagtgagcgttttgctgcccgatggcacgttagtaaccccgaaagatgtgcaagagaaatatggagttccgccagaacgttgggtggactttcgcgcactgactggtgatcgttcagacaacatcccgggcgttgccgggattggtgaaaagacggcgctgcgcctgctggcagaatggggctcggtggaaaatctgctcaagaaccttgatcgtgtgaaacctgatagcttacgccgcaagatcgaagcccacctggaagacttgcgtctgagtctggatcttgcccgtattcgcaccgatctgccgttggaagtagactttaaagctctgcgtcgtcgcacacccgatttagaggggttacgcgcgttcctcgaagaactggagctgggctccctgctgcatgaattcggtttgttgggcggagagaaaccgcgtgaagaagcaccatggccgccgcccgaaggtgcctttgtcggctttcttctgtcacgcaaagagccaatgtgggcggaactgttagctcttgcagccgccgcggaagggcgtgttcaccgcgcgacctctcctgtcgaggccctcgctgacctcaaagaagcacgtggtttcttggcgaaagatttagccgtgcttgcattacgcgaaggcgttgcgctcgatccgacggacgacccgcttttggtggcttatttgctcgatcatgcgaataccaacccggaacgtgtcgcccgtcgttacggcggcgagtttactgaagatgcggcagaacgcgcgttgcttagcgaacgcctcttccagacgttatttccacgtctttcggagaaattactctggctctatcaggaagtcgaacgtccattgagtcgcgtgcttgcctggatggaggctcgcggtgtgcgcttagatgttccgttgttagaagcactcagcttcgagttggagaaagaactggaacgtcttgaaggcgaagtctttcgtttagcggggcatcccttcaatctcaactctcgcgaccaattggagaaagtgctctttgatgaattaggtttaacccctgtcacgcgtacagagaagaccggcaaacgttccacttcggcagccgccttggaagcacttcgtggtgctcacccgatcgtcgagttgattttgcagtatcgcgagctcagcaaactcaaatcaacctatcttgataggttacctcgtcttgttcatccacgtacgggtcgtttacacacccgcttcaatcaaacggcaacagccaccgggcgcttgtcgtcgagtgacccgaacctccagaatattccagtgcgcacgccgctgggccaacacattcgtaaagcgtttgttgcggaagaaggttggttattacttgcggccgattactcccagatcgaacttcgtgtattggcgcatctctctggcgacgagaatcttaaacgcgtgtttcgcgaaggcaaggatattcacactgaaaccgcagcctggatgttcggggtggacccagccttagtggaccccaagatgcgtcgtgccgccaagaccgtcaactttggcgtactctatggtatgtcagcagcacgtcttagtcaggaattgggcattgactacaaagaagctgaagcgtttatcgagcgctatttccaatcctttccgaaagttcgcgcgtggattgaacgtacgctcgaagaaggtcgcactcgcggctatgtggaaacgttattcgggcgtcgtcgctacgttccagatcttacgtctcgtgtccgctcagtgcgcgaagctgctgagcgtatggcctggaatatgcctgttcagggaacagcggcggacctcatgaagatcgccatggtgaaattgtttccgcgcttgaaacccttaggagcccaccttcttttacaggtgcatgatgaattggtcttggaagtacccgaggatcgcgcagaagaagccaaagcactcgtgaaagaggttatggaaaacgcgtatccgttagatgttccgttggaggtcgaagtgggtgtaggccgtgattggcttgaagcgaaacaagactaatga

SEQ ID NO: 1122 - protein, 844 aa, synthetic construct
  REGION 1..844: note = DNA Polymerase Variant
MHHHHHHGGSGMLPLFDLEEPPKRVLLVDGHHLAYRTFYALSLTTSRGEPVQMVYGFARSLLKALKEDGQAVVVVFDAKAPSFRHEAYEAYKAGRAPTPEDFPRQLALVKRLVDLLGLVRLEAPGYEADDVLGTLAKKAEREGMEVCILTGDRDFFQLLSEKVSVLLPDGTLVTPKDVQEKYGVPPERWVDFRALTGDRSDNIPGVAGIGEKTALRLLAEWGSVENLLKNLDRVKPDSLRRKIEAHLEDLRLSLDLARIRTDLPLEVDFKALRRRTPDLEGLRAFLEELELGSLLHEFGLLGGEKPREEAPWPPPEGAFVGFLLSRKEPMWAELLALAAAAEGRVHRATSPVEALADLKEARGFLAKDLAVLALREGVALDPTDDPLLVAYLLDHANTNPERVARRYGGEFTEDAAERALLSERLFQTLFPRLSEKLLWLYQEVERPLSRVLAWMEARGVRLDVPLLEALSFELEKELERLEGEVFRLAGHPFNLNSRDQLEKVLFDELGLTPVTRTEKTGKRSTSAAALEALRGAHPIVELILQYRELSKLKSTYLDRLPRLVHPRTGRLHTRFNQTATATGRLSSSDPNLQNIPVRTPLGQHIRKAFVAEEGWLLLAADYSQIELRVLAHLSGDENLKRVFREGKDIHTETAAWMFGVDPALVDPKMRRAAKTVNFGVLYGMSAARLSQELGIDYKEAEAFIERYFQSFPKVRAWIERTLEEGRTRGYVETLFGRRRYVPDLTSRVRSVREAAERMAWNMPVQGTAADLMKIAMVKLFPRLKPLGAHLLLQVHDELVLEVPEDRAEEAKALVKEVMENAYPLDVPLEVEVGVGRDWLEAKQD

SEQ ID NO: 1123 - DNA, 2538 bp, synthetic construct
  misc_feature 1..2538: note = DNA Polymerase Variant
  source 1..2538: mol_type = other DNA
atgcaccatcatcatcatcatggcggtagcggcatgttaccgctgtttgatttggaagaaccaccaaaacgcgtgctgcttgttgacggccatcatctggcgtatcgtaccttctacgcactgagccttacgacctcacgtggtgagcctgtccagatggtgtatgggtttgctcgctccctgctgaaagccctgaaggaagatggtcaagccgtagtagtggttttcgatgcgaaagcaccgtcgtttcgtcacgaagcgtacgaggcctataaagctggccgcgcaccgaccccggaagactttccgcgtcagttagcgctcgtcaaacgcctcgtggatttgctgggattagttcgcttggaagctcctggctacgaggcggacgacgtgctcggtacactggccaagaaagcagaacgtgaaggcatggaggtctgcattcttaccggtgatcgcgatttcttccagctgctgtctgagaaagtgagcgttttgctgcccgatggcacgttagtaaccccgaaagatgtgcaagagaaatatggagttccgccagaacgttgggtggactttcgcgcactgactggtgatcgttcagacaacatcccgggcgttgccgggattggtgaaaagacggcgctgcgcctgctggcagaatggggctcggtggaaaatctgctcaagaaccttgatcgtgtgaaacctgatagcttacgccgcaagatcgaagcccacctggaagacttgcgtctgagtctggatcttgcccgtattcgcaccgatctgccgttggaagtagactttaaagctctgcgtcgtcgcacacccgatttagaggggttacgcgcgttcctcgaagaactggagctgggctccctgctgcatgaattcggtttgttgggcggagagaaaccgcgtgaagaagcaccatggccgccgcccgaaggtgcctttgtcggctttcttctgtcacgcaaagagccaatgtgggcggaactgttagctcttgcagccgccgcggaagggcgtgttcaccgcgcgacctctcctgtcgaggccctcgctgacctcaaagaagcacgtggtttcttggcgaaagatttagccgtgcttgcattacgcgaaggcgttgcgctcgatccgacggacgacccgcttttggtggcttatttgctcgatcatgcgaataccaacccggaacgtgtcgcccgtcgttacggcggcgagtttactgaagatgcggcagaacgcgcgttgcttagcgaacgcctcttccagacgttatttccacgtctttcggagaaattactctggctctatcaggaagtcgaacgtccattgagtcgcgtgcttgcccatatggaggctcgcggtgtgcgcttagatgttccgttgttagaagcactcagcttcgagttggagaaagaactggaacgtcttgaaggcgaagtctttcgtttagcggggcatcccttcaatctcaactctcgcgaccaattggagaaagtgctctttgatgaattaggtttaacccctgtcacgcgtacagagaagaccggcaaacgttccacttcggcagccgccttggaagcacttcgtggtgctcacccgatcgtcgagttgattttgcagtatcgcgagctcagcaaactcaaatcaacctatcttgataggttacctcgtcttgttcatccacgtacgggtcgtttacacacccgcttcaatcaaacggcaacagccaccgggcgcttgtcgtcgagtgacccgaacctccagaatattccagtgcgcacgccgctgggccaacacattcgtaaagcgtttgttgcggaagaaggttggttattacttgcggccgattactcccagatcgaacttcgtgtattggcgcatctctctggcgacgagaatcttaaacgcgtgtttcgcgaaggcaaggatattcacactgaaaccgcagcctggatgttcggggtggacccagccttagtggaccccaagatgcgtcgtgccgccaagaccgtcaactttggcgtactctatggtatgtcagcagcacgtcttagtcaggaattgggcattgactacaaagaagctgaagcgtttatcgagcgctatttccaatcctttccgaaagttcgcgcgtggattgaacgtacgctcgaagaaggtcgcacttcgggctatgtggaaacgttattcgggcgtcgtcgctacgttccagatcttacgtctcgtgtccgctcagtgcgcgaagctgctgagcgtatggcctggaatatgcctgttcagggaacagcggcggacctcatgaagatcgccatggtgaaattgtttccgcgcttgaaacccttaggagcccaccttcttttacaggtgcatgatgaattggtcttggaagtacccgaggatcgcgcagaagaagccaaagcactcgtgaaagaggttatggaaaacgcgtatccgttagatgttccgttggaggtcgaagtgggtgtaggccgtgattggcttgaagcgaaacaagactaatga

SEQ ID NO: 1124 - protein, 844 aa, synthetic construct
  REGION 1..844: note = DNA Polymerase Variant
MHHHHHHGGSGMLPLFDLEEPPKRVLLVDGHHLAYRTFYALSLTTSRGEPVQMVYGFARSLLKALKEDGQAVVVVFDAKAPSFRHEAYEAYKAGRAPTPEDFPRQLALVKRLVDLLGLVRLEAPGYEADDVLGTLAKKAEREGMEVCILTGDRDFFQLLSEKVSVLLPDGTLVTPKDVQEKYGVPPERWVDFRALTGDRSDNIPGVAGIGEKTALRLLAEWGSVENLLKNLDRVKPDSLRRKIEAHLEDLRLSLDLARIRTDLPLEVDFKALRRRTPDLEGLRAFLEELELGSLLHEFGLLGGEKPREEAPWPPPEGAFVGFLLSRKEPMWAELLALAAAAEGRVHRATSPVEALADLKEARGFLAKDLAVLALREGVALDPTDDPLLVAYLLDHANTNPERVARRYGGEFTEDAAERALLSERLFQTLFPRLSEKLLWLYQEVERPLSRVLAHMEARGVRLDVPLLEALSFELEKELERLEGEVFRLAGHPFNLNSRDQLEKVLFDELGLTPVTRTEKTGKRSTSAAALEALRGAHPIVELILQYRELSKLKSTYLDRLPRLVHPRTGRLHTRFNQTATATGRLSSSDPNLQNIPVRTPLGQHIRKAFVAEEGWLLLAADYSQIELRVLAHLSGDENLKRVFREGKDIHTETAAWMFGVDPALVDPKMRRAAKTVNFGVLYGMSAARLSQELGIDYKEAEAFIERYFQSFPKVRAWIERTLEEGRTSGYVETLFGRRRYVPDLTSRVRSVREAAERMAWNMPVQGTAADLMKIAMVKLFPRLKPLGAHLLLQVHDELVLEVPEDRAEEAKALVKEVMENAYPLDVPLEVEVGVGRDWLEAKQD

SEQ ID NO: 1125 - DNA, 2538 bp, synthetic construct
  misc_feature 1..2538: note = DNA Polymerase Variant
  source 1..2538: mol_type = other DNA
atgcaccatcatcatcatcatggcggtagcggcatgttaccgctgtttgatttggaagaaccaccaaaacgcgtgctgcttgttgacggccatcatctggcgtatcgtaccttctacgcactgagccttacgacctcacgtggtgagcctgtccagatggtgtatgggtttgctcgctccctgctgaaagccctgaaggaagatggtcaagccgtagtagtggttttcgatgcgaaagcaccgtcgtttcgtcacgaagcgtacgaggcctataaagctggccgcgcaccgaccccggaagactttccgcgtcagttagcgctcgtcaaacgcctcgtggatttgctgggattagttcgcttggaagctcctggctacgaggcggacgacgtgctcggtacactggccaagaaagcagaacgtgaaggcatggaggtctgcattcttaccggtgatcgcgatttcttccagctgctgtctgagaaagtgagcgttttgctgcccgatggcacgttagtaaccccgaaagatgtgcaagagaaatatggagttccgccagaacgttgggtggactttcgcgcactgactggtgatcgttcagacaacatcccgggcgttgccgggattggtgaaaagacggcgctgcgcctgctggcagaatggggctcggtggaaaatctgctcaagaaccttgatcgtgtgaaacctgatagcttacgccgcaagatcgaagcccacctggaagacttgcgtctgagtctggatcttgcccgtattcgcaccgatctgccgttggaagtagactttaaagctctgcgtcgtcgcacacccgatttagaggggttacgcgcgttcctcgaagaactggagctgggctccctgctgcatgaattcggtttgttgggcggagagaaaccgcgtgaagaagcaccatggccgccgcccgaaggtgcctttgtcggctttcttctgtcacgcaaagagccaatgtgggcggaactgttagctcttgcagccgccgcggaagggcgtgttcaccgcgcgacctctcctgtcgaggccctcgctgacctcaaagaagcacgtggtttcttggcgaaagatttagccgtgcttgcattacgcgaaggcgttgcgctcgatccgacggacgacccgcttttggtggcttatttgctcgatcatgcgaataccaacccggaacgtgtcgcccgtcgttacggcggcgagtttactgaagatgcggcagaacgcgcgttgcttagcgaacgcctcttccagacgttatttccacgtctttcggagaaattactctggctctatcaggaagtcgaacgttggttgagtcgcgtgcttgcccatatggaggctcgcggtgtgcgcttagatgttccgttgttagaagcactcagcttcgagttggagaaagaactggaacgtcttgaaggcgaagtctttcgtttagcggggcatcccttcaatctcaactctcgcgaccaattggagaaagtgctctttgatgaattaggtttaacccctgtcacgcgtacagagaagaccggcaaacgttccacttcggcagccgccttggaagcacttcgtggtgctcacccgatcgtcgagttgattttgcagtatcgcgagctcagcaaactcaaatcaacctatcttgataggttacctcgtcttgttcatccacgtacgggtcgtttacacacccgcttcaatcaaacggcaacagccaccgggcgcttgtcgtcgagtgacccgaacctccagaatattccagtgcgcacgccgctgggccaacacattcgtaaagcgtttgttgcggaagaaggttggttattacttgcggccgattactcccagatcgaacttcgtgtattggcgcatctctctggcgacgagaatcttaaacgcgtgtttcgcgaaggcaaggatattcacactgaaaccgcagcctggatgttcggggtggacccagccttagtggaccccaagatgcgtcgtgccgccaagaccgtcaactttggcgtactctatggtatgtcagcagcacgtcttagtcaggaattgggcattgactacaaagaagctgaagcgtttatcgagcgctatttccaatcctttccgaaagttcgcgcgtggattgaacgtacgctcgaagaaggtcgcactcgcggctatgtggaaacgttattcgggcgtcgtcgctacgttccagatcttacgtctcgtgtccgctcagtgcgcgaagctgctgagcgtatggcctggaatatgcctgttcagggaacagcggcggacctcatgaagatcgccatggtgaaattgtttccgcgcttgaaacccttaggagcccaccttcttttacaggtgcatgatgaattggtcttggaagtacccgaggatcgcgcagaagaagccaaagcactcgtgaaagaggttatggaaaacgcgtatccgttagatgttccgttggaggtcgaagtgggtgtaggccgtgattggcttgaagcgaaacaagactaatga

SEQ ID NO: 1126 - protein, 844 aa, synthetic construct
  REGION 1..844: note = DNA Polymerase Variant
MHHHHHHGGSGMLPLFDLEEPPKRVLLVDGHHLAYRTFYALSLTTSRGEPVQMVYGFARSLLKALKEDGQAVVVVFDAKAPSFRHEAYEAYKAGRAPTPEDFPRQLALVKRLVDLLGLVRLEAPGYEADDVLGTLAKKAEREGMEVCILTGDRDFFQLLSEKVSVLLPDGTLVTPKDVQEKYGVPPERWVDFRALTGDRSDNIPGVAGIGEKTALRLLAEWGSVENLLKNLDRVKPDSLRRKIEAHLEDLRLSLDLARIRTDLPLEVDFKALRRRTPDLEGLRAFLEELELGSLLHEFGLLGGEKPREEAPWPPPEGAFVGFLLSRKEPMWAELLALAAAAEGRVHRATSPVEALADLKEARGFLAKDLAVLALREGVALDPTDDPLLVAYLLDHANTNPERVARRYGGEFTEDAAERALLSERLFQTLFPRLSEKLLWLYQEVERWLSRVLAHMEARGVRLDVPLLEALSFELEKELERLEGEVFRLAGHPFNLNSRDQLEKVLFDELGLTPVTRTEKTGKRSTSAAALEALRGAHPIVELILQYRELSKLKSTYLDRLPRLVHPRTGRLHTRFNQTATATGRLSSSDPNLQNIPVRTPLGQHIRKAFVAEEGWLLLAADYSQIELRVLAHLSGDENLKRVFREGKDIHTETAAWMFGVDPALVDPKMRRAAKTVNFGVLYGMSAARLSQELGIDYKEAEAFIERYFQSFPKVRAWIERTLEEGRTRGYVETLFGRRRYVPDLTSRVRSVREAAERMAWNMPVQGTAADLMKIAMVKLFPRLKPLGAHLLLQVHDELVLEVPEDRAEEAKALVKEVMENAYPLDVPLEVEVGVGRDWLEAKQD

SEQ ID NO: 1127 - DNA, 2538 bp, synthetic construct
  misc_feature 1..2538: note = DNA Polymerase Variant
  source 1..2538: mol_type = other DNA
atgcaccatcatcatcatcatggcggtagcggcatgttaccgctgtttgatttggaagaaccaccaaaacgcgtgctgcttgttgacggccatcatctggcgtatcgtaccttctacgcactgagccttacgacctcacgtggtgagcctgtccagatggtgtatgggtttgctcgctccctgctgaaagccctgaaggaagatggtcaagccgtagtagtggttttcgatgcgcgcgcaccgtcgtttcgtcacgaagcgtacgaggcctataaagctggccgcgcaccgaccccggaagactttccgcgtcagttagcgctcgtcaaacgcctcgtggatttgctgggattagttcgcttggaagctcctggctacgaggcggacgacgtgctcggtacactggccaagaaagcagaacgtgaaggcatggaggtctgcattcttaccggtgatcgcgatttcttccagctgctgtctgagaaagtgagcgttttgctgcccgatggcacgttagtaaccccgaaagatgtgcaagagaaatatggagttccgccagaacgttgggtggactttcgcgcactgactggtgatcgttcagacaacatcccgggcgttgccgggattggtgaaaagacggcgctgcgcctgctggcagaatggggctcggtggaaaatctgctcaagaaccttgataaagtgaaacctgatagcttacgccgcaagatcgaagcccacctggaagacttgcgtctgagtctggatcttgcccgtattcgcaccgatctgccgttggaagtagactttaaagctctgcgtcgtcgcacacccgatttagaggggttacgcgcgttcctcgaagaactggagctgggctccctgctgcatgaattcggtttgttgggcggggagaaaccgcgtgaagaagcaccatggccgccgcccgaaggtgcctttgtcggctttcttctgtcacgcaaagagccaatgtgggcggaactgttagctcttgtagccgccgcggaagggcgtgttcaccgcgcgacctctcctgtcgaggccctcgctgacctcaaagaagcacgtggtttcttggcgaaagatttagccgtgcttgcattacgcgaaggcgttgcgctcgatccgacggacgacccgcttttggtggcttatttgctcgatcatgcgaataccaacccggaacgtgtcgcccgtcgttacggcggcgagtttactgaagatgcggcagaacgcgcgttgcttagcgaacgcctcttccagacgttatttccacgtctttcggagaaattactctggctctatcaggaagtcgaacgtccattgagtcgcgtgcttgcccatatggaggctcgcggtgtgcgcttagatgttccgttgttagaagcactcagcttcgagttggagaaagaactggaacgtcttgaaggcgaagtctttcgtttagcggggcatcccttcaatctcaactctcgcgaccaattggagaaagtgctctttgatgaattaggtttaacccctgtcacgcgtacagagaagaccggcaaacgttccacttcggcagccgccttggaagcacttcgtggtgctcacccgatcgtcgagttgattttgcagtatcgcgagctcagcaaactcaaatcaacctatcttgataggttacctcgtcttgttcatccacgtacgggtcgtttacacacccgcttcaatcaaacggcaacagccaccgggcgcttgtcgtcgagtgacccgaacctccagaatattccagtgcgcacgccgctgggccaacacattcgtaaagcgtttgttgcggaagagggttggttattacttgcggccgattactcccagatcgaacttcgtgtattggcgcatctctctggcgacgagaatcttaaacgcgtgtttcgcgaaggcaaggatattcacactgaaaccgcagcctggatgttcggggtggacccggccttagtggaccccaagatgcgtcgtgccgccaagaccgtcaactttggcgtactctatggtatgtcagcagcacgtcttagtcaggaattgggcattgactacaaagaagctgaagcgtttatcgagcgctatttccaatcctttccgaaagttcgcgcgtggattgaacgtacgctcgaagaaggtcgcactcgcggctatgtggaaacgttattcgggcgtcgtcgctacgttccagatcttacgtctcgtgtccgctcagtgcgcgaagctgctgagcgtatggcctggaatatgcctgttcagggaacagcggcggacctcatgaagatcgccatggtgaaattgtttccgcgcttgaaacccttaggagcccaccttcttttacaggtgcatgatgaattggtcttggaagtacccgaggatcgcgcagaagaagccaaagcactcgtgaaagaggttatggaaaacgcgtatccgttagatgttccgttggaggtcgaagtgggtgtaggccgtgattggcttgaagcgaaacaagactaatga

SEQ ID NO: 1128 - protein, 844 aa, synthetic construct
  REGION 1..844: note = DNA Polymerase Variant
MHHHHHHGGSGMLPLFDLEEPPKRVLLVDGHHLAYRTFYALSLTTSRGEPVQMVYGFARSLLKALKEDGQAVVVVFDARAPSFRHEAYEAYKAGRAPTPEDFPRQLALVKRLVDLLGLVRLEAPGYEADDVLGTLAKKAEREGMEVCILTGDRDFFQLLSEKVSVLLPDGTLVTPKDVQEKYGVPPERWVDFRALTGDRSDNIPGVAGIGEKTALRLLAEWGSVENLLKNLDKVKPDSLRRKIEAHLEDLRLSLDLARIRTDLPLEVDFKALRRRTPDLEGLRAFLEELELGSLLHEFGLLGGEKPREEAPWPPPEGAFVGFLLSRKEPMWAELLALVAAAEGRVHRATSPVEALADLKEARGFLAKDLAVLALREGVALDPTDDPLLVAYLLDHANTNPERVARRYGGEFTEDAAERALLSERLFQTLFPRLSEKLLWLYQEVERPLSRVLAHMEARGVRLDVPLLEALSFELEKELERLEGEVFRLAGHPFNLNSRDQLEKVLFDELGLTPVTRTEKTGKRSTSAAALEALRGAHPIVELILQYRELSKLKSTYLDRLPRLVHPRTGRLHTRFNQTATATGRLSSSDPNLQNIPVRTPLGQHIRKAFVAEEGWLLLAADYSQIELRVLAHLSGDENLKRVFREGKDIHTETAAWMFGVDPALVDPKMRRAAKTVNFGVLYGMSAARLSQELGIDYKEAEAFIERYFQSFPKVRAWIERTLEEGRTRGYVETLFGRRRYVPDLTSRVRSVREAAERMAWNMPVQGTAADLMKIAMVKLFPRLKPLGAHLLLQVHDELVLEVPEDRAEEAKALVKEVMENAYPLDVPLEVEVGVGRDWLEAKQD

SEQ ID NO: 1129 - DNA, 2538 bp, synthetic construct
  misc_feature 1..2538: note = DNA Polymerase Variant
  source 1..2538: mol_type = other DNA
atgcaccatcatcatcatcatggcggtagcggcatgttaccgctgtttgatttggaagaaccaccaaaacgcgtgctgcttgttgacggccatcatctggcgtatcgtaccttctacgcactgagccttacgacctcacgtggtgagcctgtccagatggtgtatgggtttgctcgctccctgctgaaagccctgaaggaagatggtcaagccgtagtagtggttttcgatgcgaaagcaccgtcgtttcgtcacgaagcgtacgaggcctataaagctggccgcgcaccgaccccggaagactttccgcgtcagttagcgctcgtcaaacgcctcgtggatttgctgggattagttcgcttggaagctcctggctacgaggcggacgacgtgctcggtacactggccaagaaagcagaacgtgaaggcatggaggtctgcattcttaccggtgatcgcgatttcttccagctgctgtctgagaaagtgagcgttttgctgcccgatggcacgttagtaaccccgaaagatgtgcaagagaaatatggagttccgccagaacgttgggtggactttcgcgcactgactggtgatcgttcagacaacatcccgggcgttgccgggattggtgaaaagacggcgctgcgcctgctggcagaatggggctcggtggaaaatctgctcaagaaccttgatcgtgtgaaacctgatagcttacgccgcaagatcgaagcccacctggaagacttgcgtctgagtctggatcttgcccgtattcgcaccgatctgccgttggaagtagactttaaagctctgcgtcgtcgcacacccgatttagaggggttacgcgcgttcctcgaagaactggagctgggctccctgctgcatgaattcggtttgttgggcggagagaaaccgcgtgaagaagcaccatggccgccgcccgaaggtgcctttgtcggctttcttctgtcacgcaaagagccaatgtgggcggaactgttagctcttgcagccgccgcggaagggcgtgttcaccgcgcgacctctcctgtcgaggccctcgctgacctcaaagaagcacgtggtttcttggcgaaagatttagccgtgcttgcattacgcgaaggcgttgcgctcgatccgacggacgacccgcttttggtggcttatttgctcgatcatgcgaataccaacccggaacgtgtcgcccgtcgttacggcggcgagtttactgaagatgcggcagaacgcgcgttgcttagcgaacgcctcttccagacgttatttccacgtctttcggagaaaccgctctggctctatcaggaagtcgaacgtccattgagtcgcgtgcttgcccatatggaggctcgcggtgtgcgcttagatgttccgttgttagaagcactcagcttcgagttggagaaagaactggaacgtcttgaaggcgaagtctttcgtttagcggggcatcccttcaatctcaactctcgcgaccaattggagaaagtgctctttgatgaattaggtttaacccctgtcacgcgtacagagaagaccggcaaacgttccacttcggcagccgccttggaagcacttcgtggtgctcacccgatcgtcgagttgattttgcagtatcgcgagctcagcaaactcaaatcaacctatcttgataggttacctcgtcttgttcatccacgtacgggtcgtttacacacccgcttcaatcaaacggcaacagccaccgggcgcttgtcgtcgagtgacccgaacctccagaatattccagtgcgcacgccgctgggccaacacattcgtaaagcgtttgttgcggaagaaggttggttattacttgcggccgattactcccagatcgaacttcgtgtattggcgcatctctctggcgacgagaatcttaaacgcgtgtttcgcgaaggcaaggatattcacactgaaaccgcagcctggatgttcggggtggacccagccttagtggaccccaagatgcgtcgtgccgccaagaccgtcaactttggcgtactctatggtatgtcagcagcacgtcttagtcaggaattgggcattgactacaaagaagctgaagcgtttatcgagcgctatttccaatcctttccgaaagttcgcgcgtggattgaacgtacgctcgaagaaggtcgcactcgcggctatgtggaaacgttattcgggcgtcgtcgctacgttccagatcttacgtctcgtgtccgctcagtgcgcgaagctgctgagcgtatggcctggaatatgcctgttcagggaacagcggcggacctcatgaagatcgccatggtgaaattgtttccgcgcttgaaacccttaggagcccaccttcttttacaggtgcatgatgaattggtcttggaagtacccgaggatcgcgcagaagaagccaaagcactcgtgaaagaggttatggaaaacgcgtatccgttagatgttccgttggaggtcgaagtgggtgtaggccgtgattggcttgaagcgaaacaagactaatga

SEQ ID NO: 1130 - protein, 844 aa, synthetic construct
  REGION 1..844: note = DNA Polymerase Variant
MHHHHHHGGSGMLPLFDLEEPPKRVLLVDGHHLAYRTFYALSLTTSRGEPVQMVYGFARSLLKALKEDGQAVVVVFDAKAPSFRHEAYEAYKAGRAPTPEDFPRQLALVKRLVDLLGLVRLEAPGYEADDVLGTLAKKAEREGMEVCILTGDRDFFQLLSEKVSVLLPDGTLVTPKDVQEKYGVPPERWVDFRALTGDRSDNIPGVAGIGEKTALRLLAEWGSVENLLKNLDRVKPDSLRRKIEAHLEDLRLSLDLARIRTDLPLEVDFKALRRRTPDLEGLRAFLEELELGSLLHEFGLLGGEKPREEAPWPPPEGAFVGFLLSRKEPMWAELLALAAAAEGRVHRATSPVEALADLKEARGFLAKDLAVLALREGVALDPTDDPLLVAYLLDHANTNPERVARRYGGEFTEDAAERALLSERLFQTLFPRLSEKPLWLYQEVERPLSRVLAHMEARGVRLDVPLLEALSFELEKELERLEGEVFRLAGHPFNLNSRDQLEKVLFDELGLTPVTRTEKTGKRSTSAAALEALRGAHPIVELILQYRELSKLKSTYLDRLPRLVHPRTGRLHTRFNQTATATGRLSSSDPNLQNIPVRTPLGQHIRKAFVAEEGWLLLAADYSQIELRVLAHLSGDENLKRVFREGKDIHTETAAWMFGVDPALVDPKMRRAAKTVNFGVLYGMSAARLSQELGIDYKEAEAFIERYFQSFPKVRAWIERTLEEGRTRGYVETLFGRRRYVPDLTSRVRSVREAAERMAWNMPVQGTAADLMKIAMVKLFPRLKPLGAHLLLQVHDELVLEVPEDRAEEAKALVKEVMENAYPLDVPLEVEVGVGRDWLEAKQD

SEQ ID NO: 1131 - DNA, 2538 bp, synthetic construct
  misc_feature 1..2538: note = DNA Polymerase Variant
  source 1..2538: mol_type = other DNA
atgcaccatcatcatcatcatggcggtagcggcatgttaccgctgtttgatttggaagaaccaccaaaacgcgtgctgcttgttgacggccatcatctggcgtatcgtaccttctacgcactgagccttacgacctcacgtggtgagcctgtccagatggtgtatgggtttgctcgctccctgctgaaagccctgaaggaagatggtcaagccgtagtagtggttttcgatgcgaaagcaccgtcgtttcgtcacgaagcgtacgaggcctataaagctggccgcgcaccgaccccggaagactttccgcgtcagttagcgctcgtcaaacgcctcgtggatttgctgggattagttcgcttggaagctcctggctacgaggcggacgacgtgctcggtacactggccaagaaagcagaacgtgaaggcatggaggtctgcattcttaccggtgatcgcgatttcttccagctgctgtctgagaaagtgagcgttttgctgcccgatggcacgttagtaaccccgaaagatgtgcaagagaaatatggagttccgccagaacgttgggtggactttcgcgcactgactggtgatcgttcagacaacatcccgggcgttgccgggattggtgaaaagacggcgctgcgcctgctggcagaatggggctcggtggaaaatctgctcaagaaccttgatcgtgtgaaacctgatagcttacgccgcaagatcgaagcccacctggaagacttgcgtctgagtctggatcttgcccgtattcgcaccgatctgccgttggaagtagactttaaagctctgcgtcgtcgcacacccgatttagaggggttacgcgcgttcctcgaagaactggagctgggctccctgctgcatgaattcggtttgttgggcggagagaaaccgcgtgaagaagcaccatggccgccgcccgaaggtgcctttgtcggctttcttctgtcacgcaaagagccaatgtgggcggaactgttagctcttgcagccgccgcggaagggcgtgttcaccgcgcgacctctcctgtcgaggccctcgctgacctcaaagaagcacgtggtttcttggcgaaagatttagccgtgcttgcattacgcgaaggcgttgcgctcgatccgacggacgacccgcttttggtggcttatttgctcgatcatgcgaataccaacccggaacgtgtcgcccgtcgttacggcggcgagtttactgaagatgcggcagaacgcgcgttgcttagcgaacgcctcttccagacgttatttccaactctttcggagaaattactctggctctatcaggaagtcgaacgtccattgagtcgcgtgcttgcccatatggaggctcgcggtgtgcgcttagatgttccgttgttagaagcactcagcttcgagttggagaaagaactggaacgtcttgaaggcgaagtctttcgtttagcggggcatcccttcaatctcaactctcgcgaccaattggagaaagtgctctttgatgaattaggtttaacccctgtcacgcgtacagagaagaccggcaaacgttccacttcggcagccgccttggaagcacttcgtggtgctcacccgatcgtcgagttgattttgcagtatcgcgagctcagcaaactcaaatcaacctatcttgataggttacctcgtcttgttcatccacgtacgggtcgtttacacacccgcttcaatcaaacggcaacagccaccgggcgcttgtcgtcgagtgacccgaacctccagaatattccagtgcgcacgccgctgggccaacacattcgtaaagcgtttgttgcggaagaaggttggttattacttgcggccgattactcccagatcgaacttcgtgtattggcgcatctctctggcgacgagaatcttaaacgcgtgtttcgcgaaggcaaggatattcacactgaaaccgcagcctggatgttcggggtggacccagccttagtggaccccaagatgcgtcgtgccgccaagaccgtcaactttggcgtactctatggtatgtcagcagcacgtcttagtcaggaattgggcattgactacaaagaagctgaagcgtttatcgagcgctatttccaatcctttccgaaagttcgcgcgtggattgaacgtacgctcgaagaaggtcgcactcgcggctatgtggaaacgttattcgggcgtcgtcgctacgttccagatcttacgtctcgtgtccgctcagtgcgcgaagctgctgagcgtatggcctggaatatgcctgttcagggaacagcggcggacctcatgaagatcgccatggtgaaattgtttccgcgcttgaaacccttaggagcccaccttcttttacaggtgcatgatgaattggtcttggaagtacccgaggatcgcgcagaagaagccaaagcactcgtgaaagaggttatggaaaacgcgtatccgttagatgttccgttggaggtcgaagtgggtgtaggccgtgattggcttgaagcgaaacaagactaatga

SEQ ID NO: 1132 - protein, 844 aa, synthetic construct
  REGION 1..844: note = DNA Polymerase Variant
MHHHHHHGGSGMLPLFDLEEPPKRVLLVDGHHLAYRTFYALSLTTSRGEPVQMVYGFARSLLKALKEDGQAVVVVFDAKAPSFRHEAYEAYKAGRAPTPEDFPRQLALVKRLVDLLGLVRLEAPGYEADDVLGTLAKKAEREGMEVCILTGDRDFFQLLSEKVSVLLPDGTLVTPKDVQEKYGVPPERWVDFRALTGDRSDNIPGVAGIGEKTALRLLAEWGSVENLLKNLDRVKPDSLRRKIEAHLEDLRLSLDLARIRTDLPLEVDFKALRRRTPDLEGLRAFLEELELGSLLHEFGLLGGEKPREEAPWPPPEGAFVGFLLSRKEPMWAELLALAAAAEGRVHRATSPVEALADLKEARGFLAKDLAVLALREGVALDPTDDPLLVAYLLDHANTNPERVARRYGGEFTEDAAERALLSERLFQTLFPTLSEKLLWLYQEVERPLSRVLAHMEARGVRLDVPLLEALSFELEKELERLEGEVFRLAGHPFNLNSRDQLEKVLFDELGLTPVTRTEKTGKRSTSAAALEALRGAHPIVELILQYRELSKLKSTYLDRLPRLVHPRTGRLHTRFNQTATATGRLSSSDPNLQNIPVRTPLGQHIRKAFVAEEGWLLLAADYSQIELRVLAHLSGDENLKRVFREGKDIHTETAAWMFGVDPALVDPKMRRAAKTVNFGVLYGMSAARLSQELGIDYKEAEAFIERYFQSFPKVRAWIERTLEEGRTRGYVETLFGRRRYVPDLTSRVRSVREAAERMAWNMPVQGTAADLMKIAMVKLFPRLKPLGAHLLLQVHDELVLEVPEDRAEEAKALVKEVMENAYPLDVPLEVEVGVGRDWLEAKQD

SEQ ID NO: 1133 - DNA, 2538 bp, synthetic construct
  misc_feature 1..2538: note = DNA Polymerase Variant
  source 1..2538: mol_type = other DNA
atgcaccatcatcatcatcatggcggtagcggcatgttaccgctgtttgatttggaagaaccaccaaaacgcgtgctgcttgttgacggccatcatctggcgtatcgtaccttctacgcactgagccttacgacctcacgtggtgagcctgtccagatggtgtatgggtttgctcgctccctgctgaaagccctgaaggaagatggtcaagccgtagtagtggttttcgatgcgcgtgcaccgtcgtttcgtcacgaagcgtacgaggcctataaagctggccgcgcaccgaccccggaagactttccgcgtcagttagcgctcgtcaaacgcctcgtggatttgctgggattagttcgcttggaagctcctggctacgaggcggacgacgtgctcggtacactggccaagaaagcagaacgtgaaggcatggaggtctgcattcttaccggtgatcgcgatttcttccagctgctgtctgagaaagtgagcgttttgctgcccgatggcacgttagtaaccccgaaagatctgcaagagaaatatggagttccgccagaacgttgggtggactttcgcgcactgactggtgatcgttcagacaacatcccgggcgttgccgggattggtgaaaagacggcgctgcgcctgctggcagaatggggctcggtggaaaatctgctcaagaaccttgatcgtgtgaaacctgatagcttacgccgcaagatcgaagcccacctggaagacttgcgtctgagtctggatcttgtacgtattcgcaccgatctgccgttggaagtagactttaaagctctgcgtcgtcgcacacccgatttagaggggttacgcgcgttcctcgaagaactggagctgggctccctgctgcatgaattcggtttgttgggcggagagaaaccgcgtgaagaagcaccatggccgccgcccgggggtgcctttgtcggctttcttctgtcacgcaaagagccaatgtgggcggaactgttagctcttgcagccgccgcggaagggcgtgttcaccgcgcgacctctcctgtcgaggccctcgctgacctcaaagaagcacgtggtttcttggcgaaagatttagccgtgcttgcattacgcgaaggcgttgcgctcgatccgacggacgacccgcttttggtggcttatttgctcgatagcgcgaataccaacccggaacgtgtcgcccgtcgttacggcggcgagtttactgaagatgcggcagaacgcgcgttgcttagcgaacgcctcttccagacgttatttccacgtctttcggagaaattactctggctctatcaggaagtcgaacgtccattgagtcgcgtgcttgcccatatggaggctcgcggtgtgcgcttagatgttccgttgttagaagcactcagcttcgagctggaaaaagaactggaacgtcttgaaggcgaagtctttcgtttagcggggcatcccttcaatctcaactctcgcgaccaattggagaaagtgctctttgatgaattaggtttaacccctgtcacgcgtacagagaagaccggcaaacgttccacttcggcagccgccttggaagcacttcgtggtgtgcacccgatcgtcgagttgattttgcagtatcgcgagctcagcaaactcaaatcaacctatcttgataggttacctcgtcttgttcatccacgtacgggtcgtttacacacccgcttcaatcaaacggcaacagccaccgggcgcttgtcgtcgagtgacccgaacctccagaatattccagtgcgcacgccgctgggccaacacattcgtaaagcgtttgttgcggaagaaggttggttattacttgcggccgattactcccagatcgaacttcgtgtattggcgcatctctctggcgacgagaatcttaaacgcgtgtttcgcgaaggcaaggatattcacactgaaaccgcagcctggatgttcggggtggactcggccttagtggaccccaagatgcgtcgtgccgccaagaccgtcaactttggcgtactctatggtatgtcagcagcacgtcttagtcaggaattgggcattgactacaaagtagctgaagcgtttatcgagcgctatttccaatcctttccgaaagttcgcgcgtggattgaacgtacgctcgaagaaggtcgcactcgcggctatgtggaaacgttattcgggcgtcgtcgctacgttccagatcttacgtctcgtgtccgctcagtgcgcgaagctgctgagcgtatggcctggaatatgcctgttcagggaacagcggcggacctcatgaagatcgccatggtgaaattgtttccgcgcttgaaacccttaggagcccaccttcttctgcaggtgcatgatgaattggtcttggaagtacccgaggatcgcgcagaagaagccaaagcactcgtgaaagaggttatggaaaacgcgtatccgttagatgttccgttggaggtcgaagtgggtgtaggccgtgattggcttgaagcgaaacaagactaatga

SEQ ID NO: 1134 - protein, 844 aa, synthetic construct
  REGION 1..844: note = DNA Polymerase Variant
MHHHHHHGGSGMLPLFDLEEPPKRVLLVDGHHLAYRTFYALSLTTSRGEPVQMVYGFARSLLKALKEDGQAVVVVFDARAPSFRHEAYEAYKAGRAPTPEDFPRQLALVKRLVDLLGLVRLEAPGYEADDVLGTLAKKAEREGMEVCILTGDRDFFQLLSEKVSVLLPDGTLVTPKDLQEKYGVPPERWVDFRALTGDRSDNIPGVAGIGEKTALRLLAEWGSVENLLKNLDRVKPDSLRRKIEAHLEDLRLSLDLVRIRTDLPLEVDFKALRRRTPDLEGLRAFLEELELGSLLHEFGLLGGEKPREEAPWPPPGGAFVGFLLSRKEPMWAELLALAAAAEGRVHRATSPVEALADLKEARGFLAKDLAVLALREGVALDPTDDPLLVAYLLDSANTNPERVARRYGGEFTEDAAERALLSERLFQTLFPRLSEKLLWLYQEVERPLSRVLAHMEARGVRLDVPLLEALSFELEKELERLEGEVFRLAGHPFNLNSRDQLEKVLFDELGLTPVTRTEKTGKRSTSAAALEALRGVHPIVELILQYRELSKLKSTYLDRLPRLVHPRTGRLHTRFNQTATATGRLSSSDPNLQNIPVRTPLGQHIRKAFVAEEGWLLLAADYSQIELRVLAHLSGDENLKRVFREGKDIHTETAAWMFGVDSALVDPKMRRAAKTVNFGVLYGMSAARLSQELGIDYKVAEAFIERYFQSFPKVRAWIERTLEEGRTRGYVETLFGRRRYVPDLTSRVRSVREAAERMAWNMPVQGTAADLMKIAMVKLFPRLKPLGAHLLLQVHDELVLEVPEDRAEEAKALVKEVMENAYPLDVPLEVEVGVGRDWLEAKQD

SEQ ID NO: 1135 - DNA, 2538 bp, synthetic construct
  misc_feature 1..2538: note = DNA Polymerase Variant
  source 1..2538: mol_type = other DNA
atgcaccatcatcatcatcatggcggtagcggcatgttaccgctgtttgatttggaagaaccaccaaaacgcgtgctgcttgttgacggccatcatctggcgtatcgtaccttctacgcactgagccttacgacctcacgtggtgagcctgtccagatggtgtatgggtttgctcgctccctgctgaaagccctgaaggaagatggtcaagccgtagtagtggttttcgatgcgcgcgcaccgtcgtttcgtcacgaagcgtacgaggcctataaagctggccgcgcaccgaccccggaagactttccgcgtcagttagcgctcgtcaaacgcctcgtggatttgctgggattagttcgcttggaagctcctggctacgaggcggacgacgtgctcggtacactggccaagaaagcagaacgtgaaggcatggaggtctgcattcttaccggtgatcgcgatttcttccagctgctgtctgagaaagtgagcgttttgctgcccgatggcacgttagtaaccccgaaagatgtgcaagagaaatatggagttccgccagaacgttgggtggactttcgcgcactgactggtgatcgttcagacaacatcccgggcgttgccgggattggtgaaaagacggcgctgcgcctgctggcagaatggggctcggtggaaaatctgctcaagaaccttgatcgcgtgaaacctgatagcttacgccgcaagatcgaagcccacctggaagacttgcgtctgagtctggatcttgcccgtattcgcaccgatctgccgttggaagtagactttaaagctctgcgtcgtcgcacacccgatttagaggggttacgcgcgttcctcgaagaactggagctgggctccctgctgcatgaattcggtttgttgggcaccgagaaaccgcgtgaagaagcaccatggccgccgcccgaaggtgcctttgtcggctttcttctgtcacgcaaagagccaatgtgggcggaactgttagctcttgcagccgccgcggaagggcgtgttcaccgcgcgacctctcctgtcgaggccctcgctgacctcaaagaagcacgtggtttcttggcgaaagatttagccgtgcttgcattacgcgaaggcgttgcgctcgatccgacggacgacccgcttttggtggcttatttgctcgatcatgcgaataccaacccggaacgtgtcgcccgtcgttacggcggcgagtttactgaagatgcggcagaacgcgcgttgcttagcgaacgcctcttccagacgttatttccacgtctttcggagaaattactctggctctatcaagaagtcgaacgtccattgagtcgcgtgcttgcccatatggaggctcgcggtgtgcgcttagatgttccgttgttagaagcactcagcttcgagttggagaaagaactggaacgtcttgaaggcgaagtctttcgtttagcggggcatcccttcaatctcaactctcgcgaccaattggagaaagtgctctttgatgaattaggtttaacccctgtcacgcgtacagagaagaccggcaaacgttccacttcggcagccgccttggaagcacttcgtggtgctcacccgatcgtcgagttgattttgcagtatcgcgagctcagcaaactcaaatcaacctatcttgataggttacctcgtcttgttcatccacgtacgggtcgtttacacacccgcttcaatcaaacggcaacagccaccgggcgcttgtcgtcgagtgacccgaacctccagaatattccagtgcgcacgccgctgggccaacacattcgtaaagcgtttgttgcggaagaaggttggttattacttgcggccgattactcccagatcgaacttcgtgtattggcgcatctctctggcgacgagaatcttaaacgcgtgtttcgcgaaggcaaggatattcacactgaaaccgcagcctggatgttcggggtggacccggccttagtggaccccaagatgcgtcgtgccgccaagaccgtcaactttggcgtactctatggtatgtcagcagcacgtcttagtcaggaattgggcattgactacaaagaagctgaagcgtttatcgagcgctatttccaatcctttccgggtgttcgcgcgtggattgaacgtacgctcgaagaaggtcgcactcgcggctatgtggaaacgttattcgggcgtcgtcgctacgttccagatcttacgtctcgtgtccgctcagtgcgcgaagctgctgagcgtatggcctggaatatgcctgttcagggaacagcggcggacctcatgaagatcgccatggtgaaattgtttccgcgcttgaaacccttaggagcccaccttcttttacaggtgcatgatgaattggtcttggaagtacccgaggatcgcgcagaagaagccaaagcactcgtgaaagaggttatggaaaacgcgtatccgttagatgttccgttggaggtcgaagtgggtgtaggccgtgattggcttgaagcgaaacaagactaatga

SEQ ID NO: 1136 - protein, 844 aa, synthetic construct
  REGION 1..844: note = DNA Polymerase Variant
MHHHHHHGGSGMLPLFDLEEPPKRVLLVDGHHLAYRTFYALSLTTSRGEPVQMVYGFARSLLKALKEDGQAVVVVFDARAPSFRHEAYEAYKAGRAPTPEDFPRQLALVKRLVDLLGLVRLEAPGYEADDVLGTLAKKAEREGMEVCILTGDRDFFQLLSEKVSVLLPDGTLVTPKDVQEKYGVPPERWVDFRALTGDRSDNIPGVAGIGEKTALRLLAEWGSVENLLKNLDRVKPDSLRRKIEAHLEDLRLSLDLARIRTDLPLEVDFKALRRRTPDLEGLRAFLEELELGSLLHEFGLLGTEKPREEAPWPPPEGAFVGFLLSRKEPMWAELLALAAAAEGRVHRATSPVEALADLKEARGFLAKDLAVLALREGVALDPTDDPLLVAYLLDHANTNPERVARRYGGEFTEDAAERALLSERLFQTLFPRLSEKLLWLYQEVERPLSRVLAHMEARGVRLDVPLLEALSFELEKELERLEGEVFRLAGHPFNLNSRDQLEKVLFDELGLTPVTRTEKTGKRSTSAAALEALRGAHPIVELILQYRELSKLKSTYLDRLPRLVHPRTGRLHTRFNQTATATGRLSSSDPNLQNIPVRTPLGQHIRKAFVAEEGWLLLAADYSQIELRVLAHLSGDENLKRVFREGKDIHTETAAWMFGVDPALVDPKMRRAAKTVNFGVLYGMSAARLSQELGIDYKEAEAFIERYFQSFPGVRAWIERTLEEGRTRGYVETLFGRRRYVPDLTSRVRSVREAAERMAWNMPVQGTAADLMKIAMVKLFPRLKPLGAHLLLQVHDELVLEVPEDRAEEAKALVKEVMENAYPLDVPLEVEVGVGRDWLEAKQD

SEQ ID NO: 1137 - DNA, 2538 bp, synthetic construct
  misc_feature 1..2538: note = DNA Polymerase Variant
  source 1..2538: mol_type = other DNA
atgcaccatcatcatcatcatggcggtagcggcatgttaccgctgtttgatttggaagaaccaccaaaacgcgtgctgcttgttgacggccatcatctggcgtatcgtaccttctacgcactgagccttacgacctcacgtggtgagcctgtccagatggtgtatgggtttgctcgctccctgctgaaagccctgaaggaagatggtcaagccgtagtagtggttttcgatgcgaaagcaccgtcgtttcgtcacgaagcgtacgaggcctataaagctggccgcgcaccgaccccggaagactttccgcgtcagttagcgctcgtcaaacgcctcgtggatttgctgggattagttcgcttggaagctcctggctacgaggcggacgacgtgctcggtacactggccaagaaagcagaacgtgaaggcatggaggtctgcattcttaccggtgatcgcgatttcttccagctgctgtctgagaaagtgagcgttttgctgcccgatggcacgttagtaaccccgaaagatgtgcaagagaaatatggagttccgccagaacgttgggtggactttcgcgcactgactggtgatcgttcagacaacatcccgggcgttgccgggattggtgaaaagacggcgctgcgcctgctggcagaatggggctcggtggaaaatctgctcaagaaccttgatcgtgtgaaacctgatagcttacgccgcaagatcgaagcccacctggaagacttgcgtctgagtctggatcttgcccgtattcgcaccgatctgccgttggaagtagactttaaagctctgcgtcgtcgcacacccgatttagaggggttacgcgcgttcctcgaagaactggagctgggctccctgctgcatgaattcggtttgttgggcggagagaaaccgcgtgaagaagcaccatggccgccgcccgaaggtgcctttgtcggctttcttctgtcacgcaaagagccaatgtgggcggaactgttagctcttgcagccgccgcggaagggcgtgttcaccgcgcgacctctcctgtcgaggccctcgctgacctcaaagaagcacgtggtttcttggcgaaagatttagccgtgcttgcattacgcgaaggcgttgcgctcgatccgacggacgacccgcttttggtggcttatttgctcgatcatgcgaataccaacccggaacgtgtcgcccgtcgttacggcggcgagtttactgaagatgcggcagaacgcgcgttgcttagcgaacgcctcttccagacgttatttccacgtctttcggagaaattactctggctctatcaggaagtcgaacgtccattgagtcgcgtgcttgcccatatggaggctcgcggtgtgcgcttagatgttccgttgttagaagcactcagcttcgagttggagaaagaactggaacgtcttgaaggcgaagtctttcgtttagcggggcatcccttcaatctcaactctcgcgaccaattggagaaagtgctctttgatgaattaggtttaacccctgtcacgcgtacagagaagaccggcaaacgttccacttcggcagccgccttggaagcacttcgtggtgctcacccgatcgtcgagttgattttgcagtatcgcgagctcagcaaactcaaatcaacctatcttgataggttacctcgtcttgttcatccacgtacgggtcgtttacacacccgcttcaatcaaacggcaacagccaccgggcgcttgtcgtcgagtgacccgaacctccagaatattccagtgcgcacgccgctgggccaacacattcgtaaagcgtttgttgcggaagaaggttggttattacttgcggccgattactcccagatcgaacttcgtgtattggcgcatctctctggcgacgagaatcttaaacgcgtgtttcgcgaaggcaaggatattcacactgaaaccgcagcctggatgttcggggtggacccagccttagtggaccccaagatgcgtcgtgccgccaagaccgtcaactttggcgtactctatggtatgtcagcagcacgtcttagtcaggaattgggcattgactacaaagaagctgaagcgtttatcgagcgctatttccaatcctttccgaaagttcgcgcgtggtttgaacgtacgctcgaagaaggtcgcactcgcggctatgtggaaacgttattcgggcgtcgtcgctacgttccagatcttacgtctcgtgtccgctcagtgcgcgaagctgctgagcgtatggcctggaatatgcctgttcagggaacagcggcggacctcatgaagatcgccatggtgaaattgtttccgcgcttgaaacccttaggagcccaccttcttttacaggtgcatgatgaattggtcttggaagtacccgaggatcgcgcagaagaagccaaagcactcgtgaaagaggttatggaaaacgcgtatccgttagatgttccgttggaggtcgaagtgggtgtaggccgtgattggcttgaagcgaaacaagactaatga

SEQ ID NO: 1138 - protein, 844 aa, synthetic construct
  REGION 1..844: note = DNA Polymerase Variant
MHHHHHHGGSGMLPLFDLEEPPKRVLLVDGHHLAYRTFYALSLTTSRGEPVQMVYGFARSLLKALKEDGQAVVVVFDAKAPSFRHEAYEAYKAGRAPTPEDFPRQLALVKRLVDLLGLVRLEAPGYEADDVLGTLAKKAEREGMEVCILTGDRDFFQLLSEKVSVLLPDGTLVTPKDVQEKYGVPPERWVDFRALTGDRSDNIPGVAGIGEKTALRLLAEWGSVENLLKNLDRVKPDSLRRKIEAHLEDLRLSLDLARIRTDLPLEVDFKALRRRTPDLEGLRAFLEELELGSLLHEFGLLGGEKPREEAPWPPPEGAFVGFLLSRKEPMWAELLALAAAAEGRVHRATSPVEALADLKEARGFLAKDLAVLALREGVALDPTDDPLLVAYLLDHANTNPERVARRYGGEFTEDAAERALLSERLFQTLFPRLSEKLLWLYQEVERPLSRVLAHMEARGVRLDVPLLEALSFELEKELERLEGEVFRLAGHPFNLNSRDQLEKVLFDELGLTPVTRTEKTGKRSTSAAALEALRGAHPIVELILQYRELSKLKSTYLDRLPRLVHPRTGRLHTRFNQTATATGRLSSSDPNLQNIPVRTPLGQHIRKAFVAEEGWLLLAADYSQIELRVLAHLSGDENLKRVFREGKDIHTETAAWMFGVDPALVDPKMRRAAKTVNFGVLYGMSAARLSQELGIDYKEAEAFIERYFQSFPKVRAWFERTLEEGRTRGYVETLFGRRRYVPDLTSRVRSVREAAERMAWNMPVQGTAADLMKIAMVKLFPRLKPLGAHLLLQVHDELVLEVPEDRAEEAKALVKEVMENAYPLDVPLEVEVGVGRDWLEAKQD

SEQ ID NO: 1139 - DNA, 2538 bp, synthetic construct
  misc_feature 1..2538: note = DNA Polymerase Variant
  source 1..2538: mol_type = other DNA
atgcaccatcatcatcatcatggcggtagcggcatgttaccgctgtttgatttggaagaaccaccaaaacgcgtgctgcttgttgacggccatcatctggcgtatcgtaccttctacgcactgagccttacgacctcacgtggtgagcctgtccagatggtgtatgggtttgctcgctccctgctgaaagccctgaaggaagatggtcaagccgtagtagtggttttcgatgcgaaagcaccgtcgtttcgtcacgaagcgtacgaggcctataaagctggccgcgcaccgaccccggaagactttccgcgtcagttagcgctcgtcaaacgcctcgtggatttgctgggattagttcgcttggaagctcctggctacgaggcggacgacgtgctcggtacactggccaagaaagcagaacgtgaaggcatggaggtctgcattcttaccggtgatcgcgatttcttccagctgctgtctgagaaagtgagcgttttgctgcccgatggcacgttagtaaccccgaaagatgtgcaagagaaatatggagttccgccagaacgttgggtggactttcgcgcactgactggtgatcgttcagacaacatcccgggcgttgccgggattggtgaaaagacggcgctgcgcctgctggcagaatggggctcggtggaaaatctgctcaagaaccttgatcgtgtgaaacctgatagcttacgccgcaagatcgaagcccacctggaagacttgcgtctgagtctggatcttgcccgtattcgcaccgatctgccgttggaagtagactttaaagctctgcgtcgtcgcacacccgatttagaggggttacgcgcgttcctcgaagaactggagctgggctccctgctgcatgaattcggtttgttgggcggagagaaaccgcgtgaagaagcaccatggccgccgcccgaaggtgcctttgtcggctttcttctgtcacgcaaagagccaatgtgggcggaactgttagctcttgcagccgccgcggaagggcgtgttcaccgcgcgacctctcctgtcgaggccctcgctgacctcaaagaagcacgtggtttcttggcgaaagatttagccgtgcttgcattacgcgaaggcgttgcgctcgatccgacggacgacccgcttttggtggcttatttgctcgatcatgcgaataccaacccggaacgtgtcgcccgtcgttacggcggcgagtttactgaagatgcggcagaacgcgcgttgcttagcgaacgcctcttccagacgttatttccacgtctttcggagaaattactctggctctatcaggaagtcgaacgtccattgagtcgcgtgcttctgcatatggaggctcgcggtgtgcgcttagatgttccgttgttagaagcactcagcttcgagttggagaaagaactggaacgtcttgaaggcgaagtctttcgtttagcggggcatcccttcaatctcaactctcgcgaccaattggagaaagtgctctttgatgaattaggtttaacccctgtcacgcgtacagagaagaccggcaaacgttccacttcggcagccgccttggaagcacttcgtggtgctcacccgatcgtcgagttgattttgcagtatcgcgagctcagcaaactcaaatcaacctatcttgataggttacctcgtcttgttcatccacgtacgggtcgtttacacacccgcttcaatcaaacggcaacagccaccgggcgcttgtcgtcgagtgacccgaacctccagaatattccagtgcgcacgccgctgggccaacacattcgtaaagcgtttgttgcggaagaaggttggttattacttgcggccgattactcccagatcgaacttcgtgtattggcgcatctctctggcgacgagaatcttaaacgcgtgtttcgcgaaggcaaggatattcacactgaaaccgcagcctggatgttcggggtggacccagccttagtggaccccaagatgcgtcgtgccgccaagaccgtcaactttggcgtactctatggtatgtcagcagcacgtcttagtcaggaattgggcattgactacaaagaagctgaagcgtttatcgagcgctatttccaatcctttccgaaagttcgcgcgtggattgaacgtacgctcgaagaaggtcgcactcgcggctatgtggaaacgttattcgggcgtcgtcgctacgttccagatcttacgtctcgtgtccgctcagtgcgcgaagctgctgagcgtatggcctggaatatgcctgttcagggaacagcggcggacctcatgaagatcgccatggtgaaattgtttccgcgcttgaaacccttaggagcccaccttcttttacaggtgcatgatgaattggtcttggaagtacccgaggatcgcgcagaagaagccaaagcactcgtgaaagaggttatggaaaacgcgtatccgttagatgttccgttggaggtcgaagtgggtgtaggccgtgattggcttgaagcgaaacaagactaatga

SEQ ID NO: 1140 - protein, 844 aa, synthetic construct
  REGION 1..844: note = DNA Polymerase Variant
MHHHHHHGGSGMLPLFDLEEPPKRVLLVDGHHLAYRTFYALSLTTSRGEPVQMVYGFARSLLKALKEDGQAVVVVFDAKAPSFRHEAYEAYKAGRAPTPEDFPRQLALVKRLVDLLGLVRLEAPGYEADDVLGTLAKKAEREGMEVCILTGDRDFFQLLSEKVSVLLPDGTLVTPKDVQEKYGVPPERWVDFRALTGDRSDNIPGVAGIGEKTALRLLAEWGSVENLLKNLDRVKPDSLRRKIEAHLEDLRLSLDLARIRTDLPLEVDFKALRRRTPDLEGLRAFLEELELGSLLHEFGLLGGEKPREEAPWPPPEGAFVGFLLSRKEPMWAELLALAAAAEGRVHRATSPVEALADLKEARGFLAKDLAVLALREGVALDPTDDPLLVAYLLDHANTNPERVARRYGGEFTEDAAERALLSERLFQTLFPRLSEKLLWLYQEVERPLSRVLLHMEARGVRLDVPLLEALSFELEKELERLEGEVFRLAGHPFNLNSRDQLEKVLFDELGLTPVTRTEKTGKRSTSAAALEALRGAHPIVELILQYRELSKLKSTYLDRLPRLVHPRTGRLHTRFNQTATATGRLSSSDPNLQNIPVRTPLGQHIRKAFVAEEGWLLLAADYSQIELRVLAHLSGDENLKRVFREGKDIHTETAAWMFGVDPALVDPKMRRAAKTVNFGVLYGMSAARLSQELGIDYKEAEAFIERYFQSFPKVRAWIERTLEEGRTRGYVETLFGRRRYVPDLTSRVRSVREAAERMAWNMPVQGTAADLMKIAMVKLFPRLKPLGAHLLLQVHDELVLEVPEDRAEEAKALVKEVMENAYPLDVPLEVEVGVGRDWLEAKQD

SEQ ID NO: 1141 - DNA, 2538 bp, synthetic construct
  misc_feature 1..2538: note = DNA Polymerase Variant
  source 1..2538: mol_type = other DNA
atgcaccatcatcatcatcatggcggtagcggcatgttaccgctgtttgatttggaagaaccaccaaaacgcgtgctgcttgttgacggccatcatctggcgtatcgtaccttctacgcactgagccttacgacctcacgtggtgagcctgtccagatggtgtatgggtttgctcgctccctgctgaaagccctgaaggaagatggtcaagccgtagtagtggttttcgatgcgaaagcaccgtcgtttcgtcacgaagcgtacgaggcctataaagctggccgcgcaccgaccccggaagactttccgcgtcagttagcgctcgtcaaacgcctcgtggatttgctgggattagttcgcttggaagctcctggctacgaggcggacgacgtgctcggtacactggccaagaaagcagaacgtgaaggcatggaggtctgcattcttaccggtgatcgcgatttcttccagctgctgtctgagaaagtgagcgttttgctgcccgatggcacgttagtaaccccgaaagatgtgcaagagaaatatggagttccgccagaacgttgggtggactttcgcgcactgactggtgatcgttcagacaacatcccgggcgttgccgggattggtgaaaagacggcgctgcgcctgctggcagaatggggctcggtggaaaatctgctcaagaaccttgatcgtgtgaaacctgatagcttacgccgcaagatcgaagcccacctggaagacttgcgtctgagtctggatcttgcccgtattcgcaccgatctgccgttggaagtagactttaaagctctgcgtcgtcgcacacccgatttagaggggttacgcgcgttcctcgaagaactggagctgggctccctgctgcatgaattcggtttgttgggcggagagaaaccgcgtgaagaagcaccatggccgccgcccgaaggtgcctttgtcggctttcttctgtcacgcaaagagccaatgtgggcggaactgttagctcttgcagccgccgcggaagggcgtgttcaccgcgcgacctctcctgtcgaggccctcgctgacctcaaagaagcacgtggtttcttggcgaaagatttagccgtgcttgcattacgcgaaggcgttgcgctcgatccgacggacgacccgcttttggtggcttatttgctcgatcatgcgaataccaacccggaacgtgtcgcccgtcgttacggcggcgagtttactgaagatgcggcagaacgcgcgttgcttagcgaacgcctcttctttacgttatttccacgtctttcggagaaattactctggctctatcaggaagtcgaacgtccattgagtcgcgtgcttgcccatatggaggctcgcggtgtgcgcttagatgttccgttgttagaagcactcagcttcgagttggagaaagaactggaacgtcttgaaggcgaagtctttcgtttagcggggcatcccttcaatctcaactctcgcgaccaattggagaaagtgctctttgatgaattaggtttaacccctgtcacgcgtacagagaagaccggcaaacgttccacttcggcagccgccttggaagcacttcgtggtgctcacccgatcgtcgagttgattttgcagtatcgcgagctcagcaaactcaaatcaacctatcttgataggttacctcgtcttgttcatccacgtacgggtcgtttacacacccgcttcaatcaaacggcaacagccaccgggcgcttgtcgtcgagtgacccgaacctccagaatattccagtgcgcacgccgctgggccaacacattcgtaaagcgtttgttgcggaagaaggttggttattacttgcggccgattactcccagatcgaacttcgtgtattggcgcatctctctggcgacgagaatcttaaacgcgtgtttcgcgaaggcaaggatattcacactgaaaccgcagcctggatgttcggggtggacccagccttagtggaccccaagatgcgtcgtgccgccaagaccgtcaactttggcgtactctatggtatgtcagcagcacgtcttagtcaggaattgggcattgactacaaagaagctgaagcgtttatcgagcgctatttccaatcctttccgaaagttcgcgcgtggattgaacgtacgctcgaagaaggtcgcactcgcggctatgtggaaacgttattcgggcgtcgtcgctacgttccagatcttacgtctcgtgtccgctcagtgcgcgaagctgctgagcgtatggcctggaatatgcctgttcagggaacagcggcggacctcatgaagatcgccatggtgaaattgtttccgcgcttgaaacccttaggagcccaccttcttttacaggtgcatgatgaattggtcttggaagtacccgaggatcgcgcagaagaagccaaagcactcgtgaaagaggttatggaaaacgcgtatccgttagatgttccgttggaggtcgaagtgggtgtaggccgtgattggcttgaagcgaaacaagactaatga

SEQ ID NO: 1142 - protein, 844 aa, synthetic construct
  REGION 1..844: note = DNA Polymerase Variant
MHHHHHHGGSGMLPLFDLEEPPKRVLLVDGHHLAYRTFYALSLTTSRGEPVQMVYGFARSLLKALKEDGQAVVVVFDAKAPSFRHEAYEAYKAGRAPTPEDFPRQLALVKRLVDLLGLVRLEAPGYEADDVLGTLAKKAEREGMEVCILTGDRDFFQLLSEKVSVLLPDGTLVTPKDVQEKYGVPPERWVDFRALTGDRSDNIPGVAGIGEKTALRLLAEWGSVENLLKNLDRVKPDSLRRKIEAHLEDLRLSLDLARIRTDLPLEVDFKALRRRTPDLEGLRAFLEELELGSLLHEFGLLGGEKPREEAPWPPPEGAFVGFLLSRKEPMWAELLALAAAAEGRVHRATSPVEALADLKEARGFLAKDLAVLALREGVALDPTDDPLLVAYLLDHANTNPERVARRYGGEFTEDAAERALLSERLFFTLFPRLSEKLLWLYQEVERPLSRVLAHMEARGVRLDVPLLEALSFELEKELERLEGEVFRLAGHPFNLNSRDQLEKVLFDELGLTPVTRTEKTGKRSTSAAALEALRGAHPIVELILQYRELSKLKSTYLDRLPRLVHPRTGRLHTRFNQTATATGRLSSSDPNLQNIPVRTPLGQHIRKAFVAEEGWLLLAADYSQIELRVLAHLSGDENLKRVFREGKDIHTETAAWMFGVDPALVDPKMRRAAKTVNFGVLYGMSAARLSQELGIDYKEAEAFIERYFQSFPKVRAWIERTLEEGRTRGYVETLFGRRRYVPDLTSRVRSVREAAERMAWNMPVQGTAADLMKIAMVKLFPRLKPLGAHLLLQVHDELVLEVPEDRAEEAKALVKEVMENAYPLDVPLEVEVGVGRDWLEAKQD

SEQ ID NO: 1143 - DNA, 2538 bp, synthetic construct
  misc_feature 1..2538: note = DNA Polymerase Variant
  source 1..2538: mol_type = other DNA
atgcaccatcatcatcatcatggcggtagcggcatgttaccgctgtttgatttggaagaaccaccaaaacgcgtgctgcttgttgacggccatcatctggcgtatcgtaccttctacgcactgagccttacgacctcacgtggtgagcctgtccagatggtgtatgggtttgctcgctccctgctgaaagccctgaaggaagatggtcaagccgtagtagtggttttcgatgcgaaagcaccgtcgtttcgtcacgaagcgtacgaggcctataaagctggccgcgcaccgaccccggaagactttccgcgtcagttagcgctcgtcaaacgcctcgtggatttgctgggattagttcgcttggaagctcctggctacgaggcggacgacgtgctcggtacactggccaagaaagcagaacgtgaaggcatggaggtctgcattcttaccggtgatcgcgatttcttccagctgctgtctgagaaagtgagcgttttgctgcccgatggcacgttagtaaccccgaaagatgtgcaagagaaatatggagttccgccagaacgttgggtggactttcgcgcactgactggtgatcgttcagacaacatcccgggcgttgccgggattggtgaaaagacggcgctgcgcctgctggcagaatggggctcggtggaaaatctgctcaagaaccttgataaagtgaaacctgatagcttacgccgcaagatcgaagcccacctggaagacttgcgtctgagtctggatcttgcccgtattcgcaccgatctgccgttggaagtagactttaaagctctgcgtcgtcgcacacccgatttagaggggttacgcgcgttcctcgaagaactggagctgggctccctgctgcatgaattcggtttgttgggcggggagaaaccgcgtgaagaagcaccatggccgccgcccgaaggtgcctttgtcggctttcttctgtcacgcaaagagccaatgtgggcggaactgttagctcttgcagccgccgcggaagggcgtgttcaccgcgcgacctctcctgtcgaggccctcgctgacctcaaagaagcacgtggtttcttggcgaaagatttagccgtgcttgcattacgcgaaggcgttggcctcgatccgacggacgacccgcttttggtggcttatttgctcgatcatgcgaataccaacccggaacgtgtcgcccgtcgttacggcggcgagtttactgaagatgcggcagaacgcgcgttgcttagcgaacgcctcttccagacgttatttccacgtctttcggagaaattactctggctctatggtgaagtcgaacgtccattgagtcgcgtgcttgcccatatggaggctcgcggtgtgcgcttagatgttccgttgttagaagcactcagcttcgagttggagaaagaactggaacgtcttgaaggcgaagtctttcgtttagcggggcatcccttcaatctcaactctcgcgaccaattggagaaagtgctctttgatgaattaggtttaacccctgtcacgcgtacagagaagaccggcaaacgttccacttcggcagccgccttggaagcacttcgtggtgctcacccgatcgtcgagttgattttgcagtatcgcgagctcagcaaactcaaatcaacctatcttgataggttacctaagcttgttcatccacgtacgggtcgtttacacacccgcttcaatcaaacggcaacagccaccgggcgcttgtcgtcgagtgacccgaacctccagaatattccagtgcgcacgccgctgggccaacacattcgtaaagcgtttgttgcggaacatggttggttattacttgcggccgattactcccagatcgaacttcgtgtattggcgcatctctctggcgacgagaatcttaaacgtgtgtttcgcgaaggcaaggatattcacactgaaaccgcagcctggatgttcggggtggactcggccttagtggaccccaagatgcgtcgtgccgccaagaccgtcaactttggcgtactctatggtatgtcagcagcacgtcttagtcaggaattgggcattgactacaaagaggctgaagcgtttatcgagcgctatttccaatcctttccgggtgttcgcgcgtggattgaacgtacgctcgaagaaggtcgcactcgcggctatgtggaaacgttattcgggcgtcgtcgctacgttccagatcttacgtctcgtgtccgctcagtgcgcgaagctgctgagcgtatggcctggaatatgcctgttcagggaacagcggcggacctcatgaagatcgccatggtgaaattgtttccgcgcttgaaacccttaggagcccaccttcttttacaggtgcatgatgaattggtcttggaagtacccgaggatcgcgcagaagaagccaaagcactcgtgaaagaggttatggaaaacgcgtatccgttagatgttccgttggaggtcgaagtgggtgtaggccgtgattggcttgaagcgaaacaagactaatga

SEQ ID NO: 1144 - protein, 844 aa, synthetic construct
  REGION 1..844: note = DNA Polymerase Variant
MHHHHHHGGSGMLPLFDLEEPPKRVLLVDGHHLAYRTFYALSLTTSRGEPVQMVYGFARSLLKALKEDGQAVVVVFDAKAPSFRHEAYEAYKAGRAPTPEDFPRQLALVKRLVDLLGLVRLEAPGYEADDVLGTLAKKAEREGMEVCILTGDRDFFQLLSEKVSVLLPDGTLVTPKDVQEKYGVPPERWVDFRALTGDRSDNIPGVAGIGEKTALRLLAEWGSVENLLKNLDKVKPDSLRRKIEAHLEDLRLSLDLARIRTDLPLEVDFKALRRRTPDLEGLRAFLEELELGSLLHEFGLLGGEKPREEAPWPPPEGAFVGFLLSRKEPMWAELLALAAAAEGRVHRATSPVEALADLKEARGFLAKDLAVLALREGVGLDPTDDPLLVAYLLDHANTNPERVARRYGGEFTEDAAERALLSERLFQTLFPRLSEKLLWLYGEVERPLSRVLAHMEARGVRLDVPLLEALSFELEKELERLEGEVFRLAGHPFNLNSRDQLEKVLFDELGLTPVTRTEKTGKRSTSAAALEALRGAHPIVELILQYRELSKLKSTYLDRLPKLVHPRTGRLHTRFNQTATATGRLSSSDPNLQNIPVRTPLGQHIRKAFVAEHGWLLLAADYSQIELRVLAHLSGDENLKRVFREGKDIHTETAAWMFGVDSALVDPKMRRAAKTVNFGVLYGMSAARLSQELGIDYKEAEAFIERYFQSFPGVRAWIERTLEEGRTRGYVETLFGRRRYVPDLTSRVRSVREAAERMAWNMPVQGTAADLMKIAMVKLFPRLKPLGAHLLLQVHDELVLEVPEDRAEEAKALVKEVMENAYPLDVPLEVEVGVGRDWLEAKQD

SEQ ID NO: 1145 - DNA, 2538 bp, synthetic construct
  misc_feature 1..2538: note = DNA Polymerase Variant
  source 1..2538: mol_type = other DNA
atgcaccatcatcatcatcatggcggtagcggcatgttaccgctgtttgatttggaagaagcaccaaaacgcgtgctgcttgttgacggccatcatctggcgtatcgtaccttctacgcactgagccttacgacctcacgtggtgagcctgtccagatggtgtatgggtttgctcgctccctgctgaaagccctgaaggaagatggtcaagccgtagtagtggttttcgatgcgaaagcaccgtcgtttcgtcacgaagcgtacgaggcctataaagctggccgcgcaccgaccccggaagactttccgcgtcagttagcgctcgtcaaacgcctcgtggatttgctgggattagttcgcttggaagctcctggctacgaggcggacgacgtgctcggtacactggccaagaaagcagaacgtgaaggcatggaggtctgcattcttaccggtgatcgcgatttcttccagctgctgtctgagaaagtgagcgttttgctgcccgatggcacgttagtaaccccgaaagatgtgcaagagaaatatggagttccgccagaacgttgggtggactttcgcgcactgactggtgatcgttcagacaacatcccgggcgttgccgggattggtgaaaagacggcgctgcgcctgctggcagaatggggctcggtggaaaatctgctcaagaaccttgatcgtgtgaaacctgatagcttacgccgcaagatcgaagcccacctggaagacttgcgtctgagtctggatcttgcccgtattcgcaccgatctgccgttggaagtagactttaaagctctgcgtcgtcgcacacccgatttagaggggttacgcgcgttcctcgaagaactggagctgggctccctgctgcatgaattcggtttgttgggcggagagaaaccgcgtgaagaagcaccatggccgccgcccgaaggtgcctttgtcggctttcttctgtcacgcaaagagccaatgtgggcggaactgttagctcttgcagccgccgcggaagggcgtgttcaccgcgcgacctctcctgtcgaggccctcgctgacctcaaagaagcacgtggtttcttggcgaaagatttagccgtgcttgcattacgcgaaggcgttgcgctcgatccgacggacgacccgcttttggtggcttatttgctcgatcatgcgaataccaacccggaacgtgtcgcccgtcgttacggcggcgagtttactgaagatgcggcagaacgcgcgttgcttagcgaacgcctcttccagacgttatttccacgtctttcggagaaattactctggctctatcaggaagtcgaacgtccattgagtcgcgtgcttgcccatatggaggctcgcggtgtgcgcttagatgttccgttgttagaagcactcagcttcgagttggagaaagaactggaacgtcttgaaggcgaagtctttcgtttagcggggcatcccttcaatctcaactctcgcgaccaattggagaaagtgctctttgatgaattaggtttaacccctgtcacgcgtacagagaagaccggcaaacgttccacttcggcagccgccttggaagcacttcgtggtgctcacccgatcgtcgagttgattttgcagtatcgcgagctcagcaaactcaaatcaacctatcttgataggttacctcgtcttgttcatccacgtacgggtcgtttacacacccgcttcaatcaaacggcaacagccaccgggcgcttgtcgtcgagtgacccgaacctccagaatattccagtgcgcacgccgctgggccaacacattcgtaaagcgtttgttgcggaagagggttggttattacttgcggccgattactcccagatcgaacttcgtgtattggcgcatctctctggcgacgagaatcttaaacgtgtgtttcgcgaaggcaaggatattcacactgaaaccgcagcctggatgttcggggtggacccagccttagtggaccccaagatgcgtcgtgccgccaagaccgtcaactttggcgtactctatggtatgtcagcagcacgtcttagtcaggaattgggcattgactacaaagaagctgaagcgtttatcgagcgctatttccaatcctttccgaaagttcgcgcgtggattgaacgtacgctcgaagaaggtcgcactcgcggctatgtggaaacgttattcgggcgtcgtcgctacgttaaggatcttacgtctcgtgtccgctcagtgcgcgaagctgctgagcgtatggcctggaatatgcctgttcagggaacagcggcggacctcatgaagatcgccatggtgaaattgtttccgcgcttgaaacccttaggagcccaccttcttttacaggtgcatgatgaattggtcttggaagtacccgaggatcgcgcagaagaagccaaagcactcgtgaaagaggttatggaaaacgcgtatccgttagatgttccgttggaggtcgaagtgggtgtaggccgtgattggcttgaagcgaaacaagactaatga

SEQ ID NO: 1146 - protein, 844 aa, synthetic construct
  REGION 1..844: note = DNA Polymerase Variant
MHHHHHHGGSGMLPLFDLEEAPKRVLLVDGHHLAYRTFYALSLTTSRGEPVQMVYGFARSLLKALKEDGQAVVVVFDAKAPSFRHEAYEAYKAGRAPTPEDFPRQLALVKRLVDLLGLVRLEAPGYEADDVLGTLAKKAEREGMEVCILTGDRDFFQLLSEKVSVLLPDGTLVTPKDVQEKYGVPPERWVDFRALTGDRSDNIPGVAGIGEKTALRLLAEWGSVENLLKNLDRVKPDSLRRKIEAHLEDLRLSLDLARIRTDLPLEVDFKALRRRTPDLEGLRAFLEELELGSLLHEFGLLGGEKPREEAPWPPPEGAFVGFLLSRKEPMWAELLALAAAAEGRVHRATSPVEALADLKEARGFLAKDLAVLALREGVALDPTDDPLLVAYLLDHANTNPERVARRYGGEFTEDAAERALLSERLFQTLFPRLSEKLLWLYQEVERPLSRVLAHMEARGVRLDVPLLEALSFELEKELERLEGEVFRLAGHPFNLNSRDQLEKVLFDELGLTPVTRTEKTGKRSTSAAALEALRGAHPIVELILQYRELSKLKSTYLDRLPRLVHPRTGRLHTRFNQTATATGRLSSSDPNLQNIPVRTPLGQHIRKAFVAEEGWLLLAADYSQIELRVLAHLSGDENLKRVFREGKDIHTETAAWMFGVDPALVDPKMRRAAKTVNFGVLYGMSAARLSQELGIDYKEAEAFIERYFQSFPKVRAWIERTLEEGRTRGYVETLFGRRRYVKDLTSRVRSVREAAERMAWNMPVQGTAADLMKIAMVKLFPRLKPLGAHLLLQVHDELVLEVPEDRAEEAKALVKEVMENAYPLDVPLEVEVGVGRDWLEAKQD

SEQ ID NO: 1147 - DNA, 2538 bp, synthetic construct
  misc_feature 1..2538: note = DNA Polymerase Variant
  source 1..2538: mol_type = other DNA
atgcaccatcatcatcatcatggcggtagcggcatgttaccgctgtttgatttggaagaaccaccaaaacgtgtgctgcttgttgacggccatcatctggcgtatcgtaccttctacgcactgagccttacgacctcacgtggtgagcctgtccagatggtgtatgggtttgctcgctccctgctgaaagccctgaaggaagatggtcaagccgtagtagtggttttcgatgcgaaagcaccgtcgtttcgtcacgaagcgtacgaggcctataaagctggccgcgcaccgaccccggaagactttccgcgtcagttagcgctcgtcaaacgcctcgtggatttgctgggattagttcgcttggaagctcctggctacgaggcggacgacgtgctcggtacactggccaagaaagcagaacgtgaaggcatggaggtctgcattcttaccggtgatcgcgatttcttccagctgctgtctgagaaagtgagcgttttgctgcccgatggcacgttagtaaccccgaaagatgtgcaagagaaatatggagttccgccagaacgttgggtggactttcgcgcactgactggtgatcgttcagacaacatcccgggcgttgccgggattggtgaaaagacggcgctgcgcctgctggcagaatggggctcggtggaaaatctgctcaagaaccttgatcgtgtgaaacctgatagcttacgccgcaagatcgaagcccacctggaagacttgcgtctgagtctggatcttgcccgtattcgcaccgatctgccgttggaagtagactttaaagctctgcgtcgtcgcacacccgatttagaggggttacgcgcgttcctcgaagaactggagctgggctccctgctgcatgaattcggtttgttgggcggagagaaaccgcgtgaagaagcaccatggccgccgcccgaaggtgcctttgtcggctttcttctgtcacgcaaagagccaatgtgggcggaactgttagctcttgcagccgccgcggaagggcgtgttcaccgcgcgacctctcctgtcgaggccctcgctgacctcaaagaagcacgtggtttcttggcgaaagatttagccgtgcttgcattacgcgaaggcgttgcgctcgatccgacggacgacccgcttttggtggcttatttgctcgatcatgcgaataccaacccggaacgtgtcgcccgtcgttacggcggcgagtttactgaagatgcggcagaacgcgcgttgcttagcgaacgcctcttccagacgttatttccacgtctttcggagaaattactctggctctatcaggaagtcgaacgtccattgagtcgcgtgcttgcccatatggaggctcgcggtgtgcgcttagatgttccgttgttagaagcactcagcttcgagttggagaaagaactggaacgtcttgaaggcgaagtctttcgtttagcggggcatcccttcaatctcaactctcgcgaccaattggagaaagtgctctttgatgaattaggtttaacccctgtcacgcgtacagagaagaccggcaaacgttccacttcggcagccgccttggaagcacttcgtggtgctcacccgatcgtcgagttgattttgcagtatcgcgagctcagcaaactcaaatcaacctatcttgataggttacctcgtcttgttcatccacgtacgggtcgtttacacacccgcttcaatcaaacggcaacagccaccgggcgcttgtcgtcgagtgacccgaacctccagaatattccagtgcgcacgccgctgggccaacacattcgtaaagcgtttgttgcggaagaaggttggttattacttgcggccgattactcccagatcgaacttcgtgtattggcgcatctctctggcgacgagaatcttaaacgcgtgtttcgcgaaggcaaggatattcacactgaaaccgcagcctggatgttcggggtggacccagccttagtggaccccaagatgcgtcgtgccgccaagaccgtcaactttggcgtactctatggtatgtcagcagcacgtcttagtcaggaattgggcattgactacaaagaagctgaagcgtttatcgagcgctatttccaatcctttccgaaagttcgcgcgtggattgaacgtacgctcgaagaaggtcgcactcgcggctatgtgctgacgttattcgggcgtcgtcgctacgttccagatcttacgtctcgtgtccgctcagtgcgcgaagctgctgagcgtatggcctggaatatgcctgttcagggaacagcggcggacctcatgaagatcgccatggtgaaattgtttccgcgcttgaaacccttaggagcccaccttcttttacaggtgcatgatgaattggtcttggaagtacccgaggatcgcgcagaagaagccaaagcactcgtgaaagaggttatggaaaacgcgtatccgttagatgttccgttggaggtcgaagtgggtgtaggccgtgattggcttgaagcgaaacaagactaatga

SEQ ID NO: 1148 - protein, 844 aa, synthetic construct
  REGION 1..844: note = DNA Polymerase Variant
MHHHHHHGGSGMLPLFDLEEPPKRVLLVDGHHLAYRTFYALSLTTSRGEPVQMVYGFARSLLKALKEDGQAVVVVFDAKAPSFRHEAYEAYKAGRAPTPEDFPRQLALVKRLVDLLGLVRLEAPGYEADDVLGTLAKKAEREGMEVCILTGDRDFFQLLSEKVSVLLPDGTLVTPKDVQEKYGVPPERWVDFRALTGDRSDNIPGVAGIGEKTALRLLAEWGSVENLLKNLDRVKPDSLRRKIEAHLEDLRLSLDLARIRTDLPLEVDFKALRRRTPDLEGLRAFLEELELGSLLHEFGLLGGEKPREEAPWPPPEGAFVGFLLSRKEPMWAELLALAAAAEGRVHRATSPVEALADLKEARGFLAKDLAVLALREGVALDPTDDPLLVAYLLDHANTNPERVARRYGGEFTEDAAERALLSERLFQTLFPRLSEKLLWLYQEVERPLSRVLAHMEARGVRLDVPLLEALSFELEKELERLEGEVFRLAGHPFNLNSRDQLEKVLFDELGLTPVTRTEKTGKRSTSAAALEALRGAHPIVELILQYRELSKLKSTYLDRLPRLVHPRTGRLHTRFNQTATATGRLSSSDPNLQNIPVRTPLGQHIRKAFVAEEGWLLLAADYSQIELRVLAHLSGDENLKRVFREGKDIHTETAAWMFGVDPALVDPKMRRAAKTVNFGVLYGMSAARLSQELGIDYKEAEAFIERYFQSFPKVRAWIERTLEEGRTRGYVLTLFGRRRYVPDLTSRVRSVREAAERMAWNMPVQGTAADLMKIAMVKLFPRLKPLGAHLLLQVHDELVLEVPEDRAEEAKALVKEVMENAYPLDVPLEVEVGVGRDWLEAKQD

SEQ ID NO: 1149 - DNA, 2538 bp, synthetic construct
  misc_feature 1..2538: note = DNA Polymerase Variant
  source 1..2538: mol_type = other DNA
atgcaccatcatcatcatcatggcggtagcggcatgttaccgctgtttgatttggaagaaccaccaaaacgcgtgctgcttgttgacggccatcatctggcgtatcgtaccttctacgcactgagccttacgacctcacgtggtgagcctgtccagatggtgtatgggtttgctcgctccctgctgaaagccctgaaggaagatggtcaagccgtagtagtggttttcgatgcgaaagcaccgtcgtttcgtcacgaagcgtacgaggcctataaagctggccgcgcaccgaccccggaagactttccgcgtcagttagcgctcgtcaaacgcctcgtggatttgctgggattagttcgcttggaagctcctggctacgaggcggacgacgtgctcggtacactggccaagaaagcagaacgtgaaggcatggaggtctgcattcttaccggtgatcgcgatttcttccagctgctgtctgagaaagtgagcgttttgctgcccgatggcacgttagtaaccccgaaagatgtgcaagagaaatatggagttccgccagaacgttgggtggactttcgcgcactgactggtgatcgttcagacaacatcccgggcgttgccgggattggtgaaaagacggcgctgcgcctgctggcagaatggggctcggtggaaaatctgctcaagaaccttgatcgtgtgaaacctgatagcttacgccgcaagatcgaagcccacctggaagacttgcgtctgagtctggatcttgcccgtattcgcaccgatctgccgttggaagtagactttaaagctctgcgtcgtcgcacacccgatttagaggggttacgcgcgttcctcgaagaactggagctgggctccctgctgcatgaattcggtttgttgggcggagagaaaccgcgtgaagaagcaccatggccgccgcccgaaggtgcctttgtcggctttcttctgtcacgcaaagagccaatgtgggcggaactgttagctcttgcagccgccgcggaagggcgtgttcaccgcgcgacctctcctgtcgaggccctcgctgacctcaaagaagcacgtggtttcttggcgaaagatttagccgtgcttgcattacgcgaaggcgttgcgctcgatccgacggacgacccgcttttggtggcttattctctcgatcatgcgaataccaacccggaacgtgtcgcccgtcgttacggcggcgagtttactgaagatgcggcagaacgcgcgttgcttagcgaacgcctcttccagacgttatttccacgtctttcggagaaattactctggctctatcaggaagtcgaacgtccattgagtcgcgtgcttgcccatatggaggctcgcggtgtgcgcttagatgttccgttgttagaagcactcagcttcgagttggagaaagaactggaacgtcttgaaggcgaagtctttcgtttagcggggcatcccttcaatctcaactctcgcgaccaattggagaaagtgctctttgatgaattaggtttaacccctgtcacgcgtacagagaagaccggcaaacgttccacttcggcagccgccttggaagcacttcgtggtgctcacccgatcgtcgagttgattttgcagtatcgcgagctcagcaaactcaaatcaacctatcttgataggttacctcgtcttgttcatccacgtacgggtcgtttacacacccgcttcaatcaaacggcaacagccaccgggcgcttgtcgtcgagtgacccgaacctccagaatattccagtgcgcacgccgctgggccaacacattcgtaaagcgtttgttgcggaagaaggttggttattacttgcggccgattactcccagatcgaacttcgtgtattggcgcatctctctggcgacgagaatcttaaacgcgtgtttcgcgaaggcaaggatattcacactgaaaccgcagcctggatgttcggggtggacccagccttagtggaccccaagatgcgtcgtgccgccaagaccgtcaactttggcgtactctatggtatgtcagcagcacgtcttagtcaggaattgggcattgactacaaagaagctgaagcgtttatcgagcgctatttccaatcctttccgaaagttcgcgcgtggattgaacgtacgctcgaagaaggtcgcactcgcggctatgtggaaacgttattcgggcgtcgtcgctacgttccagatcttacgtctcgtgtccgctcagtgcgcgaagctgctgagcgtatggcctggaatatgcctgttcagggaacagcggcggacctcatgaagatcgccatggtgaaattgtttccgcgcttgaaacccttaggagcccaccttcttttacaggtgcatgatgaattggtcttggaagtacccgaggatcgcgcagaagaagccaaagcactcgtgaaagaggttatggaaaacgcgtatccgttagatgttccgttggaggtcgaagtgggtgtaggccgtgattggcttgaagcgaaacaagactaatga

SEQ ID NO: 1150 - protein, 844 aa, synthetic construct
  REGION 1..844: note = DNA Polymerase Variant
MHHHHHHGGSGMLPLFDLEEPPKRVLLVDGHHLAYRTFYALSLTTSRGEPVQMVYGFARSLLKALKEDGQAVVVVFDAKAPSFRHEAYEAYKAGRAPTPEDFPRQLALVKRLVDLLGLVRLEAPGYEADDVLGTLAKKAEREGMEVCILTGDRDFFQLLSEKVSVLLPDGTLVTPKDVQEKYGVPPERWVDFRALTGDRSDNIPGVAGIGEKTALRLLAEWGSVENLLKNLDRVKPDSLRRKIEAHLEDLRLSLDLARIRTDLPLEVDFKALRRRTPDLEGLRAFLEELELGSLLHEFGLLGGEKPREEAPWPPPEGAFVGFLLSRKEPMWAELLALAAAAEGRVHRATSPVEALADLKEARGFLAKDLAVLALREGVALDPTDDPLLVAYSLDHANTNPERVARRYGGEFTEDAAERALLSERLFQTLFPRLSEKLLWLYQEVERPLSRVLAHMEARGVRLDVPLLEALSFELEKELERLEGEVFRLAGHPFNLNSRDQLEKVLFDELGLTPVTRTEKTGKRSTSAAALEALRGAHPIVELILQYRELSKLKSTYLDRLPRLVHPRTGRLHTRFNQTATATGRLSSSDPNLQNIPVRTPLGQHIRKAFVAEEGWLLLAADYSQIELRVLAHLSGDENLKRVFREGKDIHTETAAWMFGVDPALVDPKMRRAAKTVNFGVLYGMSAARLSQELGIDYKEAEAFIERYFQSFPKVRAWIERTLEEGRTRGYVETLFGRRRYVPDLTSRVRSVREAAERMAWNMPVQGTAADLMKIAMVKLFPRLKPLGAHLLLQVHDELVLEVPEDRAEEAKALVKEVMENAYPLDVPLEVEVGVGRDWLEAKQD

SEQ ID NO: 1151 - DNA, 2538 bp, synthetic construct
  misc_feature 1..2538: note = DNA Polymerase Variant
  source 1..2538: mol_type = other DNA
atgcaccatcatcatcatcatggcggtagcggcatgttaccgctgtttgatttggaagaaccaccaaaacgcgtgctgcttgttgacggccatcatctggcgtatcgtaccttctacgcactgagccttacgacctcacgtggtgagcctgtccagatggtgtatgggtttgctcgctccctgctgaaagccctgaaggaagatggtcaagccgtagtagtggttttcgatgcgaaagcaccgtcgtttcgtcacgaagcgtacgaggcctataaagctggccgcgcaccgaccccggaagactttccgcgtcagttagcgctcgtcaaacgcctcgtggatttgctgggattagttcgcttggaagctcctggctacgaggcggacgacgtgctcggtacactggccaagaaagcagaacgtgaaggcatggaggtctgcattcttaccggtgatcgcgatttcttccagctgctgtctgagaaagtgagcgttttgctgcccgatggcacgttagtaaccccgaaagatgtgcaagagaaatatggagttccgccagaacgttgggtggactttcgcgcactgactggtgatcgttcagacaacatcccgggcgttgccgggattggtgaaaagacggcgctgcgcctgctggcagaatggggctcggtggaaaatctgctcaagaaccttgatcgtgtgaaacctgatagcttacgccgcaagatcgaagcccacctggaagacttgcgtctgagtctggatcttgcccgtattcgcaccgatctgccgttggaagtagactttaaagctctgcgtcgtcgcacacccgatttagaggggttacgcgcgttcctcgaagaactggagctgggctccctgctgcatgaattcggtttgttgggcggagagaaaccgcgtgaagaagcaccatggccgccgcccgaaggtgcctttgtcggctttcttctgtcacgcaaagagccaatgtgggcggaactgttagctcttgcagccgccgcggaagggcgtgttcaccgcgcgacctctcctgtcgaggccctcgctgacctcaaagaagcacgtggtttcttggcgaaagatttagccgtgcttgcattacgcgaaggcgttgcgctcgatccgacggacgacccgcttccggtggcttatttgctcgatcatgcgaataccaacccggaacgtgtcgcccgtcgttacggcggcgagtttactgaagatgcggcagaacgcgcgttgcttagcgaacgcctcttccagacgttatttccacgtctttcggagaaattactctggctctatcaggaagtcgaacgtccattgagtcgcgtgcttgcccatatggaggctcgcggtgtgcgcttagatgttccgttgttagaagcactcagcttcgagttggagaaagaactggaacgtcttgaaggcgaagtctttcgtttagcggggcatcccttcaatctcaactctcgcgaccaattggagaaagtgctctttgatgaattaggtttaacccctgtcacgcgtacagagaagaccggcaaacgttccacttcggcagccgccttggaagcacttcgtggtgctcacccgatcgtcgagttgattttgcagtatcgcgagctcagcaaactcaaatcaacctatcttgataggttacctcgtcttgttcatccacgtacgggtcgtttacacacccgcttcaatcaaacggcaacagccaccgggcgcttgtcgtcgagtgacccgaacctccagaatattccagtgcgcacgccgctgggccaacacattcgtaaagcgtttgttgcggaagaaggttggttattacttgcggccgattactcccagatcgaacttcgtgtattggcgcatctctctggcgacgagaatcttaaacgcgtgtttcgcgaaggcaaggatattcacactgaaaccgcagcctggatgttcggggtggacccagccttagtggaccccaagatgcgtcgtgccgccaagaccgtcaactttggcgtactctatggtatgtcagcagcacgtcttagtcaggaattgggcattgactacaaagaagctgaagcgtttatcgagcgctatttccaatcctttccgaaagttcgcgcgtggattgaacgtacgctcgaagaaggtcgcactcgcggctatgtggaaacgttattcgggcgtcgtcgctacgttccagatcttacgtctcgtgtccgctcagtgcgcgaagctgctgagcgtatggcctggaatatgcctgttcagggaacagcggcggacctcatgaagatcgccatggtgaaattgtttccgcgcttgaaacccttaggagcccaccttcttttacaggtgcatgatgaattggtcttggaagtacccgaggatcgcgcagaagaagccaaagcactcgtgaaagaggttatggaaaacgcgtatccgttagatgttccgttggaggtcgaagtgggtgtaggccgtgattggcttgaagcgaaacaagactaatga

SEQ ID NO: 1152 - protein, 844 aa, synthetic construct
  REGION 1..844: note = DNA Polymerase Variant
MHHHHHHGGSGMLPLFDLEEPPKRVLLVDGHHLAYRTFYALSLTTSRGEPVQMVYGFARSLLKALKEDGQAVVVVFDAKAPSFRHEAYEAYKAGRAPTPEDFPRQLALVKRLVDLLGLVRLEAPGYEADDVLGTLAKKAEREGMEVCILTGDRDFFQLLSEKVSVLLPDGTLVTPKDVQEKYGVPPERWVDFRALTGDRSDNIPGVAGIGEKTALRLLAEWGSVENLLKNLDRVKPDSLRRKIEAHLEDLRLSLDLARIRTDLPLEVDFKALRRRTPDLEGLRAFLEELELGSLLHEFGLLGGEKPREEAPWPPPEGAFVGFLLSRKEPMWAELLALAAAAEGRVHRATSPVEALADLKEARGFLAKDLAVLALREGVALDPTDDPLPVAYLLDHANTNPERVARRYGGEFTEDAAERALLSERLFQTLFPRLSEKLLWLYQEVERPLSRVLAHMEARGVRLDVPLLEALSFELEKELERLEGEVFRLAGHPFNLNSRDQLEKVLFDELGLTPVTRTEKTGKRSTSAAALEALRGAHPIVELILQYRELSKLKSTYLDRLPRLVHPRTGRLHTRFNQTATATGRLSSSDPNLQNIPVRTPLGQHIRKAFVAEEGWLLLAADYSQIELRVLAHLSGDENLKRVFREGKDIHTETAAWMFGVDPALVDPKMRRAAKTVNFGVLYGMSAARLSQELGIDYKEAEAFIERYFQSFPKVRAWIERTLEEGRTRGYVETLFGRRRYVPDLTSRVRSVREAAERMAWNMPVQGTAADLMKIAMVKLFPRLKPLGAHLLLQVHDELVLEVPEDRAEEAKALVKEVMENAYPLDVPLEVEVGVGRDWLEAKQD

SEQ ID NO: 1153 - DNA, 2538 bp, synthetic construct
  misc_feature 1..2538: note = DNA Polymerase Variant
  source 1..2538: mol_type = other DNA
atgcaccatcatcatcatcatggcggtagcggcatgttaccgctgtttgatttggaagaaccaccaaaacgcgtgctgcttgttgacggccatcatctggcgtatcgtaccttctacgcactgagccttacgacctcacgtggtgagcctgtccagatggtgtatgggtttgctcgctccctgctgaaagccctgaaggaagatggtcaagccgtagtagtggttttcgatgcgaaagcaccgtcgtttcgtcacgaagcgtacgaggcctataaagctggccgcgcaccgaccccggaagactttccgcgtcagttagcgctcgtcaaacgcctcgtggatttgctgggattagttcgcttggaagctcctggctacgaggcggacgacgtgctcggtacactggccaagaaagcagaacgtgaaggcatggaggtctgcattcttaccggtgatcgcgatttcttccagctgctgtctgagaaagtgagcgttttgctgcccgatggcacgttagtaaccccgaaagatgtgcaagagaaatatggagttccgccagaacgttgggtggactttcgcgcactgactggtgatcgttcagacaacatcccgggcgttgccgggattggtgaaaagacggcgctgcgcctgctggcagaatggggctcggtggaaaatctgctcaagaaccttgatcgtgtgaaacctgatagcttacgccgcaagatcgaagcccacctggaagacttgcgtctgagtctggatcttgcccgtattcgcaccgatctgccgttggaagtagactttaaagctctgcgtcgtcgcacacccgatttagaggggttacgcgcgttcctcgaagaactggagctgggctccctgctgcatgaattcggtttgttgggcggagagaaaccgcgtgaagaagcaccatggccgccgcccgaaggtgcctttgtcggctttcttctgtcacgcaaagagccaatgtgggcggaactgttagctcttgcagccgccgcggaagggcgtgttcaccgcgcgacctctcctgtcgaggccctcgctgacctcaaagaagcacgtggtttcttggcgaaagatttagccgtgcttgcattacgcgaaggcgttgcgctcgatccgacggacgacccgcttttggtggcttatttgtcggatcatgcgaataccaacccggaacgtgtcgcccgtcgttacggcggcgagtttactgaagatgcggcagaacgcgcgttgcttagcgaacgcctcttccagacgttatttccacgtctttcggagaaattactctggctctatcaggaagtcgaacgtccattgagtcgcgtgcttgcccatatggaggctcgcggtgtgcgcttagatgttccgttgttagaagcactcagcttcgagttggagaaagaactggaacgtcttgaaggcgaagtctttcgtttagcggggcatcccttcaatctcaactctcgcgaccaattggagaaagtgctctttgatgaattaggtttaacccctgtcacgcgtacagagaagaccggcaaacgttccacttcggcagccgccttggaagcacttcgtggtgctcacccgatcgtcgagttgattttgcagtatcgcgagctcagcaaactcaaatcaacctatcttgataggttacctcgtcttgttcatccacgtacgggtcgtttacacacccgcttcaatcaaacggcaacagccaccgggcgcttgtcgtcgagtgacccgaacctccagaatattccagtgcgcacgccgctgggccaacacattcgtaaagcgtttgttgcggaagaaggttggttattacttgcggccgattactcccagatcgaacttcgtgtattggcgcatctctctggcgacgagaatcttaaacgcgtgtttcgcgaaggcaaggatattcacactgaaaccgcagcctggatgttcggggtggacccagccttagtggaccccaagatgcgtcgtgccgccaagaccgtcaactttggcgtactctatggtatgtcagcagcacgtcttagtcaggaattgggcattgactacaaagaagctgaagcgtttatcgagcgctatttccaatcctttccgaaagttcgcgcgtggattgaacgtacgctcgaagaaggtcgcactcgcggctatgtggaaacgttattcgggcgtcgtcgctacgttccagatcttacgtctcgtgtccgctcagtgcgcgaagctgctgagcgtatggcctggaatatgcctgttcagggaacagcggcggacctcatgaagatcgccatggtgaaattgtttccgcgcttgaaacccttaggagcccaccttcttttacaggtgcatgatgaattggtcttggaagtacccgaggatcgcgcagaagaagccaaagcactcgtgaaagaggttatggaaaacgcgtatccgttagatgttccgttggaggtcgaagtgggtgtaggccgtgattggcttgaagcgaaacaagactaatga

SEQ ID NO: 1154 - protein, 844 aa, synthetic construct
  REGION 1..844: note = DNA Polymerase Variant
MHHHHHHGGSGMLPLFDLEEPPKRVLLVDGHHLAYRTFYALSLTTSRGEPVQMVYGFARSLLKALKEDGQAVVVVFDAKAPSFRHEAYEAYKAGRAPTPEDFPRQLALVKRLVDLLGLVRLEAPGYEADDVLGTLAKKAEREGMEVCILTGDRDFFQLLSEKVSVLLPDGTLVTPKDVQEKYGVPPERWVDFRALTGDRSDNIPGVAGIGEKTALRLLAEWGSVENLLKNLDRVKPDSLRRKIEAHLEDLRLSLDLARIRTDLPLEVDFKALRRRTPDLEGLRAFLEELELGSLLHEFGLLGGEKPREEAPWPPPEGAFVGFLLSRKEPMWAELLALAAAAEGRVHRATSPVEALADLKEARGFLAKDLAVLALREGVALDPTDDPLLVAYLSDHANTNPERVARRYGGEFTEDAAERALLSERLFQTLFPRLSEKLLWLYQEVERPLSRVLAHMEARGVRLDVPLLEALSFELEKELERLEGEVFRLAGHPFNLNSRDQLEKVLFDELGLTPVTRTEKTGKRSTSAAALEALRGAHPIVELILQYRELSKLKSTYLDRLPRLVHPRTGRLHTRFNQTATATGRLSSSDPNLQNIPVRTPLGQHIRKAFVAEEGWLLLAADYSQIELRVLAHLSGDENLKRVFREGKDIHTETAAWMFGVDPALVDPKMRRAAKTVNFGVLYGMSAARLSQELGIDYKEAEAFIERYFQSFPKVRAWIERTLEEGRTRGYVETLFGRRRYVPDLTSRVRSVREAAERMAWNMPVQGTAADLMKIAMVKLFPRLKPLGAHLLLQVHDELVLEVPEDRAEEAKALVKEVMENAYPLDVPLEVEVGVGRDWLEAKQD

SEQ ID NO: 1155 - DNA, 2538 bp, synthetic construct
  misc_feature 1..2538: note = DNA Polymerase Variant
  source 1..2538: mol_type = other DNA
atgcaccatcatcatcatcatggcggtagcggcatgttaccgctgtttgatttggaagaaccaccaaaacgcgtgctgcttgttgacggccatcatctggcgtatcgtaccttctacgcactgagccttacgacctcacgtggtgagcctgtccagatggtgtatgggtttgctcgctccctgctgaaagccctgaaggaagatggtcaagccgtagtagtggttttcgatgcgaaagcaccgtcgtttcgtcacgaagcgtacgaggcctataaagctggccgcgcaccgaccccggaagactttccgcgtcagttagcgctcgtcaaacgcctcgtggatttgctgggattagttcgcttggaagctcctggctacgaggcggacgacgtgctcggtacactggccaagaaagcagaacgtgaaggcatggaggtctgcattcttaccggtgatcgcgatttcttccagctgctgtctgagaaagtgagcgttttgctgcccgatggcacgttagtaaccccgaaagatgtgcaagagaaatatggagttccgccagaacgttgggtggactttcgcgcactgactggtgatcgttcagacaacatcccgggcgttgccgggattggtgaaaagacggcgctgcgcctgctggcagaatggggctcggtggaaaatctgctcaagaaccttgatcgtgtgaaacctgatagcttacgccgcaagatcgaagcccacctggaagacttgcgtctgagtctggatcttgcccgtattcgcaccgatctgccgttggaagtagactttaaagctctgcgtcgtcgcacacccgatttagaggggttacgcgcgttcctcgaagaactggagctgggctccctgctgcatgaattcggtttgttgggcggagagaaaccgcgtgaagaagcaccatggccgccgcccgaaggtgcctttgtcggctttcttctgtcacgcaaagagccaatgtgggcggaactgttagctcttgcagccgccgcggaagggcgtgttcaccgcgcgacctctcctgtcgaggccctcgctgacctcaaagaagcacgtggtttcttggcgaaagatttagccgtgcttgcattacgcgaaggcgttgcgctcgatccgacggacgacccgcttttggtggcttatttgctcgatcatgcgaataccaacccggaacgtgtcgcccgtcgttacggcggcgagtttactgaagatgcggcagaacgcgcgttgcttagcgaacgcctcttccagacgttatttccacgtctttcggagaaaaatctctggctctatcaggaagtcgaacgtccattgagtcgcgtgcttgcccatatggaggctcgcggtgtgcgcttagatgttccgttgttagaagcactcagcttcgagttggagaaagaactggaacgtcttgaaggcgaagtctttcgtttagcggggcatcccttcaatctcaactctcgcgaccaattggagaaagtgctctttgatgaattaggtttaacccctgtcacgcgtacagagaagaccggcaaacgttccacttcggcagccgccttggaagcacttcgtggtgctcacccgatcgtcgagttgattttgcagtatcgcgagctcagcaaactcaaatcaacctatcttgataggttacctcgtcttgttcatccacgtacgggtcgtttacacacccgcttcaatcaaacggcaacagccaccgggcgcttgtcgtcgagtgacccgaacctccagaatattccagtgcgcacgccgctgggccaacacattcgtaaagcgtttgttgcggaagaaggttggttattacttgcggccgattactcccagatcgaacttcgtgtattggcgcatctctctggcgacgagaatcttaaacgcgtgtttcgcgaaggcaaggatattcacactgaaaccgcagcctggatgttcggggtggacccagccttagtggaccccaagatgcgtcgtgccgccaagaccgtcaactttggcgtactctatggtatgtcagcagcacgtcttagtcaggaattgggcattgactacaaagaagctgaagcgtttatcgagcgctatttccaatcctttccgaaagttcgcgcgtggattgaacgtacgctcgaagaaggtcgcactcgcggctatgtggaaacgttattcgggcgtcgtcgctacgttccagatcttacgtctcgtgtccgctcagtgcgcgaagctgctgagcgtatggcctggaatatgcctgttcagggaacagcggcggacctcatgaagatcgccatggtgaaattgtttccgcgcttgaaacccttaggagcccaccttcttttacaggtgcatgatgaattggtcttggaagtacccgaggatcgcgcagaagaagccaaagcactcgtgaaagaggttatggaaaacgcgtatccgttagatgttccgttggaggtcgaagtgggtgtaggccgtgattggcttgaagcgaaacaagactaatga

SEQ ID NO: 1156 - protein, 844 aa, synthetic construct
  REGION 1..844: note = DNA Polymerase Variant
MHHHHHHGGSGMLPLFDLEEPPKRVLLVDGHHLAYRTFYALSLTTSRGEPVQMVYGFARSLLKALKEDGQAVVVVFDAKAPSFRHEAYEAYKAGRAPTPEDFPRQLALVKRLVDLLGLVRLEAPGYEADDVLGTLAKKAEREGMEVCILTGDRDFFQLLSEKVSVLLPDGTLVTPKDVQEKYGVPPERWVDFRALTGDRSDNIPGVAGIGEKTALRLLAEWGSVENLLKNLDRVKPDSLRRKIEAHLEDLRLSLDLARIRTDLPLEVDFKALRRRTPDLEGLRAFLEELELGSLLHEFGLLGGEKPREEAPWPPPEGAFVGFLLSRKEPMWAELLALAAAAEGRVHRATSPVEALADLKEARGFLAKDLAVLALREGVALDPTDDPLLVAYLLDHANTNPERVARRYGGEFTEDAAERALLSERLFQTLFPRLSEKNLWLYQEVERPLSRVLAHMEARGVRLDVPLLEALSFELEKELERLEGEVFRLAGHPFNLNSRDQLEKVLFDELGLTPVTRTEKTGKRSTSAAALEALRGAHPIVELILQYRELSKLKSTYLDRLPRLVHPRTGRLHTRFNQTATATGRLSSSDPNLQNIPVRTPLGQHIRKAFVAEEGWLLLAADYSQIELRVLAHLSGDENLKRVFREGKDIHTETAAWMFGVDPALVDPKMRRAAKTVNFGVLYGMSAARLSQELGIDYKEAEAFIERYFQSFPKVRAWIERTLEEGRTRGYVETLFGRRRYVPDLTSRVRSVREAAERMAWNMPVQGTAADLMKIAMVKLFPRLKPLGAHLLLQVHDELVLEVPEDRAEEAKALVKEVMENAYPLDVPLEVEVGVGRDWLEAKQD

SEQ ID NO: 1157 - DNA, 2538 bp, synthetic construct
  misc_feature 1..2538: note = DNA Polymerase Variant
  source 1..2538: mol_type = other DNA
atgcaccatcatcatcatcatggcggtagcggcatgttaccgctgtttgatttggaagaaccaccaaaacgcgtgctgcttgttgacggccatcatctggcgtatcgtaccttctacgcactgagccttacgacctcacgtggtgagcctgtccagatggtgtatgggtttgctcgctccctgctgaaagccctgaaggaagatggtcaagccgtagtagtggttttcgatgcgaaagcaccgtcgtttcgtcacgaagcgtacgaggcctataaagctggccgcgcaccgaccccggaagactttccgcgtcagttagcgctcgtcaaacgcctcgtggatttgctgggattagttcgcttggaagctcctggctacgaggcggacgacgtgctcggtacactggccaagaaagcagaacgtgaaggcatggaggtctgcattcttaccggtgatcgcgatttcttccagctgctgtctgagaaagtgagcgttttgctgcccgatggcacgttagtaaccccgaaagatgtgcaagagaaatatggagttccgccagaacgttgggtggactttcgcgcactgactggtgatcgttcagacaacatcccgggcgttgccgggattggtgaaaagacggcgctgcgcctgctggcagaatggggctcggtggaaaatctgctcaagaaccttgatcgtgtgaaacctgatagcttacgccgcaagatcgaagcccacctggaagacttgcgtctgagtctggatcttgcccgtattcgcaccgatctgccgttggaagtagactttaaagctctgcgtcgtcgcacacccgatttagaggggttacgcgcgttcctcgaagaactggagctgggctccctgctgcatgaattcggtttgttgggcggagagaaaccgcgtgaagaagcaccatggccgccgcccgaaggtgcctttgtcggctttcttctgtcacgcaaagagccaatgtgggcggaactgttagctcttgcagccgccgcggaagggcgtgttcaccgcgcgacctctcctgtcgaggccctcgctgacctcaaagaagcacgtggtttcttggcgaaagatttagccgtgcttgcattacgcgaaggcgttgcgctcgatccgacggacgacccgcttttggtggcttatgctctcgatcatgcgaataccaacccggaacgtgtcgcccgtcgttacggcggcgagtttactgaagatgcggcagaacgcgcgttgcttagcgaacgcctcttccagacgttatttccacgtctttcggagaaattactctggctctatcaggaagtcgaacgtccattgagtcgcgtgcttgcccatatggaggctcgcggtgtgcgcttagatgttccgttgttagaagcactcagcttcgagttggagaaagaactggaacgtcttgaaggcgaagtctttcgtttagcggggcatcccttcaatctcaactctcgcgaccaattggagaaagtgctctttgatgaattaggtttaacccctgtcacgcgtacagagaagaccggcaaacgttccacttcggcagccgccttggaagcacttcgtggtgctcacccgatcgtcgagttgattttgcagtatcgcgagctcagcaaactcaaatcaacctatcttgataggttacctcgtcttgttcatccacgtacgggtcgtttacacacccgcttcaatcaaacggcaacagccaccgggcgcttgtcgtcgagtgacccgaacctccagaatattccagtgcgcacgccgctgggccaacacattcgtaaagcgtttgttgcggaagaaggttggttattacttgcggccgattactcccagatcgaacttcgtgtattggcgcatctctctggcgacgagaatcttaaacgcgtgtttcgcgaaggcaaggatattcacactgaaaccgcagcctggatgttcggggtggacccagccttagtggaccccaagatgcgtcgtgccgccaagaccgtcaactttggcgtactctatggtatgtcagcagcacgtcttagtcaggaattgggcattgactacaaagaagctgaagcgtttatcgagcgctatttccaatcctttccgaaagttcgcgcgtggattgaacgtacgctcgaagaaggtcgcactcgcggctatgtggaaacgttattcgggcgtcgtcgctacgttccagatcttacgtctcgtgtccgctcagtgcgcgaagctgctgagcgtatggcctggaatatgcctgttcagggaacagcggcggacctcatgaagatcgccatggtgaaattgtttccgcgcttgaaacccttaggagcccaccttcttttacaggtgcatgatgaattggtcttggaagtacccgaggatcgcgcagaagaagccaaagcactcgtgaaagaggttatggaaaacgcgtatccgttagatgttccgttggaggtcgaagtgggtgtaggccgtgattggcttgaagcgaaacaagactaatga

SEQ ID NO: 1158 - protein, 844 aa, synthetic construct
  REGION 1..844: note = DNA Polymerase Variant
MHHHHHHGGSGMLPLFDLEEPPKRVLLVDGHHLAYRTFYALSLTTSRGEPVQMVYGFARSLLKALKEDGQAVVVVFDAKAPSFRHEAYEAYKAGRAPTPEDFPRQLALVKRLVDLLGLVRLEAPGYEADDVLGTLAKKAEREGMEVCILTGDRDFFQLLSEKVSVLLPDGTLVTPKDVQEKYGVPPERWVDFRALTGDRSDNIPGVAGIGEKTALRLLAEWGSVENLLKNLDRVKPDSLRRKIEAHLEDLRLSLDLARIRTDLPLEVDFKALRRRTPDLEGLRAFLEELELGSLLHEFGLLGGEKPREEAPWPPPEGAFVGFLLSRKEPMWAELLALAAAAEGRVHRATSPVEALADLKEARGFLAKDLAVLALREGVALDPTDDPLLVAYALDHANTNPERVARRYGGEFTEDAAERALLSERLFQTLFPRLSEKLLWLYQEVERPLSRVLAHMEARGVRLDVPLLEALSFELEKELERLEGEVFRLAGHPFNLNSRDQLEKVLFDELGLTPVTRTEKTGKRSTSAAALEALRGAHPIVELILQYRELSKLKSTYLDRLPRLVHPRTGRLHTRFNQTATATGRLSSSDPNLQNIPVRTPLGQHIRKAFVAEEGWLLLAADYSQIELRVLAHLSGDENLKRVFREGKDIHTETAAWMFGVDPALVDPKMRRAAKTVNFGVLYGMSAARLSQELGIDYKEAEAFIERYFQSFPKVRAWIERTLEEGRTRGYVETLFGRRRYVPDLTSRVRSVREAAERMAWNMPVQGTAADLMKIAMVKLFPRLKPLGAHLLLQVHDELVLEVPEDRAEEAKALVKEVMENAYPLDVPLEVEVGVGRDWLEAKQD

SEQ ID NO: 1159 - DNA, 2538 bp, synthetic construct
  misc_feature 1..2538: note = DNA Polymerase Variant
  source 1..2538: mol_type = other DNA
atgcaccatcatcatcatcatggcggtagcggcatgttaccgctgtttgatttggaagaaccaccaaaacgcgtgctgcttgttgacggccatcatctggcgtatcgtaccttctacgcactgagccttacgacctcacgtggtgagcctgtccagatggtgtatgggtttgctcgctccctgctgaaagccctgaaggaagatggtcaagccgtagtagtggttttcgatgcgaaagcaccgtcgtttcgtcacgaagcgtacgaggcctataaagctggccgcgcaccgaccccggaagactttccgcgtcagttagcgctcgtcaaacgcctcgtggatttgctgggattagttcgcttggaagctcctggctacgaggcggacgacgtgctcggtacactggccaagaaagcagaacgtgaaggcatggaggtctgcattcttaccggtgatcgcgatttcttccagctgctgtctgagaaagtgagcgttttgctgcccgatggcacgttagtaaccccgaaagatgtgcaagagaaatatggagttccgccagaacgttgggtggactttcgcgcactgactggtgatcgttcagacaacatcccgggcgttgccgggattggtgaaaagacggcgctgcgcctgctggcagaatggggctcggtggaaaatctgctcaagaaccttgatcgtgtgaaacctgatagcttacgccgcaagatcgaagcccacctggaagacttgcgtctgagtctggatcttgcccgtattcgcaccgatctgccgttggaagtagactttaaagctctgcgtcgtcgcacacccgatttagaggggttacgcgcgttcctcgaagaactggagctgggctccctgctgcatgaattcggtttgttgggcggagagaaaccgcgtgaagaagcaccatggccgccgcccgaaggtgcctttgtcggctttcttctgtcacgcaaagagccaatgtgggcggaactgttagctcttgcagccgccgcggaagggcgtgttcaccgcgcgacctctcctgtcgaggccctcgctgacctcaaagaagcacgtggtttcttggcgaaagatttagccgtgcttgcattacgcgaaggcgttgcgctcgatccgacggacgacccgcttttggtggcttatttgggtgatcatgcgaataccaacccggaacgtgtcgcccgtcgttacggcggcgagtttactgaagatgcggcagaacgcgcgttgcttagcgaacgcctcttccagacgttatttccacgtctttcggagaaattactctggctctatcaggaagtcgaacgtccattgagtcgcgtgcttgcccatatggaggctcgcggtgtgcgcttagatgttccgttgttagaagcactcagcttcgagttggagaaagaactggaacgtcttgaaggcgaagtctttcgtttagcggggcatcccttcaatctcaactctcgcgaccaattggagaaagtgctctttgatgaattaggtttaacccctgtcacgcgtacagagaagaccggcaaacgttccacttcggcagccgccttggaagcacttcgtggtgctcacccgatcgtcgagttgattttgcagtatcgcgagctcagcaaactcaaatcaacctatcttgataggttacctcgtcttgttcatccacgtacgggtcgtttacacacccgcttcaatcaaacggcaacagccaccgggcgcttgtcgtcgagtgacccgaacctccagaatattccagtgcgcacgccgctgggccaacacattcgtaaagcgtttgttgcggaagaaggttggttattacttgcggccgattactcccagatcgaacttcgtgtattggcgcatctctctggcgacgagaatcttaaacgcgtgtttcgcgaaggcaaggatattcacactgaaaccgcagcctggatgttcggggtggacccagccttagtggaccccaagatgcgtcgtgccgccaagaccgtcaactttggcgtactctatggtatgtcagcagcacgtcttagtcaggaattgggcattgactacaaagaagctgaagcgtttatcgagcgctatttccaatcctttccgaaagttcgcgcgtggattgaacgtacgctcgaagaaggtcgcactcgcggctatgtggaaacgttattcgggcgtcgtcgctacgttccagatcttacgtctcgtgtccgctcagtgcgcgaagctgctgagcgtatggcctggaatatgcctgttcagggaacagcggcggacctcatgaagatcgccatggtgaaattgtttccgcgcttgaaacccttaggagcccaccttcttttacaggtgcatgatgaattggtcttggaagtacccgaggatcgcgcagaagaagccaaagcactcgtgaaagaggttatggaaaacgcgtatccgttagatgttccgttggaggtcgaagtgggtgtaggccgtgattggcttgaagcgaaacaagactaatga

SEQ ID NO: 1160 - protein, 844 aa, synthetic construct
  REGION 1..844: note = DNA Polymerase Variant
MHHHHHHGGSGMLPLFDLEEPPKRVLLVDGHHLAYRTFYALSLTTSRGEPVQMVYGFARSLLKALKEDGQAVVVVFDAKAPSFRHEAYEAYKAGRAPTPEDFPRQLALVKRLVDLLGLVRLEAPGYEADDVLGTLAKKAEREGMEVCILTGDRDFFQLLSEKVSVLLPDGTLVTPKDVQEKYGVPPERWVDFRALTGDRSDNIPGVAGIGEKTALRLLAEWGSVENLLKNLDRVKPDSLRRKIEAHLEDLRLSLDLARIRTDLPLEVDFKALRRRTPDLEGLRAFLEELELGSLLHEFGLLGGEKPREEAPWPPPEGAFVGFLLSRKEPMWAELLALAAAAEGRVHRATSPVEALADLKEARGFLAKDLAVLALREGVALDPTDDPLLVAYLGDHANTNPERVARRYGGEFTEDAAERALLSERLFQTLFPRLSEKLLWLYQEVERPLSRVLAHMEARGVRLDVPLLEALSFELEKELERLEGEVFRLAGHPFNLNSRDQLEKVLFDELGLTPVTRTEKTGKRSTSAAALEALRGAHPIVELILQYRELSKLKSTYLDRLPRLVHPRTGRLHTRFNQTATATGRLSSSDPNLQNIPVRTPLGQHIRKAFVAEEGWLLLAADYSQIELRVLAHLSGDENLKRVFREGKDIHTETAAWMFGVDPALVDPKMRRAAKTVNFGVLYGMSAARLSQELGIDYKEAEAFIERYFQSFPKVRAWIERTLEEGRTRGYVETLFGRRRYVPDLTSRVRSVREAAERMAWNMPVQGTAADLMKIAMVKLFPRLKPLGAHLLLQVHDELVLEVPEDRAEEAKALVKEVMENAYPLDVPLEVEVGVGRDWLEAKQD

SEQ ID NO: 1161 - DNA, 2538 bp, synthetic construct
  misc_feature 1..2538: note = DNA Polymerase Variant
  source 1..2538: mol_type = other DNA
atgcaccatcatcatcatcatggcggtagcggcatgttaccgctgtttgatttggaagaaccaccaaaacgcgtgctgcttgttgacggccatcatctggcgtatcgtaccttctacgcactgagccttacgacctcacgtggtgagcctgtccagatggtgtatgggtttgctcgctccctgctgaaagccctgaaggaagatggtcaagccgtagtagtggttttcgatgcgaaagcaccgtcgtttcgtcacgaagcgtacgaggcctataaagctggccgcgcaccgaccccggaagactttccgcgtcagttagcgctcgtcaaacgcctcgtggatttgctgggattagttcgcttggaagctcctggctacgaggcggacgacgtgctcggtacactggccaagaaagcagaacgtgaaggcatggaggtctgcattcttaccggtgatcgcgatttcttccagctgctgtctgagaaagtgagcgttttgctgcccgatggcacgttagtaaccccgaaagatgtgcaagagaaatatggagttccgccagaacgttgggtggactttcgcgcactgactggtgatcgttcagacaacatcccgggcgttgccgggattggtgaaaagacggcgctgcgcctgctggcagaatggggctcggtggaaaatctgctcaagaaccttgatcgtgtgaaacctgatagcttacgccgcaagatcgaagcccacctggaagacttgcgtctgagtctggatcttgcccgtattcgcaccgatctgccgttggaagtagactttaaagctctgcgtcgtcgcacacccgatttagaggggttacgcgcgttcctcgaagaactggagctgggctccctgctgcatgaattcggtttgttgggcggagagaaaccgcgtgaagaagcaccatggccgccgcccgaaggtgcctttgtcggctttcttctgtcacgcaaagagccaatgtgggcggaactgttagctcttgcagccgccgcggaagggcgtgttcaccgcgcgacctctcctgtcgaggccctcgctgacctcaaagaagcacgtggtttcttggcgaaagatttagccgtgcttgcattacgcgaaggcgttgcgctcgatccgacggacgacccgcttttggtggcttatttgctcgatcatgcgaataccaacccggaacgtgtcgcccgtcgttacggcggcgagtttatggaagatgcggcagaacgcgcgttgcttagcgaacgcctcttccagacgttatttccacgtctttcggagaaattactctggctctatcaggaagtcgaacgtccattgagtcgcgtgcttgcccatatggaggctcgcggtgtgcgcttagatgttccgttgttagaagcactcagcttcgagttggagaaagaactggaacgtcttgaaggcgaagtctttcgtttagcggggcatcccttcaatctcaactctcgcgaccaattggagaaagtgctctttgatgaattaggtttaacccctgtcacgcgtacagagaagaccggcaaacgttccacttcggcagccgccttggaagcacttcgtggtgctcacccgatcgtcgagttgattttgcagtatcgcgagctcagcaaactcaaatcaacctatcttgataggttacctcgtcttgttcatccacgtacgggtcgtttacacacccgcttcaatcaaacggcaacagccaccgggcgcttgtcgtcgagtgacccgaacctccagaatattccagtgcgcacgccgctgggccaacacattcgtaaagcgtttgttgcggaagaaggttggttattacttgcggccgattactcccagatcgaacttcgtgtattggcgcatctctctggcgacgagaatcttaaacgcgtgtttcgcgaaggcaaggatattcacactgaaaccgcagcctggatgttcggggtggacccagccttagtggaccccaagatgcgtcgtgccgccaagaccgtcaactttggcgtactctatggtatgtcagcagcacgtcttagtcaggaattgggcattgactacaaagaagctgaagcgtttatcgagcgctatttccaatcctttccgaaagttcgcgcgtggattgaacgtacgctcgaagaaggtcgcactcgcggctatgtggaaacgttattcgggcgtcgtcgctacgttccagatcttacgtctcgtgtccgctcagtgcgcgaagctgctgagcgtatggcctggaatatgcctgttcagggaacagcggcggacctcatgaagatcgccatggtgaaattgtttccgcgcttgaaacccttaggagcccaccttcttttacaggtgcatgatgaattggtcttggaagtacccgaggatcgcgcagaagaagccaaagcactcgtgaaagaggttatggaaaacgcgtatccgttagatgttccgttggaggtcgaagtgggtgtaggccgtgattggcttgaagcgaaacaagactaatga

SEQ ID NO: 1162 - protein, 844 aa, synthetic construct
  REGION 1..844: note = DNA Polymerase Variant
MHHHHHHGGSGMLPLFDLEEPPKRVLLVDGHHLAYRTFYALSLTTSRGEPVQMVYGFARSLLKALKEDGQAVVVVFDAKAPSFRHEAYEAYKAGRAPTPEDFPRQLALVKRLVDLLGLVRLEAPGYEADDVLGTLAKKAEREGMEVCILTGDRDFFQLLSEKVSVLLPDGTLVTPKDVQEKYGVPPERWVDFRALTGDRSDNIPGVAGIGEKTALRLLAEWGSVENLLKNLDRVKPDSLRRKIEAHLEDLRLSLDLARIRTDLPLEVDFKALRRRTPDLEGLRAFLEELELGSLLHEFGLLGGEKPREEAPWPPPEGAFVGFLLSRKEPMWAELLALAAAAEGRVHRATSPVEALADLKEARGFLAKDLAVLALREGVALDPTDDPLLVAYLLDHANTNPERVARRYGGEFMEDAAERALLSERLFQTLFPRLSEKLLWLYQEVERPLSRVLAHMEARGVRLDVPLLEALSFELEKELERLEGEVFRLAGHPFNLNSRDQLEKVLFDELGLTPVTRTEKTGKRSTSAAALEALRGAHPIVELILQYRELSKLKSTYLDRLPRLVHPRTGRLHTRFNQTATATGRLSSSDPNLQNIPVRTPLGQHIRKAFVAEEGWLLLAADYSQIELRVLAHLSGDENLKRVFREGKDIHTETAAWMFGVDPALVDPKMRRAAKTVNFGVLYGMSAARLSQELGIDYKEAEAFIERYFQSFPKVRAWIERTLEEGRTRGYVETLFGRRRYVPDLTSRVRSVREAAERMAWNMPVQGTAADLMKIAMVKLFPRLKPLGAHLLLQVHDELVLEVPEDRAEEAKALVKEVMENAYPLDVPLEVEVGVGRDWLEAKQD

SEQ ID NO: 1163 - DNA, 2538 bp, synthetic construct
  misc_feature 1..2538: note = DNA Polymerase Variant
  source 1..2538: mol_type = other DNA
atgcaccatcatcatcatcatggcggtagcggcatgttaccgctgtttgatttggaagaaccaccaaaacgcgtgctgcttgttgacggccatcatctggcgtatcgtaccttctacgcactgagccttacgacctcacgtggtgagcctgtccagatggtgtatgggtttgctcgctccctgctgaaagccctgaaggaagatggtcaagccgtagtagtggttttcgatgcgcgtgcaccgtcgtttcgtcacgaagcgtacgaggcctataaagctggccgcgcaccgaccccggaagactttccgcgtcagttagcgctcgtcaaacgcctcgtggatttgctgggattagttcgcttggaagctcctggctacgaggcggacgacgtgctcggtacactggccaagaaagcagaacgtgaaggcatggaggtctgcattcttaccggtgatcgcgatttcttccagctgctgtctgagaaagtgagcgttttgctgcccgatggcacgttagtaaccccgaaagatgtgcaagagaaatatggagttccgccagaacgttgggtggactttcgcgcactgactggtgatcgttcagacaacatcccgggcgttgccgggattggtgaaaagacggcgctgcgcctgctggcagaatggggctcggtggaaaatctgctcaagaaccttgatcgtgtgaaacctgatagcttacgccgcaagatcgaagcccacctggaagacttgcgtctgagtctggatcttgtacgtattcgcaccgatctgccgttggaagtagactttaaagctctgcgtcgtcgcacacccgatttagaggggttacgcgcgttcctcgaagaactggagctgggctccctgctgcatgaattcggtttgttgggcggagagaaaccgcgtgaagaagcaccatggccgccgcccgaaggtgcctttgtcggctttcttctgtcacgcaaagagccaatgtgggcggaactgttagctcttgcagccgccgcggaagggcgtgttcaccgcgcgacctctcctgtcgaggccctcgctgacctcaaagaagcacgtggtttcttggcgaaagatttagccgtgcttgcattacgcgaaggcgttgcgctcgatccgacggacgacccgcttttggtggcttatttgctcgatagcgcgaataccaacccggaacgtgtcgcccgtcgttacggcggcgagtttactgaagatgcggcagaacgcgcgttgcttagcgaacgcctcttccagacgttatttccacgtctttcggagaaattactctggctctatcaggaagtcgaacgtccattgagtcgcgtgcttgcccatatggaggctcgcggtgtgcgcttagatgttccgttgttagaagcactcagcttcgagttggagaaagaactggaacgtcttgaaggcgaagtctttcgtttagcggggcatcccttcaatctcaactctcgcgaccaattggagaaagtgctctttgatgaattaggtttaacccctgtcacgcgtacagagaagaccggcaaacgttccacttcggcagccgccttggaagcacttcgtggtgctcacccgatcgtcgagttgattttgcagtatcgcgagctcagcaaactcaaatcaacctatcttgataggttacctaagcttgttcatccacgtacgggtcgtttacacacccgcttcaatcaaacggcaacagccaccgggcgcttgtcgtcgagtgacccgaacctccagaatattccagtgcgcacgccgctgggccaacacattcgtaaagcgtttgttgcggaagaaggttggttattacttgcggccgattactcccagatcgaacttcgtgtattggcgcatctctctggcgacgagaatcttaaacgcgtgtttcgcgaaggcaaggatattcacactgaaaccgcagcctggatgttcggggtggactcggccttagtggaccccaagatgcgtcgtgccgccaagaccgtcaactttggcgtactctatggtatgtcagcagcacgtcttagtcaggaattgggcattgactacaaagtagctgaagcgtttatcgagcgctatttccaatcctttccgaaagttcgcgcgtggattgaacgtacgctcgaagaaggtcgcactcgcggctatgtggaaacgttattcgggcgtcgtcgctacgttccagatcttacgtctcgtgtccgctcagtgcgcgaagctgctgagcgtatggcctggaatatgcctgttcagggaacagcggcggacctcatgaagatcgccatggtgaaattgtttccgcgcttgaaacccttaggagcccaccttcttttacaggtgcatgatgaattggtcttggaagtacccgaggatcgcgcagaagaagccaaagcactcgtgaaagaggttatggaaaacgcgtatccgttagatgttccgttggaggtcgaagtgggtgtaggccgtgattggcttgaagcgaaacaagactaatga

SEQ ID NO: 1164 - protein, 844 aa, synthetic construct
  REGION 1..844: note = DNA Polymerase Variant
MHHHHHHGGSGMLPLFDLEEPPKRVLLVDGHHLAYRTFYALSLTTSRGEPVQMVYGFARSLLKALKEDGQAVVVVFDARAPSFRHEAYEAYKAGRAPTPEDFPRQLALVKRLVDLLGLVRLEAPGYEADDVLGTLAKKAEREGMEVCILTGDRDFFQLLSEKVSVLLPDGTLVTPKDVQEKYGVPPERWVDFRALTGDRSDNIPGVAGIGEKTALRLLAEWGSVENLLKNLDRVKPDSLRRKIEAHLEDLRLSLDLVRIRTDLPLEVDFKALRRRTPDLEGLRAFLEELELGSLLHEFGLLGGEKPREEAPWPPPEGAFVGFLLSRKEPMWAELLALAAAAEGRVHRATSPVEALADLKEARGFLAKDLAVLALREGVALDPTDDPLLVAYLLDSANTNPERVARRYGGEFTEDAAERALLSERLFQTLFPRLSEKLLWLYQEVERPLSRVLAHMEARGVRLDVPLLEALSFELEKELERLEGEVFRLAGHPFNLNSRDQLEKVLFDELGLTPVTRTEKTGKRSTSAAALEALRGAHPIVELILQYRELSKLKSTYLDRLPKLVHPRTGRLHTRFNQTATATGRLSSSDPNLQNIPVRTPLGQHIRKAFVAEEGWLLLAADYSQIELRVLAHLSGDENLKRVFREGKDIHTETAAWMFGVDSALVDPKMRRAAKTVNFGVLYGMSAARLSQELGIDYKVAEAFIERYFQSFPKVRAWIERTLEEGRTRGYVETLFGRRRYVPDLTSRVRSVREAAERMAWNMPVQGTAADLMKIAMVKLFPRLKPLGAHLLLQVHDELVLEVPEDRAEEAKALVKEVMENAYPLDVPLEVEVGVGRDWLEAKQD

SEQ ID NO: 1165 - DNA, 2538 bp, synthetic construct
  misc_feature 1..2538: note = DNA Polymerase Variant
  source 1..2538: mol_type = other DNA
atgcaccatcatcatcatcatggcggtagcggcatgttaccgctgtttgatttggaagaagcaccaaaacgcgtgctgcttgttgacggccatcatctggcgtatcgtaccttctacgcactgagccttacgacctcacgtggtgagcctgtccagatggtgtatgggtttgctcgctccctgctgaaagccctgaaggaagatggtcaagccgtagtagtggttttcgatgcgaaagcaccgtcgtttcgtcacgaagcgtacgaggcctataaagctggccgcgcaccgaccccggaagactttccgcgtcagttagcgctcgtcaaacgcctcgtggatttgctgggattagttcgcttggaagctcctggctacgaggcggacgacgtgctcggtacactggccaagaaagcagaacgtgaaggcatggaggtctgcattcttaccggtgatcgcgatttcttccagctgctgtctgagaaagtgagcgttttgctgcccgatggcacgttagtaaccccgaaagatgtgcaagagaaatatggagttccgccagaacgttgggtggactttcgcgcactgactggtgatcgttcagacaacatcccgggcgttgccgggattggtgaaaagacggcgctgcgcctgctggcagaatggggctcggtggaaaatctgctcaagaaccttgataaagtgaaacctgatagcttacgccgcaagatcgaagcccacctggaagacttgcgtctgagtctggatcttgcccgtattcgcaccgatctgccgttggaagtagactttaaagctctgcgtcgtcgcacacccgatttagaggggttacgcgcgttcctcgaagaactggagctgggctccctgctgcatgaattcggtttgttgggcggggagaaaccgcgtgaagaagcaccatggccgccgcccgaaggtgcctttgtcggctttcttctgtcacgcaaagagccaatgtgggcggaactgttagctcttgtagccgccgcggaagggcgtgttcaccgcgcgacctctcctgtcgaggccctcgctgacctcaaagaagcacgtggtttcttggcgaaagatttagccgtgcttgcattacgcgaaggcgttggcctcgatccgacggacgacccgcttttggtggcttatttgctcgatcatgcgaataccaacccggaacgtgtcgcccgtcgttacggcggcgagtttactgaagatgcggcagaacgcgcgttgcttagcgaacgcctcttccagacgttatttccacgtctttcggagaaattactctggctctatggtgaagtcgaacgtccattgagtcgcgtgcttgcccatatggaggctcgcggtgtgcgcttagatgttccgttgttagaagcactcagcttcgagttggagaaagaactggaacgtcttgaaggcgaagtctttcgtttagcggggcatcccttcaatctcaactctcgcgaccaattggagaaagtgctctttgatgaattaggtttaacccctgtcacgcgtacagagaagaccggcaaacgttccacttcggcagccgccttggaagcacttcgtggtgctcacccgatcgtcgagttgattttgcagtatcgcgagctcagcaaactcaaatcaacctatcttgataggttacctaagcttgttcatccacgtacgggtcgtttacacacccgcttcaatcaaacggcaacagccaccgggcgcttgtcgtcgagtgacccgaacctccagaatattccagtgcgcacgccgctgggccaacacattcgtaaagcgtttgttgcggaacatggttggttattacttgcggccgattactcccagatcgaacttcgtgtattggcgcatctctctggcgacgagaatcttaaacgtgtgtttcgcgaaggcaaggatattcacactgaaaccgcagcctggatgttcggggtggactcggccttagtggaccccaagatgcgtcgtgccgccaagaccgtcaactttggcgtactctatggtatgtcagcagcacgtcttagtcaggaattgggcattgactacaaagaggctgaagcgtttatcgagcgctatttccaatcctttccgaaagttcgcgcgtggattgaacgtacgctcgaagaaggtcgcactcgcggctatgtggaaacgttattcgggcgtcgtcgctacgttccagatcttacgtctcgtgtccgctcagtgcgcgaagctgctgagcgtatggcctggaatatgcctgttcagggaacagcggcggacctcatgaagatcgccatggtgaaattgtttccgcgcttgaaacccttaggagcccaccttcttttacaggtgcatgatgaattggtcttggaagtacccgaggatcgcgcagaggaagccaaatcgctcgtgaaagaggttatggaaaacgcgtatccgttagatgttccgttggaggtcgaagtgggtgtaggccgtgattggcttgaagcgaaacaagactaatga

SEQ ID NO: 1166 - protein, 844 aa, synthetic construct
  REGION 1..844: note = DNA Polymerase Variant
MHHHHHHGGSGMLPLFDLEEAPKRVLLVDGHHLAYRTFYALSLTTSRGEPVQMVYGFARSLLKALKEDGQAVVVVFDAKAPSFRHEAYEAYKAGRAPTPEDFPRQLALVKRLVDLLGLVRLEAPGYEADDVLGTLAKKAEREGMEVCILTGDRDFFQLLSEKVSVLLPDGTLVTPKDVQEKYGVPPERWVDFRALTGDRSDNIPGVAGIGEKTALRLLAEWGSVENLLKNLDKVKPDSLRRKIEAHLEDLRLSLDLARIRTDLPLEVDFKALRRRTPDLEGLRAFLEELELGSLLHEFGLLGGEKPREEAPWPPPEGAFVGFLLSRKEPMWAELLALVAAAEGRVHRATSPVEALADLKEARGFLAKDLAVLALREGVGLDPTDDPLLVAYLLDHANTNPERVARRYGGEFTEDAAERALLSERLFQTLFPRLSEKLLWLYGEVERPLSRVLAHMEARGVRLDVPLLEALSFELEKELERLEGEVFRLAGHPFNLNSRDQLEKVLFDELGLTPVTRTEKTGKRSTSAAALEALRGAHPIVELILQYRELSKLKSTYLDRLPKLVHPRTGRLHTRFNQTATATGRLSSSDPNLQNIPVRTPLGQHIRKAFVAEHGWLLLAADYSQIELRVLAHLSGDENLKRVFREGKDIHTETAAWMFGVDSALVDPKMRRAAKTVNFGVLYGMSAARLSQELGIDYKEAEAFIERYFQSFPKVRAWIERTLEEGRTRGYVETLFGRRRYVPDLTSRVRSVREAAERMAWNMPVQGTAADLMKIAMVKLFPRLKPLGAHLLLQVHDELVLEVPEDRAEEAKSLVKEVMENAYPLDVPLEVEVGVGRDWLEAKQD

SEQ ID NO: 1167 - DNA, 2538 bp, synthetic construct
  misc_feature 1..2538: note = DNA Polymerase Variant
  source 1..2538: mol_type = other DNA
atgcaccatcatcatcatcatggcggtagcggcatgttaccgctgtttgatttggaagaaccaccaaaacgcgtgctgcttgttgacggccatcatctggcgtatcgtaccttctacgcactgagccttacgacctcacgtggtgagcctgtccagatggtgtatgggtttgctcgctccctgctgaaagccctgaaggaagatggtcaagccgtagtagtggttttcgatgcgaaagcaccgtcgtttcgtcacgaagcgtacgaggcctataaagctggccgcgcaccgaccccggaagactttccgcgtcagttagcgctcgtcaaacgcctcgtggatttgctgggattagttcgcttggaagctcctggctacgaggcggacgacgtgctcggtacactggccaagaaagcagaacgtgaaggcatggaggtctgcattcttaccggtgatcgcgatttcttccagctgctgtctgagaaagtgagcgttttgctgcccgatggcacgttagtaaccccgaaagatgtgcaagagaaatatggagttccgccagaacgttgggtggactttcgcgcactgactggtgatcgttcagacaacatcccgggcgttgccgggattggtgaaaagacggcgctgcgcctgctggcagaatggggctcggtggaaaatctgctcaagaaccttgatcgtgtgaaacctgatagcttacgccgcaagatcgaagcccacctggaagacttgcgtctgagtctggatcttgcccgtattcgcaccgatctgccgttggaagtagactttaaagctctgcgtcgtcgcacacccgatttagaggggttacgcgcgttcctcgaagaactggagctgggctccctgctgcatgaattcggtttgttgggcggagagaaaccgcgtgaagaagcaccatggccgccgcccgaaggtgcctttgtcggctttcttctgtcacgcaaagagccaatgtgggcggaactgttagctcttgcagccgccgcggaagggcgtgttcaccgcgcgacctctcctgtcgaggccctcgctgacctcaaagaagcacgtggtttcttggcgaaagatttagccgtgcttgcattacgcgaaggcgttgcgctcgatccgacggacgacccgcttttggtggcttatttgctcgatcatgcgaataccaacccggaacgtgtcgcccgtcgttacggcggcgagtttactgaagatgcggcagaacgcgcgttgcttagcgaacgcctcttctatacgttatttccacgtctttcggagaaattactctggctctatcaggaagtcgaacgtccattgagtcgcgtgcttgcccatatggaggctcgcggtgtgcgcttagatgttccgttgttagaagcactcagcttcgagttggagaaagaactggaacgtcttgaaggcgaagtctttcgtttagcggggcatcccttcaatctcaactctcgcgaccaattggagaaagtgctctttgatgaattaggtttaacccctgtcacgcgtacagagaagaccggcaaacgttccacttcggcagccgccttggaagcacttcgtggtgctcacccgatcgtcgagttgattttgcagtatcgcgagctcagcaaactcaaatcaacctatcttgataggttacctcgtcttgttcatccacgtacgggtcgtttacacacccgcttcaatcaaacggcaacagccaccgggcgcttgtcgtcgagtgacccgaacctccagaatattccagtgcgcacgccgctgggccaacacattcgtaaagcgtttgttgcggaagaaggttggttattacttgcggccgattactcccagatcgaacttcgtgtattggcgcatctctctggcgacgagaatcttaaacgcgtgtttcgcgaaggcaaggatattcacactgaaaccgcagcctggatgttcggggtggacccagccttagtggaccccaagatgcgtcgtgccgccaagaccgtcaactttggcgtactctatggtatgtcagcagcacgtcttagtcaggaattgggcattgactacaaagaagctgaagcgtttatcgagcgctatttccaatcctttccgaaagttcgcgcgtggattgaacgtacgctcgaagaaggtcgcactcgcggctatgtggaaacgttattcgggcgtcgtcgctacgttccagatcttacgtctcgtgtccgctcagtgcgcgaagctgctgagcgtatggcctggaatatgcctgttcagggaacagcggcggacctcatgaagatcgccatggtgaaattgtttccgcgcttgaaacccttaggagcccaccttcttttacaggtgcatgatgaattggtcttggaagtacccgaggatcgcgcagaagaagccaaagcactcgtgaaagaggttatggaaaacgcgtatccgttagatgttccgttggaggtcgaagtgggtgtaggccgtgattggcttgaagcgaaacaagactaatga

SEQ ID NO: 1168 - protein, 844 aa, synthetic construct
  REGION 1..844: note = DNA Polymerase Variant
MHHHHHHGGSGMLPLFDLEEPPKRVLLVDGHHLAYRTFYALSLTTSRGEPVQMVYGFARSLLKALKEDGQAVVVVFDAKAPSFRHEAYEAYKAGRAPTPEDFPRQLALVKRLVDLLGLVRLEAPGYEADDVLGTLAKKAEREGMEVCILTGDRDFFQLLSEKVSVLLPDGTLVTPKDVQEKYGVPPERWVDFRALTGDRSDNIPGVAGIGEKTALRLLAEWGSVENLLKNLDRVKPDSLRRKIEAHLEDLRLSLDLARIRTDLPLEVDFKALRRRTPDLEGLRAFLEELELGSLLHEFGLLGGEKPREEAPWPPPEGAFVGFLLSRKEPMWAELLALAAAAEGRVHRATSPVEALADLKEARGFLAKDLAVLALREGVALDPTDDPLLVAYLLDHANTNPERVARRYGGEFTEDAAERALLSERLFYTLFPRLSEKLLWLYQEVERPLSRVLAHMEARGVRLDVPLLEALSFELEKELERLEGEVFRLAGHPFNLNSRDQLEKVLFDELGLTPVTRTEKTGKRSTSAAALEALRGAHPIVELILQYRELSKLKSTYLDRLPRLVHPRTGRLHTRFNQTATATGRLSSSDPNLQNIPVRTPLGQHIRKAFVAEEGWLLLAADYSQIELRVLAHLSGDENLKRVFREGKDIHTETAAWMFGVDPALVDPKMRRAAKTVNFGVLYGMSAARLSQELGIDYKEAEAFIERYFQSFPKVRAWIERTLEEGRTRGYVETLFGRRRYVPDLTSRVRSVREAAERMAWNMPVQGTAADLMKIAMVKLFPRLKPLGAHLLLQVHDELVLEVPEDRAEEAKALVKEVMENAYPLDVPLEVEVGVGRDWLEAKQD

SEQ ID NO: 1169 - DNA, 2538 bp, synthetic construct
  misc_feature 1..2538: note = DNA Polymerase Variant
  source 1..2538: mol_type = other DNA
atgcaccatcatcatcatcatggcggtagcggcatgttaccgctgtttgatttggaagaaccaccaaaacgcgtgctgcttgttgacggccatcatctggcgtatcgtaccttctacgcactgagccttacgacctcacgtggtgagcctgtccagatggtgtatgggtttgctcgctccctgctgaaagccctgaaggaagatggtcaagccgtagtagtggttttcgatgcgaaagcaccgtcgtttcgtcacgaagcgtacgaggcctataaagctggccgcgcaccgaccccggaagactttccgcgtcagttagcgctcgtcaaacgcctcgtggatttgctgggattagttcgcttggaagctcctggctacgaggcggacgacgtgctcggtacactggccaagaaagcagaacgtgaaggcatggaggtctgcattcttaccggtgatcgcgatttcttccagctgctgtctgagaaagtgagcgttttgctgcccgatggcacgttagtaaccccgaaagatgtgcaagagaaatatggagttccgccagaacgttgggtggactttcgcgcactgactggtgatcgttcagacaacatcccgggcgttgccgggattggtgaaaagacggcgctgcgcctgctggcagaatggggctcggtggaaaatctgctcaagaaccttgatcgtgtgaaacctgatagcttacgccgcaagatcgaagcccacctggaagacttgcgtctgagtctggatcttgcccgtattcgcaccgatctgccgttggaagtagactttaaagctctgcgtcgtcgcacacccgatttagaggggttacgcgcgttcctcgaagaactggagctgggctccctgctgcatgaattcggtttgttgggcggagagaaaccgcgtgaagaagcaccatggccgccgcccgaaggtgcctttgtcggctttcttctgtcacgcaaagagccaatgtgggcggaactgttagctcttgcagccgccgcggaagggcgtgttcaccgcgcgacctctcctgtcgaggccctcgctgacctcaaagaagcacgtggtttcttggcgaaagatttagccgtgcttgcattacgcgaaggcgttgcgctcgatccgacggacgacccgcttttggtggcttatttgctcgatcatgcgaataccaacccggaacgtgtcgcccgtcgttacggcggcgagtttactgaagatgcggcagaacgcgcgttgcttagcgaacgcctcttccagacgttatttccacgtctttcggagaaattactctggctctatcaggaagtcgaacgtccattgagtcgcgtgcttgcccatatggaggctcgcggtgtgcgcttagatgttccgttgttagaagcactcagcttcgagttggagaaagaactggaacgtcttgaaggcgaagtctttcgtttagcggggcatcccttcaatctcaactctcgcgaccaattggagaaagtgctctttgatgaattaggtttaacccctgtcacgcgtacagagaagaccggcaaacgttccacttcggcagccgccttggaagcacttcgtggtgctcacccgatcgtcgagttgattttgcagtatcgcgagctcagcaaactcaaatcaacctatcttgataggttacctcgtcttgttcatccacgtacgggtcgtttacacacccgcttcaatcaaacggcaacagccaccgggcgcttgtcgtcgagtgacccgaacctccagaatattccagtgcgcacgccgctgggccaacacattcgtaaagcgtttgttgcggaagaaggttggttattacttgcggccgattactcccagatcgaacttcgtgtattggcgcatctctctggcgacgagaatcttaaacgcgtgtttcgcgaaggcaaggatattcacactgaaaccgcagcctggatgttcggggtggacccagccttagtggaccccaagatgcgtcgtgccgccaagaccgtcaactttggcgtactctatggtatgtcagcagcacgtcttagtcaggaattgggcattgactacaaagaagctgaagcgtttatcgagcgctatttccaatcctttccgaaagttcgcgcgtggattgaacgtacgctcgaagaaggtcgcactcgcggctatgtgcagacgttattcgggcgtcgtcgctacgttccagatcttacgtctcgtgtccgctcagtgcgcgaagctgctgagcgtatggcctggaatatgcctgttcagggaacagcggcggacctcatgaagatcgccatggtgaaattgtttccgcgcttgaaacccttaggagcccaccttcttttacaggtgcatgatgaattggtcttggaagtacccgaggatcgcgcagaagaagccaaagcactcgtgaaagaggttatggaaaacgcgtatccgttagatgttccgttggaggtcgaagtgggtgtaggccgtgattggcttgaagcgaaacaagactaatga

SEQ ID NO: 1170 - protein, 844 aa, synthetic construct
  REGION 1..844: note = DNA Polymerase Variant
MHHHHHHGGSGMLPLFDLEEPPKRVLLVDGHHLAYRTFYALSLTTSRGEPVQMVYGFARSLLKALKEDGQAVVVVFDAKAPSFRHEAYEAYKAGRAPTPEDFPRQLALVKRLVDLLGLVRLEAPGYEADDVLGTLAKKAEREGMEVCILTGDRDFFQLLSEKVSVLLPDGTLVTPKDVQEKYGVPPERWVDFRALTGDRSDNIPGVAGIGEKTALRLLAEWGSVENLLKNLDRVKPDSLRRKIEAHLEDLRLSLDLARIRTDLPLEVDFKALRRRTPDLEGLRAFLEELELGSLLHEFGLLGGEKPREEAPWPPPEGAFVGFLLSRKEPMWAELLALAAAAEGRVHRATSPVEALADLKEARGFLAKDLAVLALREGVALDPTDDPLLVAYLLDHANTNPERVARRYGGEFTEDAAERALLSERLFQTLFPRLSEKLLWLYQEVERPLSRVLAHMEARGVRLDVPLLEALSFELEKELERLEGEVFRLAGHPFNLNSRDQLEKVLFDELGLTPVTRTEKTGKRSTSAAALEALRGAHPIVELILQYRELSKLKSTYLDRLPRLVHPRTGRLHTRFNQTATATGRLSSSDPNLQNIPVRTPLGQHIRKAFVAEEGWLLLAADYSQIELRVLAHLSGDENLKRVFREGKDIHTETAAWMFGVDPALVDPKMRRAAKTVNFGVLYGMSAARLSQELGIDYKEAEAFIERYFQSFPKVRAWIERTLEEGRTRGYVQTLFGRRRYVPDLTSRVRSVREAAERMAWNMPVQGTAADLMKIAMVKLFPRLKPLGAHLLLQVHDELVLEVPEDRAEEAKALVKEVMENAYPLDVPLEVEVGVGRDWLEAKQD

SEQ ID NO: 1171 - DNA, 2538 bp, synthetic construct
  misc_feature 1..2538: note = DNA Polymerase Variant
  source 1..2538: mol_type = other DNA
atgcaccatcatcatcatcatggcggtagcggcatgttaccgctgtttgatttggaagaaccaccaaaacgcgtgctgcttgttgacggccatcatctggcgtatcgtaccttctacgcactgagccttacgacctcacgtggtgagcctgtccagatggtgtatgggtttgctcgctccctgctgaaagccctgaaggaagatggtcaagccgtagtagtggttttcgatgcgaaagcaccgtcgtttcgtcacgaagcgtacgaggcctataaagctggccgcgcaccgaccccggaagactttccgcgtcagttagcgctcgtcaaacgcctcgtggatttgctgggattagttcgcttggaagctcctggctacgaggcggacgacgtgctcggtacactggccaagaaagcagaacgtgaaggcatggaggtctgcattcttaccggtgatcgcgatttcttccagctgctgtctgagaaagtgagcgttttgctgcccgatggcacgttagtaaccccgaaagatgtgcaagagaaatatggagttccgccagaacgttgggtggactttcgcgcactgactggtgatcgttcagacaacatcccgggcgttgccgggattggtgaaaagacggcgctgcgcctgctggcagaatggggctcggtggaaaatctgctcaagaaccttgatcgtgtgaaacctgatagcttacgccgcaagatcgaagcccacctggaagacttgcgtctgagtctggatcttgcccgtattcgcaccgatctgccgttggaagtagactttaaagctctgcgtcgtcgcacacccgatttagaggggttacgcgcgttcctcgaagaactggagctgggctccctgctgcatgaattcggtttgttgggcggagagaaaccgcgtgaagaagcaccatggccgccgcccgaaggtgcctttgtcggctttcttctgtcacgcaaagagccaatgtgggcggaactgttagctcttgcagccgccgcggaagggcgtgttcaccgcgcgacctctcctgtcgaggccctcgctgacctcaaagaagcacgtggtttcttggcgaaagatttagccgtgcttgcattacgcgaaggcgttgcgctcgatccgacggacgacccgcttttggtggcttatttgctcgatcatgcgaataccaacccggaacgtgtcgcccgtcgttacggcggcgagtttactgaagatgcggcagaacgcgcgttgcttagcgaacgcctcttccagacgttttttccacgtctttcggagaaattactctggctctatcaggaagtcgaacgtccattgagtcgcgtgcttgcccatatggaggctcgcggtgtgcgcttagatgttccgttgttagaagcactcagcttcgagttggagaaagaactggaacgtcttgaaggcgaagtctttcgtttagcggggcatcccttcaatctcaactctcgcgaccaattggagaaagtgctctttgatgaattaggtttaacccctgtcacgcgtacagagaagaccggcaaacgttccacttcggcagccgccttggaagcacttcgtggtgctcacccgatcgtcgagttgattttgcagtatcgcgagctcagcaaactcaaatcaacctatcttgataggttacctcgtcttgttcatccacgtacgggtcgtttacacacccgcttcaatcaaacggcaacagccaccgggcgcttgtcgtcgagtgacccgaacctccagaatattccagtgcgcacgccgctgggccaacacattcgtaaagcgtttgttgcggaagaaggttggttattacttgcggccgattactcccagatcgaacttcgtgtattggcgcatctctctggcgacgagaatcttaaacgcgtgtttcgcgaaggcaaggatattcacactgaaaccgcagcctggatgttcggggtggacccagccttagtggaccccaagatgcgtcgtgccgccaagaccgtcaactttggcgtactctatggtatgtcagcagcacgtcttagtcaggaattgggcattgactacaaagaagctgaagcgtttatcgagcgctatttccaatcctttccgaaagttcgcgcgtggattgaacgtacgctcgaagaaggtcgcactcgcggctatgtggaaacgttattcgggcgtcgtcgctacgttccagatcttacgtctcgtgtccgctcagtgcgcgaagctgctgagcgtatggcctggaatatgcctgttcagggaacagcggcggacctcatgaagatcgccatggtgaaattgtttccgcgcttgaaacccttaggagcccaccttcttttacaggtgcatgatgaattggtcttggaagtacccgaggatcgcgcagaagaagccaaagcactcgtgaaagaggttatggaaaacgcgtatccgttagatgttccgttggaggtcgaagtgggtgtaggccgtgattggcttgaagcgaaacaagactaatga

SEQ ID NO: 1172 - protein, 844 aa, synthetic construct
  REGION 1..844: note = DNA Polymerase Variant
MHHHHHHGGSGMLPLFDLEEPPKRVLLVDGHHLAYRTFYALSLTTSRGEPVQMVYGFARSLLKALKEDGQAVVVVFDAKAPSFRHEAYEAYKAGRAPTPEDFPRQLALVKRLVDLLGLVRLEAPGYEADDVLGTLAKKAEREGMEVCILTGDRDFFQLLSEKVSVLLPDGTLVTPKDVQEKYGVPPERWVDFRALTGDRSDNIPGVAGIGEKTALRLLAEWGSVENLLKNLDRVKPDSLRRKIEAHLEDLRLSLDLARIRTDLPLEVDFKALRRRTPDLEGLRAFLEELELGSLLHEFGLLGGEKPREEAPWPPPEGAFVGFLLSRKEPMWAELLALAAAAEGRVHRATSPVEALADLKEARGFLAKDLAVLALREGVALDPTDDPLLVAYLLDHANTNPERVARRYGGEFTEDAAERALLSERLFQTFFPRLSEKLLWLYQEVERPLSRVLAHMEARGVRLDVPLLEALSFELEKELERLEGEVFRLAGHPFNLNSRDQLEKVLFDELGLTPVTRTEKTGKRSTSAAALEALRGAHPIVELILQYRELSKLKSTYLDRLPRLVHPRTGRLHTRFNQTATATGRLSSSDPNLQNIPVRTPLGQHIRKAFVAEEGWLLLAADYSQIELRVLAHLSGDENLKRVFREGKDIHTETAAWMFGVDPALVDPKMRRAAKTVNFGVLYGMSAARLSQELGIDYKEAEAFIERYFQSFPKVRAWIERTLEEGRTRGYVETLFGRRRYVPDLTSRVRSVREAAERMAWNMPVQGTAADLMKIAMVKLFPRLKPLGAHLLLQVHDELVLEVPEDRAEEAKALVKEVMENAYPLDVPLEVEVGVGRDWLEAKQD

SEQ ID NO: 1173 - DNA, 2538 bp, synthetic construct
  misc_feature 1..2538: note = DNA Polymerase Variant
  source 1..2538: mol_type = other DNA
atgcaccatcatcatcatcatggcggtagcggcatgttaccgctgtttgatttggaagaaccaccaaaacgcgtgctgcttgttgacggccatcatctggcgtatcgtaccttctacgcactgagccttacgacctcacgtggtgagcctgtccagatggtgtatgggtttgctcgctccctgctgaaagccctgaaggaagatggtcaagccgtagtagtggttttcgatgcgaaggcaccgtcgtttcgtcacgaagcgtacgaggcctataaagctggccgcgcaccgaccccggaagactttccgcgtcagttagcgctcgtcaaacgcctcgtggatttgctgggattagttcgcttggaagctcctggctacgaggcggacgacgtgctcggtacactggccaagaaagcagaacgtgaaggcatggaggtctgcattcttaccggtgatcgcgatttcttccagctgctgtctgagaaagtgagcgttttgctgcccgatggcacgttagtaaccccgaaagatgtgcaagagaaatatggagttccgccagaacgttgggtggactttcgcgcactgactggtgatcgttcagacaacatcccgggcgttgccgggattggtgaaaagacggcgctgcgcctgctggcagaatggggctcggtggaaaatctgctcaagaaccttgatcgtgtgaaacctgatagcttacgccgcaagatcgaagcccacctggaagacttgcgtctgagtctggatcttgcccgtattcgcaccgatctgccgttggaagtagactttaaagctctgcgtcgtcgcacacccgatttagaggggttacgcgcgttcctcgaagaactggagctgggctccctgctgcatgaattcggtttgttgggcggagagaaaccgcgtgaagaagcaccatggccgccgcccgagggtgcctttgtcggctttcttctgtcacgcaaagagccaatgtgggcggaactgttagctcttgcagccgccgcggaagggcgtgttcaccgcgcgacctctcctgtcgaggccctcgctgacctcaaagaagcacgtggtttcttggcgaaagatttagccgtgcttgcattacgcgaaggcgttgcgctcgatccgacggacgacccgcttttggtggcttatttgctcgatcatgcgaataccaacccggaacgtgtcgcccgtcgttacggcggcgagtttactgaagatgcggcagaacgcgcgttgcttagcgaacgcctcttccagacgttatttccacgtctttcggagaaattactctggctctatcaggaagtcgaacgtccattgagtcgcgtgcttgcccatatggaggctcgcggtgtgcgcttagatgttccgttgttagaagcactcagcttcgagttggagaaagaactggaacgtcttgaaggcgaagtctttcgtttagcggggcatcccttcaatctcaactctcgcgaccaattggagaaagtgctctttgatgaattaggtttaacccctgtcacgcgtacagagaagaccggcaaacgttccacttcggcagccgccttggaagcacttcgtggtgctcacccgatcgtcgagttgattttgcagtatcgcgagctcagcaaactcaaatcaacctatcttgataggttacctaagcttgttcatccacgtacgggtcgtttacacacccgcttcaatcaaacggcaacagccaccgggcgcttgtcgtcgagtgacccgaacctccagaatattccagtgcgcacgccgctgggccaacacattcgtaaagcgtttgttgcggaagaaggttggttattacttgcggccgattactcccagatcgaacttcgtgtattggcgcatctctctggcgacgagaatcttaaacgcgtgtttcgcgaaggcaaggatattcacactgaaaccgcagcctggatgttcggggtggacccggccttagtggaccccaagatgcgtcgtgccgccaagaccgtcaactttggcgtactctatggtatgtcagcagcacgtcttagtcaggaattgggcattgactacaaagtagctgaagcgtttatcgagcgctatttccaatcctttccgaaagttcgcgcgtggattgaacgtacgctcgaagaaggtcgcactcgcggctatgtggaaacgttattcgggcgtcgtcgctacgttccagatcttacgtctcgtgtccgctcagtgcgcgaagctgctgagcgtatggcctggaatatgcctgttcagggaacagcggcggacctcatgaagatcgccatggtgaaattgtttccgcgcttgaaacccttaggagcccaccttcttttacaggtgcatgatgaattggtcttggaagtacccgaggatcgcgcagaagaagccaaagcactcgtgaaagaggttatggaaaacgcgtatccgttagatgttccgttggaggtcgaagtgggtgtaggccgtgattggcttgaagcgaaacaagactaatga

SEQ ID NO: 1174 - protein, 844 aa, synthetic construct; identical to SEQ ID NO: 864
  REGION 1..844: note = DNA Polymerase Variant

SEQ ID NO: 1175 - DNA, 2535 bp, synthetic construct
  misc_feature 1..2535: note = DNA Polymerase Variant
  source 1..2535: mol_type = other DNA
atgcaccatcatcatcatggcggtagcggcatgttaccgctgtttgatttggaagaaccaccaaaacgcgtgctgcttgttgacggccatcatctggcgtatcgtaccttctacgcactgagccttacgacctcacgtggtgagcctgtccagatggtgtatgggtttgctcgctccctgctgaaagccctgaaggaagatggtcaagccgtagtagtggttttcgatgcgaaagcaccgtcgtttcgtcacgaagcgtacgaggcctataaagctggccgcgcaccgaccccggaagactttccgcgtcagttagcgctcgtcaaacgcctcgtggatttgctgggattagttcgcttggaagctcctggctacgaggcggacgacgtgctcggtacactggccaagaaagcagaacgtgaaggcatggaggtctgcattcttaccggtgatcgcgatttcttccagctgctgtctgagaaagtgagcgttttgctgcccgatggcacgttagtaaccccgaaagatgtgcaagagaaatatggagttccgccagaacgttgggtggactttcgcgcactgactggtgatcgttcagacaacatcccgggcgttgccgggattggtgaaaagacggcgctgcgcctgctggcagaatggggctcggtggaaaatctgctcaagaaccttgatcgtgtgaaacctgatagcttacgccgcaagatcgaagcccacctggaagacttgcgtctgagtctggatcttgcccgtattcgcaccgatctgccgttggaagtagactttaaagctctgcgtcgtcgcacacccgatttagaggggttacgcgcgttcctcgaagaactggagctgggctccctgctgcatgaattcggtttgttgggcggagagaaaccgcgtgaagaagcaccatggccgccgcccgaaggtgcctttgtcggctttcttctgtcacgcaaagagccaatgtgggcggaactgttagctcttgcagccgccgcggaagggcgtgttcaccgcgcgacctctcctgtcgaggccctcgctgacctcaaagaagcacgtggtttcttggcgaaagatttagccgtgcttgcatatcgcgaaggcgttgcgctcgatccgacggacgacccgcttttggtggcttatttgctcgatcatgcgaataccaacccggaacgtgtcgcccgtcgttacggcggcgagtttactgaagatgcggcagaacgcgcgttgcttagcgaacgcctcttccagacgttatttccacgtctttcggagaaattactctggctctatcaggaagtcgaacgtccattgagtcgcgtgcttgcccatatggaggctcgcggtgtgcgcttagatgttccgttgttagaagcactcagcttcgagttggagaaagaactggaacgtcttgaaggcgaagtctttcgtttagcggggcatcccttcaatctcaactctcgcgaccaattggagaaagtgctctttgatgaattaggtttaacccctgtcacgcgtacagagaagaccggcaaacgttccacttcggcagccgccttggaagcacttcgtggtgctcacccgatcgtcgagttgattttgcagtatcgcgagctcagcaaactcaaatcaacctatcttgataggttacctcgtcttgttcatccacgtacgggtcgtttacacacccgcttcaatcaaacggcaacagccaccgggcgcttgtcgtcgagtgacccgaacctccagaatattccagtgcgcacgccgctgggccaacacattcgtaaagcgtttgttgcggaagaaggttggttattacttgcggccgattactcccagatcgaacttcgtgtattggcgcatctctctggcgacgagaatcttaaacgcgtgtttcgcgaaggcaaggatattcacactgaaaccgcagcctggatgttcggggtggacccagccttagtggaccccaagatgcgtcgtgccgccaagaccgtcaactttggcgtactctatggtatgtcagcagcacgtcttagtcaggaattgggcattgactacaaagaagctgaagcgtttatcgagcgctatttccaatcctttccgaaagttcgcgcgtggattgaacgtacgctcgaagaaggtcgcactcgcggctatgtggaaacgttattcgggcgtcgtcgctacgttccagatcttacgtctcgtgtccgctcagtgcgcgaagctgctgagcgtatggcctggaatatgcctgttcagggaacagcggcggacctcatgaagatcgccatggtgaaattgtttccgcgcttgaaacccttaggagcccaccttcttttacaggtgcatgatgaattggtcttggaagtacccgaggatcgcgcagaagaagccaaagcactcgtgaaagaggttatggaaaacgcgtatccgttagatgttccgttggaggtcgaagtgggtgtaggccgtgattggcttgaagcgaaacaagactaatga

SEQ ID NO: 1176 - protein, 843 aa, synthetic construct
  REGION 1..843: note = DNA Polymerase Variant
MHHHHHGGSGMLPLFDLEEPPKRVLLVDGHHLAYRTFYALSLTTSRGEPVQMVYGFARSLLKALKEDGQAVVVVFDAKAPSFRHEAYEAYKAGRAPTPEDFPRQLALVKRLVDLLGLVRLEAPGYEADDVLGTLAKKAEREGMEVCILTGDRDFFQLLSEKVSVLLPDGTLVTPKDVQEKYGVPPERWVDFRALTGDRSDNIPGVAGIGEKTALRLLAEWGSVENLLKNLDRVKPDSLRRKIEAHLEDLRLSLDLARIRTDLPLEVDFKALRRRTPDLEGLRAFLEELELGSLLHEFGLLGGEKPREEAPWPPPEGAFVGFLLSRKEPMWAELLALAAAAEGRVHRATSPVEALADLKEARGFLAKDLAVLAYREGVALDPTDDPLLVAYLLDHANTNPERVARRYGGEFTEDAAERALLSERLFQTLFPRLSEKLLWLYQEVERPLSRVLAHMEARGVRLDVPLLEALSFELEKELERLEGEVFRLAGHPFNLNSRDQLEKVLFDELGLTPVTRTEKTGKRSTSAAALEALRGAHPIVELILQYRELSKLKSTYLDRLPRLVHPRTGRLHTRFNQTATATGRLSSSDPNLQNIPVRTPLGQHIRKAFVAEEGWLLLAADYSQIELRVLAHLSGDENLKRVFREGKDIHTETAAWMFGVDPALVDPKMRRAAKTVNFGVLYGMSAARLSQELGIDYKEAEAFIERYFQSFPKVRAWIERTLEEGRTRGYVETLFGRRRYVPDLTSRVRSVREAAERMAWNMPVQGTAADLMKIAMVKLFPRLKPLGAHLLLQVHDELVLEVPEDRAEEAKALVKEVMENAYPLDVPLEVEVGVGRDWLEAKQD

SEQ ID NO: 1177 - DNA, 2538 bp, synthetic construct
  misc_feature 1..2538: note = DNA Polymerase Variant
  source 1..2538: mol_type = other DNA
atgcaccatcatcatcatcatggcggtagcggcatgttaccgctgtttgatttggaagaaccaccaaaacgcgtgctgcttgttgacggccatcatctggcgtatcgtaccttctacgcactgagccttacgacctcacgtggtgagcctgtccagatggtgtatgggtttgctcgctccctgctgaaagccctgaaggaagatggtcaagccgtagtagtggttttcgatgcgaaagcaccgtcgtttcgtcacgaagcgtacgaggcctataaagctggccgcgcaccgaccccggaagactttccgcgtcagttagcgctcgtcaaacgcctcgtggatttgctgggattagttcgcttggaagctcctggctacgaggcggacgacgtgctcggtacactggccaagaaagcagaacgtgaaggcatggaggtctgcattcttaccggtgatcgcgatttcttccagctgctgtctgagaaagtgagcgttttgctgcccgatggcacgttagtaaccccgaaagatgtgcaagagaaatatggagttccgccagaacgttgggtggactttcgcgcactgactggtgatcgttcagacaacatcccgggcgttgccgggattggtgaaaagacggcgctgcgcctgctggcagaatggggctcggtggaaaatctgctcaagaaccttgatcgtgtgaaacctgatagcttacgccgcaagatcgaagcccacctggaagacttgcgtctgagtctggatcttgcccgtattcgcaccgatctgccgttggaagtagactttaaagctctgcgtcgtcgcacacccgatttagaggggttacgcgcgttcctcgaagaactggagctgggctccctgctgcatgaattcggtttgttgggcggagagaaaccgcgtgaagaagcaccatggccgccgcccgaaggtgcctttgtcggctttcttctgtcacgcaaagagccaatgtgggcggaactgttagctcttgcagccgccgcggaagggcgtgttcaccgcgcgacctctcctgtcgaggccctcgctgacctcaaagaagcacgtggtttcttggcgaaagatttagccgtgcttgcattacgcgaaggcgttgcgctcgatccgacggacgacccgcttttggtggcttatttgctcgatcatgcgaataccaacccggaacgtgtcgcccgtcgttacggcggcgagtttactgaagatgcggcagaacgcgcgttgcttagcgaacgcctcttccagacgttatttccacgtctttcggagaaattactctggctctatcaggaagtcgaacgtccattgagtcgcgtgcttgcccatatggaggctcgcggtgtgcgcttagatgttccgttgttagaagcactcagcttcgagttggagaaagaactggaacgtcttgaaggcgaagtctttcgtttagcggggcatcccttcaatctcaactctcgcgaccaattggagaaagtgctctttgatgaattaggtttaacccctgtcacgcgtacagagaagaccggcaaacgttccacttcggcagccgccttggaagcacttcgtggtgctcacccgatcgtcgagttgattttgcagtatcgcgagctcagcaaactcaaatcaacctatcttgataggttacctcgtcttgttcatccacgtacgggtcgtttacacacccgcttcaatcaaacggcaacagccaccgggcgcttgtcgtcgagtgacccgaacctccagaatattccagtgcgcacgccgctgggccaacacattcgtaaagcgtttgttgcggaagaaggttggttattacttgcggccgattactcccagatcgaacttcgtgtattggcgcatctctctggcgacgagaatcttaaacgcgtgtttcgcgaaggcaaggatattcacactgaaaccgcagcctggatgttcggggtggacccagccttagtggaccccaagatgcgtcgtgccgccaagaccgtcaactttggcgtactctatggtatgtcagcagcacgtcttagtcaggaattgggcattgactacaaagaagctgaagcgtttatcgagcgctatttccaatcctttccgaaagttcgcgcgtggattgaacgtacgctctatgaaggtcgcactcgcggctatgtggaaacgttattcgggcgtcgtcgctacgttccagatcttacgtctcgtgtccgctcagtgcgcgaagctgctgagcgtatggcctggaatatgcctgttcagggaacagcggcggacctcatgaagatcgccatggtgaaattgtttccgcgcttgaaacccttaggagcccaccttcttttacaggtgcatgatgaattggtcttggaagtacccgaggatcgcgcagaagaagccaaagcactcgtgaaagaggttatggaaaacgcgtatccgttagatgttccgttggaggtcgaagtgggtgtaggccgtgattggcttgaagcgaaacaagactaatga

SEQ ID NO: 1178 - protein, 844 aa, synthetic construct
  REGION 1..844: note = DNA Polymerase Variant
MHHHHHHGGSGMLPLFDLEEPPKRVLLVDGHHLAYRTFYALSLTTSRGEPVQMVYGFARSLLKALKEDGQAVVVVFDAKAPSFRHEAYEAYKAGRAPTPEDFPRQLALVKRLVDLLGLVRLEAPGYEADDVLGTLAKKAEREGMEVCILTGDRDFFQLLSEKVSVLLPDGTLVTPKDVQEKYGVPPERWVDFRALTGDRSDNIPGVAGIGEKTALRLLAEWGSVENLLKNLDRVKPDSLRRKIEAHLEDLRLSLDLARIRTDLPLEVDFKALRRRTPDLEGLRAFLEELELGSLLHEFGLLGGEKPREEAPWPPPEGAFVGFLLSRKEPMWAELLALAAAAEGRVHRATSPVEALADLKEARGFLAKDLAVLALREGVALDPTDDPLLVAYLLDHANTNPERVARRYGGEFTEDAAERALLSERLFQTLFPRLSEKLLWLYQEVERPLSRVLAHMEARGVRLDVPLLEALSFELEKELERLEGEVFRLAGHPFNLNSRDQLEKVLFDELGLTPVTRTEKTGKRSTSAAALEALRGAHPIVELILQYRELSKLKSTYLDRLPRLVHPRTGRLHTRFNQTATATGRLSSSDPNLQNIPVRTPLGQHIRKAFVAEEGWLLLAADYSQIELRVLAHLSGDENLKRVFREGKDIHTETAAWMFGVDPALVDPKMRRAAKTVNFGVLYGMSAARLSQELGIDYKEAEAFIERYFQSFPKVRAWIERTLYEGRTRGYVETLFGRRRYVPDLTSRVRSVREAAERMAWNMPVQGTAADLMKIAMVKLFPRLKPLGAHLLLQVHDELVLEVPEDRAEEAKALVKEVMENAYPLDVPLEVEVGVGRDWLEAKQD

SEQ ID NO: 1179 - DNA, 2538 bp, synthetic construct
  misc_feature 1..2538: note = DNA Polymerase Variant
  source 1..2538: mol_type = other DNA
atgcaccatcatcatcatcatggcggtagcggcatgttaccgctgtttgatttggaagaaccaccaaaacgcgtgctgcttgttgacggccatcatctggcgtatcgtaccttctacgcactgagccttacgacctcacgtggtgagcctgtccagatggtgtatgggtttgctcgctccctgctgaaagccctgaaggaagatggtcaagccgtagtagtggttttcgatgcgaaagcaccgtcgtttcgtcacgaagcgtacgaggcctataaagctggccgcgcaccgaccccggaagactttccgcgtcagttagcgctcgtcaaacgcctcgtggatttgctgggattagttcgcttggaagctcctggctacgaggcggacgacgtgctcggtacactggccaagaaagcagaacgtgaaggcatggaggtctgcattcttaccggtgatcgcgatttcttccagctgctgtctgagaaagtgagcgttttgctgcccgatggcacgttagtaaccccgaaagatgtgcaagagaaatatggagttccgccagaacgttgggtggactttcgcgcactgactggtgatcgttcagacaacatcccgggcgttgccgggattggtgaaaagacggcgctgcgcctgctggcagaatggggctcggtggaaaatctgctcaagaaccttgatcgtgtgaaacctgatagcttacgccgcaagatcgaagcccacctggaagacttgcgtctgagtctggatcttgcccgtattcgcaccgatctgccgttggaagtagactttaaagctctgcgtcgtcgcacacccgatttagaggggttacgcgcgttcctcgaagaactggagctgggctccctgctgcatgaattcggtttgttgggcggagagaaaccgcgtgaagaagcaccatggccgccgcccgaaggtgcctttgtcggctttcttctgtcacgcaaagagccaatgtgggcggaactgttagctcttgcagccgccgcggaagggcgtgttcaccgcgcgacctctcctgtcgaggccctcgctgacctcaaagaagcacgtggtttcttggcgaaagatttagccgtgcttgcattacgcgaaggcgttgcgctcgatccgacggacgacccgcttttggtggcttatttgctcgatcatgcgaataccaacccggaacgtgtcgcccgtcgttacggcggcgagtttactgaagatgcggcagaacgcgcgttgcttagcgaacgcctcttccagacgttatttccacgtcttaatgagaaattactctggctctatcaggaagtcgaacgtccattgagtcgcgtgcttgcccatatggaggctcgcggtgtgcgcttagatgttccgttgttagaagcactcagcttcgagttggagaaagaactggaacgtcttgaaggcgaagtctttcgtttagcggggcatcccttcaatctcaactctcgcgaccaattggagaaagtgctctttgatgaattaggtttaacccctgtcacgcgtacagagaagaccggcaaacgttccacttcggcagccgccttggaagcacttcgtggtgctcacccgatcgtcgagttgattttgcagtatcgcgagctcagcaaactcaaatcaacctatcttgataggttacctcgtcttgttcatccacgtacgggtcgtttacacacccgcttcaatcaaacggcaacagccaccgggcgcttgtcgtcgagtgacccgaacctccagaatattccagtgcgcacgccgctgggccaacacattcgtaaagcgtttgttgcggaagaaggttggttattacttgcggccgattactcccagatcgaacttcgtgtattggcgcatctctctggcgacgagaatcttaaacgcgtgtttcgcgaaggcaaggatattcacactgaaaccgcagcctggatgttcggggtggacccagccttagtggaccccaagatgcgtcgtgccgccaagaccgtcaactttggcgtactctatggtatgtcagcagcacgtcttagtcaggaattgggcattgactacaaagaagctgaagcgtttatcgagcgctatttccaatcctttccgaaagttcgcgcgtggattgaacgtacgctcgaagaaggtcgcactcgcggctatgtggaaacgttattcgggcgtcgtcgctacgttccagatcttacgtctcgtgtccgctcagtgcgcgaagctgctgagcgtatggcctggaatatgcctgttcagggaacagcggcggacctcatgaagatcgccatggtgaaattgtttccgcgcttgaaacccttaggagcccaccttcttttacaggtgcatgatgaattggtcttggaagtacccgaggatcgcgcagaagaagccaaagcactcgtgaaagaggttatggaaaacgcgtatccgttagatgttccgttggaggtcgaagtgggtgtaggccgtgattggcttgaagcgaaacaagactaatga

SEQ ID NO: 1180 - protein, 844 aa, synthetic construct
  REGION 1..844: note = DNA Polymerase Variant
MHHHHHHGGSGMLPLFDLEEPPKRVLLVDGHHLAYRTFYALSLTTSRGEPVQMVYGFARSLLKALKEDGQAVVVVFDAKAPSFRHEAYEAYKAGRAPTPEDFPRQLALVKRLVDLLGLVRLEAPGYEADDVLGTLAKKAEREGMEVCILTGDRDFFQLLSEKVSVLLPDGTLVTPKDVQEKYGVPPERWVDFRALTGDRSDNIPGVAGIGEKTALRLLAEWGSVENLLKNLDRVKPDSLRRKIEAHLEDLRLSLDLARIRTDLPLEVDFKALRRRTPDLEGLRAFLEELELGSLLHEFGLLGGEKPREEAPWPPPEGAFVGFLLSRKEPMWAELLALAAAAEGRVHRATSPVEALADLKEARGFLAKDLAVLALREGVALDPTDDPLLVAYLLDHANTNPERVARRYGGEFTEDAAERALLSERLFQTLFPRLNEKLLWLYQEVERPLSRVLAHMEARGVRLDVPLLEALSFELEKELERLEGEVFRLAGHPFNLNSRDQLEKVLFDELGLTPVTRTEKTGKRSTSAAALEALRGAHPIVELILQYRELSKLKSTYLDRLPRLVHPRTGRLHTRFNQTATATGRLSSSDPNLQNIPVRTPLGQHIRKAFVAEEGWLLLAADYSQIELRVLAHLSGDENLKRVFREGKDIHTETAAWMFGVDPALVDPKMRRAAKTVNFGVLYGMSAARLSQELGIDYKEAEAFIERYFQSFPKVRAWIERTLEEGRTRGYVETLFGRRRYVPDLTSRVRSVREAAERMAWNMPVQGTAADLMKIAMVKLFPRLKPLGAHLLLQVHDELVLEVPEDRAEEAKALVKEVMENAYPLDVPLEVEVGVGRDWLEAKQD

SEQ ID NO: 1181 - DNA, 2538 bp, synthetic construct
  misc_feature 1..2538: note = DNA Polymerase Variant
  source 1..2538: mol_type = other DNA
atgcaccatcatcatcatcatggcggtagcggcatgttaccgctgtttgatttggaagaaccaccaaaacgcgtgctgcttgttgacggccatcatctggcgtatcgtaccttctacgcactgagccttacgacctcacgtggtgagcctgtccagatggtgtatgggtttgctcgctccctgctgaaagccctgaaggaagatggtcaagccgtagtagtggttttcgatgcgaaagcaccgtcgtttcgtcacgaagcgtacgaggcctataaagctggccgcgcaccgaccccggaagactttccgcgtcagttagcgctcgtcaaacgcctcgtggatttgctgggattagttcgcttggaagctcctggctacgaggcggacgacgtgctcggtacactggccaagaaagcagaacgtgaaggcatggaggtctgcattcttaccggtgatcgcgatttcttccagctgctgtctgagaaagtgagcgttttgctgcccgatggcacgttagtaaccccgaaagatgtgcaagagaaatatggagttccgccagaacgttgggtggactttcgcgcactgactggtgatcgttcagacaacatcccgggcgttgccgggattggtgaaaagacggcgctgcgcctgctggcagaatggggctcggtggaaaatctgctcaagaaccttgatcgtgtgaaacctgatagcttacgccgcaagatcgaagcccacctggaagacttgcgtctgagtctggatcttgcccgtattcgcaccgatctgccgttggaagtagactttaaagctctgcgtcgtcgcacacccgatttagaggggttacgcgcgttcctcgaagaactggagctgggctccctgctgcatgaattcggtttgttgggcggagagaaaccgcgtgaagaagcaccatggccgccgcccgaaggtgcctttgtcggctttcttctgtcacgcaaagagccaatgtgggcggaactgttagctcttgcagccgccgcggaagggcgtgttcaccgcgcgacctctcctgtcgaggccctcgctgacctcaaagaagcacgtggtttcttggcgaaagatttagccgtgcttgcattacgcgaaggcgttgcgctcgatccgacggacgacccgcttgtggtggcttatttgctcgatcatgcgaataccaacccggaacgtgtcgcccgtcgttacggcggcgagtttactgaagatgcggcagaacgcgcgttgcttagcgaacgcctcttccagacgttatttccacgtctttcggagaaattactctggctctatcaggaagtcgaacgtccattgagtcgcgtgcttgcccatatggaggctcgcggtgtgcgcttagatgttccgttgttagaagcactcagcttcgagttggagaaagaactggaacgtcttgaaggcgaagtctttcgtttagcggggcatcccttcaatctcaactctcgcgaccaattggagaaagtgctctttgatgaattaggtttaacccctgtcacgcgtacagagaagaccggcaaacgttccacttcggcagccgccttggaagcacttcgtggtgctcacccgatcgtcgagttgattttgcagtatcgcgagctcagcaaactcaaatcaacctatcttgataggttacctcgtcttgttcatccacgtacgggtcgtttacacacccgcttcaatcaaacggcaacagccaccgggcgcttgtcgtcgagtgacccgaacctccagaatattccagtgcgcacgccgctgggccaacacattcgtaaagcgtttgttgcggaagaaggttggttattacttgcggccgattactcccagatcgaacttcgtgtattggcgcatctctctggcgacgagaatcttaaacgcgtgtttcgcgaaggcaaggatattcacactgaaaccgcagcctggatgttcggggtggacccagccttagtggaccccaagatgcgtcgtgccgccaagaccgtcaactttggcgtactctatggtatgtcagcagcacgtcttagtcaggaattgggcattgactacaaagaagctgaagcgtttatcgagcgctatttccaatcctttccgaaagttcgcgcgtggattgaacgtacgctcgaagaaggtcgcactcgcggctatgtggaaacgttattcgggcgtcgtcgctacgttccagatcttacgtctcgtgtccgctcagtgcgcgaagctgctgagcgtatggcctggaatatgcctgttcagggaacagcggcggacctcatgaagatcgccatggtgaaattgtttccgcgcttgaaacccttaggagcccaccttcttttacaggtgcatgatgaattggtcttggaagtacccgaggatcgcgcagaagaagccaaagcactcgtgaaagaggttatggaaaacgcgtatccgttagatgttccgttggaggtcgaagtgggtgtaggccgtgattggcttgaagcgaaacaagactaatga

SEQ ID NO: 1182 - protein, 844 aa, synthetic construct
  REGION 1..844: note = DNA Polymerase Variant
MHHHHHHGGSGMLPLFDLEEPPKRVLLVDGHHLAYRTFYALSLTTSRGEPVQMVYGFARSLLKALKEDGQAVVVVFDAKAPSFRHEAYEAYKAGRAPTPEDFPRQLALVKRLVDLLGLVRLEAPGYEADDVLGTLAKKAEREGMEVCILTGDRDFFQLLSEKVSVLLPDGTLVTPKDVQEKYGVPPERWVDFRALTGDRSDNIPGVAGIGEKTALRLLAEWGSVENLLKNLDRVKPDSLRRKIEAHLEDLRLSLDLARIRTDLPLEVDFKALRRRTPDLEGLRAFLEELELGSLLHEFGLLGGEKPREEAPWPPPEGAFVGFLLSRKEPMWAELLALAAAAEGRVHRATSPVEALADLKEARGFLAKDLAVLALREGVALDPTDDPLVVAYLLDHANTNPERVARRYGGEFTEDAAERALLSERLFQTLFPRLSEKLLWLYQEVERPLSRVLAHMEARGVRLDVPLLEALSFELEKELERLEGEVFRLAGHPFNLNSRDQLEKVLFDELGLTPVTRTEKTGKRSTSAAALEALRGAHPIVELILQYRELSKLKSTYLDRLPRLVHPRTGRLHTRFNQTATATGRLSSSDPNLQNIPVRTPLGQHIRKAFVAEEGWLLLAADYSQIELRVLAHLSGDENLKRVFREGKDIHTETAAWMFGVDPALVDPKMRRAAKTVNFGVLYGMSAARLSQELGIDYKEAEAFIERYFQSFPKVRAWIERTLEEGRTRGYVETLFGRRRYVPDLTSRVRSVREAAERMAWNMPVQGTAADLMKIAMVKLFPRLKPLGAHLLLQVHDELVLEVPEDRAEEAKALVKEVMENAYPLDVPLEVEVGVGRDWLEAKQD

SEQ ID NO: 1183 - DNA, 2538 bp, synthetic construct
  misc_feature 1..2538: note = DNA Polymerase Variant
  source 1..2538: mol_type = other DNA
atgcaccatcatcatcatcatggcggtagcggcatgttaccgctgtttgatttggaagaaccaccaaaacgcgtgctgcttgttgacggccatcatctggcgtatcgtaccttctacgcactgagccttacgacctcacgtggtgagcctgtccagatggtgtatgggtttgctcgctccctgctgaaagccctgaaggaagatggtcaagccgtagtagtggttttcgatgcgaaagcaccgtcgtttcgtcacgaagcgtacgaggcctataaagctggccgcgcaccgaccccggaagactttccgcgtcagttagcgctcgtcaaacgcctcgtggatttgctgggattagttcgcttggaagctcctggctacgaggcggacgacgtgctcggtacactggccaagaaagcagaacgtgaaggcatggaggtctgcattcttaccggtgatcgcgatttcttccagctgctgtctgagaaagtgagcgttttgctgcccgatggcacgttagtaaccccgaaagatgtgcaagagaaatatggagttccgccagaacgttgggtggactttcgcgcactgactggtgatcgttcagacaacatcccgggcgttgccgggattggtgaaaagacggcgctgcgcctgctggcagaatggggctcggtggaaaatctgctcaagaaccttgatcgtgtgaaacctgatagcttacgccgcaagatcgaagcccacctggaagacttgcgtctgagtctggatcttgcccgtattcgcaccgatctgccgttggaagtagactttaaagctctgcgtcgtcgcacacccgatttagaggggttacgcgcgttcctcgaagaactggagctgggctccctgctgcatgaattcggtttgttgggcggagagaaaccgcgtgaagaagcaccatggccgccgcccgaaggtgcctttgtcggctttcttctgtcacgcaaagagccaatgtgggcggaactgttagctcttgcagccgccgcggaagggcgtgttcaccgcgcgacctctcctgtcgaggccctcgctgacctcaaagaagcacgtggtttcttggcgaaagatttagccgtgcttgcattacgcgaaggcgttgcgctcgatccgacggacgacccgcttttggtggcttatttgctcgatcatgcgaataccaacccggaacgtgtcgcccgtcgttacggcggcgagtttactgaagatgcggcagaacgcgcggtgcttagcgaacgcctcttccagacgttatttccacgtctttcggagaaattactctggctctatcaggaagtcgaacgtccattgagtcgcgtgcttgcccatatggaggctcgcggtgtgcgcttagatgttccgttgttagaagcactcagcttcgagttggagaaagaactggaacgtcttgaaggcgaagtctttcgtttagcggggcatcccttcaatctcaactctcgcgaccaattggagaaagtgctctttgatgaattaggtttaacccctgtcacgcgtacagagaagaccggcaaacgttccacttcggcagccgccttggaagcacttcgtggtgctcacccgatcgtcgagttgattttgcagtatcgcgagctcagcaaactcaaatcaacctatcttgataggttacctcgtcttgttcatccacgtacgggtcgtttacacacccgcttcaatcaaacggcaacagccaccgggcgcttgtcgtcgagtgacccgaacctccagaatattccagtgcgcacgccgctgggccaacacattcgtaaagcgtttgttgcggaagaaggttggttattacttgcggccgattactcccagatcgaacttcgtgtattggcgcatctctctggcgacgagaatcttaaacgcgtgtttcgcgaaggcaaggatattcacactgaaaccgcagcctggatgttcggggtggacccagccttagtggaccccaagatgcgtcgtgccgccaagaccgtcaactttggcgtactctatggtatgtcagcagcacgtcttagtcaggaattgggcattgactacaaagaagctgaagcgtttatcgagcgctatttccaatcctttccgaaagttcgcgcgtggattgaacgtacgctcgaagaaggtcgcactcgcggctatgtggaaacgttattcgggcgtcgtcgctacgttccagatcttacgtctcgtgtccgctcagtgcgcgaagctgctgagcgtatggcctggaatatgcctgttcagggaacagcggcggacctcatgaagatcgccatggtgaaattgtttccgcgcttgaaacccttaggagcccaccttcttttacaggtgcatgatgaattggtcttggaagtacccgaggatcgcgcagaagaagccaaagcactcgtgaaagaggttatggaaaacgcgtatccgttagatgttccgttggaggtcgaagtgggtgtaggccgtgattggcttgaagcgaaacaagactaatga

SEQ ID NO: 1184 - protein, 844 aa, synthetic construct
  REGION 1..844: note = DNA Polymerase Variant
MHHHHHHGGSGMLPLFDLEEPPKRVLLVDGHHLAYRTFYALSLTTSRGEPVQMVYGFARSLLKALKEDGQAVVVVFDAKAPSFRHEAYEAYKAGRAPTPEDFPRQLALVKRLVDLLGLVRLEAPGYEADDVLGTLAKKAEREGMEVCILTGDRDFFQLLSEKVSVLLPDGTLVTPKDVQEKYGVPPERWVDFRALTGDRSDNIPGVAGIGEKTALRLLAEWGSVENLLKNLDRVKPDSLRRKIEAHLEDLRLSLDLARIRTDLPLEVDFKALRRRTPDLEGLRAFLEELELGSLLHEFGLLGGEKPREEAPWPPPEGAFVGFLLSRKEPMWAELLALAAAAEGRVHRATSPVEALADLKEARGFLAKDLAVLALREGVALDPTDDPLLVAYLLDHANTNPERVARRYGGEFTEDAAERAVLSERLFQTLFPRLSEKLLWLYQEVERPLSRVLAHMEARGVRLDVPLLEALSFELEKELERLEGEVFRLAGHPFNLNSRDQLEKVLFDELGLTPVTRTEKTGKRSTSAAALEALRGAHPIVELILQYRELSKLKSTYLDRLPRLVHPRTGRLHTRFNQTATATGRLSSSDPNLQNIPVRTPLGQHIRKAFVAEEGWLLLAADYSQIELRVLAHLSGDENLKRVFREGKDIHTETAAWMFGVDPALVDPKMRRAAKTVNFGVLYGMSAARLSQELGIDYKEAEAFIERYFQSFPKVRAWIERTLEEGRTRGYVETLFGRRRYVPDLTSRVRSVREAAERMAWNMPVQGTAADLMKIAMVKLFPRLKPLGAHLLLQVHDELVLEVPEDRAEEAKALVKEVMENAYPLDVPLEVEVGVGRDWLEAKQD

SEQ ID NO: 1185 - DNA, 2538 bp, synthetic construct
  misc_feature 1..2538: note = DNA Polymerase Variant
  source 1..2538: mol_type = other DNA
atgcaccatcatcatcatcatggcggtagcggcatgttaccgctgtttgatttggaagaaccaccaaaacgcgtgctgcttgttgacggccatcatctggcgtatcgtaccttctacgcactgagccttacgacctcacgtggtgagcctgtccagatggtgtatgggtttgctcgctccctgctgaaagccctgaaggaagatggtcaagccgtagtagtggttttcgatgcgaaagcaccgtcgtttcgtcacgaagcgtacgaggcctataaagctggccgcgcaccgaccccggaagactttccgcgtcagttagcgctcgtcaaacgcctcgtggatttgctgggattagttcgcttggaagctcctggctacgaggcggacgacgtgctcggtacactggccaagaaagcagaacgtgaaggcatggaggtctgcattcttaccggtgatcgcgatttcttccagctgctgtctgagaaagtgagcgttttgctgcccgatggcacgttagtaaccccgaaagatgtgcaagagaaatatggagttccgccagaacgttgggtggactttcgcgcactgactggtgatcgttcagacaacatcccgggcgttgccgggattggtgaaaagacggcgctgcgcctgctggcagaatggggctcggtggaaaatctgctcaagaaccttgatcgtgtgaaacctgatagcttacgccgcaagatcgaagcccacctggaagacttgcgtctgagtctggatcttgcccgtattcgcaccgatctgccgttggaagtagactttaaagctctgcgtcgtcgcacacccgatttagaggggttacgcgcgttcctcgaagaactggagctgggctccctgctgcatgaattcggtttgttgggcggagagaaaccgcgtgaagaagcaccatggccgccgcccgaaggtgcctttgtcggctttcttctgtcacgcaaagagccaatgtgggcggaactgttagctcttgcagccgccgcggaagggcgtgttcaccgcgcgacctctcctgtcgaggccctcgctgacctcaaagaagcacgtggtttcttggcgaaagatttagccgtgcttgcattacgcgaaggcgttgcgctcgatccgacggacgacccgcttttggtggcttatttgctcgatcatgcgaataccaacccggaacgtgtcgcccgtcgttacggcggcgagtttactgaagatgcggcagaacgcgcgttgcttagcgaacgcctcttccagacgttatttccacgtctttcggagaaattactctggctctatcaggaagtcgaacgtccattgagtcgcgtgcttgcccatatggaggctcgcggtgtgcgcttagatgttccgttgttagaagcactcagcttcgagttggagaaagaactggaacgtcttgaaggcgaagtctttcgtttagcggggcatcccttcaatctcaactctcgcgaccaattggagaaagtgctctttgatgaattaggtttaacccctgtcacgcgtacagagaagaccggcaaacgttccacttcggcagccgccttggaagcacttcgtggtgcgcacccgatcgtcgagttgattttgcagtatcgcgagctcagcaaactcaaatcaacctatcttgataggttacctcgtcttgttcatccacgtacgggtcgtttacacacccgcttcaatcaaacggcaacagccaccgggcgcttgtcgtcgagtgacccgaacctccagaatattccagtgcgcacgccgctgggccaacacattcgtaaagcgtttgttgcggaagaaggttggttattacttgcggccgattactcccagatcgaacttcgtgtattggcgcatctctctggcgacgagaatcttaaacgcgtgtttcgcgaaggcaaggatattcacactgaaaccgcagcctggatgttcggggtggacccggccttagtggaccccaagatgcgtcgtgccgccaagaccgtcaactttggcgtactctatggtatgtcagcagcacgtcttagtcaggaattgggcattgactacaaagtagctgaagcgtttatcgagcgctatttccaatcctttccgaaagttcgcgcgtggattgaacgtacgctcgaagaaggtcgcactcgcggctatgtggaaacgttattcgggcgtcgtcgctacgttccagatcttacgtctcgtgtccgctcagtgcgcgaagctgctgagcgtatggcctggaatatgcctgttcagggaacagcggcggacctcatgaagatcgccatggtgaaattgtttccgcgcttgaaacccttaggagcccaccttcttctgcaggtgcatgatgaattggtcttggaagtacccgaggatcgcgcagaagaagccaaagcactcgtgaaagaggttatggaaaacgcgtatccgttagatgttccgttggaggtcgaagtgggtgtaggccgtgattggcttgaagcgaaacaagactaatga

SEQ ID NO: 1186 - protein, 844 aa, synthetic construct
  REGION 1..844: note = DNA Polymerase Variant
MHHHHHHGGSGMLPLFDLEEPPKRVLLVDGHHLAYRTFYALSLTTSRGEPVQMVYGFARSLLKALKEDGQAVVVVFDAKAPSFRHEAYEAYKAGRAPTPEDFPRQLALVKRLVDLLGLVRLEAPGYEADDVLGTLAKKAEREGMEVCILTGDRDFFQLLSEKVSVLLPDGTLVTPKDVQEKYGVPPERWVDFRALTGDRSDNIPGVAGIGEKTALRLLAEWGSVENLLKNLDRVKPDSLRRKIEAHLEDLRLSLDLARIRTDLPLEVDFKALRRRTPDLEGLRAFLEELELGSLLHEFGLLGGEKPREEAPWPPPEGAFVGFLLSRKEPMWAELLALAAAAEGRVHRATSPVEALADLKEARGFLAKDLAVLALREGVALDPTDDPLLVAYLLDHANTNPERVARRYGGEFTEDAAERALLSERLFQTLFPRLSEKLLWLYQEVERPLSRVLAHMEARGVRLDVPLLEALSFELEKELERLEGEVFRLAGHPFNLNSRDQLEKVLFDELGLTPVTRTEKTGKRSTSAAALEALRGAHPIVELILQYRELSKLKSTYLDRLPRLVHPRTGRLHTRFNQTATATGRLSSSDPNLQNIPVRTPLGQHIRKAFVAEEGWLLLAADYSQIELRVLAHLSGDENLKRVFREGKDIHTETAAWMFGVDPALVDPKMRRAAKTVNFGVLYGMSAARLSQELGIDYKVAEAFIERYFQSFPKVRAWIERTLEEGRTRGYVETLFGRRRYVPDLTSRVRSVREAAERMAWNMPVQGTAADLMKIAMVKLFPRLKPLGAHLLLQVHDELVLEVPEDRAEEAKALVKEVMENAYPLDVPLEVEVGVGRDWLEAKQD

SEQ ID NO: 1187 - DNA, 2538 bp, synthetic construct
  misc_feature 1..2538: note = DNA Polymerase Variant
  source 1..2538: mol_type = other DNA
atgcaccatcatcatcatcatggcggtagcggcatgttaccgctgtttgatttggaagaaccaccaaaacgcgtgctgcttgttgacggccatcatctggcgtatcgtaccttctacgcactgagccttacgacctcacgtggtgagcctgtccagatggtgtatgggtttgctcgctccctgctgaaagccctgaaggaagatggtcaagccgtagtagtggttttcgatgcgaaagcaccgtcgtttcgtcacgaagcgtacgaggcctataaagctggccgcgcaccgaccccggaagactttccgcgtcagttagcgctcgtcaaacgcctcgtggatttgctgggattagttcgcttggaagctcctggctacgaggcggacgacgtgctcggtacactggccaagaaagcagaacgtgaaggcatggaggtctgcattcttaccggtgatcgcgatttcttccagctgctgtctgagaaagtgagcgttttgctgcccgatggcacgttagtaaccccgaaagatgtgcaagagaaatatggagttccgccagaacgttgggtggactttcgcgcactgactggtgatcgttcagacaacatcccgggcgttgccgggattggtgaaaagacggcgctgcgcctgctggcagaatggggctcggtggaaaatctgctcaagaaccttgatcgtgtgaaacctgatagcttacgccgcaagatcgaagcccacctggaagacttgcgtctgagtctggatcttgcccgtattcgcaccgatctgccgttggaagtagactttaaagctctgcgtcgtcgcacacccgatttagaggggttacgcgcgttcctcgaagaactggagctgggctccctgctgcatgaattcggtttgttgggcggagagaaaccgcgtgaagaagcaccatggccgccgcccgaaggtgcctttgtcggctttcttctgtcacgcaaagagccaatgtgggcggaactgttagctcttgcagccgccgcggaagggcgtgttcaccgcgcgacctctcctgtcgaggccctcgctgacctcaaagaagcacgtggtttcttggcgaaagatttagccgtgcttgcattacgcgaaggcgttgcgctcgatccgacggacgacccgcttttggtggcttatttgctcgatcatgcgaataccaacccggaacgtgtcgcccgtcgttacggcggcgagtttactgaagatgcggcagaacgcgcgttgcttagcgaacgcctcttcattacgttatttccacgtctttcggagaaattactctggctctatcaggaagtcgaacgtccattgagtcgcgtgcttgcccatatggaggctcgcggtgtgcgcttagatgttccgttgttagaagcactcagcttcgagttggagaaagaactggaacgtcttgaaggcgaagtctttcgtttagcggggcatcccttcaatctcaactctcgcgaccaattggagaaagtgctctttgatgaattaggtttaacccctgtcacgcgtacagagaagaccggcaaacgttccacttcggcagccgccttggaagcacttcgtggtgctcacccgatcgtcgagttgattttgcagtatcgcgagctcagcaaactcaaatcaacctatcttgataggttacctcgtcttgttcatccacgtacgggtcgtttacacacccgcttcaatcaaacggcaacagccaccgggcgcttgtcgtcgagtgacccgaacctccagaatattccagtgcgcacgccgctgggccaacacattcgtaaagcgtttgttgcggaagaaggttggttattacttgcggccgattactcccagatcgaacttcgtgtattggcgcatctctctggcgacgagaatcttaaacgcgtgtttcgcgaaggcaaggatattcacactgaaaccgcagcctggatgttcggggtggacccagccttagtggaccccaagatgcgtcgtgccgccaagaccgtcaactttggcgtactctatggtatgtcagcagcacgtcttagtcaggaattgggcattgactacaaagaagctgaagcgtttatcgagcgctatttccaatcctttccgaaagttcgcgcgtggattgaacgtacgctcgaagaaggtcgcactcgcggctatgtggaaacgttattcgggcgtcgtcgctacgttccagatcttacgtctcgtgtccgctcagtgcgcgaagctgctgagcgtatggcctggaatatgcctgttcagggaacagcggcggacctcatgaagatcgccatggtgaaattgtttccgcgcttgaaacccttaggagcccaccttcttttacaggtgcatgatgaattggtcttggaagtacccgaggatcgcgcagaagaagccaaagcactcgtgaaagaggttatggaaaacgcgtatccgttagatgttccgttggaggtcgaagtgggtgtaggccgtgattggcttgaagcgaaacaagactaatga

SEQ ID NO: 1188 - protein, 844 aa, synthetic construct
  REGION 1..844: note = DNA Polymerase Variant
MHHHHHHGGSGMLPLFDLEEPPKRVLLVDGHHLAYRTFYALSLTTSRGEPVQMVYGFARSLLKALKEDGQAVVVVFDAKAPSFRHEAYEAYKAGRAPTPEDFPRQLALVKRLVDLLGLVRLEAPGYEADDVLGTLAKKAEREGMEVCILTGDRDFFQLLSEKVSVLLPDGTLVTPKDVQEKYGVPPERWVDFRALTGDRSDNIPGVAGIGEKTALRLLAEWGSVENLLKNLDRVKPDSLRRKIEAHLEDLRLSLDLARIRTDLPLEVDFKALRRRTPDLEGLRAFLEELELGSLLHEFGLLGGEKPREEAPWPPPEGAFVGFLLSRKEPMWAELLALAAAAEGRVHRATSPVEALADLKEARGFLAKDLAVLALREGVALDPTDDPLLVAYLLDHANTNPERVARRYGGEFTEDAAERALLSERLFITLFPRLSEKLLWLYQEVERPLSRVLAHMEARGVRLDVPLLEALSFELEKELERLEGEVFRLAGHPFNLNSRDQLEKVLFDELGLTPVTRTEKTGKRSTSAAALEALRGAHPIVELILQYRELSKLKSTYLDRLPRLVHPRTGRLHTRFNQTATATGRLSSSDPNLQNIPVRTPLGQHIRKAFVAEEGWLLLAADYSQIELRVLAHLSGDENLKRVFREGKDIHTETAAWMFGVDPALVDPKMRRAAKTVNFGVLYGMSAARLSQELGIDYKEAEAFIERYFQSFPKVRAWIERTLEEGRTRGYVETLFGRRRYVPDLTSRVRSVREAAERMAWNMPVQGTAADLMKIAMVKLFPRLKPLGAHLLLQVHDELVLEVPEDRAEEAKALVKEVMENAYPLDVPLEVEVGVGRDWLEAKQD

SEQ ID NO: 1189 - DNA, 2538 bp, synthetic construct
  misc_feature 1..2538: note = DNA Polymerase Variant
  source 1..2538: mol_type = other DNA
atgcaccatcatcatcatcatggcggtagcggcatgttaccgctgtttgatttggaagaaccaccaaaacgcgtgctgcttgttgacggccatcatctggcgtatcgtaccttctacgcactgagccttacgacctcacgtggtgagcctgtccagatggtgtatgggtttgctcgctccctgctgaaagccctgaaggaagatggtcaagccgtagtagtggttttcgatgcgaaagcaccgtcgtttcgtcacgaagcgtacgaggcctataaagctggccgcgcaccgaccccggaagactttccgcgtcagttagcgctcgtcaaacgcctcgtggatttgctgggattagttcgcttggaagctcctggctacgaggcggacgacgtgctcggtacactggccaagaaagcagaacgtgaaggcatggaggtctgcattcttaccggtgatcgcgatttcttccagctgctgtctgagaaagtgagcgttttgctgcccgatggcacgttagtaaccccgaaagatgtgcaagagaaatatggagttccgccagaacgttgggtggactttcgcgcactgactggtgatcgttcagacaacatcccgggcgttgccgggattggtgaaaagacggcgctgcgcctgctggcagaatggggctcggtggaaaatctgctcaagaaccttgatcgtgtgaaacctgatagcttacgccgcaagatcgaagcccacctggaagacttgcgtctgagtctggatcttgcccgtattcgcaccgatctgccgttggaagtagactttaaagctctgcgtcgtcgcacacccgatttagaggggttacgcgcgttcctcgaagaactggagctgggctccctgctgcatgaattcggtttgttgggcggagagaaaccgcgtgaagaagcaccatggccgccgcccgaaggtgcctttgtcggctttcttctgtcacgcaaagagccaatgtgggcggaactgttagctcttgcagccgccgcggaagggcgtgttcaccgcgcgacctctcctgtcgaggccctcgctgacctcaaagaagcacgtggtttcttggcgaaagatttagccgtgcttgcattacgcgaaggcgttgcgctcgatccgacggacgacccgcttttggtggcttatttgctcgatcatgcgaataccaacccggaacgtgtcgcccgtcgttacggcggcgagtttactgaagatgcggcagaacgcgcgttgcttagcgaacgcctcttccagacgttatttccacgtctttcggagaaattactctggctctatcaggaagtcgaacgtccattgagtcgcgtgcttgcccatatggaggctcgcggtgtgcgcttagatgttccgttgttagaagcactcagcttcgagttggagaaagaactggaacgtcttgaaggcgaagtctttcgtttagcggggcatcccttcaatctcaactctcgcgaccaattggagaaagtgctctttgatgaattaggtttaacccctgtcacgcgtacagagaagaccggcaaacgttccacttcggcagccgccttggaagcacttcgtggtgctcacccgatcgtcgagttgattttgcagtatcgcgagctcagcaaactcaaatcaacctatcttgataggttacctcgtcttgttcatccacgtacgggtcgtttacacacccgcttcaatcaaacggcaacagccaccgggcgcttgtcgtcgagtgacccgaacctccagaatattccagtgcgcacgccgctgggccaacacattcgtaaagcgtttgttgcggaagaaggttggttattacttgcggccgattactcccagatcgaacttcgtgtattggcgcatctctctggcgacgagaatcttaaacgcgtgtttcgcgaaggcaaggatattcacactgaaaccgcagcctggatgttcggggtggacccagccttagtggaccccaagatgcgtcgtgccgccaagaccgtcaactttggcgtactctatggtatgtcagcagcacgtcttagtcaggaattgggcattgactacaaagaagctgaagcgtttatcgagcgctatttccaatcctttccgaaagttcgcgcgtggattgaacgtacgctcgaacttggtcgcactcgcggctatgtggaaacgttattcgggcgtcgtcgctacgttccagatcttacgtctcgtgtccgctcagtgcgcgaagctgctgagcgtatggcctggaatatgcctgttcagggaacagcggcggacctcatgaagatcgccatggtgaaattgtttccgcgcttgaaacccttaggagcccaccttcttttacaggtgcatgatgaattggtcttggaagtacccgaggatcgcgcagaagaagccaaagcactcgtgaaagaggttatggaaaacgcgtatccgttagatgttccgttggaggtcgaagtgggtgtaggccgtgattggcttgaagcgaaacaagactaatga

SEQ ID NO: 1190 - protein, 844 aa, synthetic construct
  REGION 1..844: note = DNA Polymerase Variant
MHHHHHHGGSGMLPLFDLEEPPKRVLLVDGHHLAYRTFYALSLTTSRGEPVQMVYGFARSLLKALKEDGQAVVVVFDAKAPSFRHEAYEAYKAGRAPTPEDFPRQLALVKRLVDLLGLVRLEAPGYEADDVLGTLAKKAEREGMEVCILTGDRDFFQLLSEKVSVLLPDGTLVTPKDVQEKYGVPPERWVDFRALTGDRSDNIPGVAGIGEKTALRLLAEWGSVENLLKNLDRVKPDSLRRKIEAHLEDLRLSLDLARIRTDLPLEVDFKALRRRTPDLEGLRAFLEELELGSLLHEFGLLGGEKPREEAPWPPPEGAFVGFLLSRKEPMWAELLALAAAAEGRVHRATSPVEALADLKEARGFLAKDLAVLALREGVALDPTDDPLLVAYLLDHANTNPERVARRYGGEFTEDAAERALLSERLFQTLFPRLSEKLLWLYQEVERPLSRVLAHMEARGVRLDVPLLEALSFELEKELERLEGEVFRLAGHPFNLNSRDQLEKVLFDELGLTPVTRTEKTGKRSTSAAALEALRGAHPIVELILQYRELSKLKSTYLDRLPRLVHPRTGRLHTRFNQTATATGRLSSSDPNLQNIPVRTPLGQHIRKAFVAEEGWLLLAADYSQIELRVLAHLSGDENLKRVFREGKDIHTETAAWMFGVDPALVDPKMRRAAKTVNFGVLYGMSAARLSQELGIDYKEAEAFIERYFQSFPKVRAWIERTLELGRTRGYVETLFGRRRYVPDLTSRVRSVREAAERMAWNMPVQGTAADLMKIAMVKLFPRLKPLGAHLLLQVHDELVLEVPEDRAEEAKALVKEVMENAYPLDVPLEVEVGVGRDWLEAKQD

SEQ ID NO: 1191 - DNA, 2538 bp, synthetic construct
  misc_feature 1..2538: note = DNA Polymerase Variant
  source 1..2538: mol_type = other DNA
atgcaccatcatcatcatcatggcggtagcggcatgttaccgctgtttgatttggaagaaccaccaaaacgcgtgctgcttgttgacggccatcatctggcgtatcgtaccttctacgcactgagccttacgacctcacgtggtgagcctgtccagatggtgtatgggtttgctcgctccctgctgaaagccctgaaggaacggggtcaagccgtagtagtggttttcgatgcgaaggcaccgtcgtttcgtcacgaagcgtacgaggcctataaagctggccgcgcaccgaccccggaagactttccgcgtcagttagcgctcgtcaaacgcctcgtggatttgctgggattagttcgcttggaagctcctggctacgaggcggacgacgtgctcggtacactggccaagaaagcagaacgtgaaggcatggaggtctgcattcttaccggtgatcgcgatttcttccagctgctgtctgagaaagtgagcgttttgctgcccgatggcacgttagtaaccccgaaagatgtgcaagagaaatatggagttccgccagaacgttgggtggactttcgcgcactgactggtgatcgttcagacaacatcccgggcgttgccgggattggtgaaaagacggcgctgcgcctgctggcagaatggggctcggtggaaaatctgctcaagaaccttgatcgtgtgaaacctgatagcttacgccgcaagatcgaagcccacctggaagacttgcgtctgagtctggatcttgtacgtattcgcaccgatctgccgttggaagtagactttaaagctctgcgtcgtcgcacacccgatttagaggggttacgcgcgttcctcgaagaactggagctgggctccctgctgcatgaattcggtttgttgggcggagagaaaccgcgtgaagaagcaccatggccgccgcccgagggtgcctttgtcggctttcttctgtcacgcaaagagccaatgtgggcggaactgttagctcttgcagccgccgcggaagggcgtgttcaccgcgcgacctctcctgtcgaggccctcgctgacctcaaagaagcacgtggtttcttggcgaaagatttagccgtgcttgcattacgcgaaggcgttgcgctcgatccgacggacgacccgcttttggtggcttatttgctcgatagcgcgaataccaacccggaacgtgtcgcccgtcgttacggcggcgagtttactgaagatgcggcagaacgcgcgttgcttagcgaacgcctcttccagacgttatttccacgtctttcggagaaattactctggctctatcaggaagtcgaacgtccattgagtcgcgtgcttgcccatatggaggctcgcggtgtgcgcttagatgttccgttgttagaagcactcagcttcgaggcggcaaaagaactggaacgtcttgaaggcgaagtctttcgtttagcggggcatcccttcaatctcaactctcgcgaccaattggagaaagtgctctttgatgaattaggtttaacccctgtcacgcgtacagagaagaccggcaaacgttccacttcggcagccgccttggaagcacttcgtggtgtgcacccgatcgtcgagttgattttgcagtatcgcgagctcagcaaactcaaatcaacctatcttgataggttacctcgtcttgttcatccacgtacgggtcgtttacacacccgcttcaatcaaacggcaacagccaccgggcgcttgtcgtcgagtgacccgaacctccagaatattccagtgcgcacgccgctgggccaacacattcgtaaagcgtttgttgcggaagaaggttggttattacttgcggccgattactcccagatcgaacttcgtgtattggcgcatctctctggcgacgagaatcttaaacgcgtgtttcgcgaaggcaaggatattcacactgaaaccgcagcctggatgttcggggtggactcggccttagtggaccccaagatgcgtcgtgccgccaagaccgtcaactttggcgtactctatggtatgtcagcagcacgtcttagtcaggaattgggcattgactacaaagaagctgaagcgtttatcgagcgctatttccaatcctttccgaaagttcgcgcgtggattgaacgtacgctcgaagaaggtcgcactcgcggctatgtggaaacgttattcgggcgtcgtcgctacgttccagatcttacgtctcgtgtccgctcagtgcgcgaagctgctgagcgtatggcctggaatatgcctgttcagggaacagcggcggacctcatgaagatcgccatggtgaaattgtttccgcgcttgaaacccttaggagcccaccttcttctgcaggtgcatgatgaattggtcttggaagtacccgaggatcgcgcagaagaagccaaagcactcgtgaaagaggttatggaaaacgcgtatccgttagatgttccgttggaggtcgaagtgggtgtaggccgtgattggcttgaagcgaaacaagactaatga

SEQ ID NO: 1192 - protein, 844 aa, synthetic construct
  REGION 1..844: note = DNA Polymerase Variant
MHHHHHHGGSGMLPLFDLEEPPKRVLLVDGHHLAYRTFYALSLTTSRGEPVQMVYGFARSLLKALKERGQAVVVVFDAKAPSFRHEAYEAYKAGRAPTPEDFPRQLALVKRLVDLLGLVRLEAPGYEADDVLGTLAKKAEREGMEVCILTGDRDFFQLLSEKVSVLLPDGTLVTPKDVQEKYGVPPERWVDFRALTGDRSDNIPGVAGIGEKTALRLLAEWGSVENLLKNLDRVKPDSLRRKIEAHLEDLRLSLDLVRIRTDLPLEVDFKALRRRTPDLEGLRAFLEELELGSLLHEFGLLGGEKPREEAPWPPPEGAFVGFLLSRKEPMWAELLALAAAAEGRVHRATSPVEALADLKEARGFLAKDLAVLALREGVALDPTDDPLLVAYLLDSANTNPERVARRYGGEFTEDAAERALLSERLFQTLFPRLSEKLLWLYQEVERPLSRVLAHMEARGVRLDVPLLEALSFEAAKELERLEGEVFRLAGHPFNLNSRDQLEKVLFDELGLTPVTRTEKTGKRSTSAAALEALRGVHPIVELILQYRELSKLKSTYLDRLPRLVHPRTGRLHTRFNQTATATGRLSSSDPNLQNIPVRTPLGQHIRKAFVAEEGWLLLAADYSQIELRVLAHLSGDENLKRVFREGKDIHTETAAWMFGVDSALVDPKMRRAAKTVNFGVLYGMSAARLSQELGIDYKEAEAFIERYFQSFPKVRAWIERTLEEGRTRGYVETLFGRRRYVPDLTSRVRSVREAAERMAWNMPVQGTAADLMKIAMVKLFPRLKPLGAHLLLQVHDELVLEVPEDRAEEAKALVKEVMENAYPLDVPLEVEVGVGRDWLEAKQD

SEQ ID NO: 1193 - DNA, 2538 bp, synthetic construct
  misc_feature 1..2538: note = DNA Polymerase Variant
  source 1..2538: mol_type = other DNA
atgcaccatcatcatcatcatggcggtagcggcatgttaccgctgtttgatttggaagaaccaccaaaacgcgtgctgcttgttgacggccatcatctggcgtatcgtaccttctacgcactgagccttacgacctcacgtggtgagcctgtccagatggtgtatgggtttgctcgctccctgctgaaagccctgaaggaagatggtcaagccgtagtagtggttttcgatagtaaggcaccgtcgtttcgtcacgaagcgtacgaggcctataaagctggccgcgcaccgaccccggaagactttccgcgtcagttagcgctcgtcaaacgcctcgtggatttgctgggattagttcgcttggaagctcctggctacgaggcggacgacgtgctcggtacactggccaagaaagcagaacgtgaaggcatggaggtctgcattcttaccggtgatcgcgatttcttccagctgctgtctgagaaagtgagcgttttgctgcccgatggcacgttagtaaccccgaaagatgtgcaagagaaatatggagttccgccagaacgttgggtggactttcgcgcactgactggtgatcgttcagacaacatcccgggcgttgccgggattggtgaaaagacggcgctgcgcctgctggcagaatggggctcggtggaaaatctgctcaagaaccttgatcgtgtgaaacctgatagcttacgccgcaagatcgaagcccacctggaagacttgcgtctgagtctggatcttgtacgtattcgcaccgatctgccgttggaagtagactttaaagctctgcgtcgtcgcacacccgatttagaggggttacgcgcgttcctcgaagaactggagctgggctccctgctgcatgaattcggtttgttgggcggagagaaaccgcgtgaagaagcaccatggccgccgcccgagggtgcctttgtcggctttcttctgtcacgcaaagagccaatgtgggcggaactgttagctcttgcagccgccgcggaagggcgtgttcaccgcgcgacctctcctgtcgaggccctcgctgacctcaaagaagcacgtggtttcttggcgaaagatttagccgtgcttgcattacgcgaaggcgttgcgctcgatccgacggacgacccgcttttggtggcttatttgctcgatagcgcgaataccaacccggaacgtgtcgcccgtcgttacggcggcgagtttactgaagatgcggcagaacgcgcgttgcttagcgaacgcctcttccagacgttatttccacgtctttcggagaaattactctggctctatcaggaagtcgaacgtccattgagtcgcgtgcttgcccatatggaggctcgcggtgtgcgcttagatgttccgttgttagaagcactcagcttcgaggcggcaaaagaactggaacgtcttgaaggcgaagtctttcgtttagcggggcatcccttcaatctcaactctcgcgaccaattggagaaagtgctctttgatgaattaggtttaacccctgtcacgcgtacagagaagaccggcaaacgttccacttcggcagccgccttggaagcacttcgtggtgtgcacccgatcgtcgagttgattttgcagtatcgcgagctcagcaaactcaaatcaacctatcttgataggttacctcgtcttgttcatccacgtacgggtcgtttacacacccgcttcaatcaaacggcaacagccaccgggcgcttgtcgtcgagtgacccgaacctccagaatattccagtgcgcacgccgctgggccaacacattcgtaaagcgtttgttgcggaagaaggttggttattacttgcggccgattactcccagatcgaacttcgtgtattggcgcatctctctggcgacgagaatcttaaacgcgtgtttcgcgaaggcaaggatattcacactgaaaccgcagcctggatgttcggggtggactcggccttagtggaccccaagatgcgtcgtgccgccaagaccgtcaactttggcgtactctatggtatgtcagcagcacgtcttagtcaggaattgggcattgactacaaagaagctgaagcgtttatcgagcgctatttccaatcctttccgaaagttcgcgcgtggattgaacgtacgctcgaagaaggtcgcactcgcggctatgtggaaacgttattcgggcgtcgtcgctacgttccagatcttacgtctcgtgtccgctcagtgcgcgaagctgctgagcgtatggcctggaatatgcctgttcagggaacagcggcggacctcatgaagatcgccatggtgaaattgtttccgcgcttgaaacccttaggagcccaccttcttctgcaggtgcatgatgaattggtcttggaagtacccgaggatcgcgcagaagaagccaaagcactcgtgaaagaggttatggaaaacgcgtatccgttagatgttccgttggaggtcgaagtgggtgtaggccgtgattggcttgaagcgaaacaagactaatga

SEQ ID NO: 1194 - protein, 844 aa, synthetic construct
  REGION 1..844: note = DNA Polymerase Variant
MHHHHHHGGSGMLPLFDLEEPPKRVLLVDGHHLAYRTFYALSLTTSRGEPVQMVYGFARSLLKALKEDGQAVVVVFDSKAPSFRHEAYEAYKAGRAPTPEDFPRQLALVKRLVDLLGLVRLEAPGYEADDVLGTLAKKAEREGMEVCILTGDRDFFQLLSEKVSVLLPDGTLVTPKDVQEKYGVPPERWVDFRALTGDRSDNIPGVAGIGEKTALRLLAEWGSVENLLKNLDRVKPDSLRRKIEAHLEDLRLSLDLVRIRTDLPLEVDFKALRRRTPDLEGLRAFLEELELGSLLHEFGLLGGEKPREEAPWPPPEGAFVGFLLSRKEPMWAELLALAAAAEGRVHRATSPVEALADLKEARGFLAKDLAVLALREGVALDPTDDPLLVAYLLDSANTNPERVARRYGGEFTEDAAERALLSERLFQTLFPRLSEKLLWLYQEVERPLSRVLAHMEARGVRLDVPLLEALSFEAAKELERLEGEVFRLAGHPFNLNSRDQLEKVLFDELGLTPVTRTEKTGKRSTSAAALEALRGVHPIVELILQYRELSKLKSTYLDRLPRLVHPRTGRLHTRFNQTATATGRLSSSDPNLQNIPVRTPLGQHIRKAFVAEEGWLLLAADYSQIELRVLAHLSGDENLKRVFREGKDIHTETAAWMFGVDSALVDPKMRRAAKTVNFGVLYGMSAARLSQELGIDYKEAEAFIERYFQSFPKVRAWIERTLEEGRTRGYVETLFGRRRYVPDLTSRVRSVREAAERMAWNMPVQGTAADLMKIAMVKLFPRLKPLGAHLLLQVHDELVLEVPEDRAEEAKALVKEVMENAYPLDVPLEVEVGVGRDWLEAKQD

SEQ ID NO: 1195 - DNA, 2538 bp, synthetic construct
  misc_feature 1..2538: note = DNA Polymerase Variant
  source 1..2538: mol_type = other DNA
atgcaccatcatcatcatcatggcggtagcggcatgttaccgctgtttgatttggaagaaccaccaaaacgcgtgctgcttgttgacggccatcatctggcgtatcgtaccttctacgcactgagccttacgacctcacgtggtgagcctgtccagatggtgtatgggtttgctcgctccctgctgaaagccctgaaggaaaagggtcaagccgtagtagtggttttcgatgcgaaggcaccgtcgtttcgtcacgaagcgtacgaggcctataaagctggccgcgcaccgaccccggaagactttccgcgtcagttagcgctcgtcaaacgcctcgtggatttgctgggattagttcgcttggaagctcctggctacgaggcggacgacgtgctcggtacactggccaagaaagcagaacgtgaaggcatggaggtctgcattcttaccggtgatcgcgatttcttccagctgctgtctgagaaagtgagcgttttgctgcccgatggcacgttagtaaccccgaaagatgtgcaagagaaatatggagttccgccagaacgttgggtggactttcgcgcactgactggtgatcgttcagacaacatcccgggcgttgccgggattggtgaaaagacggcgctgcgcctgctggcagaatggggctcggtggaaaatctgctcaagaaccttgatcgtgtgaaacctgatagcttacgccgcaagatcgaagcccacctggaagacttgcgtctgagtctggatcttgtacgtattcgcaccgatctgccgttggaagtagactttaaagctctgcgtcgtcgcacacccgatttagaggggttacgcgcgttcctcgaagaactggagctgggctccctgctgcatgaattcggtttgttgggcggagagaaaccgcgtgaagaagcaccatggccgccgcccgagggtgcctttgtcggctttcttctgtcacgcaaagagccaatgtgggcggaactgttagctcttgcagccgccgcggaagggcgtgttcaccgcgcgacctctcctgtcgaggccctcgctgacctcaaagaagcacgtggtttcttggcgaaagatttagccgtgcttgcattacgcgaaggcgttgcgctcgatccgacggacgacccgcttttggtggcttatttgctcgatagcgcgaataccaacccggaacgtgtcgcccgtcgttacggcggcgagtttactgaagatgcggcagaacgcgcgttgcttagcgaacgcctcttccagacgttatttccacgtctttcggagaaattactctggctctatcaggaagtcgaacgtccattgagtcgcgtgcttgcccatatggaggctcgcggtgtgcgcttagatgttccgttgttagaagcactcagcttcgaggcggcaaaagaactggaacgtcttgaaggcgaagtctttcgtttagcggggcatcccttcaatctcaactctcgcgaccaattggagaaagtgctctttgatgaattaggtttaacccctgtcacgcgtacagagaagaccggcaaacgttccacttcggcagccgccttggaagcacttcgtggtgtgcacccgatcgtcgagttgattttgcagtatcgcgagctcagcaaactcaaatcaacctatcttgataggttacctcgtcttgttcatccacgtacgggtcgtttacacacccgcttcaatcaaacggcaacagccaccgggcgcttgtcgtcgagtgacccgaacctccagaatattccagtgcgcacgccgctgggccaacacattcgtaaagcgtttgttgcggaagaaggttggttattacttgcggccgattactcccagatcgaacttcgtgtattggcgcatctctctggcgacgagaatcttaaacgcgtgtttcgcgaaggcaaggatattcacactgaaaccgcagcctggatgttcggggtggactcggccttagtggaccccaagatgcgtcgtgccgccaagaccgtcaactttggcgtactctatggtatgtcagcagcacgtcttagtcaggaattgggcattgactacaaagaagctgaagcgtttatcgagcgctatttccaatcctttccgaaagttcgcgcgtggattgaacgtacgctcgaagaaggtcgcactcgcggctatgtggaaacgttattcgggcgtcgtcgctacgttccagatcttacgtctcgtgtccgctcagtgcgcgaagctgctgagcgtatggcctggaatatgcctgttcagggaacagcggcggacctcatgaagatcgccatggtgaaattgtttccgcgcttgaaacccttaggagcccaccttcttctgcaggtgcatgatgaattggtcttggaagtacccgaggatcgcgcagaagaagccaaagcactcgtgaaagaggttatggaaaacgcgtatccgttagatgttccgttggaggtcgaagtgggtgtaggccgtgattggcttgaagcgaaacaagactaatga

SEQ ID NO: 1196 - protein, 844 aa, synthetic construct
  REGION 1..844: note = DNA Polymerase Variant
MHHHHHHGGSGMLPLFDLEEPPKRVLLVDGHHLAYRTFYALSLTTSRGEPVQMVYGFARSLLKALKEKGQAVVVVFDAKAPSFRHEAYEAYKAGRAPTPEDFPRQLALVKRLVDLLGLVRLEAPGYEADDVLGTLAKKAEREGMEVCILTGDRDFFQLLSEKVSVLLPDGTLVTPKDVQEKYGVPPERWVDFRALTGDRSDNIPGVAGIGEKTALRLLAEWGSVENLLKNLDRVKPDSLRRKIEAHLEDLRLSLDLVRIRTDLPLEVDFKALRRRTPDLEGLRAFLEELELGSLLHEFGLLGGEKPREEAPWPPPEGAFVGFLLSRKEPMWAELLALAAAAEGRVHRATSPVEALADLKEARGFLAKDLAVLALREGVALDPTDDPLLVAYLLDSANTNPERVARRYGGEFTEDAAERALLSERLFQTLFPRLSEKLLWLYQEVERPLSRVLAHMEARGVRLDVPLLEALSFEAAKELERLEGEVFRLAGHPFNLNSRDQLEKVLFDELGLTPVTRTEKTGKRSTSAAALEALRGVHPIVELILQYRELSKLKSTYLDRLPRLVHPRTGRLHTRFNQTATATGRLSSSDPNLQNIPVRTPLGQHIRKAFVAEEGWLLLAADYSQIELRVLAHLSGDENLKRVFREGKDIHTETAAWMFGVDSALVDPKMRRAAKTVNFGVLYGMSAARLSQELGIDYKEAEAFIERYFQSFPKVRAWIERTLEEGRTRGYVETLFGRRRYVPDLTSRVRSVREAAERMAWNMPVQGTAADLMKIAMVKLFPRLKPLGAHLLLQVHDELVLEVPEDRAEEAKALVKEVMENAYPLDVPLEVEVGVGRDWLEAKQD

SEQ ID NO: 1197 - DNA, 2538 bp, synthetic construct
  misc_feature 1..2538: note = DNA Polymerase Variant
  source 1..2538: mol_type = other DNA
atgcaccatcatcatcatcatggcggtagcggcatgttaccgctgtttgatttggaagaaccaccaaaacgcgtgctgcttgttgacggccatcatctggcgtatcgtaccttctacgcactgagccttacgacctcacgtggtgagcctgtccagatggtgtatgggtttgctcgctccctgctgaaagccctgaaggaagatggtcaagccgtagtagtggttttcgatgcgaaggcaccgtcgtttcgtcacgaagcgtacgaggcctataaagctggccgcgcaccgaccccggaagactttccgcgtcagttagcgctcgtcaaacgcctcgtggatttgctgggattagttcgcttggaagctcctggctacgaggcggacgacgtgctcggtacactggccaagaaagcagaacgtgaaggcatggaggtctgcattcttaccggtgatcgcgatttcttccagctgctgtctgagaaagtgagcgttttgctgcccgatggcacgttagtaaccccgaaagatgtgcaagagaaatatggagttccgccagaacgttgggtggactttcgcgcactgactggtgatcgttcagacaacatcccgggcgttgccgggattggtgaaaagacggcgctgcgcctgctggcagaatggggctcggtggaaaatctgctcaagaaccttgatcgtgtgaaacctgatagcttacgccgcaagatcgaagcccacctggaagacttgcgtctgagtctggatcttgtacgtattcgcaccgatctgccgttggaagtagactttaaagctctgcgtcgtcgcacacccgatttagaggggttacgcgcgttcctcgaagaactggagctgggctccctgctgcatgaattcggtttgttgggcggagagaaaccgcgtgaagaagcaccatggccgccgcccgagggtgcctttgtcggctttcttctgtcacgcaaagagccaatgtgggcggaactgttagctcttgcagccgccgcggaagggcgtgttcaccgcgcgacctctcctgtcgaggccctcgctgacctcaaagaagcacgtggtttcttggcgaaagatttagccgtgcttgcattacgcgaaggcgttgcgctcgatccgacggacgacccgcttttggtggcttatttgctcgatagcgcgaataccaacccggaacgtgtcgcccgtcgttacggcggcgagtttactgaagatgcggcagaacgcgcgttgcttagcgaacgcctcttccagacgttatttccacgtctttcggagaaattactctggctctatcaggaagtcgaacgtccattgagtcgcgtgcttgcccatatggaggctcgcggtgtgcgcttagatgttccgtatttagaagcactcagcttcgaggcggcaaaagaactggaacgtcttgaaggcgaagtctttcgtttagcggggcatcccttcaatctcaactctcgcgaccaattggagaaagtgctctttgatgaattaggtttaacccctgtcacgcgtacagagaagaccggcaaacgttccacttcggcagccgccttggaagcacttcgtggtgtgcacccgatcgtcgagttgattttgcagtatcgcgagctcagcaaactcaaatcaacctatcttgataggttacctcgtcttgttcatccacgtacgggtcgtttacacacccgcttcaatcaaacggcaacagccaccgggcgcttgtcgtcgagtgacccgaacctccagaatattccagtgcgcacgccgctgggccaacacattcgtaaagcgtttgttgcggaagaaggttggttattacttgcggccgattactcccagatcgaacttcgtgtattggcgcatctctctggcgacgagaatcttaaacgcgtgtttcgcgaaggcaaggatattcacactgaaaccgcagcctggatgttcggggtggactcggccttagtggaccccaagatgcgtcgtgccgccaagaccgtcaactttggcgtactctatggtatgtcagcagcacgtcttagtcaggaattgggcattgactacaaagaagctgaagcgtttatcgagcgctatttccaatcctttccgaaagttcgcgcgtggattgaacgtacgctcgaagaaggtcgcactcgcggctatgtggaaacgttattcgggcgtcgtcgctacgttccagatcttacgtctcgtgtccgctcagtgcgcgaagctgctgagcgtatggcctggaatatgcctgttcagggaacagcggcggacctcatgaagatcgccatggtgaaattgtttccgcgcttgaaacccttaggagcccaccttcttctgcaggtgcatgatgaattggtcttggaagtacccgaggatcgcgcagaagaagccaaagcactcgtgaaagaggttatggaaaacgcgtatccgttagatgttccgttggaggtcgaagtgggtgtaggccgtgattggcttgaagcgaaacaagactaatga

SEQ ID NO: 1198 - protein, 844 aa, synthetic construct
  REGION 1..844: note = DNA Polymerase Variant
MHHHHHHGGSGMLPLFDLEEPPKRVLLVDGHHLAYRTFYALSLTTSRGEPVQMVYGFARSLLKALKEDGQAVVVVFDAKAPSFRHEAYEAYKAGRAPTPEDFPRQLALVKRLVDLLGLVRLEAPGYEADDVLGTLAKKAEREGMEVCILTGDRDFFQLLSEKVSVLLPDGTLVTPKDVQEKYGVPPERWVDFRALTGDRSDNIPGVAGIGEKTALRLLAEWGSVENLLKNLDRVKPDSLRRKIEAHLEDLRLSLDLVRIRTDLPLEVDFKALRRRTPDLEGLRAFLEELELGSLLHEFGLLGGEKPREEAPWPPPEGAFVGFLLSRKEPMWAELLALAAAAEGRVHRATSPVEALADLKEARGFLAKDLAVLALREGVALDPTDDPLLVAYLLDSANTNPERVARRYGGEFTEDAAERALLSERLFQTLFPRLSEKLLWLYQEVERPLSRVLAHMEARGVRLDVPYLEALSFEAAKELERLEGEVFRLAGHPFNLNSRDQLEKVLFDELGLTPVTRTEKTGKRSTSAAALEALRGVHPIVELILQYRELSKLKSTYLDRLPRLVHPRTGRLHTRFNQTATATGRLSSSDPNLQNIPVRTPLGQHIRKAFVAEEGWLLLAADYSQIELRVLAHLSGDENLKRVFREGKDIHTETAAWMFGVDSALVDPKMRRAAKTVNFGVLYGMSAARLSQELGIDYKEAEAFIERYFQSFPKVRAWIERTLEEGRTRGYVETLFGRRRYVPDLTSRVRSVREAAERMAWNMPVQGTAADLMKIAMVKLFPRLKPLGAHLLLQVHDELVLEVPEDRAEEAKALVKEVMENAYPLDVPLEVEVGVGRDWLEAKQD

SEQ ID NO: 1199 - DNA, 2538 bp, synthetic construct
  misc_feature 1..2538: note = DNA Polymerase Variant
  source 1..2538: mol_type = other DNA
atgcaccatcatcatcatcatggcggtagcggcatgttaccgctgtttgatttggaagaaccaccaaaacgcgtgctgcttgttgacggccatcatctggcgtatcgtaccttctacgcactgagccttacgacctcacgtggtgagcctgtccagatggtgtatgggtttgctcgctccctgctgaaagccctgaaggaagatggtcaagccgtagtagtggttttcgatgcgaaggcaccgtcgtttcgtcacgaagcgtacgaggcctataaagctggccgcgcaccgaccccggaagactttccgcgtcagttagcgctcgtcaaacgcctcgtggatttgctgggattagttcgcttggaagctcctggctacgaggcggacgacgtgctcggtacactggccaagaaagcagaacgtgaaggcatggaggtctgcattcttaccggtgatcgcgatttcttccagctgctgtctgagaaagtgagcgttttgctgcccgatggcacgttagtaaccccgaaagatgtgcaagagaaatatggagttccgccagaacgttgggtggactttcgcgcactgactggtgatcgttcagacaacatcccgggcgttgccgggattggtgaaaagacggcgctgcgcctgctggcagaatggggctcggtggaaaatctgctcaagaaccttgatcgtgtgaaacctgatagcttacgccgcaagatcgaagcccacctggaagacttgcgtctgagtctggatcttgtacgtattcgcaccgatctgccgttggaagtagactttaaagctctgcgtcgtcgcacacccgatttagaggggttacgcgcgttcctcgaagaactggagctgggctccctgctgcatgaattcggtttgttgggcggagagaaaccgcgtgaagaagcaccatggccgccgcccgagggtgcctttgtcggctttcttctgtcacgcaaagagccaatgtgggcggaactgttagctcttgcagccgccgcggaagggcgtgttcaccgcgcgacctctcctgtcgaggccctcgctgacctcaaagaagcacgtggtttcttggcgaaagatttagccgtgcttgcattacgcgaaggcgttgcgctcgatccgacggacgacccgcttttggtggcttatttgctcgatagcgcgaataccaacccggaacgtgtcgcccgtcgttacggcggcgagtttactgaagatgcggcagaacgcgcgttgcttagcgaacgcctcttccagacgttatttccacgtctttcggagaaattactctggctctatcaggaagtcgaacgtccattgagtcgcgtgcttgcccatatggaggctcgcggtgtgcgcttagatgttccgttgttagaagcactcagcttcgaggcggcaaaagaactggaacgtcttgaaggcgaagtctttcgtttagcggggcatcccttcaatctcaactctcgcgaccaattggagaaagtgctctttgatgaattaggtttaacccctgtcacgcgtacagagaagaccggcaaacgttccacttcggcagccgccttggaagcacttcgtggtgtgcacccgatcgtcgagttgattttgcagtatcgcgagctcagcaaactcaaatcaacctatcttgataggttacctcgtcttgttcatccacgtacgggtcgtttacacacccgcttcaatcaaacggcaacagccaccgggcgcttgtcgtcgagtgacccgaacctccagaatattccagtgcgcacgccgctgggccaacacattcgtaaagcgtttgttgcggaagaaggttggttattacttgcggccgattactcccagatcgaacttcgtgtattggcgcatctctctggcgacgagaatcttaaacgcgtgtttcgcgaaggcaaggatattcacactgaaaccgcagcctggatgttcggggtggactcggccttagtggaccccaagatgcgtcgtgccgccaagaccgtcaactttggcgtactctatggtatgtcagcagcacgtcttagtcaggaattgggcattgactacaaagaagctgaagcgtttatcgagcgctatttccaatcctttccgaaagttcgcgcgtggattgaacgtacgctcgaagaaggtcgcactcgcggctatgtggaaacgttattcgggcgtcgtcgctacgttccagatcttacgtctcgtgtccgctcagtgcgcgaagctgctgagcgtatggcctggaatatgcctgttcagggaacagcggcggacctcatgaagatcgccatggtgaaattgtttccgcgcttgaaacccttaggagcccaccttcttctgcaggtgcatgatgaattggtcttggaagtacccgaggatcgcatggaagaagccaaagcactcgtgaaagaggttatggaaaacgcgtatccgttagatgttccgttggaggtcgaagtgggtgtaggccgtgattggcttgaagcgaaacaagactaatga

SEQ ID NO: 1200 - protein, 844 aa, synthetic construct
  REGION 1..844: note = DNA Polymerase Variant
MHHHHHHGGSGMLPLFDLEEPPKRVLLVDGHHLAYRTFYALSLTTSRGEPVQMVYGFARSLLKALKEDGQAVVVVFDAKAPSFRHEAYEAYKAGRAPTPEDFPRQLALVKRLVDLLGLVRLEAPGYEADDVLGTLAKKAEREGMEVCILTGDRDFFQLLSEKVSVLLPDGTLVTPKDVQEKYGVPPERWVDFRALTGDRSDNIPGVAGIGEKTALRLLAEWGSVENLLKNLDRVKPDSLRRKIEAHLEDLRLSLDLVRIRTDLPLEVDFKALRRRTPDLEGLRAFLEELELGSLLHEFGLLGGEKPREEAPWPPPEGAFVGFLLSRKEPMWAELLALAAAAEGRVHRATSPVEALADLKEARGFLAKDLAVLALREGVALDPTDDPLLVAYLLDSANTNPERVARRYGGEFTEDAAERALLSERLFQTLFPRLSEKLLWLYQEVERPLSRVLAHMEARGVRLDVPLLEALSFEAAKELERLEGEVFRLAGHPFNLNSRDQLEKVLFDELGLTPVTRTEKTGKRSTSAAALEALRGVHPIVELILQYRELSKLKSTYLDRLPRLVHPRTGRLHTRFNQTATATGRLSSSDPNLQNIPVRTPLGQHIRKAFVAEEGWLLLAADYSQIELRVLAHLSGDENLKRVFREGKDIHTETAAWMFGVDSALVDPKMRRAAKTVNFGVLYGMSAARLSQELGIDYKEAEAFIERYFQSFPKVRAWIERTLEEGRTRGYVETLFGRRRYVPDLTSRVRSVREAAERMAWNMPVQGTAADLMKIAMVKLFPRLKPLGAHLLLQVHDELVLEVPEDRMEEAKALVKEVMENAYPLDVPLEVEVGVGRDWLEAKQD

SEQ ID NO: 1201 - DNA, 2538 bp, synthetic construct
  misc_feature 1..2538: note = DNA Polymerase Variant
  source 1..2538: mol_type = other DNA
atgcaccatcatcatcatcatggcggtagcggcatgttaccgctgtttgatttggaagaaccaccaaaacgcgtgctgcttgttgacggccatcatctggcgtatcgtaccttctacgcactgagccttacgacctcacgtggtgagcctgtccagatggtgtatgggtttgctcgctccctgctgaaagccctgaaggaagatggtcaagccgtagtagtggttttcgatgcgaaggcaccgtcgtttcgtcacgaagcgtacgaggcctataaagctggccgcgcaccgaccccggaagactttccgcgtcagttagcgctcgtcaaacgcctcgtggatttgctgggattagttcgcttggaagctcctggctacgaggcggacgacgtgctcggtacactggccaagaaagcagaacgtgaaggcatggaggtctgcattcttaccggtgatcgcgatttcttccagctgctgtctgagaaagtgagcgttttgctgcccgatggcacgttagtaaccccgaaagatgtgcaagagaaatatggagttccgccagaacgttgggtggactttcgcgcactgactggtgatcgttcagacaacatcccgggcgttgccgggattggtgaaaagacggcgctgcgcctgctggcagaatggggctcggtggaaaatctgctcaagaaccttgatcgtgtgaaacctgatagcttacgccgcaagatcgaagcccacctggaagacttgcgtctgagtctggatcttgtacgtattcgcaccgatctgccgttggaagtagactttaaagctctgcgtcgtcgcacacccgatttagaggggttacgcgcgttcctcgaagaactggagctgggctccctgctgcatgaattcggtttgttgggcggagagaaaccgcgtgaagaagcaccatggccgccgcccgagggtgcctttgtcggctttcttctgtcacgcaaagagccaatgtgggcggaactgttagctcttgcagccgccgcggaagggcgtgttcaccgcgcgacctctcctgtcgaggccctcgctgacctcaaagaagcacgtggtttcttggcgaaagatttagccgtgcttgcattacgcgaaggcgttgcgctcgatccgacggacgacccgcttttggtggcttatttgctcgatagcgcgaataccaacccggaacgtgtcgcccgtcgttacggcggcgagtttactgaagatgcggcagaacgcgcgttgcttagcgaacgcctcttccagacgttatttccacgtctttcggagaaattactctggctctatcaggaagtcgaacgtccattgagtcgcgtgcttgcccatatggaggctcgcggtgtgcgcttagatgttccgttgttagaagcactcagcttcgaggcggcaaaagaactggaacgtcttgaaggcgaagtctttcgtttagcggggcatcccttcaatctcaactctcgcgaccaattggagaaagtgctctttgatgaattaggtttaacccctgtcacgcgtacagagaagaccggcaaacgttccacttcggcagccgccttggaagcacttcgtggtgtgcacccgatcgtcgagttgattttgcagtatcgcgagctcagcaaactcaaatcaacctatcttgataggttacctcgtcttgttcatccacgtacgggtcgtttacacacccgcttcaatcaaacggcaacagccaccgggcgcttgtcgtcgagtgacccgaacctccagaatattccagtgcgcacgccgctgggccaacacattcgtaaagcgtttgttgcggatgaaggttggttattacttgcggccgattactcccagatcgaacttcgtgtattggcgcatctctctggcgacgagaatcttaaacgcgtgtttcgcgaaggcaaggatattcacactgaaaccgcagcctggatgttcggggtggactcggccttagtggaccccaagatgcgtcgtgccgccaagaccgtcaactttggcgtactctatggtatgtcagcagcacgtcttagtcaggaattgggcattgactacaaagaagctgaagcgtttatcgagcgctatttccaatcctttccgaaagttcgcgcgtggattgaacgtacgctcgaagaaggtcgcactcgcggctatgtggaaacgttattcgggcgtcgtcgctacgttccagatcttacgtctcgtgtccgctcagtgcgcgaagctgctgagcgtatggcctggaatatgcctgttcagggaacagcggcggacctcatgaagatcgccatggtgaaattgtttccgcgcttgaaacccttaggagcccaccttcttctgcaggtgcatgatgaattggtcttggaagtacccgaggatcgcgcagaagaagccaaagcactcgtgaaagaggttatggaaaacgcgtatccgttagatgttccgttggaggtcgaagtgggtgtaggccgtgattggcttgaagcgaaacaagactaatga

SEQ ID NO: 1202 - protein, 844 aa, synthetic construct
  REGION 1..844: note = DNA Polymerase Variant
MHHHHHHGGSGMLPLFDLEEPPKRVLLVDGHHLAYRTFYALSLTTSRGEPVQMVYGFARSLLKALKEDGQAVVVVFDAKAPSFRHEAYEAYKAGRAPTPEDFPRQLALVKRLVDLLGLVRLEAPGYEADDVLGTLAKKAEREGMEVCILTGDRDFFQLLSEKVSVLLPDGTLVTPKDVQEKYGVPPERWVDFRALTGDRSDNIPGVAGIGEKTALRLLAEWGSVENLLKNLDRVKPDSLRRKIEAHLEDLRLSLDLVRIRTDLPLEVDFKALRRRTPDLEGLRAFLEELELGSLLHEFGLLGGEKPREEAPWPPPEGAFVGFLLSRKEPMWAELLALAAAAEGRVHRATSPVEALADLKEARGFLAKDLAVLALREGVALDPTDDPLLVAYLLDSANTNPERVARRYGGEFTEDAAERALLSERLFQTLFPRLSEKLLWLYQEVERPLSRVLAHMEARGVRLDVPLLEALSFEAAKELERLEGEVFRLAGHPFNLNSRDQLEKVLFDELGLTPVTRTEKTGKRSTSAAALEALRGVHPIVELILQYRELSKLKSTYLDRLPRLVHPRTGRLHTRFNQTATATGRLSSSDPNLQNIPVRTPLGQHIRKAFVADEGWLLLAADYSQIELRVLAHLSGDENLKRVFREGKDIHTETAAWMFGVDSALVDPKMRRAAKTVNFGVLYGMSAARLSQELGIDYKEAEAFIERYFQSFPKVRAWIERTLEEGRTRGYVETLFGRRRYVPDLTSRVRSVREAAERMAWNMPVQGTAADLMKIAMVKLFPRLKPLGAHLLLQVHDELVLEVPEDRAEEAKALVKEVMENAYPLDVPLEVEVGVGRDWLEAKQD

SEQ ID NO: 1203 - DNA, 2538 bp, synthetic construct
  misc_feature 1..2538: note = DNA Polymerase Variant
  source 1..2538: mol_type = other DNA
atgcaccatcatcatcatcatggcggtagcggcatgttaccgctgtttgatttggaagaaccaccaaaacgcgtgctgcttgttgacggccatcatctggcgtatcgtaccttctacgcactgagccttacgacctcacgtggtgagcctgtccagatggtgtatgggtttgctcgctccctgctgaaagccctgaaggaagagggtcaagccgtagtagtggttttcgatgcgaaggcaccgtcgtttcgtcacgaagcgtacgaggcctataaagctggccgcgcaccgaccccggaagactttccgcgtcagttagcgctcgtcaaacgcctcgtggatttgctgggattagttcgcttggaagctcctggctacgaggcggacgacgtgctcggtacactggccaagaaagcagaacgtgaaggcatggaggtctgcattcttaccggtgatcgcgatttcttccagctgctgtctgagaaagtgagcgttttgctgcccgatggcacgttagtaaccccgaaagatgtgcaagagaaatatggagttccgccagaacgttgggtggactttcgcgcactgactggtgatcgttcagacaacatcccgggcgttgccgggattggtgaaaagacggcgctgcgcctgctggcagaatggggctcggtggaaaatctgctcaagaaccttgatcgtgtgaaacctgatagcttacgccgcaagatcgaagcccacctggaagacttgcgtctgagtctggatcttgtacgtattcgcaccgatctgccgttggaagtagactttaaagctctgcgtcgtcgcacacccgatttagaggggttacgcgcgttcctcgaagaactggagctgggctccctgctgcatgaattcggtttgttgggcggagagaaaccgcgtgaagaagcaccatggccgccgcccgagggtgcctttgtcggctttcttctgtcacgcaaagagccaatgtgggcggaactgttagctcttgcagccgccgcggaagggcgtgttcaccgcgcgacctctcctgtcgaggccctcgctgacctcaaagaagcacgtggtttcttggcgaaagatttagccgtgcttgcattacgcgaaggcgttgcgctcgatccgacggacgacccgcttttggtggcttatttgctcgatagcgcgaataccaacccggaacgtgtcgcccgtcgttacggcggcgagtttactgaagatgcggcagaacgcgcgttgcttagcgaacgcctcttccagacgttatttccacgtctttcggagaaattactctggctctatcaggaagtcgaacgtccattgagtcgcgtgcttgcccatatggaggctcgcggtgtgcgcttagatgttccgttgttagaagcactcagcttcgaggcggcaaaagaactggaacgtcttgaaggcgaagtctttcgtttagcggggcatcccttcaatctcaactctcgcgaccaattggagaaagtgctctttgatgaattaggtttaacccctgtcacgcgtacagagaagaccggcaaacgttccacttcggcagccgccttggaagcacttcgtggtgtgcacccgatcgtcgagttgattttgcagtatcgcgagctcagcaaactcaaatcaacctatcttgataggttacctcgtcttgttcatccacgtacgggtcgtttacacacccgcttcaatcaaacggcaacagccaccgggcgcttgtcgtcgagtgacccgaacctccagaatattccagtgcgcacgccgctgggccaacacattcgtaaagcgtttgttgcggaagaaggttggttattacttgcggccgattactcccagatcgaacttcgtgtattggcgcatctctctggcgacgagaatcttaaacgcgtgtttcgcgaaggcaaggatattcacactgaaaccgcagcctggatgttcggggtggactcggccttagtggaccccaagatgcgtcgtgccgccaagaccgtcaactttggcgtactctatggtatgtcagcagcacgtcttagtcaggaattgggcattgactacaaagaagctgaagcgtttatcgagcgctatttccaatcctttccgaaagttcgcgcgtggattgaacgtacgctcgaagaaggtcgcactcgcggctatgtggaaacgttattcgggcgtcgtcgctacgttccagatcttacgtctcgtgtccgctcagtgcgcgaagctgctgagcgtatggcctggaatatgcctgttcagggaacagcggcggacctcatgaagatcgccatggtgaaattgtttccgcgcttgaaacccttaggagcccaccttcttctgcaggtgcatgatgaattggtcttggaagtacccgaggatcgcgcagaagaagccaaagcactcgtgaaagaggttatggaaaacgcgtatccgttagatgttccgttggaggtcgaagtgggtgtaggccgtgattggcttgaagcgaaacaagactaatga

SEQ ID NO: 1204 - protein, 844 aa, synthetic construct
  REGION 1..844: note = DNA Polymerase Variant
MHHHHHHGGSGMLPLFDLEEPPKRVLLVDGHHLAYRTFYALSLTTSRGEPVQMVYGFARSLLKALKEEGQAVVVVFDAKAPSFRHEAYEAYKAGRAPTPEDFPRQLALVKRLVDLLGLVRLEAPGYEADDVLGTLAKKAEREGMEVCILTGDRDFFQLLSEKVSVLLPDGTLVTPKDVQEKYGVPPERWVDFRALTGDRSDNIPGVAGIGEKTALRLLAEWGSVENLLKNLDRVKPDSLRRKIEAHLEDLRLSLDLVRIRTDLPLEVDFKALRRRTPDLEGLRAFLEELELGSLLHEFGLLGGEKPREEAPWPPPEGAFVGFLLSRKEPMWAELLALAAAAEGRVHRATSPVEALADLKEARGFLAKDLAVLALREGVALDPTDDPLLVAYLLDSANTNPERVARRYGGEFTEDAAERALLSERLFQTLFPRLSEKLLWLYQEVERPLSRVLAHMEARGVRLDVPLLEALSFEAAKELERLEGEVFRLAGHPFNLNSRDQLEKVLFDELGLTPVTRTEKTGKRSTSAAALEALRGVHPIVELILQYRELSKLKSTYLDRLPRLVHPRTGRLHTRFNQTATATGRLSSSDPNLQNIPVRTPLGQHIRKAFVAEEGWLLLAADYSQIELRVLAHLSGDENLKRVFREGKDIHTETAAWMFGVDSALVDPKMRRAAKTVNFGVLYGMSAARLSQELGIDYKEAEAFIERYFQSFPKVRAWIERTLEEGRTRGYVETLFGRRRYVPDLTSRVRSVREAAERMAWNMPVQGTAADLMKIAMVKLFPRLKPLGAHLLLQVHDELVLEVPEDRAEEAKALVKEVMENAYPLDVPLEVEVGVGRDWLEAKQD

SEQ ID NO: 1205 - DNA, 2538 bp, synthetic construct
  misc_feature 1..2538: note = DNA Polymerase Variant
  source 1..2538: mol_type = other DNA
atgcaccatcatcatcatcatggcggtagcggcatgttaccgctgtttgatttggaagaaccaccaaaacgcgtgctgcttgttgacggccatcatctggcgtatcgtaccttctacgcactgagccttacgacctcacgtggtgagcctgtccagatggtgtatgggtttgctcgctccctgctgaaagccctgaaggaaactggtcaagccgtagtagtggttttcgatgcgaaggcaccgtcgtttcgtcacgaagcgtacgaggcctataaagctggccgcgcaccgaccccggaagactttccgcgtcagttagcgctcgtcaaacgcctcgtggatttgctgggattagttcgcttggaagctcctggctacgaggcggacgacgtgctcggtacactggccaagaaagcagaacgtgaaggcatggaggtctgcattcttaccggtgatcgcgatttcttccagctgctgtctgagaaagtgagcgttttgctgcccgatggcacgttagtaaccccgaaagatgtgcaagagaaatatggagttccgccagaacgttgggtggactttcgcgcactgactggtgatcgttcagacaacatcccgggcgttgccgggattggtgaaaagacggcgctgcgcctgctggcagaatggggctcggtggaaaatctgctcaagaaccttgatcgtgtgaaacctgatagcttacgccgcaagatcgaagcccacctggaagacttgcgtctgagtctggatcttgtacgtattcgcaccgatctgccgttggaagtagactttaaagctctgcgtcgtcgcacacccgatttagaggggttacgcgcgttcctcgaagaactggagctgggctccctgctgcatgaattcggtttgttgggcggagagaaaccgcgtgaagaagcaccatggccgccgcccgagggtgcctttgtcggctttcttctgtcacgcaaagagccaatgtgggcggaactgttagctcttgcagccgccgcggaagggcgtgttcaccgcgcgacctctcctgtcgaggccctcgctgacctcaaagaagcacgtggtttcttggcgaaagatttagccgtgcttgcattacgcgaaggcgttgcgctcgatccgacggacgacccgcttttggtggcttatttgctcgatagcgcgaataccaacccggaacgtgtcgcccgtcgttacggcggcgagtttactgaagatgcggcagaacgcgcgttgcttagcgaacgcctcttccagacgttatttccacgtctttcggagaaattactctggctctatcaggaagtcgaacgtccattgagtcgcgtgcttgcccatatggaggctcgcggtgtgcgcttagatgttccgttgttagaagcactcagcttcgaggcggcaaaagaactggaacgtcttgaaggcgaagtctttcgtttagcggggcatcccttcaatctcaactctcgcgaccaattggagaaagtgctctttgatgaattaggtttaacccctgtcacgcgtacagagaagaccggcaaacgttccacttcggcagccgccttggaagcacttcgtggtgtgcacccgatcgtcgagttgattttgcagtatcgcgagctcagcaaactcaaatcaacctatcttgataggttacctcgtcttgttcatccacgtacgggtcgtttacacacccgcttcaatcaaacggcaacagccaccgggcgcttgtcgtcgagtgacccgaacctccagaatattccagtgcgcacgccgctgggccaacacattcgtaaagcgtttgttgcggaagaaggttggttattacttgcggccgattactcccagatcgaacttcgtgtattggcgcatctctctggcgacgagaatcttaaacgcgtgtttcgcgaaggcaaggatattcacactgaaaccgcagcctggatgttcggggtggactcggccttagtggaccccaagatgcgtcgtgccgccaagaccgtcaactttggcgtactctatggtatgtcagcagcacgtcttagtcaggaattgggcattgactacaaagaagctgaagcgtttatcgagcgctatttccaatcctttccgaaagttcgcgcgtggattgaacgtacgctcgaagaaggtcgcactcgcggctatgtggaaacgttattcgggcgtcgtcgctacgttccagatcttacgtctcgtgtccgctcagtgcgcgaagctgctgagcgtatggcctggaatatgcctgttcagggaacagcggcggacctcatgaagatcgccatggtgaaattgtttccgcgcttgaaacccttaggagcccaccttcttctgcaggtgcatgatgaattggtcttggaagtacccgaggatcgcgcagaagaagccaaagcactcgtgaaagaggttatggaaaacgcgtatccgttagatgttccgttggaggtcgaagtgggtgtaggccgtgattggcttgaagcgaaacaagactaatga

SEQ ID NO: 1206 - protein, 844 aa, synthetic construct
  REGION 1..844: note = DNA Polymerase Variant
MHHHHHHGGSGMLPLFDLEEPPKRVLLVDGHHLAYRTFYALSLTTSRGEPVQMVYGFARSLLKALKETGQAVVVVFDAKAPSFRHEAYEAYKAGRAPTPEDFPRQLALVKRLVDLLGLVRLEAPGYEADDVLGTLAKKAEREGMEVCILTGDRDFFQLLSEKVSVLLPDGTLVTPKDVQEKYGVPPERWVDFRALTGDRSDNIPGVAGIGEKTALRLLAEWGSVENLLKNLDRVKPDSLRRKIEAHLEDLRLSLDLVRIRTDLPLEVDFKALRRRTPDLEGLRAFLEELELGSLLHEFGLLGGEKPREEAPWPPPEGAFVGFLLSRKEPMWAELLALAAAAEGRVHRATSPVEALADLKEARGFLAKDLAVLALREGVALDPTDDPLLVAYLLDSANTNPERVARRYGGEFTEDAAERALLSERLFQTLFPRLSEKLLWLYQEVERPLSRVLAHMEARGVRLDVPLLEALSFEAAKELERLEGEVFRLAGHPFNLNSRDQLEKVLFDELGLTPVTRTEKTGKRSTSAAALEALRGVHPIVELILQYRELSKLKSTYLDRLPRLVHPRTGRLHTRFNQTATATGRLSSSDPNLQNIPVRTPLGQHIRKAFVAEEGWLLLAADYSQIELRVLAHLSGDENLKRVFREGKDIHTETAAWMFGVDSALVDPKMRRAAKTVNFGVLYGMSAARLSQELGIDYKEAEAFIERYFQSFPKVRAWIERTLEEGRTRGYVETLFGRRRYVPDLTSRVRSVREAAERMAWNMPVQGTAADLMKIAMVKLFPRLKPLGAHLLLQVHDELVLEVPEDRAEEAKALVKEVMENAYPLDVPLEVEVGVGRDWLEAKQD

SEQ ID NO: 1207 - DNA, 2538 bp, synthetic construct
  misc_feature 1..2538: note = DNA Polymerase Variant
  source 1..2538: mol_type = other DNA
atgcaccatcatcatcatcatggcggtagcggcatgttaccgctgtttgatttggaagaaccaccaaaacgcgtgctgcttgttgacggccatcatctggcgtatcgtaccttctacgcactgagccttacgacctcacgtggtgagcctgtccagatggtgtatgggtttgctcgctccctgctgaaagccctgaaggaagatggtcaagccgtagtagtggttttcgatgcgaaggcaccgtcgtttcgtcacgaagcgtacgaggcctataaagctggccgcgcaccgaccccggaagactttccgcgtcagttagcgctcgtcaaacgcctcgtggatttgctgggattagttcgcttggaagctcctggctacgaggcggacgacgtgctcggtacactggccaagaaagcagaacgtgaaggcatggaggtccatattcttaccggtgatcgcgatttcttccagctgctgtctgagaaagtgagcgttttgctgcccgatggcacgttagtaaccccgaaagatgtgcaagagaaatatggagttccgccagaacgttgggtggactttcgcgcactgactggtgatcgttcagacaacatcccgggcgttgccgggattggtgaaaagacggcgctgcgcctgctggcagaatggggctcggtggaaaatctgctcaagaaccttgatcgtgtgaaacctgatagcttacgccgcaagatcgaagcccacctggaagacttgcgtctgagtctggatcttgtacgtattcgcaccgatctgccgttggaagtagactttaaagctctgcgtcgtcgcacacccgatttagaggggttacgcgcgttcctcgaagaactggagctgggctccctgctgcatgaattcggtttgttgggcggagagaaaccgcgtgaagaagcaccatggccgccgcccgagggtgcctttgtcggctttcttctgtcacgcaaagagccaatgtgggcggaactgttagctcttgcagccgccgcggaagggcgtgttcaccgcgcgacctctcctgtcgaggccctcgctgacctcaaagaagcacgtggtttcttggcgaaagatttagccgtgcttgcattacgcgaaggcgttgcgctcgatccgacggacgacccgcttttggtggcttatttgctcgatagcgcgaataccaacccggaacgtgtcgcccgtcgttacggcggcgagtttactgaagatgcggcagaacgcgcgttgcttagcgaacgcctcttccagacgttatttccacgtctttcggagaaattactctggctctatcaggaagtcgaacgtccattgagtcgcgtgcttgcccatatggaggctcgcggtgtgcgcttagatgttccgttgttagaagcactcagcttcgaggcggcaaaagaactggaacgtcttgaaggcgaagtctttcgtttagcggggcatcccttcaatctcaactctcgcgaccaattggagaaagtgctctttgatgaattaggtttaacccctgtcacgcgtacagagaagaccggcaaacgttccacttcggcagccgccttggaagcacttcgtggtgtgcacccgatcgtcgagttgattttgcagtatcgcgagctcagcaaactcaaatcaacctatcttgataggttacctcgtcttgttcatccacgtacgggtcgtttacacacccgcttcaatcaaacggcaacagccaccgggcgcttgtcgtcgagtgacccgaacctccagaatattccagtgcgcacgccgctgggccaacacattcgtaaagcgtttgttgcggaagaaggttggttattacttgcggccgattactcccagatcgaacttcgtgtattggcgcatctctctggcgacgagaatcttaaacgcgtgtttcgcgaaggcaaggatattcacactgaaaccgcagcctggatgttcggggtggactcggccttagtggaccccaagatgcgtcgtgccgccaagaccgtcaactttggcgtactctatggtatgtcagcagcacgtcttagtcaggaattgggcattgactacaaagaagctgaagcgtttatcgagcgctatttccaatcctttccgaaagttcgcgcgtggattgaacgtacgctcgaagaaggtcgcactcgcggctatgtggaaacgttattcgggcgtcgtcgctacgttccagatcttacgtctcgtgtccgctcagtgcgcgaagctgctgagcgtatggcctggaatatgcctgttcagggaacagcggcggacctcatgaagatcgccatggtgaaattgtttccgcgcttgaaacccttaggagcccaccttcttctgcaggtgcatgatgaattggtcttggaagtacccgaggatcgcgcagaagaagccaaagcactcgtgaaagaggttatggaaaacgcgtatccgttagatgttccgttggaggtcgaagtgggtgtaggccgtgattggcttgaagcgaaacaagactaatga

SEQ ID NO: 1208 - protein, 844 aa, synthetic construct
  REGION 1..844: note = DNA Polymerase Variant
MHHHHHHGGSGMLPLFDLEEPPKRVLLVDGHHLAYRTFYALSLTTSRGEPVQMVYGFARSLLKALKEDGQAVVVVFDAKAPSFRHEAYEAYKAGRAPTPEDFPRQLALVKRLVDLLGLVRLEAPGYEADDVLGTLAKKAEREGMEVHILTGDRDFFQLLSEKVSVLLPDGTLVTPKDVQEKYGVPPERWVDFRALTGDRSDNIPGVAGIGEKTALRLLAEWGSVENLLKNLDRVKPDSLRRKIEAHLEDLRLSLDLVRIRTDLPLEVDFKALRRRTPDLEGLRAFLEELELGSLLHEFGLLGGEKPREEAPWPPPEGAFVGFLLSRKEPMWAELLALAAAAEGRVHRATSPVEALADLKEARGFLAKDLAVLALREGVALDPTDDPLLVAYLLDSANTNPERVARRYGGEFTEDAAERALLSERLFQTLFPRLSEKLLWLYQEVERPLSRVLAHMEARGVRLDVPLLEALSFEAAKELERLEGEVFRLAGHPFNLNSRDQLEKVLFDELGLTPVTRTEKTGKRSTSAAALEALRGVHPIVELILQYRELSKLKSTYLDRLPRLVHPRTGRLHTRFNQTATATGRLSSSDPNLQNIPVRTPLGQHIRKAFVAEEGWLLLAADYSQIELRVLAHLSGDENLKRVFREGKDIHTETAAWMFGVDSALVDPKMRRAAKTVNFGVLYGMSAARLSQELGIDYKEAEAFIERYFQSFPKVRAWIERTLEEGRTRGYVETLFGRRRYVPDLTSRVRSVREAAERMAWNMPVQGTAADLMKIAMVKLFPRLKPLGAHLLLQVHDELVLEVPEDRAEEAKALVKEVMENAYPLDVPLEVEVGVGRDWLEAKQD

SEQ ID NO: 1209 - DNA, 2538 bp, synthetic construct
  misc_feature 1..2538: note = DNA Polymerase Variant
  source 1..2538: mol_type = other DNA
atgcaccatcatcatcatcatggcggtagcggcatgttaccgctgtttgatttggaagaaccaccaaaacgcgtgctgcttgttgacggccatcatctggcgtatcgtaccttctacgcactgagccttacgacctcacgtggtgagcctgtccagatggtgtatgggtttgctcgctccctgctgaaagccctgaaggaagatggtcaagccgtagtagtggttttcgatgcgaaggcaccgtcgtttcgtcacgaagcgtacgaggcctataaagctggccgcgcaccgaccccggaagactttccgcgtcagttagcgctcgtcaaacgcctcgtggatttgctgggattagttcgcttggaagctcctggctacgaggcggacgacgtgctcggtacactggccaagaaagcagaacgtgaaggcatggaggtctgcattcttaccggtgatcgcgatttcttccagctgctgtctgagaaagtgagcgttttgctgcccgatggcacgttagtaaccccgaaagatgtgcaagagaaatatggagttccgccagaacgttgggtggactttcgcgcactgactggtgatcgttcagacaacatcccgggcgttgccgggattggtgaaaagacggcgctgcgcctgctggcagaatggggctcggtggaaaatctgctcaagaaccttgatcgtgtgaaacctgatagcttacgccgcaagatcgaagcccacctggaagacttgcgtctgagtctggatcttgtacgtattcgcaccgatctgccgttggaagtagactttaaagctctgcgtcgtcgcacacccgatttagaggggttacgcgcgttcctcgaagaactggagctgggctccctgctgcatgaattcggtttgttgggcggagagaaaccgcgtgaagaagcaccatggccgccgcccgagggtgcctttgtcggctttcttctgtcacgcaaagagccaatgtgggcggaactgttagctcttgcagccgccgcggaagggcgtgttcaccgcgcgacctctcctgtcgaggccctcagtgacctcaaagaagcacgtggtttcttggcgaaagatttagccgtgcttgcattacgcgaaggcgttgcgctcgatccgacggacgacccgcttttggtggcttatttgctcgatagcgcgaataccaacccggaacgtgtcgcccgtcgttacggcggcgagtttactgaagatgcggcagaacgcgcgttgcttagcgaacgcctcttccagacgttatttccacgtctttcggagaaattactctggctctatcaggaagtcgaacgtccattgagtcgcgtgcttgcccatatggaggctcgcggtgtgcgcttagatgttccgttgttagaagcactcagcttcgaggcggcaaaagaactggaacgtcttgaaggcgaagtctttcgtttagcggggcatcccttcaatctcaactctcgcgaccaattggagaaagtgctctttgatgaattaggtttaacccctgtcacgcgtacagagaagaccggcaaacgttccacttcggcagccgccttggaagcacttcgtggtgtgcacccgatcgtcgagttgattttgcagtatcgcgagctcagcaaactcaaatcaacctatcttgataggttacctcgtcttgttcatccacgtacgggtcgtttacacacccgcttcaatcaaacggcaacagccaccgggcgcttgtcgtcgagtgacccgaacctccagaatattccagtgcgcacgccgctgggccaacacattcgtaaagcgtttgttgcggaagaaggttggttattacttgcggccgattactcccagatcgaacttcgtgtattggcgcatctctctggcgacgagaatcttaaacgcgtgtttcgcgaaggcaaggatattcacactgaaaccgcagcctggatgttcggggtggactcggccttagtggaccccaagatgcgtcgtgccgccaagaccgtcaactttggcgtactctatggtatgtcagcagcacgtcttagtcaggaattgggcattgactacaaagaagctgaagcgtttatcgagcgctatttccaatcctttccgaaagttcgcgcgtggattgaacgtacgctcgaagaaggtcgcactcgcggctatgtggaaacgttattcgggcgtcgtcgctacgttccagatcttacgtctcgtgtccgctcagtgcgcgaagctgctgagcgtatggcctggaatatgcctgttcagggaacagcggcggacctcatgaagatcgccatggtgaaattgtttccgcgcttgaaacccttaggagcccaccttcttctgcaggtgcatgatgaattggtcttggaagtacccgaggatcgcgcagaagaagccaaagcactcgtgaaagaggttatggaaaacgcgtatccgttagatgttccgttggaggtcgaagtgggtgtaggccgtgattggcttgaagcgaaacaagactaatga

SEQ ID NO: 1210 - protein, 844 aa, synthetic construct
  REGION 1..844: note = DNA Polymerase Variant
MHHHHHHGGSGMLPLFDLEEPPKRVLLVDGHHLAYRTFYALSLTTSRGEPVQMVYGFARSLLKALKEDGQAVVVVFDAKAPSFRHEAYEAYKAGRAPTPEDFPRQLALVKRLVDLLGLVRLEAPGYEADDVLGTLAKKAEREGMEVCILTGDRDFFQLLSEKVSVLLPDGTLVTPKDVQEKYGVPPERWVDFRALTGDRSDNIPGVAGIGEKTALRLLAEWGSVENLLKNLDRVKPDSLRRKIEAHLEDLRLSLDLVRIRTDLPLEVDFKALRRRTPDLEGLRAFLEELELGSLLHEFGLLGGEKPREEAPWPPPEGAFVGFLLSRKEPMWAELLALAAAAEGRVHRATSPVEALSDLKEARGFLAKDLAVLALREGVALDPTDDPLLVAYLLDSANTNPERVARRYGGEFTEDAAERALLSERLFQTLFPRLSEKLLWLYQEVERPLSRVLAHMEARGVRLDVPLLEALSFEAAKELERLEGEVFRLAGHPFNLNSRDQLEKVLFDELGLTPVTRTEKTGKRSTSAAALEALRGVHPIVELILQYRELSKLKSTYLDRLPRLVHPRTGRLHTRFNQTATATGRLSSSDPNLQNIPVRTPLGQHIRKAFVAEEGWLLLAADYSQIELRVLAHLSGDENLKRVFREGKDIHTETAAWMFGVDSALVDPKMRRAAKTVNFGVLYGMSAARLSQELGIDYKEAEAFIERYFQSFPKVRAWIERTLEEGRTRGYVETLFGRRRYVPDLTSRVRSVREAAERMAWNMPVQGTAADLMKIAMVKLFPRLKPLGAHLLLQVHDELVLEVPEDRAEEAKALVKEVMENAYPLDVPLEVEVGVGRDWLEAKQD

SEQ ID NO: 1211 - DNA, 2538 bp, synthetic construct
  misc_feature 1..2538: note = DNA Polymerase Variant
  source 1..2538: mol_type = other DNA
atgcaccatcatcatcatcatggcggtagcggcatgttaccgctgtttgatttggaagaaccaccaaaacgcgtgctgcttgttgacggccatcatctggcgtatcgtaccttctacgcactgagccttacgacctcacgtggtgagcctgtccagatggtgtatgggtttgctcgctccctgctgaaagccctgaaggaagatggtcaagccgtagtagtggttttcgatgcgaaggcaccgtcgtttcgtcacgaagcgtacgaggcctataaagctggccgcgcaccgaccccggaagactttccgcgtcagttagcgctcgtcaaacgcctcgtggatttgctgggattagttcgcttggaagctcctggctacgaggcggacgacgtgctcggtacactggccaagaaagcagaacgtgaaggcatggaggtctgcattcttaccggtgatcgcgatttcttccagctgctgtctgagaaagtgagcgttttgctgcccgatggcacgttagtaaccccgaaagatgtgcaagagaaatatggagttccgccagaacgttgggtggactttcgcgcactgactggtgatcgttcagacaacatcccgggcgttgccgggattggtgaaaagacggcgctgcgcctgctggcagaatggggctcggtggaaaatctgctcaagaaccttgatcgtgtgaaacctgatagcttacgccgcaagatcgaagcccacctggaagacttgcgtctgagtctggatcttgtacgtattcgcaccgatctgccgttggaagtagactttaaagctctgcgtcgtcgcacacccgatttagaggggttacgcgcgttcctcgaagaactggagctgggctccctgctgcatgaattcggtttgttgggcggagagaaaccgcgtgaagaagcaccatggccgccgcccgagggtgcctttgtcggctttcttctgtcacgcaaagagccaatgtgggcggaactgttagctcttgcagccgccgcggaagggcgtgttcaccgcgcgacctctcctgtcgaggccctcgctgacctcaaagaagcacgtggtttcttggcgaaagatttagccgtgcttgcattacgcgaaggcgttgcgctcgatccgacggacgacccgcttttggtggcttatttgctcgatagcgcgaataccaacccggaacgtgtcgcccgtcgttacggcggcgagtttactgaagatgcggcagaacgcgcgttgcttagcgaacgcctcttccagacgttatttccacgtctttcggagaaattactctggctctatcaggaagtcgaacgtccattgagtcgcgtgcttgcccatatggaggctcgcggtgtgcgcttagatgttccgttgttagaagcactcagcttcgaggcggcaaaagaactggaacgtcttgaaggcgaagtctttcgttgggcggggcatcccttcaatctcaactctcgcgaccaattggagaaagtgctctttgatgaattaggtttaacccctgtcacgcgtacagagaagaccggcaaacgttccacttcggcagccgccttggaagcacttcgtggtgtgcacccgatcgtcgagttgattttgcagtatcgcgagctcagcaaactcaaatcaacctatcttgataggttacctcgtcttgttcatccacgtacgggtcgtttacacacccgcttcaatcaaacggcaacagccaccgggcgcttgtcgtcgagtgacccgaacctccagaatattccagtgcgcacgccgctgggccaacacattcgtaaagcgtttgttgcggaagaaggttggttattacttgcggccgattactcccagatcgaacttcgtgtattggcgcatctctctggcgacgagaatcttaaacgcgtgtttcgcgaaggcaaggatattcacactgaaaccgcagcctggatgttcggggtggactcggccttagtggaccccaagatgcgtcgtgccgccaagaccgtcaactttggcgtactctatggtatgtcagcagcacgtcttagtcaggaattgggcattgactacaaagaagctgaagcgtttatcgagcgctatttccaatcctttccgaaagttcgcgcgtggattgaacgtacgctcgaagaaggtcgcactcgcggctatgtggaaacgttattcgggcgtcgtcgctacgttccagatcttacgtctcgtgtccgctcagtgcgcgaagctgctgagcgtatggcctggaatatgcctgttcagggaacagcggcggacctcatgaagatcgccatggtgaaattgtttccgcgcttgaaacccttaggagcccaccttcttctgcaggtgcatgatgaattggtcttggaagtacccgaggatcgcgcagaagaagccaaagcactcgtgaaagaggttatggaaaacgcgtatccgttagatgttccgttggaggtcgaagtgggtgtaggccgtgattggcttgaagcgaaacaagactaatga

SEQ ID NO: 1212 - protein, 844 aa, synthetic construct
  REGION 1..844: note = DNA Polymerase Variant
MHHHHHHGGSGMLPLFDLEEPPKRVLLVDGHHLAYRTFYALSLTTSRGEPVQMVYGFARSLLKALKEDGQAVVVVFDAKAPSFRHEAYEAYKAGRAPTPEDFPRQLALVKRLVDLLGLVRLEAPGYEADDVLGTLAKKAEREGMEVCILTGDRDFFQLLSEKVSVLLPDGTLVTPKDVQEKYGVPPERWVDFRALTGDRSDNIPGVAGIGEKTALRLLAEWGSVENLLKNLDRVKPDSLRRKIEAHLEDLRLSLDLVRIRTDLPLEVDFKALRRRTPDLEGLRAFLEELELGSLLHEFGLLGGEKPREEAPWPPPEGAFVGFLLSRKEPMWAELLALAAAAEGRVHRATSPVEALADLKEARGFLAKDLAVLALREGVALDPTDDPLLVAYLLDSANTNPERVARRYGGEFTEDAAERALLSERLFQTLFPRLSEKLLWLYQEVERPLSRVLAHMEARGVRLDVPLLEALSFEAAKELERLEGEVFRWAGHPFNLNSRDQLEKVLFDELGLTPVTRTEKTGKRSTSAAALEALRGVHPIVELILQYRELSKLKSTYLDRLPRLVHPRTGRLHTRFNQTATATGRLSSSDPNLQNIPVRTPLGQHIRKAFVAEEGWLLLAADYSQIELRVLAHLSGDENLKRVFREGKDIHTETAAWMFGVDSALVDPKMRRAAKTVNFGVLYGMSAARLSQELGIDYKEAEAFIERYFQSFPKVRAWIERTLEEGRTRGYVETLFGRRRYVPDLTSRVRSVREAAERMAWNMPVQGTAADLMKIAMVKLFPRLKPLGAHLLLQVHDELVLEVPEDRAEEAKALVKEVMENAYPLDVPLEVEVGVGRDWLEAKQD

SEQ ID NO: 1213 - DNA, 2538 bp, synthetic construct
  misc_feature 1..2538: note = DNA Polymerase Variant
  source 1..2538: mol_type = other DNA
atgcaccatcatcatcatcatggcggtagcggcatgttaccgctgtttgatttggaagaaccaccaaaacgcgtgctgcttgttgacggccatcatctggcgtatcgtaccttctacgcactgagccttacgacctcacgtggtgagcctgtccagatggtgtatgggtttgctcgctccctgctgaaagccctgaaggaagatggtcaagccgtagtagtggttttcgatgcgaaggcaccgtcgtttcgtcacgaagcgtacgaggcctataaagctggccgcgcaccgaccccggaagactttccgcgtcagttagcgctcgtcaaacgcctcgtggatttgctgggattagttcgcttggaagctcctggctacgaggcggacgacgtgctcggtacactggccaagaaagcagaacgtgaaggcatggaggtctgcattcttaccggtgatcgcgatttcttccagctgctgtctgagaaagtgagcgttttgctgcccgatggcacgttagtaaccccgaaagatgtgcaagagaaatatggagttccgccagaacgttgggtggactttcgcgcactgactggtgatcgttcagacaacatcccgggcgttgccgggattggtgaaaagacggcgctgcgcctgctggcagaatggggctcggtggaaaatctgctcaagaaccttgatcgtgtgaaacctgatagcttacgccgcaagatcgaagcccacctggaagacttgcgtctgagtctggatcttgtacgtattcgcaccgatctgccgttggaagtagactttaaagctctgcgtcgtcgcacacccgatttagaggggttacgcgcgttcctcgaagaactggagctgggctccctgctgcatgaattcggtttgttgggcggagagaaaccgcgtgaagaagcaccatggccgccgcccgagggtgcctttgtcggctttcttctgtcacgcaaagagccaatgtgggcggaactgttagctcttgcagccgccgcggaagggcgtgttcaccgcgcgacctctcctgtcgaggccctcgctgacctcaaagaagcacgtggtttcttggcgaaagatttagccgtgcttgcattacgcgaaggcgttgcgctcgatccgacggacgacccgcttttggtggcttatttgctcgatagcgcgaataccaacccggaacgtgtcgcccgtcgttacggcggcgagtttactgaagatgcggcagaacgcgcgttgcttagcgaacgcctcttccagacgttatttccacgtctttcggagaaattactctggctctatcaggaagtcgaacgtccattgagtcgcgtgcttgcccatatggaggctcgcggtgtgcgcttagatgttccgttgttagaagcactcagcttcgaggcggcaaaagaactggaacgtcttgaaggcgaagtctttcgtttagcggggcatcccttcaatctcaactctcgcgaccaattggagaaagtgctctttgatgaattaggtttaacccctgtcacgcgtacagagaagaccggcaaacgttccacttcggcagccgccttggaagcacttcgtggtgtgcacccgatcgtcgagttgattttgcagtatcgcgagctcagcaaactcaaatcaacctatcttgataggttacctcgtcttgttcatccacgtacgggtcgtttacacacccgcttcaatcaaacggcaacagccaccgggcgcttgtcgtcgagtgacccgaacctccagaatattccagtgcgcacgccgctgggccggcacattcgtaaagcgtttgttgcggaagaaggttggttattacttgcggccgattactcccagatcgaacttcgtgtattggcgcatctctctggcgacgagaatcttaaacgcgtgtttcgcgaaggcaaggatattcacactgaaaccgcagcctggatgttcggggtggactcggccttagtggaccccaagatgcgtcgtgccgccaagaccgtcaactttggcgtactctatggtatgtcagcagcacgtcttagtcaggaattgggcattgactacaaagaagctgaagcgtttatcgagcgctatttccaatcctttccgaaagttcgcgcgtggattgaacgtacgctcgaagaaggtcgcactcgcggctatgtggaaacgttattcgggcgtcgtcgctacgttccagatcttacgtctcgtgtccgctcagtgcgcgaagctgctgagcgtatggcctggaatatgcctgttcagggaacagcggcggacctcatgaagatcgccatggtgaaattgtttccgcgcttgaaacccttaggagcccaccttcttctgcaggtgcatgatgaattggtcttggaagtacccgaggatcgcgcagaagaagccaaagcactcgtgaaagaggttatggaaaacgcgtatccgttagatgttccgttggaggtcgaagtgggtgtaggccgtgattggcttgaagcgaaacaagactaatga

SEQ ID NO: 1214 - protein, 844 aa, synthetic construct
  REGION 1..844: note = DNA Polymerase Variant
MHHHHHHGGSGMLPLFDLEEPPKRVLLVDGHHLAYRTFYALSLTTSRGEPVQMVYGFARSLLKALKEDGQAVVVVFDAKAPSFRHEAYEAYKAGRAPTPEDFPRQLALVKRLVDLLGLVRLEAPGYEADDVLGTLAKKAEREGMEVCILTGDRDFFQLLSEKVSVLLPDGTLVTPKDVQEKYGVPPERWVDFRALTGDRSDNIPGVAGIGEKTALRLLAEWGSVENLLKNLDRVKPDSLRRKIEAHLEDLRLSLDLVRIRTDLPLEVDFKALRRRTPDLEGLRAFLEELELGSLLHEFGLLGGEKPREEAPWPPPEGAFVGFLLSRKEPMWAELLALAAAAEGRVHRATSPVEALADLKEARGFLAKDLAVLALREGVALDPTDDPLLVAYLLDSANTNPERVARRYGGEFTEDAAERALLSERLFQTLFPRLSEKLLWLYQEVERPLSRVLAHMEARGVRLDVPLLEALSFEAAKELERLEGEVFRLAGHPFNLNSRDQLEKVLFDELGLTPVTRTEKTGKRSTSAAALEALRGVHPIVELILQYRELSKLKSTYLDRLPRLVHPRTGRLHTRFNQTATATGRLSSSDPNLQNIPVRTPLGRHIRKAFVAEEGWLLLAADYSQIELRVLAHLSGDENLKRVFREGKDIHTETAAWMFGVDSALVDPKMRRAAKTVNFGVLYGMSAARLSQELGIDYKEAEAFIERYFQSFPKVRAWIERTLEEGRTRGYVETLFGRRRYVPDLTSRVRSVREAAERMAWNMPVQGTAADLMKIAMVKLFPRLKPLGAHLLLQVHDELVLEVPEDRAEEAKALVKEVMENAYPLDVPLEVEVGVGRDWLEAKQD

SEQ ID NO: 1215 - DNA, 2538 bp, synthetic construct
  misc_feature 1..2538: note = DNA Polymerase Variant
  source 1..2538: mol_type = other DNA
atgcaccatcatcatcatcatggcggtagcggcatgttaccgctgtttgatttggaagaaccaccaaaacgcgtgctgcttgttgacggccatcatctggcgtatcgtaccttctacgcactgagccttacgacctcacgtggtgagcctgtccagatggtgtatgggtttgctcgctccctgctgaaagccctgaaggaaattggtcaagccgtagtagtggttttcgatgcgaaggcaccgtcgtttcgtcacgaagcgtacgaggcctataaagctggccgcgcaccgaccccggaagactttccgcgtcagttagcgctcgtcaaacgcctcgtggatttgctgggattagttcgcttggaagctcctggctacgaggcggacgacgtgctcggtacactggccaagaaagcagaacgtgaaggcatggaggtctgcattcttaccggtgatcgcgatttcttccagctgctgtctgagaaagtgagcgttttgctgcccgatggcacgttagtaaccccgaaagatgtgcaagagaaatatggagttccgccagaacgttgggtggactttcgcgcactgactggtgatcgttcagacaacatcccgggcgttgccgggattggtgaaaagacggcgctgcgcctgctggcagaatggggctcggtggaaaatctgctcaagaaccttgatcgtgtgaaacctgatagcttacgccgcaagatcgaagcccacctggaagacttgcgtctgagtctggatcttgtacgtattcgcaccgatctgccgttggaagtagactttaaagctctgcgtcgtcgcacacccgatttagaggggttacgcgcgttcctcgaagaactggagctgggctccctgctgcatgaattcggtttgttgggcggagagaaaccgcgtgaagaagcaccatggccgccgcccgagggtgcctttgtcggctttcttctgtcacgcaaagagccaatgtgggcggaactgttagctcttgcagccgccgcggaagggcgtgttcaccgcgcgacctctcctgtcgaggccctcgctgacctcaaagaagcacgtggtttcttggcgaaagatttagccgtgcttgcattacgcgaaggcgttgcgctcgatccgacggacgacccgcttttggtggcttatttgctcgatagcgcgaataccaacccggaacgtgtcgcccgtcgttacggcggcgagtttactgaagatgcggcagaacgcgcgttgcttagcgaacgcctcttccagacgttatttccacgtctttcggagaaattactctggctctatcaggaagtcgaacgtccattgagtcgcgtgcttgcccatatggaggctcgcggtgtgcgcttagatgttccgttgttagaagcactcagcttcgaggcggcaaaagaactggaacgtcttgaaggcgaagtctttcgtttagcggggcatcccttcaatctcaactctcgcgaccaattggagaaagtgctctttgatgaattaggtttaacccctgtcacgcgtacagagaagaccggcaaacgttccacttcggcagccgccttggaagcacttcgtggtgtgcacccgatcgtcgagttgattttgcagtatcgcgagctcagcaaactcaaatcaacctatcttgataggttacctcgtcttgttcatccacgtacgggtcgtttacacacccgcttcaatcaaacggcaacagccaccgggcgcttgtcgtcgagtgacccgaacctccagaatattccagtgcgcacgccgctgggccaacacattcgtaaagcgtttgttgcggaagaaggttggttattacttgcggccgattactcccagatcgaacttcgtgtattggcgcatctctctggcgacgagaatcttaaacgcgtgtttcgcgaaggcaaggatattcacactgaaaccgcagcctggatgttcggggtggactcggccttagtggaccccaagatgcgtcgtgccgccaagaccgtcaactttggcgtactctatggtatgtcagcagcacgtcttagtcaggaattgggcattgactacaaagaagctgaagcgtttatcgagcgctatttccaatcctttccgaaagttcgcgcgtggattgaacgtacgctcgaagaaggtcgcactcgcggctatgtggaaacgttattcgggcgtcgtcgctacgttccagatcttacgtctcgtgtccgctcagtgcgcgaagctgctgagcgtatggcctggaatatgcctgttcagggaacagcggcggacctcatgaagatcgccatggtgaaattgtttccgcgcttgaaacccttaggagcccaccttcttctgcaggtgcatgatgaattggtcttggaagtacccgaggatcgcgcagaagaagccaaagcactcgtgaaagaggttatggaaaacgcgtatccgttagatgttccgttggaggtcgaagtgggtgtaggccgtgattggcttgaagcgaaacaagactaatga

SEQ ID NO: 1216 - protein, 844 aa, synthetic construct
  REGION 1..844: note = DNA Polymerase Variant
MHHHHHHGGSGMLPLFDLEEPPKRVLLVDGHHLAYRTFYALSLTTSRGEPVQMVYGFARSLLKALKEIGQAVVVVFDAKAPSFRHEAYEAYKAGRAPTPEDFPRQLALVKRLVDLLGLVRLEAPGYEADDVLGTLAKKAEREGMEVCILTGDRDFFQLLSEKVSVLLPDGTLVTPKDVQEKYGVPPERWVDFRALTGDRSDNIPGVAGIGEKTALRLLAEWGSVENLLKNLDRVKPDSLRRKIEAHLEDLRLSLDLVRIRTDLPLEVDFKALRRRTPDLEGLRAFLEELELGSLLHEFGLLGGEKPREEAPWPPPEGAFVGFLLSRKEPMWAELLALAAAAEGRVHRATSPVEALADLKEARGFLAKDLAVLALREGVALDPTDDPLLVAYLLDSANTNPERVARRYGGEFTEDAAERALLSERLFQTLFPRLSEKLLWLYQEVERPLSRVLAHMEARGVRLDVPLLEALSFEAAKELERLEGEVFRLAGHPFNLNSRDQLEKVLFDELGLTPVTRTEKTGKRSTSAAALEALRGVHPIVELILQYRELSKLKSTYLDRLPRLVHPRTGRLHTRFNQTATATGRLSSSDPNLQNIPVRTPLGQHIRKAFVAEEGWLLLAADYSQIELRVLAHLSGDENLKRVFREGKDIHTETAAWMFGVDSALVDPKMRRAAKTVNFGVLYGMSAARLSQELGIDYKEAEAFIERYFQSFPKVRAWIERTLEEGRTRGYVETLFGRRRYVPDLTSRVRSVREAAERMAWNMPVQGTAADLMKIAMVKLFPRLKPLGAHLLLQVHDELVLEVPEDRAEEAKALVKEVMENAYPLDVPLEVEVGVGRDWLEAKQD

SEQ ID NO: 1217 - DNA, 2538 bp, synthetic construct
  misc_feature 1..2538: note = DNA Polymerase Variant
  source 1..2538: mol_type = other DNA
atgcaccatcatcatcatcatggcggtagcggcatgttaccgctgtttgatttggaagaaccaccaaaacgcgtgctgcttgttgacggccatcatctggcgtatcgtaccttctacgcactgagccttacgacctcacgtggtgagcctgtccagatggtgtatgggtttgctcgctccctgctgaaagccctgaaggaagatggtcaagccgtagtagtggttttcgatgcgaaggcaccgtcgtttcgtcacgaagcgtacgaggcctataaagctggccgcgcaccgaccccggaagactttccgcgtcagttagcgctcgtcaaacgcctcgtggatttgctgggattagttcgcttggaagctcctggctacgaggcggacgacgtgctcggtacactggccaagaaagcagaacgtgaaggcatggaggtccagattcttaccggtgatcgcgatttcttccagctgctgtctgagaaagtgagcgttttgctgcccgatggcacgttagtaaccccgaaagatgtgcaagagaaatatggagttccgccagaacgttgggtggactttcgcgcactgactggtgatcgttcagacaacatcccgggcgttgccgggattggtgaaaagacggcgctgcgcctgctggcagaatggggctcggtggaaaatctgctcaagaaccttgatcgtgtgaaacctgatagcttacgccgcaagatcgaagcccacctggaagacttgcgtctgagtctggatcttgtacgtattcgcaccgatctgccgttggaagtagactttaaagctctgcgtcgtcgcacacccgatttagaggggttacgcgcgttcctcgaagaactggagctgggctccctgctgcatgaattcggtttgttgggcggagagaaaccgcgtgaagaagcaccatggccgccgcccgagggtgcctttgtcggctttcttctgtcacgcaaagagccaatgtgggcggaactgttagctcttgcagccgccgcggaagggcgtgttcaccgcgcgacctctcctgtcgaggccctcgctgacctcaaagaagcacgtggtttcttggcgaaagatttagccgtgcttgcattacgcgaaggcgttgcgctcgatccgacggacgacccgcttttggtggcttatttgctcgatagcgcgaataccaacccggaacgtgtcgcccgtcgttacggcggcgagtttactgaagatgcggcagaacgcgcgttgcttagcgaacgcctcttccagacgttatttccacgtctttcggagaaattactctggctctatcaggaagtcgaacgtccattgagtcgcgtgcttgcccatatggaggctcgcggtgtgcgcttagatgttccgttgttagaagcactcagcttcgaggcggcaaaagaactggaacgtcttgaaggcgaagtctttcgtttagcggggcatcccttcaatctcaactctcgcgaccaattggagaaagtgctctttgatgaattaggtttaacccctgtcacgcgtacagagaagaccggcaaacgttccacttcggcagccgccttggaagcacttcgtggtgtgcacccgatcgtcgagttgattttgcagtatcgcgagctcagcaaactcaaatcaacctatcttgataggttacctcgtcttgttcatccacgtacgggtcgtttacacacccgcttcaatcaaacggcaacagccaccgggcgcttgtcgtcgagtgacccgaacctccagaatattccagtgcgcacgccgctgggccaacacattcgtaaagcgtttgttgcggaagaaggttggttattacttgcggccgattactcccagatcgaacttcgtgtattggcgcatctctctggcgacgagaatcttaaacgcgtgtttcgcgaaggcaaggatattcacactgaaaccgcagcctggatgttcggggtggactcggccttagtggaccccaagatgcgtcgtgccgccaagaccgtcaactttggcgtactctatggtatgtcagcagcacgtcttagtcaggaattgggcattgactacaaagaagctgaagcgtttatcgagcgctatttccaatcctttccgaaagttcgcgcgtggattgaacgtacgctcgaagaaggtcgcactcgcggctatgtggaaacgttattcgggcgtcgtcgctacgttccagatcttacgtctcgtgtccgctcagtgcgcgaagctgctgagcgtatggcctggaatatgcctgttcagggaacagcggcggacctcatgaagatcgccatggtgaaattgtttccgcgcttgaaacccttaggagcccaccttcttctgcaggtgcatgatgaattggtcttggaagtacccgaggatcgcgcagaagaagccaaagcactcgtgaaagaggttatggaaaacgcgtatccgttagatgttccgttggaggtcgaagtgggtgtaggccgtgattggcttgaagcgaaacaagactaatga

SEQ ID NO: 1218 - protein, 844 aa, synthetic construct
  REGION 1..844: note = DNA Polymerase Variant
MHHHHHHGGSGMLPLFDLEEPPKRVLLVDGHHLAYRTFYALSLTTSRGEPVQMVYGFARSLLKALKEDGQAVVVVFDAKAPSFRHEAYEAYKAGRAPTPEDFPRQLALVKRLVDLLGLVRLEAPGYEADDVLGTLAKKAEREGMEVQILTGDRDFFQLLSEKVSVLLPDGTLVTPKDVQEKYGVPPERWVDFRALTGDRSDNIPGVAGIGEKTALRLLAEWGSVENLLKNLDRVKPDSLRRKIEAHLEDLRLSLDLVRIRTDLPLEVDFKALRRRTPDLEGLRAFLEELELGSLLHEFGLLGGEKPREEAPWPPPEGAFVGFLLSRKEPMWAELLALAAAAEGRVHRATSPVEALADLKEARGFLAKDLAVLALREGVALDPTDDPLLVAYLLDSANTNPERVARRYGGEFTEDAAERALLSERLFQTLFPRLSEKLLWLYQEVERPLSRVLAHMEARGVRLDVPLLEALSFEAAKELERLEGEVFRLAGHPFNLNSRDQLEKVLFDELGLTPVTRTEKTGKRSTSAAALEALRGVHPIVELILQYRELSKLKSTYLDRLPRLVHPRTGRLHTRFNQTATATGRLSSSDPNLQNIPVRTPLGQHIRKAFVAEEGWLLLAADYSQIELRVLAHLSGDENLKRVFREGKDIHTETAAWMFGVDSALVDPKMRRAAKTVNFGVLYGMSAARLSQELGIDYKEAEAFIERYFQSFPKVRAWIERTLEEGRTRGYVETLFGRRRYVPDLTSRVRSVREAAERMAWNMPVQGTAADLMKIAMVKLFPRLKPLGAHLLLQVHDELVLEVPEDRAEEAKALVKEVMENAYPLDVPLEVEVGVGRDWLEAKQD

SEQ ID NO: 1219 - DNA, 2538 bp, synthetic construct
  misc_feature 1..2538: note = DNA Polymerase Variant
  source 1..2538: mol_type = other DNA
atgcaccatcatcatcatcatggcggtagcggcatgttaccgctgtttgatttggaagaaccaccaaaacgcgtgctgcttgttgacggccatcatctggcgtatcgtaccttctacgcactgagccttacgacctcacgtggtgagcctgtccagatggtgtatgggtttgctcgctccctgctgaaagccctgaaggaagatggtcaagccgtagtagtggttttcgatgcgaaggcaccgtcgtttcgtcacgaagcgtacgaggcctataaagctggccgcgcaccgaccccggaagactttccgcgtcagttagcgctcgtcaaacgcctcgtggatttgctgggattagttcgcttggaagctcctggctacgaggcggacgacgtgctcggtacactggccaagaaagcagaacgtgaaggcatggaggtctgcattcttaccggtgatcgcgatttcttccagctgctgtctgagaaagtgagcgttttgctgcccgatggcacgttagtaaccccgaaagatgtgcaagagaaatatggagttccgccagaacgttgggtggactttcgcgcactgactggtgatcgttcagacaacatcccgggcgttgccgggattggtgaaaagacggcgctgcgcctgctggcagaatggggctcggtggaaaatctgctcaagaaccttgatcgtgtgaaacctgatagcttacgccgcaagatcgaagcccacctggaagacttgcgtctgagtctggatcttgtacgtattcgcaccgatctgccgttggaagtagactttaaaggtctgcgtcgtcgcacacccgatttagaggggttacgcgcgttcctcgaagaactggagctgggctccctgctgcatgaattcggtttgttgggcggagagaaaccgcgtgaagaagcaccatggccgccgcccgagggtgcctttgtcggctttcttctgtcacgcaaagagccaatgtgggcggaactgttagctcttgcagccgccgcggaagggcgtgttcaccgcgcgacctctcctgtcgaggccctcgctgacctcaaagaagcacgtggtttcttggcgaaagatttagccgtgcttgcattacgcgaaggcgttgcgctcgatccgacggacgacccgcttttggtggcttatttgctcgatagcgcgaataccaacccggaacgtgtcgcccgtcgttacggcggcgagtttactgaagatgcggcagaacgcgcgttgcttagcgaacgcctcttccagacgttatttccacgtctttcggagaaattactctggctctatcaggaagtcgaacgtccattgagtcgcgtgcttgcccatatggaggctcgcggtgtgcgcttagatgttccgttgttagaagcactcagcttcgaggcggcaaaagaactggaacgtcttgaaggcgaagtctttcgtttagcggggcatcccttcaatctcaactctcgcgaccaattggagaaagtgctctttgatgaattaggtttaacccctgtcacgcgtacagagaagaccggcaaacgttccacttcggcagccgccttggaagcacttcgtggtgtgcacccgatcgtcgagttgattttgcagtatcgcgagctcagcaaactcaaatcaacctatcttgataggttacctcgtcttgttcatccacgtacgggtcgtttacacacccgcttcaatcaaacggcaacagccaccgggcgcttgtcgtcgagtgacccgaacctccagaatattccagtgcgcacgccgctgggccaacacattcgtaaagcgtttgttgcggaagaaggttggttattacttgcggccgattactcccagatcgaacttcgtgtattggcgcatctctctggcgacgagaatcttaaacgcgtgtttcgcgaaggcaaggatattcacactgaaaccgcagcctggatgttcggggtggactcggccttagtggaccccaagatgcgtcgtgccgccaagaccgtcaactttggcgtactctatggtatgtcagcagcacgtcttagtcaggaattgggcattgactacaaagaagctgaagcgtttatcgagcgctatttccaatcctttccgaaagttcgcgcgtggattgaacgtacgctcgaagaaggtcgcactcgcggctatgtggaaacgttattcgggcgtcgtcgctacgttccagatcttacgtctcgtgtccgctcagtgcgcgaagctgctgagcgtatggcctggaatatgcctgttcagggaacagcggcggacctcatgaagatcgccatggtgaaattgtttccgcgcttgaaacccttaggagcccaccttcttctgcaggtgcatgatgaattggtcttggaagtacccgaggatcgcgcagaagaagccaaagcactcgtgaaagaggttatggaaaacgcgtatccgttagatgttccgttggaggtcgaagtgggtgtaggccgtgattggcttgaagcgaaacaagactaatga

SEQ ID NO: 1220 - protein, 844 aa, synthetic construct
  REGION 1..844: note = DNA Polymerase Variant
MHHHHHHGGSGMLPLFDLEEPPKRVLLVDGHHLAYRTFYALSLTTSRGEPVQMVYGFARSLLKALKEDGQAVVVVFDAKAPSFRHEAYEAYKAGRAPTPEDFPRQLALVKRLVDLLGLVRLEAPGYEADDVLGTLAKKAEREGMEVCILTGDRDFFQLLSEKVSVLLPDGTLVTPKDVQEKYGVPPERWVDFRALTGDRSDNIPGVAGIGEKTALRLLAEWGSVENLLKNLDRVKPDSLRRKIEAHLEDLRLSLDLVRIRTDLPLEVDFKGLRRRTPDLEGLRAFLEELELGSLLHEFGLLGGEKPREEAPWPPPEGAFVGFLLSRKEPMWAELLALAAAAEGRVHRATSPVEALADLKEARGFLAKDLAVLALREGVALDPTDDPLLVAYLLDSANTNPERVARRYGGEFTEDAAERALLSERLFQTLFPRLSEKLLWLYQEVERPLSRVLAHMEARGVRLDVPLLEALSFEAAKELERLEGEVFRLAGHPFNLNSRDQLEKVLFDELGLTPVTRTEKTGKRSTSAAALEALRGVHPIVELILQYRELSKLKSTYLDRLPRLVHPRTGRLHTRFNQTATATGRLSSSDPNLQNIPVRTPLGQHIRKAFVAEEGWLLLAADYSQIELRVLAHLSGDENLKRVFREGKDIHTETAAWMFGVDSALVDPKMRRAAKTVNFGVLYGMSAARLSQELGIDYKEAEAFIERYFQSFPKVRAWIERTLEEGRTRGYVETLFGRRRYVPDLTSRVRSVREAAERMAWNMPVQGTAADLMKIAMVKLFPRLKPLGAHLLLQVHDELVLEVPEDRAEEAKALVKEVMENAYPLDVPLEVEVGVGRDWLEAKQD

SEQ ID NO: 1221 - DNA, 2538 bp, synthetic construct
  misc_feature 1..2538: note = DNA Polymerase Variant
  source 1..2538: mol_type = other DNA
atgcaccatcatcatcatcatggcggtagcggcatgttaccgctgtttgatttggaagaaccaccaaaacgcgtgctgcttgttgacggccatcatctggcgtatcgtaccttctacgcactgagccttacgacctcacgtggtgagcctgtccagatggtgtatgggtttgctcgctccctgctgaaagccctgaaggaagatggtcaagccgtagtagtggttttcgatgcgaaggcaccgtcgtttcgtcacgaagcgtacgaggcctataaagctggccgcgcaccgaccccggaagactttccgcgtcagttagcgctcgtcaaacgcctcgtggatttgctgggattagttcgcttggaagctcctggctacgaggcggacgacgtgctcggtacactggccaagaaagcagaacgtgaaggcatggaggtctgcattcttaccggtgatcgcgatttcttccagctgctgtctgagaaagtgagcgttttgctgcccgatggcacgttagtaaccccgaaagatgtgcaagagaaatatggagttccgccagaacgttgggtggactttcgcgcactgactggtgatcgttcagacaacatcccgggcgttgccgggattggtgaaaagacggcgctgcgcctgctggcagaatggggctcggtggaaaatctgctcaagaaccttgatcgtgtgaaacctgatagcttacgccgcaagatcgaagcccacctggaagacttgcgtctgagtctggatcttgtacgtattcgcaccgatctgccgttggaagtagactttaaagctctgcgtcgtcgcacacccgatttagaggggttacgcgcgttcctcgaagaactggagctgggctccctgctgcatgaattcggtttgttgggcggagagaaaccgcgtgaagaagcaccatggccgccgcccgagggtgcctttgtcggctttcttctgtcacgcaaagagccaatgtgggcggaactgttagctcttgcagccgccgcggaagggcgtgttcaccgcgcgacctctcctgtcgaggccctcgctgacctcaaagaagcacgtggtttcttggcgaaagatttagccgtgcttgcattacgcgaaggcgttgcgctcgatccgacggacgacccgcttttggtggcttatttgctcgatagcgcgaataccaacccggaacgtgtcgcccgtcgttacggcggcgagtttactgaagatgcggcagaacgcgcgttgcttagcgaacgcctcttccagacgttatttccacgtctttcggagaaattactctggctctatcaggaagtcgaacgtccattgagtcgcgtgcttgcccatatggaggctcgcggtgtgcgcttagatgttccgttgttagaagcactcagcttcgaggcggcaaaagaactggaacgtcttgaaggcgaagtctttcgtttagcggggcatcccttcaatctcaactctcgcgaccaattggagaaagtgctctttgataagttaggtttaacccctgtcacgcgtacagagaagaccggcaaacgttccacttcggcagccgccttggaagcacttcgtggtgtgcacccgatcgtcgagttgattttgcagtatcgcgagctcagcaaactcaaatcaacctatcttgataggttacctcgtcttgttcatccacgtacgggtcgtttacacacccgcttcaatcaaacggcaacagccaccgggcgcttgtcgtcgagtgacccgaacctccagaatattccagtgcgcacgccgctgggccaacacattcgtaaagcgtttgttgcggaagaaggttggttattacttgcggccgattactcccagatcgaacttcgtgtattggcgcatctctctggcgacgagaatcttaaacgcgtgtttcgcgaaggcaaggatattcacactgaaaccgcagcctggatgttcggggtggactcggccttagtggaccccaagatgcgtcgtgccgccaagaccgtcaactttggcgtactctatggtatgtcagcagcacgtcttagtcaggaattgggcattgactacaaagaagctgaagcgtttatcgagcgctatttccaatcctttccgaaagttcgcgcgtggattgaacgtacgctcgaagaaggtcgcactcgcggctatgtggaaacgttattcgggcgtcgtcgctacgttccagatcttacgtctcgtgtccgctcagtgcgcgaagctgctgagcgtatggcctggaatatgcctgttcagggaacagcggcggacctcatgaagatcgccatggtgaaattgtttccgcgcttgaaacccttaggagcccaccttcttctgcaggtgcatgatgaattggtcttggaagtacccgaggatcgcgcagaagaagccaaagcactcgtgaaagaggttatggaaaacgcgtatccgttagatgttccgttggaggtcgaagtgggtgtaggccgtgattggcttgaagcgaaacaagactaatga

SEQ ID NO: 1222 - protein, 844 aa, synthetic construct
  REGION 1..844: note = DNA Polymerase Variant
MHHHHHHGGSGMLPLFDLEEPPKRVLLVDGHHLAYRTFYALSLTTSRGEPVQMVYGFARSLLKALKEDGQAVVVVFDAKAPSFRHEAYEAYKAGRAPTPEDFPRQLALVKRLVDLLGLVRLEAPGYEADDVLGTLAKKAEREGMEVCILTGDRDFFQLLSEKVSVLLPDGTLVTPKDVQEKYGVPPERWVDFRALTGDRSDNIPGVAGIGEKTALRLLAEWGSVENLLKNLDRVKPDSLRRKIEAHLEDLRLSLDLVRIRTDLPLEVDFKALRRRTPDLEGLRAFLEELELGSLLHEFGLLGGEKPREEAPWPPPEGAFVGFLLSRKEPMWAELLALAAAAEGRVHRATSPVEALADLKEARGFLAKDLAVLALREGVALDPTDDPLLVAYLLDSANTNPERVARRYGGEFTEDAAERALLSERLFQTLFPRLSEKLLWLYQEVERPLSRVLAHMEARGVRLDVPLLEALSFEAAKELERLEGEVFRLAGHPFNLNSRDQLEKVLFDKLGLTPVTRTEKTGKRSTSAAALEALRGVHPIVELILQYRELSKLKSTYLDRLPRLVHPRTGRLHTRFNQTATATGRLSSSDPNLQNIPVRTPLGQHIRKAFVAEEGWLLLAADYSQIELRVLAHLSGDENLKRVFREGKDIHTETAAWMFGVDSALVDPKMRRAAKTVNFGVLYGMSAARLSQELGIDYKEAEAFIERYFQSFPKVRAWIERTLEEGRTRGYVETLFGRRRYVPDLTSRVRSVREAAERMAWNMPVQGTAADLMKIAMVKLFPRLKPLGAHLLLQVHDELVLEVPEDRAEEAKALVKEVMENAYPLDVPLEVEVGVGRDWLEAKQD

SEQ ID NO: 1223 - DNA, 2538 bp, synthetic construct
  misc_feature 1..2538: note = DNA Polymerase Variant
  source 1..2538: mol_type = other DNA
atgcaccatcatcatcatcatggcggtagcggcatgttaccgctgtttgatttggaagaaccaccaaaacgcgtgctgcttgttgacggccatcatctggcgtatcgtaccttctacgcactgagccttacgacctcacgtggtgagcctgtccagatggtgtatgggtttgctcgctccctgctgaaagccctgaaggaagatggtcaagccgtagtagtggttttcgatgcgaaggcaccgtcgtttcgtcacgaagcgtacgaggcctataaagctggccgcgcaccgaccccggaagactttccgcgtcagttagcgctcgtcaaacgcctcgtggatttgctgggattagttcgcttggaagctcctggctacgaggcggacgacgtgctcggtacactggccaagaaagcagaacgtgaaggcatggaggtctgcattcttaccggtgatcgcgatttcttccagctgctgtctgagaaagtgagcgttttgctgcccgatggcacgttagtaaccccgaaagatgtgcaagagaaatatggagttccgccagaacgttgggtggactttcgcgcactgactggtgatcgttcagacaacatcccgggcgttgccgggattggtgaaaagacggcgctgcgcctgctggcagaatggggctcggtggaaaatctgctcaagaaccttgatcgtgtgaaacctgatagcttacgccgcaagatcgaagcccacctggaagacttgcgtctgagtctggatcttgtacgtattcgcaccgatctgccgttggaagtagactttaaagctctgcgtcgtcgcacacccgatttagaggggttacgcgcgttcctcgaagaactggagctgggctccctgctgcatgaattcggtttgttgggcggagagaaaccgcgtgaagaagcaccatggccgccgcccgagggtgcctttgtcggctttcttctgtcacgcaaagagccaatgtgggcggaactgttagctcttgcagccgccgcggaagggcgtgttcaccgcgcgacctctcctgtcgaggccctcgctgacctcaaagaagcacgtggtttcttggcgaaagatttagccgtgcttgcattacgcgaaggcgttgcgctcgatccgacggacgacccgcttttggtggcttatttgctcgatagcgcgaataccaacccggaacgtgtcgcccgtcgttacggcggcgagtttactgaagatgcggcagaacgcgcgttgcttagcgaacgcctcttccagacgttatttccacgtctttcggagaaattactctggctctatcaggaagtcgaacgtccattgagtcgcgtgcttgcccatatggaggctcgcggtgtgcgcttagatgttccgttgttagaagcactcagcttcgaggcggcaaaagaactggaacgtcttgaaggcgaagtctttcgtttagcggggcatcccttcaatctcaactctcgcgaccaattggagaaagtgctctttgatgaattaggtttaacccctgtcacgcgtacagagaagaccggcaaacgttccacttcggcagccgccttggaagcacttcgtggtgtgcacccgatcgtcgagttgattttgcagtatcgcgagctcagcaaactcaaatcaacctatcttgataggttacctcgtcttgttcatccacgtacgggtcgtttacacacccgcttcaatcaaacggcaacagccaccgggcgcttgtcgtcgagtgacccgaacctccagaatattccagtgcgcacgccgctgggccaacacattcgtaaagcgtttgttgcggaagaaggttggttattacttgcggccgattactcccagatcgaacttcgtgtattggcgcatctctctggcgacgagaatcttaaacgcgtgtttcgcgaaggcaaggatattcacactgaaaccgcagcctggatgttcggggtggactcggccttagtggaccccaagatgcgtcgtgccgccaagaccgtcaactttggcgtactctatggtatgtcagcagcacgtcttagtcaggaattgggcattgactacaaagaagctgaagcgtttatcgagcgctatttccaatcctttccgaaagttcgcgcgtggattgaacgtacgctcgaagaaggtcgcactcgcggctatgtggaaacgttattcgggcgtcgtcgctacgttccagatcttacgtctcgtgtccgctcagtgcgcgaagctgctgagcgtatggcctggaatatgcctgttcagggaacagcggcggacctcatgaagatcgccatggtgaaattgtttccgcgcttgaaacccttaaatgcccaccttcttctgcaggtgcatgatgaattggtcttggaagtacccgaggatcgcgcagaagaagccaaagcactcgtgaaagaggttatggaaaacgcgtatccgttagatgttccgttggaggtcgaagtgggtgtaggccgtgattggcttgaagcgaaacaagactaatga

SEQ ID NO: 1224 - protein, 844 aa, synthetic construct
  REGION 1..844: note = DNA Polymerase Variant
MHHHHHHGGSGMLPLFDLEEPPKRVLLVDGHHLAYRTFYALSLTTSRGEPVQMVYGFARSLLKALKEDGQAVVVVFDAKAPSFRHEAYEAYKAGRAPTPEDFPRQLALVKRLVDLLGLVRLEAPGYEADDVLGTLAKKAEREGMEVCILTGDRDFFQLLSEKVSVLLPDGTLVTPKDVQEKYGVPPERWVDFRALTGDRSDNIPGVAGIGEKTALRLLAEWGSVENLLKNLDRVKPDSLRRKIEAHLEDLRLSLDLVRIRTDLPLEVDFKALRRRTPDLEGLRAFLEELELGSLLHEFGLLGGEKPREEAPWPPPEGAFVGFLLSRKEPMWAELLALAAAAEGRVHRATSPVEALADLKEARGFLAKDLAVLALREGVALDPTDDPLLVAYLLDSANTNPERVARRYGGEFTEDAAERALLSERLFQTLFPRLSEKLLWLYQEVERPLSRVLAHMEARGVRLDVPLLEALSFEAAKELERLEGEVFRLAGHPFNLNSRDQLEKVLFDELGLTPVTRTEKTGKRSTSAAALEALRGVHPIVELILQYRELSKLKSTYLDRLPRLVHPRTGRLHTRFNQTATATGRLSSSDPNLQNIPVRTPLGQHIRKAFVAEEGWLLLAADYSQIELRVLAHLSGDENLKRVFREGKDIHTETAAWMFGVDSALVDPKMRRAAKTVNFGVLYGMSAARLSQELGIDYKEAEAFIERYFQSFPKVRAWIERTLEEGRTRGYVETLFGRRRYVPDLTSRVRSVREAAERMAWNMPVQGTAADLMKIAMVKLFPRLKPLNAHLLLQVHDELVLEVPEDRAEEAKALVKEVMENAYPLDVPLEVEVGVGRDWLEAKQD

SEQ ID NO: 1225 - DNA, 2538 bp, synthetic construct
  misc_feature 1..2538: note = DNA Polymerase Variant
  source 1..2538: mol_type = other DNA
atgcaccatcatcatcatcatggcggtagcggcatgttaccgctgtttgatttggaagaaccaccaaaacgcgtgctgcttgttgacggccatcatctggcgtatcgtaccttctacgcactgagccttacgacctcacgtggtgagcctgtccagatggtgtatgggtttgctcgctccctgctgaaagccctgaaggaagatggtcaagccgtagtagtggttttcgatgcgaaggcaccgtcgtttcgtcacgaagcgtacgaggcctataaagctggccgcgcaccgaccccggaagactttccgcgtcagttagcgctcgtcaaacgcctcgtggatttgctgggattagttcgcttggaagctcctggctacgaggcggacgacgtgctcggtacactggccaagaaagcagaacgtgaaggcatggaggtctgcattcttaccggtgatcgcgatttcttccagctgctgtctgagaaagtgagcgttttgctgcccgatggcacgttagtaaccccgaaagatgtgcaagagaaatatggagttccgccagaacgttgggtggactttcgcgcactgactggtgatcgttcagacaacatcccgggcgttgccgggattggtgaaaagacggcgctgcgcctgctggcagaatggggctcggtggaaaatctgctcaagaaccttgatcgtgtgaaacctgatagcttacgccgcaagatcgaagcccacctggaagacttgcgtctgagtctggatcttgtacgtattcgcaccgatctgccgttggaagtagactttaaagctctgcgtcgtcgcacacccgatttagaggggttacgcgcgttcctcgaagaactggagctgggctccctgctgcatgaattcggtttgttgggcggagagaaaccgcgtgaagaagcaccatggccgccgcccgagggtgcctttgtcggctttcttctgtcacgcaaagagccaatgtgggcggaactgttagctcttgcagccgccgcggaagggcgtgttcaccgcgcgacctctcctgtcgaggccctcgctgacctcaaagaagcacgtggtttcttggcgaaagatttagccgtgcttgcattacgcgaaggcgttgcgctcgatccgacggacgacccgcttctggtggcttatttgctcgatagcgcgaataccaacccggaacgtgtcgcccgtcgttacggcggcgagtttcgcgaagatgcggcatggcgcgcgttgcttagcgaacgcctcttccacacgttatttccacgtctttcggagaaattactctggctctatcaggaagtcgaacgtccattgagtcgcgtgcttgcccatatggaggctcgcggtgtgcgcttagatgttccgttgttagaagcactcagcttcgaggcggcaaaagaactggaacgtcttgaaggcgaagtctttcgtttagcggggcatcccttcaatctcaactctcgcgaccaattggagaaagtgctctttgatgaattaggtttaacccctgtcacgcgtacagagaagaccggcaaacgttccacttcggcagccgccttggaagcacttcgtggtgtgcacccgatcgtcgagttgattttgcagtatcgcgagctcagcaaactcaaatcaacctatcttgataggttacctcgccttgttcatccacgtacgggtcgtttacacacccgcttcaatcaaacggcaacagccaccgggcgcttgtcgtcgagtgacccgaacctccagaatattccagtgcgcacgccgctgggccaacacattcgtaaagcgtttgttgcggaagaaggttggttattacttgcggccgattactcccagatcgaacttcgtgtattggcgcatctctctggcgacgagaatcttaaacgcgtgtttcgcgaaggcaaggatattcacactgaaaccgcagcctggatgttcggggtggactcggccttagtggaccccaagatgcgtcgtgccgccaagaccgtcaactttggcgtactctatggtatgtcagcagcacgtcttagtcaggaattgggcattgactataaagaagctgaagcgtttatcgagcgctatttccaatcctttccgaaagttcgcgcgtggattgaacgtacgctcgaagaaggtcgcactcgcggctatgtggaaacgttattcgggcgtcgtcgctacgttccagatcttacgtctcgtgtccgctcagtgcgcgaagctgctgagcgtatggcctggaatatgcctgttcagggaacagcggcggacctcatgaagatcgccatggtgaaattgtttccgcgcttgaaacccttaggagcccaccttcttctgcaggtgcatgatgaattggtcttggaagtacccgaggatcgcgcagaagaagccaaagcactcgtgaaagaggttatggaaaacgcgtatccgttagatgttccgttggaggtcgaagtgggtgtaggccgtgattggcttgaagcgaaacaagactaatga

SEQ ID NO: 1226 - protein, 844 aa, synthetic construct
  REGION 1..844: note = DNA Polymerase Variant
MHHHHHHGGSGMLPLFDLEEPPKRVLLVDGHHLAYRTFYALSLTTSRGEPVQMVYGFARSLLKALKEDGQAVVVVFDAKAPSFRHEAYEAYKAGRAPTPEDFPRQLALVKRLVDLLGLVRLEAPGYEADDVLGTLAKKAEREGMEVCILTGDRDFFQLLSEKVSVLLPDGTLVTPKDVQEKYGVPPERWVDFRALTGDRSDNIPGVAGIGEKTALRLLAEWGSVENLLKNLDRVKPDSLRRKIEAHLEDLRLSLDLVRIRTDLPLEVDFKALRRRTPDLEGLRAFLEELELGSLLHEFGLLGGEKPREEAPWPPPEGAFVGFLLSRKEPMWAELLALAAAAEGRVHRATSPVEALADLKEARGFLAKDLAVLALREGVALDPTDDPLLVAYLLDSANTNPERVARRYGGEFREDAAWRALLSERLFHTLFPRLSEKLLWLYQEVERPLSRVLAHMEARGVRLDVPLLEALSFEAAKELERLEGEVFRLAGHPFNLNSRDQLEKVLFDELGLTPVTRTEKTGKRSTSAAALEALRGVHPIVELILQYRELSKLKSTYLDRLPRLVHPRTGRLHTRFNQTATATGRLSSSDPNLQNIPVRTPLGQHIRKAFVAEEGWLLLAADYSQIELRVLAHLSGDENLKRVFREGKDIHTETAAWMFGVDSALVDPKMRRAAKTVNFGVLYGMSAARLSQELGIDYKEAEAFIERYFQSFPKVRAWIERTLEEGRTRGYVETLFGRRRYVPDLTSRVRSVREAAERMAWNMPVQGTAADLMKIAMVKLFPRLKPLGAHLLLQVHDELVLEVPEDRAEEAKALVKEVMENAYPLDVPLEVEVGVGRDWLEAKQD

SEQ ID NO: 1227 - DNA, 2538 bp, synthetic construct
  misc_feature 1..2538: note = DNA Polymerase Variant
  source 1..2538: mol_type = other DNA
atgcaccatcatcatcatcatggcggtagcggcatgttaccgctgtttgatttggaagaaccaccaaaacgcgtgctgcttgttgacggccatcatctggcgtatcgtaccttctacgcactgagccttacgacctcacgtggtgagcctgtccagatggtgtatgggtttgctcgctccctgctgaaagccctgaaggaagatggtcaagccgtagtagtggttttcgatgcgaaggcaccgtcgtttcgtcacgaagcgtacgaggcctataaagctggccgcgcaccgaccccggaagactttccgcgtcagttagcgctcgtcaaacgcctcgtggatttgctgggattagttcgcttggaagctcctggctacgaggcggacgacgtgctcggtacactggccaagaaagcagaacgtgaaggcatggaggtctgcattcttaccggtgatcgcgatttcttccagctgctgtctgagaaagtgagcgttttgctgcccgatggcacgttagtaaccccgaaagatgtgcaagagaaatatggagttccgccagaacgttgggtggactttcgcgcactgactggtgatcgttcagacaacatcccgggcgttgccgggattggtgaaaagacggcgctgcgcctgctggcagaatggggctcggtggaaaatctgctcaagaaccttgatcgtgtgaaacctgatagcttacgccgcaagatcgaagcccacctggaagacttgcgtctgagtctggatcttgtacgtattcgcaccgatctgccgttggaagtagactttaaagctctgcgtcgtcgcacacccgatttagaggggttacgcgcgttcctcgaagaactggagctgggctccctgctgcatgaattcggtttgttgggcggagagaaaccgcgtgaagaagcaccatggccgccgcccgagggtgcctttgtcggctttcttctgtcacgcaaagagccaatgtgggcggaactgttagctcttgcagccgccgcggaagggcgtgttcaccgcgcgacctctcctgtcgaggccctcattgacctcaaagaagcacgtggtttcttggcgaaagatttagccgtgcttgcattacgcgaaggcgttgcgctcgatccgacggacgacccgcttttggtggcttatttgctcgatagcgcgaataccaacccggaacgtgtcgcccgtcgttacggcggcgagtttactgaagatgcggcagaacgcgcgttgcttagcgaacgcctcttccagacgttatttccacgtctttcggagaaattactctggctctatcaggaagtcgaacgtccattgagtcgcgtgcttgcccatatggaggctcgcggtgtgcgcttagatgttccgttgttagaagcactcagcttcgaggcggcaaaagaactggaacgtcttgaaggcgaagtctttcgtttagcggggcatcccttcaatctcaactctcgcgaccaattggagaaagtgctctttgatgaattaggtttaacccctgtcacgcgtacagagaagaccggcaaacgttccacttcggcagccgccttggaagcacttcgtggtgtgcacccgatcgtcgagttgattttgcagtatcgcgagctcagcaaactcaaatcaacctatcttgataggttacctcgtcttgttcatccacgtacgggtcgtttacacacccgcttcaatcaaacggcaacagccaccgggcgcttgtcgtcgagtgacccgaacctccagaatattccagtgcgcacgccgctgggccaacacattcgtaaagcgtttgttgcggaagaaggttggttattacttgcggccgattactcccagatcgaacttcgtgtattggcgcatctctctggcgacgagaatcttaaacgcgtgtttcgcgaaggcaaggatattcacactgaaaccgcagcctggatgttcggggtggactcggccttagtggaccccaagatgcgtcgtgccgccaagaccgtcaactttggcgtactctatggtatgtcagcagcacgtcttagtcaggaattgggcattgactacaaagaagctgaagcgtttatcgagcgctatttccaatcctttccgaaagttcgcgcgtggattgaacgtacgctcgaagaaggtcgcactcgcggctatgtggaaacgttattcgggcgtcgtcgctacgttccagatcttacgtctcgtgtccgctcagtgcgcgaagctgctgagcgtatggcctggaatatgcctgttcagggaacagcggcggacctcatgaagatcgccatggtgaaattgtttccgcgcttgaaacccttaggagcccaccttcttctgcaggtgcatgatgaattggtcttggaagtacccgaggatcgcgcagaagaagccaaagcactcgtgaaagaggttatggaaaacgcgtatccgttagatgttccgttggaggtcgaagtgggtgtaggccgtgattggcttgaagcgaaacaagactaatga

SEQ ID NO: 1228 - protein, 844 aa, synthetic construct
  REGION 1..844: note = DNA Polymerase Variant
MHHHHHHGGSGMLPLFDLEEPPKRVLLVDGHHLAYRTFYALSLTTSRGEPVQMVYGFARSLLKALKEDGQAVVVVFDAKAPSFRHEAYEAYKAGRAPTPEDFPRQLALVKRLVDLLGLVRLEAPGYEADDVLGTLAKKAEREGMEVCILTGDRDFFQLLSEKVSVLLPDGTLVTPKDVQEKYGVPPERWVDFRALTGDRSDNIPGVAGIGEKTALRLLAEWGSVENLLKNLDRVKPDSLRRKIEAHLEDLRLSLDLVRIRTDLPLEVDFKALRRRTPDLEGLRAFLEELELGSLLHEFGLLGGEKPREEAPWPPPEGAFVGFLLSRKEPMWAELLALAAAAEGRVHRATSPVEALIDLKEARGFLAKDLAVLALREGVALDPTDDPLLVAYLLDSANTNPERVARRYGGEFTEDAAERALLSERLFQTLFPRLSEKLLWLYQEVERPLSRVLAHMEARGVRLDVPLLEALSFEAAKELERLEGEVFRLAGHPFNLNSRDQLEKVLFDELGLTPVTRTEKTGKRSTSAAALEALRGVHPIVELILQYRELSKLKSTYLDRLPRLVHPRTGRLHTRFNQTATATGRLSSSDPNLQNIPVRTPLGQHIRKAFVAEEGWLLLAADYSQIELRVLAHLSGDENLKRVFREGKDIHTETAAWMFGVDSALVDPKMRRAAKTVNFGVLYGMSAARLSQELGIDYKEAEAFIERYFQSFPKVRAWIERTLEEGRTRGYVETLFGRRRYVPDLTSRVRSVREAAERMAWNMPVQGTAADLMKIAMVKLFPRLKPLGAHLLLQVHDELVLEVPEDRAEEAKALVKEVMENAYPLDVPLEVEVGVGRDWLEAKQD

SEQ ID NO: 1229 - DNA, 2538 bp, synthetic construct
  misc_feature 1..2538: note = DNA Polymerase Variant
  source 1..2538: mol_type = other DNA
atgcaccatcatcatcatcatggcggtagcggcatgttaccgctgtttgatttggaagaaccaccaaaacgcgtgctgcttgttgacggccatcatctggcgtatcgtaccttctacgcactgagccttacgacctcacgtggtgagcctgtccagatggtgtatgggtttgctcgctccctgctgaaagccctgaaggaagatggtcaagccgtagtagtggttttcgatactaaggcaccgtcgtttcgtcacgaagcgtacgaggcctataaagctggccgcgcaccgaccccggaagactttccgcgtcagttagcgctcgtcaaacgcctcgtggatttgctgggattagttcgcttggaagctcctggctacgaggcggacgacgtgctcggtacactggccaagaaagcagaacgtgaaggcatggaggtctgcattcttaccggtgatcgcgatttcttccagctgctgtctgagaaagtgagcgttttgctgcccgatggcacgttagtaaccccgaaagatgtgcaagagaaatatggagttccgccagaacgttgggtggactttcgcgcactgactggtgatcgttcagacaacatcccgggcgttgccgggattggtgaaaagacggcgctgcgcctgctggcagaatggggctcggtggaaaatctgctcaagaaccttgatcgtgtgaaacctgatagcttacgccgcaagatcgaagcccacctggaagacttgcgtctgagtctggatcttgtacgtattcgcaccgatctgccgttggaagtagactttaaagctctgcgtcgtcgcacacccgatttagaggggttacgcgcgttcctcgaagaactggagctgggctccctgctgcatgaattcggtttgttgggcggagagaaaccgcgtgaagaagcaccatggccgccgcccgagggtgcctttgtcggctttcttctgtcacgcaaagagccaatgtgggcggaactgttagctcttgcagccgccgcggaagggcgtgttcaccgcgcgacctctcctgtcgaggccctcgctgacctcaaagaagcacgtggtttcttggcgaaagatttagccgtgcttgcattacgcgaaggcgttgcgctcgatccgacggacgacccgcttttggtggcttatttgctcgatagcgcgaataccaacccggaacgtgtcgcccgtcgttacggcggcgagtttactgaagatgcggcagaacgcgcgttgcttagcgaacgcctcttccagacgttatttccacgtctttcggagaaattactctggctctatcaggaagtcgaacgtccattgagtcgcgtgcttgcccatatggaggctcgcggtgtgcgcttagatgttccgttgttagaagcactcagcttcgaggcggcaaaagaactggaacgtcttgaaggcgaagtctttcgtttagcggggcatcccttcaatctcaactctcgcgaccaattggagaaagtgctctttgatgaattaggtttaacccctgtcacgcgtacagagaagaccggcaaacgttccacttcggcagccgccttggaagcacttcgtggtgtgcacccgatcgtcgagttgattttgcagtatcgcgagctcagcaaactcaaatcaacctatcttgataggttacctcgtcttgttcatccacgtacgggtcgtttacacacccgcttcaatcaaacggcaacagccaccgggcgcttgtcgtcgagtgacccgaacctccagaatattccagtgcgcacgccgctgggccaacacattcgtaaagcgtttgttgcggaagaaggttggttattacttgcggccgattactcccagatcgaacttcgtgtattggcgcatctctctggcgacgagaatcttaaacgcgtgtttcgcgaaggcaaggatattcacactgaaaccgcagcctggatgttcggggtggactcggccttagtggaccccaagatgcgtcgtgccgccaagaccgtcaactttggcgtactctatggtatgtcagcagcacgtcttagtcaggaattgggcattgactacaaagaagctgaagcgtttatcgagcgctatttccaatcctttccgaaagttcgcgcgtggattgaacgtacgctcgaagaaggtcgcactcgcggctatgtggaaacgttattcgggcgtcgtcgctacgttccagatcttacgtctcgtgtccgctcagtgcgcgaagctgctgagcgtatggcctggaatatgcctgttcagggaacagcggcggacctcatgaagatcgccatggtgaaattgtttccgcgcttgaaacccttaggagcccaccttcttctgcaggtgcatgatgaattggtcttggaagtacccgaggatcgcgcagaagaagccaaagcactcgtgaaagaggttatggaaaacgcgtatccgttagatgttccgttggaggtcgaagtgggtgtaggccgtgattggcttgaagcgaaacaagactaatga

SEQ ID NO: 1230 - protein, 844 aa, synthetic construct
  REGION 1..844: note = DNA Polymerase Variant
MHHHHHHGGSGMLPLFDLEEPPKRVLLVDGHHLAYRTFYALSLTTSRGEPVQMVYGFARSLLKALKEDGQAVVVVFDTKAPSFRHEAYEAYKAGRAPTPEDFPRQLALVKRLVDLLGLVRLEAPGYEADDVLGTLAKKAEREGMEVCILTGDRDFFQLLSEKVSVLLPDGTLVTPKDVQEKYGVPPERWVDFRALTGDRSDNIPGVAGIGEKTALRLLAEWGSVENLLKNLDRVKPDSLRRKIEAHLEDLRLSLDLVRIRTDLPLEVDFKALRRRTPDLEGLRAFLEELELGSLLHEFGLLGGEKPREEAPWPPPEGAFVGFLLSRKEPMWAELLALAAAAEGRVHRATSPVEALADLKEARGFLAKDLAVLALREGVALDPTDDPLLVAYLLDSANTNPERVARRYGGEFTEDAAERALLSERLFQTLFPRLSEKLLWLYQEVERPLSRVLAHMEARGVRLDVPLLEALSFEAAKELERLEGEVFRLAGHPFNLNSRDQLEKVLFDELGLTPVTRTEKTGKRSTSAAALEALRGVHPIVELILQYRELSKLKSTYLDRLPRLVHPRTGRLHTRFNQTATATGRLSSSDPNLQNIPVRTPLGQHIRKAFVAEEGWLLLAADYSQIELRVLAHLSGDENLKRVFREGKDIHTETAAWMFGVDSALVDPKMRRAAKTVNFGVLYGMSAARLSQELGIDYKEAEAFIERYFQSFPKVRAWIERTLEEGRTRGYVETLFGRRRYVPDLTSRVRSVREAAERMAWNMPVQGTAADLMKIAMVKLFPRLKPLGAHLLLQVHDELVLEVPEDRAEEAKALVKEVMENAYPLDVPLEVEVGVGRDWLEAKQD

SEQ ID NO: 1231 - DNA, 2538 bp, synthetic construct
  misc_feature 1..2538: note = DNA Polymerase Variant
  source 1..2538: mol_type = other DNA
atgcaccatcatcatcatcatggcggtagcggcatgttaccgctgtttgatttggaagaaccaccaaaacgcgtgctgcttgttgacggccatcatctggcgtatcgtaccttctacgcactgagccttacgacctcacgtggtgagcctgtccagatggtgtatgggtttgctcgctccctgctgaaagccctgaaggaagatggtcaagccgtagtagtggttttcgatgcgaaggcaccgtcgtttcgtcacgaagcgtacgaggcctataaagctggccgcgcaccgaccccggaagactttccgcgtcagttagcgctcgtcaaacgcctcgtggatttgctgggattagttcgcttggaagctcctggctacgaggcggacgacgtgctcggtacactggccaagaaagcagaacgtgaaggcatggaggtctgcattcttaccggtgatcgcgatttcttccagctgctgtctgagaaagtgagcgttttgctgcccgatggcacgttagtaaccccgaaagatgtgcaagagaaatatggagttccgccagaacgttgggtggactttcgcgcactgactggtgatcgttcagacaacatcccgggcgttgccgggattggtgaaaagacggcgctgcgcctgctggcagaatggggctcggtggaaaatctgctcaagaaccttgatcgtgtgaaacctgatagcttacgccgcaagatcgaagcccacctggaagacttgattctgagtctggatcttgtacgtattcgcaccgatctgccgttggaagtagactttaaagctctgcgtcgtcgcacacccgatttagaggggttacgcgcgttcctcgaagaactggagctgggctccctgctgcatgaattcggtttgttgggcggagagaaaccgcgtgaagaagcaccatggccgccgcccgagggtgcctttgtcggctttcttctgtcacgcaaagagccaatgtgggcggaactgttagctcttgcagccgccgcggaagggcgtgttcaccgcgcgacctctcctgtcgaggccctcgctgacctcaaagaagcacgtggtttcttggcgaaagatttagccgtgcttgcattacgcgaaggcgttgcgctcgatccgacggacgacccgcttttggtggcttatttgctcgatagcgcgaataccaacccggaacgtgtcgcccgtcgttacggcggcgagtttactgaagatgcggcagaacgcgcgttgcttagcgaacgcctcttccagacgttatttccacgtctttcggagaaattactctggctctatcaggaagtcgaacgtccattgagtcgcgtgcttgcccatatggaggctcgcggtgtgcgcttagatgttccgttgttagaagcactcagcttcgaggcggcaaaagaactggaacgtcttgaaggcgaagtctttcgtttagcggggcatcccttcaatctcaactctcgcgaccaattggagaaagtgctctttgatgaattaggtttaacccctgtcacgcgtacagagaagaccggcaaacgttccacttcggcagccgccttggaagcacttcgtggtgtgcacccgatcgtcgagttgattttgcagtatcgcgagctcagcaaactcaaatcaacctatcttgataggttacctcgtcttgttcatccacgtacgggtcgtttacacacccgcttcaatcaaacggcaacagccaccgggcgcttgtcgtcgagtgacccgaacctccagaatattccagtgcgcacgccgctgggccaacacattcgtaaagcgtttgttgcggaagaaggttggttattacttgcggccgattactcccagatcgaacttcgtgtattggcgcatctctctggcgacgagaatcttaaacgcgtgtttcgcgaaggcaaggatattcacactgaaaccgcagcctggatgttcggggtggactcggccttagtggaccccaagatgcgtcgtgccgccaagaccgtcaactttggcgtactctatggtatgtcagcagcacgtcttagtcaggaattgggcattgactacaaagaagctgaagcgtttatcgagcgctatttccaatcctttccgaaagttcgcgcgtggattgaacgtacgctcgaagaaggtcgcactcgcggctatgtggaaacgttattcgggcgtcgtcgctacgttccagatcttacgtctcgtgtccgctcagtgcgcgaagctgctgagcgtatggcctggaatatgcctgttcagggaacagcggcggacctcatgaagatcgccatggtgaaattgtttccgcgcttgaaacccttaggagcccaccttcttctgcaggtgcatgatgaattggtcttggaagtacccgaggatcgcgcagaagaagccaaagcactcgtgaaagaggttatggaaaacgcgtatccgttagatgttccgttggaggtcgaagtgggtgtaggccgtgattggcttgaagcgaaacaagactaatga

SEQ ID NO: 1232 - protein, 844 aa, synthetic construct
  REGION 1..844: note = DNA Polymerase Variant
MHHHHHHGGSGMLPLFDLEEPPKRVLLVDGHHLAYRTFYALSLTTSRGEPVQMVYGFARSLLKALKEDGQAVVVVFDAKAPSFRHEAYEAYKAGRAPTPEDFPRQLALVKRLVDLLGLVRLEAPGYEADDVLGTLAKKAEREGMEVCILTGDRDFFQLLSEKVSVLLPDGTLVTPKDVQEKYGVPPERWVDFRALTGDRSDNIPGVAGIGEKTALRLLAEWGSVENLLKNLDRVKPDSLRRKIEAHLEDLILSLDLVRIRTDLPLEVDFKALRRRTPDLEGLRAFLEELELGSLLHEFGLLGGEKPREEAPWPPPEGAFVGFLLSRKEPMWAELLALAAAAEGRVHRATSPVEALADLKEARGFLAKDLAVLALREGVALDPTDDPLLVAYLLDSANTNPERVARRYGGEFTEDAAERALLSERLFQTLFPRLSEKLLWLYQEVERPLSRVLAHMEARGVRLDVPLLEALSFEAAKELERLEGEVFRLAGHPFNLNSRDQLEKVLFDELGLTPVTRTEKTGKRSTSAAALEALRGVHPIVELILQYRELSKLKSTYLDRLPRLVHPRTGRLHTRFNQTATATGRLSSSDPNLQNIPVRTPLGQHIRKAFVAEEGWLLLAADYSQIELRVLAHLSGDENLKRVFREGKDIHTETAAWMFGVDSALVDPKMRRAAKTVNFGVLYGMSAARLSQELGIDYKEAEAFIERYFQSFPKVRAWIERTLEEGRTRGYVETLFGRRRYVPDLTSRVRSVREAAERMAWNMPVQGTAADLMKIAMVKLFPRLKPLGAHLLLQVHDELVLEVPEDRAEEAKALVKEVMENAYPLDVPLEVEVGVGRDWLEAKQD

SEQ ID NO: 1233 - DNA, 2538 bp, synthetic construct
  misc_feature 1..2538: note = DNA Polymerase Variant
  source 1..2538: mol_type = other DNA
atgcaccatcatcatcatcatggcggtagcggcatgttaccgctgtttgatttggaagaaccaccaaaacgcgtgctgcttgttgacggccatcatctggcgtatcgtaccttctacgcactgagccttacgacctcacgtggtgagcctgtccagatggtgtatgggtttgctcgctccctgctgaaagccctgaaggaagatggtcaagccgtagtagtggttttcgatgcgaaggcaccgtcgtttcgtcacgaagcgtacgaggcctataaagctggccgcgcaccgaccccggaagactttccgcgtcagttagcgctcgtcaaacgcctcgtggatttgctgggattagttcgcttggaagctcctggctacgaggcggacgacgtgctcggtacactggccaagaaagcagaacgtgaaggcatggaggtctgcattcttaccggtgatcgcgatttcttccagctgctgtctgagaaagtgagcgttttgctgcccgatggcacgttagtaaccccgaaagatgtgcaagagaaatatggagttccgccagaacgttgggtggactttcgcgcactgactggtgatcgttcagacaacatcccgggcgttgccgggattggtgaaaagacggcgctgcgcctgctggcagaatggggctcggtggaaaatctgctcaagaaccttgatcgtgtgaaacctgatagcttacgccgcaagatcgaagcccacctggaagacttgcgtctgagtctggatcttgtacgtattcgcaccgatctgccgttggaagtagactttaaagctctgcgtcgtcgcacacccgatttagaggggttacgcgcgttcctcgaagaactggagctgggctccctgctgcatgaattcggtttgttgggcggagagaaaccgcgtgaagaagcaccatggccgccgcccgagggtgcctttgtcggctttcttctgtcacgcaaagagccaatgtgggcggaactgttagctcttgcagccgccgcggaagggcgtgttcaccgcgcgacctctcctgtcgaggccctcgctgacctcaaagaagcacgtggtttcttggcgaaagatttagccgtgcttgcattacgcgaaggcgttgcgctcgatccgacggacgacccgcttttggtggcttatttgctcgatagcgcgaataccaacccggaacgtgtcgcccgtcgttacggcggcgagtttactgaagatgcggcagaacgcgcgttgcttagcgaacgcctcttccagacgttatttccacgtctttcggagaaattactctggctctatcaggaagtcgaacgtccattgagtcgcgtgcttgcccatatggaggctcgcggtgtgcgcttagatgttccgttgttagaagcactcagcttcgaggcggcaaaagaactggaacgtcttgaaggcgaagtctttcgtttagcggggcatcccttcaatctcaactctcgcgaccaattggagaaagtgctctttgatgaattaggtttaacccctgtcacgcgtacagagaagaccggcaaacgttccacttcggcagccgccttggaagcacttcgtggtgtgcacccgatcgtcgagttgattttgcagtatcgcgagctcagcaaactcaaatcaacctatcttgataggttacctcgtcttgttcatccacgtacgggtcgtttacacacccgcttcaatcaaacggcaacagccaccgggcgcttgtcgtcgagtgacccgaacctccagaatattccagtgcgcacgccgctgggccaacacattcgtaaagcgtttgttgcggaagaaggttggttattacttgcggccgattactcccagatcgaacttcgtgtattggcgcatctctctggcgacgagaatcttaaacgcgtgtttcgcgaaggcaaggatattcacactgaaaccgcagcctggatgttcggggtggactcggccttagtggaccccaagatgcgtcgtgccgccaagaccgtcaactttggcgtactctatggtatgtcagcagcacgtcttagtcaggaattgggcattgacatcaaagaagctgaagcgtttatcgagcgctatttccaatcctttccgaaagttcgcgcgtggattgaacgtacgctcgaagaaggtcgcactcgcggctatgtggaaacgttattcgggcgtcgtcgctacgttccagatcttacgtctcgtgtccgctcagtgcgcgaagctgctgagcgtatggcctggaatatgcctgttcagggaacagcggcggacctcatgaagatcgccatggtgaaattgtttccgcgcttgaaacccttaggagcccaccttcttctgcaggtgcatgatgaattggtcttggaagtacccgaggatcgcgcagaagaagccaaagcactcgtgaaagaggttatggaaaacgcgtatccgttagatgttccgttggaggtcgaagtgggtgtaggccgtgattggcttgaagcgaaacaagactaatga

SEQ ID NO: 1234 - protein, 844 aa, synthetic construct
  REGION 1..844: note = DNA Polymerase Variant
MHHHHHHGGSGMLPLFDLEEPPKRVLLVDGHHLAYRTFYALSLTTSRGEPVQMVYGFARSLLKALKEDGQAVVVVFDAKAPSFRHEAYEAYKAGRAPTPEDFPRQLALVKRLVDLLGLVRLEAPGYEADDVLGTLAKKAEREGMEVCILTGDRDFFQLLSEKVSVLLPDGTLVTPKDVQEKYGVPPERWVDFRALTGDRSDNIPGVAGIGEKTALRLLAEWGSVENLLKNLDRVKPDSLRRKIEAHLEDLRLSLDLVRIRTDLPLEVDFKALRRRTPDLEGLRAFLEELELGSLLHEFGLLGGEKPREEAPWPPPEGAFVGFLLSRKEPMWAELLALAAAAEGRVHRATSPVEALADLKEARGFLAKDLAVLALREGVALDPTDDPLLVAYLLDSANTNPERVARRYGGEFTEDAAERALLSERLFQTLFPRLSEKLLWLYQEVERPLSRVLAHMEARGVRLDVPLLEALSFEAAKELERLEGEVFRLAGHPFNLNSRDQLEKVLFDELGLTPVTRTEKTGKRSTSAAALEALRGVHPIVELILQYRELSKLKSTYLDRLPRLVHPRTGRLHTRFNQTATATGRLSSSDPNLQNIPVRTPLGQHIRKAFVAEEGWLLLAADYSQIELRVLAHLSGDENLKRVFREGKDIHTETAAWMFGVDSALVDPKMRRAAKTVNFGVLYGMSAARLSQELGIDIKEAEAFIERYFQSFPKVRAWIERTLEEGRTRGYVETLFGRRRYVPDLTSRVRSVREAAERMAWNMPVQGTAADLMKIAMVKLFPRLKPLGAHLLLQVHDELVLEVPEDRAEEAKALVKEVMENAYPLDVPLEVEVGVGRDWLEAKQD

SEQ ID NO: 1235 - DNA, 2538 bp, synthetic construct
  misc_feature 1..2538: note = DNA Polymerase Variant
  source 1..2538: mol_type = other DNA
atgcaccatcatcatcatcatggcggtagcggcatgttaccgctgtttgatttggaagaaccaccaaaacgcgtgctgcttgttgacggccatcatctggcgtatcgtaccttctacgcactgagccttacgacctcacgtggtgagcctgtccagatggtgtatgggtttgctcgctccctgctgaaagccctgaaggaagggggtcaagccgtagtagtggttttcgatgcgaaggcaccgtcgtttcgtcacgaagcgtacgaggcctataaagctggccgcgcaccgaccccggaagactttccgcgtcagttagcgctcgtcaaacgcctcgtggatttgctgggattagttcgcttggaagctcctggctacgaggcggacgacgtgctcggtacactggccaagaaagcagaacgtgaaggcatggaggtctgcattcttaccggtgatcgcgatttcttccagctgctgtctgagaaagtgagcgttttgctgcccgatggcacgttagtaaccccgaaagatgtgcaagagaaatatggagttccgccagaacgttgggtggactttcgcgcactgactggtgatcgttcagacaacatcccgggcgttgccgggattggtgaaaagacggcgctgcgcctgctggcagaatggggctcggtggaaaatctgctcaagaaccttgatcgtgtgaaacctgatagcttacgccgcaagatcgaagcccacctggaagacttgcgtctgagtctggatcttgtacgtattcgcaccgatctgccgttggaagtagactttaaagctctgcgtcgtcgcacacccgatttagaggggttacgcgcgttcctcgaagaactggagctgggctccctgctgcatgaattcggtttgttgggcggagagaaaccgcgtgaagaagcaccatggccgccgcccgagggtgcctttgtcggctttcttctgtcacgcaaagagccaatgtgggcggaactgttagctcttgcagccgccgcggaagggcgtgttcaccgcgcgacctctcctgtcgaggccctcgctgacctcaaagaagcacgtggtttcttggcgaaagatttagccgtgcttgcattacgcgaaggcgttgcgctcgatccgacggacgacccgcttttggtggcttatttgctcgatagcgcgaataccaacccggaacgtgtcgcccgtcgttacggcggcgagtttactgaagatgcggcagaacgcgcgttgcttagcgaacgcctcttccagacgttatttccacgtctttcggagaaattactctggctctatcaggaagtcgaacgtccattgagtcgcgtgcttgcccatatggaggctcgcggtgtgcgcttagatgttccgttgttagaagcactcagcttcgaggcggcaaaagaactggaacgtcttgaaggcgaagtctttcgtttagcggggcatcccttcaatctcaactctcgcgaccaattggagaaagtgctctttgatgaattaggtttaacccctgtcacgcgtacagagaagaccggcaaacgttccacttcggcagccgccttggaagcacttcgtggtgtgcacccgatcgtcgagttgattttgcagtatcgcgagctcagcaaactcaaatcaacctatcttgataggttacctcgtcttgttcatccacgtacgggtcgtttacacacccgcttcaatcaaacggcaacagccaccgggcgcttgtcgtcgagtgacccgaacctccagaatattccagtgcgcacgccgctgggccaacacattcgtaaagcgtttgttgcggaagaaggttggttattacttgcggccgattactcccagatcgaacttcgtgtattggcgcatctctctggcgacgagaatcttaaacgcgtgtttcgcgaaggcaaggatattcacactgaaaccgcagcctggatgttcggggtggactcggccttagtggaccccaagatgcgtcgtgccgccaagaccgtcaactttggcgtactctatggtatgtcagcagcacgtcttagtcaggaattgggcattgactacaaagaagctgaagcgtttatcgagcgctatttccaatcctttccgaaagttcgcgcgtggattgaacgtacgctcgaagaaggtcgcactcgcggctatgtggaaacgttattcgggcgtcgtcgctacgttccagatcttacgtctcgtgtccgctcagtgcgcgaagctgctgagcgtatggcctggaatatgcctgttcagggaacagcggcggacctcatgaagatcgccatggtgaaattgtttccgcgcttgaaacccttaggagcccaccttcttctgcaggtgcatgatgaattggtcttggaagtacccgaggatcgcgcagaagaagccaaagcactcgtgaaagaggttatggaaaacgcgtatccgttagatgttccgttggaggtcgaagtgggtgtaggccgtgattggcttgaagcgaaacaagactaatga

SEQ ID NO: 1236 - protein, 844 aa, synthetic construct
  REGION 1..844: note = DNA Polymerase Variant
MHHHHHHGGSGMLPLFDLEEPPKRVLLVDGHHLAYRTFYALSLTTSRGEPVQMVYGFARSLLKALKEGGQAVVVVFDAKAPSFRHEAYEAYKAGRAPTPEDFPRQLALVKRLVDLLGLVRLEAPGYEADDVLGTLAKKAEREGMEVCILTGDRDFFQLLSEKVSVLLPDGTLVTPKDVQEKYGVPPERWVDFRALTGDRSDNIPGVAGIGEKTALRLLAEWGSVENLLKNLDRVKPDSLRRKIEAHLEDLRLSLDLVRIRTDLPLEVDFKALRRRTPDLEGLRAFLEELELGSLLHEFGLLGGEKPREEAPWPPPEGAFVGFLLSRKEPMWAELLALAAAAEGRVHRATSPVEALADLKEARGFLAKDLAVLALREGVALDPTDDPLLVAYLLDSANTNPERVARRYGGEFTEDAAERALLSERLFQTLFPRLSEKLLWLYQEVERPLSRVLAHMEARGVRLDVPLLEALSFEAAKELERLEGEVFRLAGHPFNLNSRDQLEKVLFDELGLTPVTRTEKTGKRSTSAAALEALRGVHPIVELILQYRELSKLKSTYLDRLPRLVHPRTGRLHTRFNQTATATGRLSSSDPNLQNIPVRTPLGQHIRKAFVAEEGWLLLAADYSQIELRVLAHLSGDENLKRVFREGKDIHTETAAWMFGVDSALVDPKMRRAAKTVNFGVLYGMSAARLSQELGIDYKEAEAFIERYFQSFPKVRAWIERTLEEGRTRGYVETLFGRRRYVPDLTSRVRSVREAAERMAWNMPVQGTAADLMKIAMVKLFPRLKPLGAHLLLQVHDELVLEVPEDRAEEAKALVKEVMENAYPLDVPLEVEVGVGRDWLEAKQD

SEQ ID NO: 1237 - DNA, 2538 bp, synthetic construct
  misc_feature 1..2538: note = DNA Polymerase Variant
  source 1..2538: mol_type = other DNA
atgcaccatcatcatcatcatggcggtagcggcatgttaccgctgtttgatttggaagaaccaccaaaacgcgtgctgcttgttgacggccatcatctggcgtatcgtaccttctacgcactgagccttacgacctcacgtggtgagcctgtccagatggtgtatgggtttgctcgctccctgctgaaagccctgaaggaagatggtcaagccgtagtagtggttttcgatgcgaaagcaccgtcgtttcgtcacgaagcgtacgaggcctataaagctggccgcgcaccgaccccggaagactttccgcgtcagttagcgctcgtcaaacgcctcgtggatttgctgggattagttcgcttggaagctcctggctacgaggcggacgacgtgctcggtacactggccaagaaagcagaacgtgaaggcatggaggtctgcattcttaccggtgatcgcgatttcttccagctgctgtctgagaaagtgagcgttttgctgcccgatggcacgttagtaaccccgaaagatgtgcaagagaaatatggagttccgccagaacgttgggtggactttcgcgcactgactggtgatcgttcagacaacatcccgggcgttgccgggattggtgaaaagacggcgctgcgcctgctggcagaatggggctcggtggaaaatctgctcaagaaccttgatcgtgtgaaacctgatagcttacgccgcaagatcgaagcccacctggaagacttgcgtctgagtctggatcttgtacgtattcgcaccgatctgccgttggaagtagactttaaagctctgcgtcgtcgcacacccgatttagaggggttacgcgcgttcctcgaagaactggagctgggctccctgctgcatgaattcggtttgttgggcggagagaaaccgcgtgaagaagcaccatggccgccgcccgagggtgcctttgtcggctttcttctgtcacgcaaagagccaatgtgggcggaactgttagctcttgcagccgccgcggaagggcgtgttcaccgcgcgacctctcctgtcgaggccctcgctgacctcaaagaagcacgtggtttcttggcgaaagatttagctgtgcttgcattacgcgaaggcgttgcgctcgatccgacggacgacccgcttctggtggcttatttgctcgatagcgcgaataccaacccggaacgtgtcgcccgtcgttacggcggcgagtttactgaagatgcggcagaacgcgcgttgcttagcgaacgcctcttccagacgttatttccacgtctttcggagaaattactctggctctatcaggaagtcgaacgtccattgagtcgcgtgcttgcccatatggaggctcgcggtgtgcgcttagatgttccgttgttagaagcactcagcttcgaggcggcaaaagaactggaacgtcttgaaggcgaagtctttcgtttagcggggcatcccttcaatctcaactctcgcgaccaattggagaaagtgctctttgatgaattaggtttaacccctgtcacgcgtacagagaagaccggcaaacgttccacttcggcagccgccttggaagcacttcgtggtgtgcacccgatcgtcgagttgattttgcagtatcgcgagctcagcaaactcaaatcaacctatcttgataggttacctaaacttgttcatccacgtacgggtcgtttacacacccgcttcaatcaaacggcaacagccaccgggcgcttgtcgtcgagtgacccgaacctccagaatattccagtgcgcacgccgctgggccaacacattcgtaaagcgtttgttgcggaagaaggttggttattacttgcggccgattactcccagatcgaacttcgtgtattggcgcatctctctggcgacgagaatcttaaacgcgtgtttcgcgaaggcaaggatattcacactgaaaccgcagcctggatgttcggggtggactcggccttagtggaccccaagatgcgtcgtgccgccaagaccgtcaactttggcgtactctatggtatgtcagcagcacgtcttagtcaggaattgggcattgactataaagaagctgaagcgtttatcgagcgctatttccaatcctttccgaaagttcgcgcgtggattgaacgtacgctcgaagaaggtcgcactcgcggctatgtggaaacgttattcgggcgtcgtcgctacgttccagatcttacgtctcgtgtccgctcagtgcgcgaagctgctgagcgtatggcctggaatatgcctgttcagggaacagcggcggacctcatgaagatcgccatggtgaaattgtttccgcgcttgaaacccttaggagcccaccttcttctgcaggtgcatgatgaattggtcttggaagtacccgaggatcgcgcagaagaagccaaagcactcgtgaaagaggttatggaaaacgcgtatccgttagatgttccgttggaggtcgaagtgggtgtaggccgtgattggcttgaagcgaaacaagactaatga

SEQ ID NO: 1238 - protein, 844 aa, synthetic construct
  REGION 1..844: note = DNA Polymerase Variant
MHHHHHHGGSGMLPLFDLEEPPKRVLLVDGHHLAYRTFYALSLTTSRGEPVQMVYGFARSLLKALKEDGQAVVVVFDAKAPSFRHEAYEAYKAGRAPTPEDFPRQLALVKRLVDLLGLVRLEAPGYEADDVLGTLAKKAEREGMEVCILTGDRDFFQLLSEKVSVLLPDGTLVTPKDVQEKYGVPPERWVDFRALTGDRSDNIPGVAGIGEKTALRLLAEWGSVENLLKNLDRVKPDSLRRKIEAHLEDLRLSLDLVRIRTDLPLEVDFKALRRRTPDLEGLRAFLEELELGSLLHEFGLLGGEKPREEAPWPPPEGAFVGFLLSRKEPMWAELLALAAAAEGRVHRATSPVEALADLKEARGFLAKDLAVLALREGVALDPTDDPLLVAYLLDSANTNPERVARRYGGEFTEDAAERALLSERLFQTLFPRLSEKLLWLYQEVERPLSRVLAHMEARGVRLDVPLLEALSFEAAKELERLEGEVFRLAGHPFNLNSRDQLEKVLFDELGLTPVTRTEKTGKRSTSAAALEALRGVHPIVELILQYRELSKLKSTYLDRLPKLVHPRTGRLHTRFNQTATATGRLSSSDPNLQNIPVRTPLGQHIRKAFVAEEGWLLLAADYSQIELRVLAHLSGDENLKRVFREGKDIHTETAAWMFGVDSALVDPKMRRAAKTVNFGVLYGMSAARLSQELGIDYKEAEAFIERYFQSFPKVRAWIERTLEEGRTRGYVETLFGRRRYVPDLTSRVRSVREAAERMAWNMPVQGTAADLMKIAMVKLFPRLKPLGAHLLLQVHDELVLEVPEDRAEEAKALVKEVMENAYPLDVPLEVEVGVGRDWLEAKQD

SEQ ID NO: 1239 - DNA, 2538 bp, synthetic construct
  misc_feature 1..2538: note = DNA Polymerase Variant
  source 1..2538: mol_type = other DNA
atgcaccatcatcatcatcatggcggtagcggcatgttaccgctgtttgatttggaagaaccaccaaaacgcgtgctgcttgttgacggccatcatctggcgtatcgtaccttctacgcactgagccttacgacctcacgtggtgagcctgtccagatggtgtatgggtttgctcgctccctgctgaaagccctgaaggaagatggtcaagccgtagtagtggttttcgatgcgcgcgcaccgtcgtttcgtcacgaagcgtacgaggcctataaagctggccgcgcaccgaccccggaagactttccgcgtcagttagcgctcgtcaaacgcctcgtggatttgctgggattagttcgcttggaagctcctggctacgaggcggacgacgtgctcggtacactggccaagaaagcagaacgtgaaggcatggaggtctgcattcttaccggtgatcgcgatttcttccagctgctgtctgagaaagtgagcgttttgctgcccgatggcacgttagtaaccccgaaagatgtgcaagagaaatatggagttccgccagaacgttgggtggactttcgcgcactgactggtgatcgttcagacaacatcccgggcgttgccgggattggtgaaaagacggcgctgcgcctgctggcagaatggggctcggtggaaaatctgctcaagaaccttgatcgtgtgaaacctgatagcttacgccgcaagatcgaagcccacctggaagacttgcgtctgagtctggatcttgtacgtattcgcaccgatctgccgttggaagtagactttaaagctctgcgtcgtcgcacacccgatttagaggggttacgcgcgttcctcgaagaactggagctgggctccctgctgcatgaattcggtttgttgggcggagagaaaccgcgtgaagaagcaccatggccgccgcccgagggtgcctttgtcggctttcttctgtcacgcaaagagccaatgtgggcggaactgttagctcttgcagccgccgcggaagggcgtgttcaccgcgcgacctctcctgtcgaggccctcgctgacctcaaagaagcacgtggtttcttggcgaaagatttagccgtgcttgcattacgcgaaggcgttgcgctcgatccgacggacgacccgcttttggtggcttatttgctcgatagcgcgaataccaacccggaacgtgtcgcccgtcgttacggcggcgagtttactgaagatgcggcagaacgcgcgttgcttagcgaacgcctcttccagacgttatttccacgtcttaatgagaaattactctggctctatcaggaagtcgaacgtccattgagtcgcgtgcttgcccatatggaggctcgcggtgtgcgcttagatgttccgttgttagaagcactcagcttcgaggcggcaaaagaactggaacgtcttgaaggcgaagtctttcgtttagcggggcatcccttcaatctcaactctcgcgaccaattggagaaagtgctctttgatgaattaggtttaacccctgtcacgcgtacagagaagaccggcaaacgttccacttcggcagccgccttggaagcacttcgtggtgtgcacccgatcgtcgagttgattttgcagtatcgcgagctcagcaaactcaaatcaacctatcttgataggttacctaaacttgttcatccacgtacgggtcgtttacacacccgcttcaatcaaacggcaacagccaccgggcgcttgtcgtcgagtgacccgaacctccagaatattccagtgcgcacgccgctgggccaacacattcgtaaagcgtttgttgcggaagaaggttggttattacttgcggccgattactcccagatcgaacttcgtgtattggcgcatctctctggcgacgagaatcttaaacgcgtgtttcgcgaaggcaaggatattcacactgaaaccgcagcctggatgttcggggtggactcggccttagtggaccccaagatgcgtcgtgccgccaagaccgtcaactttggcgtactctatggtatgtcagcagcacgtcttagtcaggaattgggcattgactataaagaagctgaagcgtttatcgagcgctatttccaatcctttccgaaagttcgcgcgtggattgaacgtacgctcgaagaaggtcgcactcgcggctatgtggaaacgttattcgggcgtcgtcgctacgttccagatcttacgtctcgtgtccgctcagtgcgcgaagctgctgagcgtatggcctggaatatgcctgttcagggaacagcggcggacctcatgaagatcgccatggtgaaattgtttccgcgcttgaaacccttaggagcccaccttcttctgcaggtgcatgatgaattggtcttggaagtacccgaggatcgcgcagaagaagccaaagcactcgtgaaagaggttatggaaaacgcgtatccgttagatgttccgttggaggtcgaagtgggtgtaggccgtgattggcttgaagcgaaacaagactaatga

SEQ ID NO: 1240 - protein, 844 aa, synthetic construct
  REGION 1..844: note = DNA Polymerase Variant
MHHHHHHGGSGMLPLFDLEEPPKRVLLVDGHHLAYRTFYALSLTTSRGEPVQMVYGFARSLLKALKEDGQAVVVVFDARAPSFRHEAYEAYKAGRAPTPEDFPRQLALVKRLVDLLGLVRLEAPGYEADDVLGTLAKKAEREGMEVCILTGDRDFFQLLSEKVSVLLPDGTLVTPKDVQEKYGVPPERWVDFRALTGDRSDNIPGVAGIGEKTALRLLAEWGSVENLLKNLDRVKPDSLRRKIEAHLEDLRLSLDLVRIRTDLPLEVDFKALRRRTPDLEGLRAFLEELELGSLLHEFGLLGGEKPREEAPWPPPEGAFVGFLLSRKEPMWAELLALAAAAEGRVHRATSPVEALADLKEARGFLAKDLAVLALREGVALDPTDDPLLVAYLLDSANTNPERVARRYGGEFTEDAAERALLSERLFQTLFPRLNEKLLWLYQEVERPLSRVLAHMEARGVRLDVPLLEALSFEAAKELERLEGEVFRLAGHPFNLNSRDQLEKVLFDELGLTPVTRTEKTGKRSTSAAALEALRGVHPIVELILQYRELSKLKSTYLDRLPKLVHPRTGRLHTRFNQTATATGRLSSSDPNLQNIPVRTPLGQHIRKAFVAEEGWLLLAADYSQIELRVLAHLSGDENLKRVFREGKDIHTETAAWMFGVDSALVDPKMRRAAKTVNFGVLYGMSAARLSQELGIDYKEAEAFIERYFQSFPKVRAWIERTLEEGRTRGYVETLFGRRRYVPDLTSRVRSVREAAERMAWNMPVQGTAADLMKIAMVKLFPRLKPLGAHLLLQVHDELVLEVPEDRAEEAKALVKEVMENAYPLDVPLEVEVGVGRDWLEAKQD

SEQ ID NO: 1241 - DNA, 2538 bp, synthetic construct
  misc_feature 1..2538: note = DNA Polymerase Variant
  source 1..2538: mol_type = other DNA
atgcaccatcatcatcatcatggcggtagcggcatgttaccgctgtttgatttggaagaaccaccaaaacgcgtgctgcttgttgacggccatcatctggcgtatcgtaccttctacgcactgagccttacgacctcacgtggtgagcctgtccagatggtgtatgggtttgctcgctccctgctgaaagccctgaaggaagatggtcaagccgtagtagtggttttcgatgcgaaggcaccgtcgtttcgtcacgaagcgtacgaggcctataaagctggccgcgcaccgaccccggaagactttccgcgtcagttagcgctcgtcaaacgcctcgtggatttgctgggattagttcgcttggaagctcctggctacgaggcggacgacgtgctcggtacactggccaagaaagcagaacgtgaaggcatggaggtctgcattcttaccggtgatcgcgatttcttccagctgctgtctgagaaagtgagcgttttgctgcccgatggcacgttagtaaccccgaaagatgtgcaagagaaatatggagttccgccagaacgttgggtggactttcgcgcactgactggtgatcgttcagacaacatcccgggcgttgccgggattggtgaaaagacggcgctgcgcctgctggcagaatggggctcggtggaaaatctgctcaagaaccttgatcgtgtgaaacctgatagcttacgccgcaagatcgaagcccacctggaagacttgcgtctgagtctggatcttgtacgtattcgcaccgatctgccgttggaagtagactttaaagctctgcgtcgtcgcacacccgatttagaggggttacgcgcgttcctcgaagaactggagctgggctccctgctgcatgaattcggtttgttgggcggagagaaaccgcgtgaagaagcaccatggccgccgcccgagggtgcctttgtcggctttcttctgtcacgcaaagagccaatgtgggcggaactgttagctcttgcagccgccgcggaagggcgtgttcaccgcgcgacctctcctgtcgaggccctcgctgacctcaaagaagcacgtggtttcttggcgaaagatttagccgtgcttgcattacgcgaaggcgttgcgctcgatccgacggacgacccgcttttggtggcttatttgctcgatagcgcgaataccaacccggaacgtgtcgcccgtcgttacggcggcgagtttactgaagatgcggcagaacgcgcgttgcttagcgaacgcctcttccagacgttatttccacgtctttcggagaaattactctggctctatcaggaagtcgaacgtccattgagtcgcgtgcttgcccatatggaggctcgcggtgtgcgcttagatgttccgttgttagaagcactcagcttcgaggcggcaaaagaactggaacgtcttgaaggcgaagtctttcgtttagcggggcatcccttcaatctcaactctcgcgaccaattggagaaagtgctctttgatgaattaggtttaacccctgtcacgcgtacagagaagaccggcaaacgttccacttcggcagccgccttggaagcacttcgtggtgtgcacccgatcgtcgagttgattttgcagtatcgcgagctcagcaaactcaaatcaacctatcttgataggttacctcgtcttgttcatccacgtacgggtcgtttacacacccgcttcaatcaaacggcaacagccaccgggcgcttgtcgtcgagtgacccgaacctccagaatattccagtgcgcacgccgctgggccaacacattcgtaaagcgtttgttgcggaagaaggttggttattacttgcggccgattactcccagatcgaacttcgtgtattggcgcatctctctggcgacgagaatcttaaacgcgtgtttcgcgaaggcaaggatattcacactgaaaccgcagcctggatgttcggggtggactcggccttagtggaccccaagatgcgtcgtgccgccaagaccgtcaactttggcgtactctatggtatgtcagcagcacgtcttagtcaggaattgggcattgactacaaagaagctgaagcgtttatcgagcgctatttccaatcctttccgaaagttcgcgcgtggattgaacgtacgctcgaagaaggtcgcactcgcggctatgtggaaacgttattcgggcgtcgtcgctacgttccagatcttacgtctcgtgtccgctcagtgcgcgaagctgctgagcgtatggcctggaatatgcctgttcagggaacagcggcggacctcatgaagatcgccatggtgaaattgtttccgcgcttgaaacccttaggagcccaccttcttctgcaggtgcatgatgaattggtcttggaagtacccgaggatcgcgcagaagaagccaaagcactcgtgaaagaggttatggaaacggcgtatccgttagatgttccgttggaggtcgaagtgggtgtaggccgtgattggcttgaagcgaaacaagactaatga

SEQ ID NO: 1242 - protein, 844 aa, synthetic construct
  REGION 1..844: note = DNA Polymerase Variant
MHHHHHHGGSGMLPLFDLEEPPKRVLLVDGHHLAYRTFYALSLTTSRGEPVQMVYGFARSLLKALKEDGQAVVVVFDAKAPSFRHEAYEAYKAGRAPTPEDFPRQLALVKRLVDLLGLVRLEAPGYEADDVLGTLAKKAEREGMEVCILTGDRDFFQLLSEKVSVLLPDGTLVTPKDVQEKYGVPPERWVDFRALTGDRSDNIPGVAGIGEKTALRLLAEWGSVENLLKNLDRVKPDSLRRKIEAHLEDLRLSLDLVRIRTDLPLEVDFKALRRRTPDLEGLRAFLEELELGSLLHEFGLLGGEKPREEAPWPPPEGAFVGFLLSRKEPMWAELLALAAAAEGRVHRATSPVEALADLKEARGFLAKDLAVLALREGVALDPTDDPLLVAYLLDSANTNPERVARRYGGEFTEDAAERALLSERLFQTLFPRLSEKLLWLYQEVERPLSRVLAHMEARGVRLDVPLLEALSFEAAKELERLEGEVFRLAGHPFNLNSRDQLEKVLFDELGLTPVTRTEKTGKRSTSAAALEALRGVHPIVELILQYRELSKLKSTYLDRLPRLVHPRTGRLHTRFNQTATATGRLSSSDPNLQNIPVRTPLGQHIRKAFVAEEGWLLLAADYSQIELRVLAHLSGDENLKRVFREGKDIHTETAAWMFGVDSALVDPKMRRAAKTVNFGVLYGMSAARLSQELGIDYKEAEAFIERYFQSFPKVRAWIERTLEEGRTRGYVETLFGRRRYVPDLTSRVRSVREAAERMAWNMPVQGTAADLMKIAMVKLFPRLKPLGAHLLLQVHDELVLEVPEDRAEEAKALVKEVMETAYPLDVPLEVEVGVGRDWLEAKQD

SEQ ID NO: 1243 - DNA, 2538 bp, synthetic construct
  misc_feature 1..2538: note = DNA Polymerase Variant
  source 1..2538: mol_type = other DNA
atgcaccatcatcatcatcatggcggtagcggcatgttaccgctgtttgatttggaagaaccaccaaaacgcgtgctgcttgttgacggccatcatctggcgtatcgtaccttctacgcactgagccttacgacctcacgtggtgagcctgtccagatggtgtatgggtttgctcgctccctgctgaaagccctgaaggaagatggtcaagccgtagtagtggttttcgatgcgaaggcaccgtcgtttcgtcacgaagcgtacgaggcctataaagctggccgcgcaccgaccccggaagactttccgcgtcagttagcgctcgtcaaacgcctcgtggatttgctgggattagttcgcttggaagctcctggctacgaggcggacgacgtgctcggtacactggccaagaaagcagaacgtgaaggcatggaggtctgcattcttaccggtgatcgcgatttcttccagctgctgtctgagaaagtgagcgttttgctgcccgatggcacgttagtaaccccgaaagatgtgcaagagaaatatggagttccgccagaacgttgggtggactttcgcgcactgactggtgatcgttcagacaacatcccgggcgttgccgggattggtgaaaagacggcgctgcgcctgctggcagaatggggctcggtggaaaatctgctcaagaaccttgatcgtgtgaaacctgatagcttacgccgcaagatcgaagcccacctggaagacttgcgtctgagtctggatcttgtacgtattcgcaccgatctgccgttggaagtagactttaaagctctgcgtcgtactacacccgatttagaggggttacgcgcgttcctcgaagaactggagctgggctccctgctgcatgaattcggtttgttgggcggagagaaaccgcgtgaagaagcaccatggccgccgcccgagggtgcctttgtcggctttcttctgtcacgcaaagagccaatgtgggcggaactgttagctcttgcagccgccgcggaagggcgtgttcaccgcgcgacctctcctgtcgaggccctcgctgacctcaaagaagcacgtggtttcttggcgaaagatttagccgtgcttgcattacgcgaaggcgttgcgctcgatccgacggacgacccgcttttggtggcttatttgctcgatagcgcgaataccaacccggaacgtgtcgcccgtcgttacggcggcgagtttactgaagatgcggcagaacgcgcgttgcttagcgaacgcctcttccagacgttatttccacgtctttcggagaaattactctggctctatcaggaagtcgaacgtccattgagtcgcgtgcttgcccatatggaggctcgcggtgtgcgcttagatgttccgttgttagaagcactcagcttcgaggcggcaaaagaactggaacgtcttgaaggcgaagtctttcgtttagcggggcatcccttcaatctcaactctcgcgaccaattggagaaagtgctctttgatgaattaggtttaacccctgtcacgcgtacagagaagaccggcaaacgttccacttcggcagccgccttggaagcacttcgtggtgtgcacccgatcgtcgagttgattttgcagtatcgcgagctcagcaaactcaaatcaacctatcttgataggttacctcgtcttgttcatccacgtacgggtcgtttacacacccgcttcaatcaaacggcaacagccaccgggcgcttgtcgtcgagtgacccgaacctccagaatattccagtgcgcacgccgctgggccaacacattcgtaaagcgtttgttgcggaagaaggttggttattacttgcggccgattactcccagatcgaacttcgtgtattggcgcatctctctggcgacgagaatcttaaacgcgtgtttcgcgaaggcaaggatattcacactgaaaccgcagcctggatgttcggggtggactcggccttagtggaccccaagatgcgtcgtgccgccaagaccgtcaactttggcgtactctatggtatgtcagcagcacgtcttagtcaggaattgggcattgactacaaagaagctgaagcgtttatcgagcgctatttccaatcctttccgaaagttcgcgcgtggattgaacgtacgctcgaagaaggtcgcactcgcggctatgtggaaacgttattcgggcgtcgtcgctacgttccagatcttacgtctcgtgtccgctcagtgcgcgaagctgctgagcgtatggcctggaatatgcctgttcagggaacagcggcggacctcatgaagatcgccatggtgaaattgtttccgcgcttgaaacccttaggagcccaccttcttctgcaggtgcatgatgaattggtcttggaagtacccgaggatcgcgcagaagaagccaaagcactcgtgaaagaggttatggaaaacgcgtatccgttagatgttccgttggaggtcgaagtgggtgtaggccgtgattggcttgaagcgaaacaagactaatga

SEQ ID NO: 1244 - protein, 844 aa, synthetic construct
  REGION 1..844: note = DNA Polymerase Variant
MHHHHHHGGSGMLPLFDLEEPPKRVLLVDGHHLAYRTFYALSLTTSRGEPVQMVYGFARSLLKALKEDGQAVVVVFDAKAPSFRHEAYEAYKAGRAPTPEDFPRQLALVKRLVDLLGLVRLEAPGYEADDVLGTLAKKAEREGMEVCILTGDRDFFQLLSEKVSVLLPDGTLVTPKDVQEKYGVPPERWVDFRALTGDRSDNIPGVAGIGEKTALRLLAEWGSVENLLKNLDRVKPDSLRRKIEAHLEDLRLSLDLVRIRTDLPLEVDFKALRRTTPDLEGLRAFLEELELGSLLHEFGLLGGEKPREEAPWPPPEGAFVGFLLSRKEPMWAELLALAAAAEGRVHRATSPVEALADLKEARGFLAKDLAVLALREGVALDPTDDPLLVAYLLDSANTNPERVARRYGGEFTEDAAERALLSERLFQTLFPRLSEKLLWLYQEVERPLSRVLAHMEARGVRLDVPLLEALSFEAAKELERLEGEVFRLAGHPFNLNSRDQLEKVLFDELGLTPVTRTEKTGKRSTSAAALEALRGVHPIVELILQYRELSKLKSTYLDRLPRLVHPRTGRLHTRFNQTATATGRLSSSDPNLQNIPVRTPLGQHIRKAFVAEEGWLLLAADYSQIELRVLAHLSGDENLKRVFREGKDIHTETAAWMFGVDSALVDPKMRRAAKTVNFGVLYGMSAARLSQELGIDYKEAEAFIERYFQSFPKVRAWIERTLEEGRTRGYVETLFGRRRYVPDLTSRVRSVREAAERMAWNMPVQGTAADLMKIAMVKLFPRLKPLGAHLLLQVHDELVLEVPEDRAEEAKALVKEVMENAYPLDVPLEVEVGVGRDWLEAKQD

SEQ ID NO: 1245 - DNA, 2538 bp, synthetic construct
  misc_feature 1..2538: note = DNA Polymerase Variant
  source 1..2538: mol_type = other DNA
atgcaccatcatcatcatcatggcggtagcggcatgttaccgctgtttgatttggaagaaccaccaaaacgcgtgctgcttgttgacggccatcatctggcgtatcgtaccttctacgcactgagccttacgacctcacgtggtgagcctgtccagatggtgtatgggtttgctcgctccctgctgaaagccctgaaggaagatggtcaagccgtagtagtggttttcgatgcgaaggcaccgtcgtttcgtcacgaagcgtacgaggcctataaagctggccgcgcaccgaccccggaagactttccgcgtcagttagcgctcgtcaaacgcctcgtggatttgctgggattagttcgcttggaagctcctggctacgaggcggacgacgtgctcggtacactggccaagaaagcagaacgtgaaggcatggaggtctgcattcttaccggtgatcgcgatttcttccagctgctgtctgagaaagtgagcgttttgctgcccgatggcacgttagtaaccccgaaagatgtgcaagagaaatatggagttccgccagaacgttgggtggactttcgcgcactgactggtgatcgttcagacaacatcccgggcgttgccgggattggtgaaaagacggcgctgcgcctgctggcagaatggggctcggtggaaaatctgctcaagaaccttgatcgtgtgaaacctgatagcttacgccgcaagatcgaagcccacctggaagacttgcgtctgagtctggatcttgtacgtattcgcaccgatctgccgttggaagtagactttaaagctctgcgtcgtcgcacacccgatttagaggggttacgcgcgttcctcgaagaactggagctgggctccctgctgcatgaattcggtttgttgggcggagagaaaccgcgtgaagaagcaccatggccgccgcccgagggtgcctttgtcggctttcttctgtcacgcaaagagccaatgtgggcggaactgttagctcttgcagccgccgcggaagggcgtgttcaccgcgcgacctctcctgtcgaggccctcgctgacctcaaagaagcacgtggtttcttggcgaaagatttagccgtgcttgcattacgcgaaggcttcgcgctcgaacctacggacgacccgcttttggtggcttatttgctcgatagcgcgaataccaacccggaacgtgtcgcccgtcgttacggcggcgagtttactgaagatgcggcagaacgcgcgttgcttagcgaacgcctcttccagacgttatttccacgtcttagtgagaaattactctggctctatcaggaagtcgaacgtccattgagtcgcgtgcttgcccatatggaggctcgcggtgtgcgcttagatgttccgttgttagaagcactcagcttcgaggcggcaaaagaactggaacgtcttgaaggcgaagtctttcgtttagcggggcatcccttcaatctcaactctcgcgaccaattggagaaagtgctctttgatgaattaggtttaacccctgtcacgcgtacagagaagaccggcaaacgttccacttcggcagccgccttggaagcacttcgtggtgtgcacccgatcgtcgagttgattttgcagtatcgcgagctcagcaaactcaaatcaacctatcttgataggttacctcgtcttgttcatccacgtacgggtcgtttacacacccgcttcaatcaaacggcaacagccaccgggcgcttgtcgtcgagtgacccgaacctccagaatattccagtgcgcacgccgctgggccaacacattcgtaaagcgtttgttgcggaagaaggttggttattacttgcggccgattactcccagatcgaacttcgtgtattggcgcatctctctggcgacgagaatcttaaacgcgtgtttcgcgaaggcaaggatattcacactgaaaccgcagcctggatgttcggggtggactcggccttagtggaccccaagatgcgtcgtgccgccaagaccgtcaactttggcgtactctatggtatgtcagcagcacgtcttagtcaggaattgggcattgacctgaaagaagctgaagcgtttatcgagcgctatttccaatcctttccgaaagttcgcgcgtggattgaacgtacgctcgaagaaggtcgcactcgcggctatgtggaaacgttattcgggcgtcgtcgctacgttccagatcttacgtctcgtgtccgctcagtgcgcgaagctgctgagcgtatggcctggaatatgcctgttcagggaacagcggcggacctcatgaagatcgccatggtgaaattgtttccgcgcttgaaacccttaggagcccaccttcttctgcaggtgcatgatgaattggtcttggaagtacccgaggatcgcgcagaagaagccaaagcactcgtgaaagaggttatggaaaacgcgtatccgttagatgttccgttggaggtcgaagtgggtgtaggccgtgattggcttgaagcgaaacaagactaatga

SEQ ID NO: 1246 - protein, 844 aa, synthetic construct
  REGION 1..844: note = DNA Polymerase Variant
MHHHHHHGGSGMLPLFDLEEPPKRVLLVDGHHLAYRTFYALSLTTSRGEPVQMVYGFARSLLKALKEDGQAVVVVFDAKAPSFRHEAYEAYKAGRAPTPEDFPRQLALVKRLVDLLGLVRLEAPGYEADDVLGTLAKKAEREGMEVCILTGDRDFFQLLSEKVSVLLPDGTLVTPKDVQEKYGVPPERWVDFRALTGDRSDNIPGVAGIGEKTALRLLAEWGSVENLLKNLDRVKPDSLRRKIEAHLEDLRLSLDLVRIRTDLPLEVDFKALRRRTPDLEGLRAFLEELELGSLLHEFGLLGGEKPREEAPWPPPEGAFVGFLLSRKEPMWAELLALAAAAEGRVHRATSPVEALADLKEARGFLAKDLAVLALREGFALEPTDDPLLVAYLLDSANTNPERVARRYGGEFTEDAAERALLSERLFQTLFPRLSEKLLWLYQEVERPLSRVLAHMEARGVRLDVPLLEALSFEAAKELERLEGEVFRLAGHPFNLNSRDQLEKVLFDELGLTPVTRTEKTGKRSTSAAALEALRGVHPIVELILQYRELSKLKSTYLDRLPRLVHPRTGRLHTRFNQTATATGRLSSSDPNLQNIPVRTPLGQHIRKAFVAEEGWLLLAADYSQIELRVLAHLSGDENLKRVFREGKDIHTETAAWMFGVDSALVDPKMRRAAKTVNFGVLYGMSAARLSQELGIDLKEAEAFIERYFQSFPKVRAWIERTLEEGRTRGYVETLFGRRRYVPDLTSRVRSVREAAERMAWNMPVQGTAADLMKIAMVKLFPRLKPLGAHLLLQVHDELVLEVPEDRAEEAKALVKEVMENAYPLDVPLEVEVGVGRDWLEAKQD

SEQ ID NO: 1247 - DNA, 2538 bp, synthetic construct
  misc_feature 1..2538: note = DNA Polymerase Variant
  source 1..2538: mol_type = other DNA
atgcaccatcatcatcatcatggcggtagcggcatgttaccgctgtttgatttggaagaaccaccaaaacgcgtgctgcttgttgacggccatcatctggcgtatcgtaccttctacgcactgagccttacgacctcacgtggtgagcctgtccagatggtgtatgggtttgctcgctccctgctgaaagccctgaaggaagatggtcaagccgtagtagtggttttcgatgcgaaggcaccgtcgtttcgtcacgaagcgtacgaggcctataaagctggccgcgcaccgaccccggaagactttccgcgtcagttagcgctcgtcaaacgcctcgtggatttgctgggattagttcgcttggaagctcctggctacgaggcggacgacgtgctcggtacactggccaagaaagcagaacgtgaaggcatggaggtctgcattcttaccggtgatcgcgatttcttccagctgctgtctgagaaagtgagcgttttgctgcccgatggcacgttagtaaccccgaaagatgtgcaagagaaatatggagttccgccagaacgttgggtggactttcgcgcactgactggtgatcgttcagacaacatcccgggcgttgccgggattggtgaaaagacggcgctgcgcctgctggcagaatggggctcggtggaaaatctgctcaagaaccttgatcgtgtgaaacctgatagcttacgccgcaagatcgaagcccacctggaagacttgcgtctgagtctggatcttgtacgtattcgcaccgatctgccgttggaagtagactttaaagctctgcgtcgtcgcacacccgatttagaggggttacgcgcgttcctcgaagaactggagctgggctccctgctgcatgaattcggtttgttgggcggagagaaaccgcgtgaagaagcaccatggccgccgcccgagggtgcctttgtcggctttcttctgtcacgcaaagagccaatgtgggcggaactgttagctcttgcagccgccgcggaagggcgtgttcaccgcgcgacctctcctgtcgaggccctcgctgacctcaaagaagcacgtggtttcttggcgaaagatttagccgtgcttgcattacgcgaaggcgttgcgctcgatccgacggacgacccgcttttggtggcttatttgctcgatagcgcgaataccaacccggaacgtgtcgcccgtcgttacggcggcgagtttactgaagatgcggcagaacgcgcgttgcttagcgaacgcctcttccagacgttatttccacgtctttcggagaaattactctggctctatcaggaagtcgaacgtccattgagtcgcgtgcttgcccatatggaggctcgcggtgtgcgcttagatgttccgttgttagaagtgctcagcttcgaggcggcaaaagaactggaacgtcttgaaggcgaagtctttcgtttagcggggcatcccttcaatctcaactctcgcgaccaattggagaaagtgctctttgatgaattaggtttaacccctgtcacgcgtacagagaagaccggcaaacgttccacttcggcagccgccttggaagcacttcgtggtgtgcacccgatcgtcgagttgattttgcagtatcgcgagctcagcaaactcaaatcaacctatcttgataggttacctcgtcttgttcatccacgtacgggtcgtttacacacccgcttcaatcaaacggcaacagccaccgggcgcttgtcgtcgagtgacccgaacctccagaatattccagtgcgcacgccgctgggccaacacattcgtaaagcgtttgttgcggaagaaggttggttattacttgcggccgattactcccagatcgaacttcgtgtattggcgcatctctctggcgacgagaatcttaaacgcgtgtttcgcgaaggcaaggatattcacactgaaaccgcagcctggatgttcggggtggactcggccttagtggaccccaagatgcgtcgtgccgccaagaccgtcaactttggcgtactctatggtatgtcagcagcacgtcttagtcaggaattgggcattgactacaaagaagctgaagcgtttatcgagcgctatttccaatcctttccgaaagttcgcgcgtggattgaacgtacgctcgaagaaggtcgcactcgcggctatgtggaaacgttattcgggcgtcgtcgctacgttccagatcttacgtctcgtgtccgctcagtgcgcgaagctgctgagcgtatggcctggaatatgcctgttcagggaacagcggcggacctcatgaagatcgccatggtgaaattgtttccgcgcttgaaacccttaggagcccaccttcttctgcaggtgcatgatgaattggtcttggaagtacccgaggatcgcgcagaagaagccaaagcactcgtgaaagaggttatggaaaacgcgtatccgttagatgttccgttggaggtcgaagtgggtgtaggccgtgattggcttgaagcgaaacaagactaatga

SEQ ID NO: 1248 - protein, 844 aa, synthetic construct
  REGION 1..844: note = DNA Polymerase Variant
MHHHHHHGGSGMLPLFDLEEPPKRVLLVDGHHLAYRTFYALSLTTSRGEPVQMVYGFARSLLKALKEDGQAVVVVFDAKAPSFRHEAYEAYKAGRAPTPEDFPRQLALVKRLVDLLGLVRLEAPGYEADDVLGTLAKKAEREGMEVCILTGDRDFFQLLSEKVSVLLPDGTLVTPKDVQEKYGVPPERWVDFRALTGDRSDNIPGVAGIGEKTALRLLAEWGSVENLLKNLDRVKPDSLRRKIEAHLEDLRLSLDLVRIRTDLPLEVDFKALRRRTPDLEGLRAFLEELELGSLLHEFGLLGGEKPREEAPWPPPEGAFVGFLLSRKEPMWAELLALAAAAEGRVHRATSPVEALADLKEARGFLAKDLAVLALREGVALDPTDDPLLVAYLLDSANTNPERVARRYGGEFTEDAAERALLSERLFQTLFPRLSEKLLWLYQEVERPLSRVLAHMEARGVRLDVPLLEVLSFEAAKELERLEGEVFRLAGHPFNLNSRDQLEKVLFDELGLTPVTRTEKTGKRSTSAAALEALRGVHPIVELILQYRELSKLKSTYLDRLPRLVHPRTGRLHTRFNQTATATGRLSSSDPNLQNIPVRTPLGQHIRKAFVAEEGWLLLAADYSQIELRVLAHLSGDENLKRVFREGKDIHTETAAWMFGVDSALVDPKMRRAAKTVNFGVLYGMSAARLSQELGIDYKEAEAFIERYFQSFPKVRAWIERTLEEGRTRGYVETLFGRRRYVPDLTSRVRSVREAAERMAWNMPVQGTAADLMKIAMVKLFPRLKPLGAHLLLQVHDELVLEVPEDRAEEAKALVKEVMENAYPLDVPLEVEVGVGRDWLEAKQD

SEQ ID NO: 1249 - DNA, 2538 bp, synthetic construct
  misc_feature 1..2538: note = DNA Polymerase Variant
  source 1..2538: mol_type = other DNA
atgcaccatcatcatcatcatggcggtagcggcatgttaccgctgtttgatttggaagaaccaccaaaacgcgtgctgcttgttgacggccatcatctggcgtatcgtaccttctacgcactgagccttacgacctcacgtggtgagcctgtccagatggtgtatgggtttgctcgctccctgctgaaagccctgaaggaagatggtcaagccgtagtagtggttttcgatgcgaaggcaccgtcgtttcgtcacgaagcgtacgaggcctataaagctggccgcgcaccgaccccggaagactttccgcgtcagttagcgctcgtcaaacgcctcgtggatttgctgggattagttcgcttggaagctcctggctacgaggcggacgacgtgctcggtacactggccaagaaagcagaacgtgaaggcatggaggtctgcattcttaccggtgatcgcgatttcttccagctgctgtctgagaaagtgagcgttttgctgcccgatggcacgttagtaaccccgaaagatgtgcaagagaaatatggagttccgccagaacgttgggtggactttcgcgcactgactggtgatcgttcagacaacatcccgggcgttgccgggattggtgaaaagacggcgctgcgcctgctggcagaatggggctcggtggaaaatctgctcaagaaccttgatcgtgtgaaacctgatagcttacgccgcaagatcgaagcccacctggaagacttgcgtctgagtctggatcttgtacgtattcgcaccgatctgccgttggaagtagactttaaagctctgcgtcgtcgcacacccgatttagaggggttacgcgcgttcctcgaagaactggagctgggctccctgctgcatgaattcggtttgttgggcggagagaaaccgcgtgaagaagcaccatggccgccgcccgagggtgcctttgtcggctttcttctgtcacgcaaagagccaatgtgggcggaactgttagctcttgcagccgccgcggaagggcgtgttcaccgcgcgacctctcctgtcgaggccctcgctgacctcaaagaagcacgtggtttcttggcgaaagatttagccgtgcttgcattacgcgaaggcgttgcgctcgatccgacggacgacccgcttttggtggcttatttgctcgatagcgcgaataccaacccggaacgtgtcgcccgtcgttacggcggcgagtttactgaagatgcggcagaacgcgcgttgcttagcgaacgcctcttccagacgttatttccacgtctttcggagaaattactctggctctatcaggaagtcgaacgtccattgagtcgcgtgcttgcccatatggaggctcgcggtgtgcgcttagatgttccgttgttagaagcactcagcttcgaggcggcaaaagaactggaacgtcttgaaggcgaagtctttcgtttagcggggcatcccttcaatctcaactctcgcgaccaattggagaaagtgctctttgatgaattaggtttaacccctgtcacgcgtacagagaagaccggcaaacgttccacttcggcagccgccttggaagcacttcgtggtgtgcacccgatcgtcgagttgattttgcagtatcgcgagctcagcaaactcaaatcaacctatcttgataggttacctcgtcttgttcatccacgtacgggtcgtttacacacccgcttcaatcaaacggcaacagccaccgggcgcttgtcgtcgagtgacccgaacctccagaatattccagtgcgcacgccgctgggccaacacattcgtaaagcgtttgttgcggaagaaggttggttattacttgcggccgattactcccagatcgaacttcgtgtattggcgcatctctctggcgacgagaatcttaaacgcgtgtttcgcgaaggcaaggatattcacactgaaaccgcagcctggatgttcggggtggactcggccttagtggaccccaagatgcgtcgtgccgccaagaccgtcaactttggcgtactctatggtatgtcagcagcacgtcttagtcaggaattgggcattgactacaaagaagctgaagcgtttatcgagcgctatttccaatcctttccgaaagttcgcgcgtggattgaacgtacgctcgaagaaggtcgcactcgcggctatgtggaaacgttattcgggcgtcgtcgctacgttccagatcttacgtctcgtgtccgctcagtgcgcgaagctgctgagcgtatggcctggaatatgcctgttcagggaacagcggcggacctcatgaagatcgccatggtgaaattgtttccgcgcttgaaacccttaggagcccaccttcttctgcaggtgcatgatgaattggtcttggaagtacccgaggatcgcgcagaagaagccaaagcactcgtgaaagaggttatggaatcggcgtatccgttagatgttccgttggaggtcgaagtgggtgtaggccgtgattggcttgaagcgaaacaagactaatga

SEQ ID NO: 1250 - protein, 844 aa, synthetic construct
  REGION 1..844: note = DNA Polymerase Variant
MHHHHHHGGSGMLPLFDLEEPPKRVLLVDGHHLAYRTFYALSLTTSRGEPVQMVYGFARSLLKALKEDGQAVVVVFDAKAPSFRHEAYEAYKAGRAPTPEDFPRQLALVKRLVDLLGLVRLEAPGYEADDVLGTLAKKAEREGMEVCILTGDRDFFQLLSEKVSVLLPDGTLVTPKDVQEKYGVPPERWVDFRALTGDRSDNIPGVAGIGEKTALRLLAEWGSVENLLKNLDRVKPDSLRRKIEAHLEDLRLSLDLVRIRTDLPLEVDFKALRRRTPDLEGLRAFLEELELGSLLHEFGLLGGEKPREEAPWPPPEGAFVGFLLSRKEPMWAELLALAAAAEGRVHRATSPVEALADLKEARGFLAKDLAVLALREGVALDPTDDPLLVAYLLDSANTNPERVARRYGGEFTEDAAERALLSERLFQTLFPRLSEKLLWLYQEVERPLSRVLAHMEARGVRLDVPLLEALSFEAAKELERLEGEVFRLAGHPFNLNSRDQLEKVLFDELGLTPVTRTEKTGKRSTSAAALEALRGVHPIVELILQYRELSKLKSTYLDRLPRLVHPRTGRLHTRFNQTATATGRLSSSDPNLQNIPVRTPLGQHIRKAFVAEEGWLLLAADYSQIELRVLAHLSGDENLKRVFREGKDIHTETAAWMFGVDSALVDPKMRRAAKTVNFGVLYGMSAARLSQELGIDYKEAEAFIERYFQSFPKVRAWIERTLEEGRTRGYVETLFGRRRYVPDLTSRVRSVREAAERMAWNMPVQGTAADLMKIAMVKLFPRLKPLGAHLLLQVHDELVLEVPEDRAEEAKALVKEVMESAYPLDVPLEVEVGVGRDWLEAKQD

SEQ ID NO: 1251 - DNA, 2538 bp, synthetic construct
  misc_feature 1..2538: note = DNA Polymerase Variant
  source 1..2538: mol_type = other DNA
atgcaccatcatcatcatcatggcggtagcggcatgttaccgctgtttgatttggaagaaccaccaaaacgcgtgctgcttgttgacggccatcatctggcgtatcgtaccttctacgcactgagccttacgacctcacgtggtgagcctgtccagatggtgtatgggtttgctcgctccctgctgaaagccctgaaggaagatggtcaagccgtagtagtggttttcgatgcgaaggcaccgtcgtttcgtcacgaagcgtacgaggcctataaagctggccgcgcaccgaccccggaagactttccgcgtcagttagcgctcgtcaaacgcctcgtggatttgctgggattagttcgcttggaagctcctggctacgaggcggacgacgtgctcggtacactggccaagaaagcagaacgtgaaggcatggaggtctgcattcttaccggtgatcgcgatttcttccagctgctgtctgagaaagtgagcgttttgctgcccgatggcacgttagtaaccccgaaagatgtgcaagagaaatatggagttccgccagaacgttgggtggactttcgcgcactgactggtgatcgttcagacaacatcccgggcgttgccgggattggtgaaaagacggcgctgcgcctgctggcagaatggggctcggtggaaaatctgctcaagaaccttgatcgtgtgaaacctgatagcttacgccgcaagatcgaagcccacctggaagacttgcgtctgagtctggatcttgtacgtattcgcaccgatctgccgttggaagtagactttaaagctctgcgtcgtcgcacacccgatttagaggggttacgcgcgttcctcgaagaactggagctgggctccctgctgcatgaattcggtttgttgggcggagagaaaccgcgtgaagaagcaccatggccgccgcccgagggtgcctttgtcggctttcttctgtcacgcaaagagccaatgtgggcggaactgttagctcttgcagccgccgcggaagggcgtgttcaccgcgcgacctctcctgtcgaggccctcgctgacctcaaagaagcacgtggtttcttggcgaaagatttagccgtgcttgcattacgcgaaggcgtcgcgctcgaccctacggacgacccgcttttggtggcttatttgctcgatagcgcgaataccaacccggaacgtgtcgcccgtcgttacggcggcgagtttcgcgaagatgcggcatggcgcgcgttgcttagcgaacgcctcttccagacgttatttccacgtctttcggagaaattactctggctctatcaggaagtcgaacgtccattgagtcgcgtgcttgcccatatggaggctcgcggtgtgcgcttagatgttccgttgttagaagcactcagcttcgaggcggcaaaagaactggaacgtcttgaaggcgaagtctttcgtttagcggggcatcccttcaatctcaactctcgcgaccaattggagaaagtgctctttgatgaattaggtttaacccctgtcacgcgtacagagaagaccggcaaacgttccacttcggcagccgccttggaagcacttcgtggtgtgcacccgatcgtcgagttgattttgcagtatcgcgagctcagcaaactcaaatcaacctatcttgataggttacctcgccttgttcatccacgtacgggtcgtttacacacccgcttcaatcaaacggcaacagccaccgggcgcttgtcgtcgagtgacccgaacctccagaatattccagtgcgcacgccgctgggccaacacattcgtaaagcgtttgttgcggaagaaggttggttattacttgcggccgattactcccagatcgaacttcgtgtattggcgcatctctctggcgacgagaatcttaaacgcgtgtttcgcgaaggcaaggatattcacactgaaaccgcagcctggatgttcggggtggactcggccttagtggaccccaagatgcgtcgtgccgccaagaccgtcaactttggcgtactctatggtatgtcagcagcacgtcttagtcaggaattgggcattgacctgaaagaagctgaagcgtttatcgagcgctatttccaatcctttccgaaagttcgcgcgtggattgaacgtacgctcgaagaaggtcgcactcgcggctatgtggaaacgttattcgggcgtcgtcgctacgttccagatcttacgtctcgtgtccgctcagtgcgcgaagctgctgagcgtatggcctggaatatgcctgttcagggaacagcggcggacctcatgaagatcgccatggtgaaattgtttccgcgcttgaaacccttaggagcccaccttcttctgcaggtgcatgatgaattggtcttggaagtacccgaggatcgcgcagaagaagccaaagcactcgtgaaagaggttatggaaaacgcgtatccgttagatgttccgttggaggtcgaagtgggtgtaggccgtgattggcttgaagcgaaacaagactaatga

SEQ ID NO: 1252 - protein, 844 aa, synthetic construct
  REGION 1..844: note = DNA Polymerase Variant
MHHHHHHGGSGMLPLFDLEEPPKRVLLVDGHHLAYRTFYALSLTTSRGEPVQMVYGFARSLLKALKEDGQAVVVVFDAKAPSFRHEAYEAYKAGRAPTPEDFPRQLALVKRLVDLLGLVRLEAPGYEADDVLGTLAKKAEREGMEVCILTGDRDFFQLLSEKVSVLLPDGTLVTPKDVQEKYGVPPERWVDFRALTGDRSDNIPGVAGIGEKTALRLLAEWGSVENLLKNLDRVKPDSLRRKIEAHLEDLRLSLDLVRIRTDLPLEVDFKALRRRTPDLEGLRAFLEELELGSLLHEFGLLGGEKPREEAPWPPPEGAFVGFLLSRKEPMWAELLALAAAAEGRVHRATSPVEALADLKEARGFLAKDLAVLALREGVALDPTDDPLLVAYLLDSANTNPERVARRYGGEFREDAAWRALLSERLFQTLFPRLSEKLLWLYQEVERPLSRVLAHMEARGVRLDVPLLEALSFEAAKELERLEGEVFRLAGHPFNLNSRDQLEKVLFDELGLTPVTRTEKTGKRSTSAAALEALRGVHPIVELILQYRELSKLKSTYLDRLPRLVHPRTGRLHTRFNQTATATGRLSSSDPNLQNIPVRTPLGQHIRKAFVAEEGWLLLAADYSQIELRVLAHLSGDENLKRVFREGKDIHTETAAWMFGVDSALVDPKMRRAAKTVNFGVLYGMSAARLSQELGIDLKEAEAFIERYFQSFPKVRAWIERTLEEGRTRGYVETLFGRRRYVPDLTSRVRSVREAAERMAWNMPVQGTAADLMKIAMVKLFPRLKPLGAHLLLQVHDELVLEVPEDRAEEAKALVKEVMENAYPLDVPLEVEVGVGRDWLEAKQD

SEQ ID NO: 1253 - DNA, 2538 bp, synthetic construct
  misc_feature 1..2538: note = DNA Polymerase Variant
  source 1..2538: mol_type = other DNA
atgcaccatcatcatcatcatggcggtagcggcatgttaccgctgtttgatttggaagaaccaccaaaacgcgtgctgcttgttgacggccatcatctggcgtatcgtaccttctacgcactgagccttacgacctcacgtggtgagcctgtccagatggtgtatgggtttgctcgctccctgctgaaagccctgaaggaagatggtcaagccgtagtagtggttttcgatgcgaaggcaccgtcgtttcgtcacgaagcgtacgaggcctataaagctggccgcgcaccgaccccggaagactttccgcgtcagttagcgctcgtcaaacgcctcgtggatttgctgggattagttcgcttggaagctcctggctacgaggcggacgacgtgctcggtacactggccaagaaagcagaacgtgaaggcatggaggtctgcattcttaccggtgatcgcgatttcttccagctgctgtctgagaaagtgagcgttttgctgcccgatggcacgttagtaaccccgaaagatgtgcaagagaaatatggagttccgccagaacgttgggtggactttcgcgcactgactggtgatcgttcagacaacatcccgggcgttgccgggattggtgaaaagacggcgctgcgcctgctggcagaatggggctcggtggaaaatctgctcaagaaccttgatcgtgtgaaacctgatagcttacgccgcaagatcgaagcccacctggaagacttgcgtctgagtctggatcttgtacgtattcgcaccgatctgccgttggaagtagactttaaagctctgcgtcgtcgcacacccgatttagaggggttacgcgcgttcctcgaagaactggagctgggctccctgctgcatgaattcggtttgttgggcggagagaaaccgcgtgaagaagcaccatggccgccgcccgagggtgcctttgtcggctttcttctgtcacgcaaagagccaatgtgggcggaactgttagctcttgcagccgccgcggaagggcgtgttcaccgcgcgacctctcctgtcgaggccctcgctgacctcaaagaagcacgtggtttcttggcgaaagatttagccgtgcttgcattacgcgaaggcgttgcgctcgatccgacggacgacccgcttttggtggcttatttgctcgatagcgcgaataccaacccggaacgtgtcgcccgtcgttacggcggcgagtttactgaagatgcggcagaacgcgcgttgcttagcgaacgcctcttccagacgttatttccacgtctttcggagaaattactctggctctatcaggaagtcgaacgtccattgagtcgcgtgcttgcccatatggaggctcgcggtgtgcgcttagatgttccgttgttagaagcactcagcttcgaggcggcaaaagaactggaacgtcttgaaggcgaagtctttcgtttagcggggcatcccttcaatctcaactctcgcgaccaattggagaaagtgctctttgatgaattaggtttaacccctgtcacgcgtacagagaagaccggcaaacgttccacttcggcagccgccttggaagcacttcgtggtgtgcacccgatcgtcgagttgattttgcagtatcgcgagctcagcaaactcaaatcaacctatcttgataggttacctcgtcttgttcatccacgtacgggtcgtttacacacccgcttcaatcaaacggcaacagccaccgggcgcttgtcgtcgagtgacccgaacctccagaatattccagtgcgcacgccgctgggccaacacattcgtaaagcgtttgttgcggaagaaggttggttattacttgcggccgattactcccagatcgaacttcgtgtattggcgcatctctctggcgacgagaatcttaaacgcgtgtttcgcgaaggcaaggatattcacactgaaaccgcagcctggatgttcggggtggactcggccttagtggaccccaagatgcgtcgtgccgccaagaccgtcaactttggcgtactctatggtatgtcagcagcacgtcttagtcaggaattgggcattgactacaaagaagctgaagcgtttatcgagcgctatttccaatcctttccgaaagttcgcgcgtggattgaacgtacgctcgaagaaggtcgcactcgcggctatgtggaaacgttattcgggcgtcgtcgctacgttccagatcttacgtctcgtgtccgctcagtgcgcgaagctgctgagcgtatggcctggaatatgcctgttcagggaacagcggcggacctcatgaagatcgccatggtgaaattgtttccgcgcttgaaacccttaggagcccaccttcttctgcaggtgcatgatgaaattgtcttggaagtacccgaggatcgcgcagaagaagccaaagcactcgtgaaagaggttatggaaaacgcgtatccgttagatgttccgttggaggtcgaagtgggtgtaggccgtgattggcttgaagcgaaacaagactaatga

SEQ ID NO: 1254 - protein, 844 aa, synthetic construct
  REGION 1..844: note = DNA Polymerase Variant
MHHHHHHGGSGMLPLFDLEEPPKRVLLVDGHHLAYRTFYALSLTTSRGEPVQMVYGFARSLLKALKEDGQAVVVVFDAKAPSFRHEAYEAYKAGRAPTPEDFPRQLALVKRLVDLLGLVRLEAPGYEADDVLGTLAKKAEREGMEVCILTGDRDFFQLLSEKVSVLLPDGTLVTPKDVQEKYGVPPERWVDFRALTGDRSDNIPGVAGIGEKTALRLLAEWGSVENLLKNLDRVKPDSLRRKIEAHLEDLRLSLDLVRIRTDLPLEVDFKALRRRTPDLEGLRAFLEELELGSLLHEFGLLGGEKPREEAPWPPPEGAFVGFLLSRKEPMWAELLALAAAAEGRVHRATSPVEALADLKEARGFLAKDLAVLALREGVALDPTDDPLLVAYLLDSANTNPERVARRYGGEFTEDAAERALLSERLFQTLFPRLSEKLLWLYQEVERPLSRVLAHMEARGVRLDVPLLEALSFEAAKELERLEGEVFRLAGHPFNLNSRDQLEKVLFDELGLTPVTRTEKTGKRSTSAAALEALRGVHPIVELILQYRELSKLKSTYLDRLPRLVHPRTGRLHTRFNQTATATGRLSSSDPNLQNIPVRTPLGQHIRKAFVAEEGWLLLAADYSQIELRVLAHLSGDENLKRVFREGKDIHTETAAWMFGVDSALVDPKMRRAAKTVNFGVLYGMSAARLSQELGIDYKEAEAFIERYFQSFPKVRAWIERTLEEGRTRGYVETLFGRRRYVPDLTSRVRSVREAAERMAWNMPVQGTAADLMKIAMVKLFPRLKPLGAHLLLQVHDEIVLEVPEDRAEEAKALVKEVMENAYPLDVPLEVEVGVGRDWLEAKQD

SEQ ID NO: 1255 - DNA, 2538 bp, synthetic construct
  misc_feature 1..2538: note = DNA Polymerase Variant
  source 1..2538: mol_type = other DNA
atgcaccatcatcatcatcatggcggtagcggcatgttaccgctgtttgatttggaagaaccaccaaaacgcgtgctgcttgttgacggccatcatctggcgtatcgtaccttctacgcactgagccttacgacctcacgtggtgagcctgtccagatggtgtatgggtttgctcgctccctgctgaaagccctgaaggaagatggtcaagccgtagtagtggttttcgatgcgcgtgcaccgtcgtttcgtcacgaagcgtacgaggcctataaagctggccgcgcaccgaccccggaagactttccgcgtcagttagcgctcgtcaaacgcctcgtggatttgctgggattagttcgcttggaagctcctggctacgaggcggacgacgtgctcggtacactggccaagaaagcagaacgtgaaggcatggaggtctgcattcttaccggtgatcgcgatttcttccagctgctgtctgagaaagtgagcgttttgctgcccgatggcacgttagtaaccccgaaagatgtgcaagagaaatatggagttccgccagaacgttgggtggactttcgcgcactgactggtgatcgttcagacaacatcccgggcgttgccgggattggtgaaaagacggcgctgcgcctgctggcagaatggggctcggtggaaaatctgctcaagaaccttgatcgtgtgaaacctgatagcttacgccgcaagatcgaagcccacctggaagacttgcgtctgagtctggatcttgtacgtattcgcaccgatctgccgttggaagtagactttaaagctctgcgtcgtcgcacacccgatttagaggggttacgcgcgttcctcgaagaactggagctgggctccctgctgcatgaattcggtttgttgggcggagagaaaccgcgtgaagaagcaccatggccgccgcccgagggtgcctttgtcggctttcttctgtcacgcaaagagccaatgtgggcggaactgttagctcttgcagccgccgcggaagggcgtgttcaccgcgcgacctctcctgtcgaggccctcgctgacctcaaagaagcacgtggtttcttggcgaaagatttagctgtgcttgcattacgcgaaggcgtcgcgctcgatccaacggacgacccgcttgtggtggcttatttgctcgatagcgcgaataccaacccggaacgtgtcgcccgtcgttacggcggcgagtttacggaagatgcggcagaacgcgcgttgcttagcgaacgcctcttccagacgttatttccacgtctttcggagaaattactctggctctatcaggaagtcgaacgtccattgagtcgcgtgcttgcccatatggaggctcgcggtgtgcgcttagatgttccgttgttagaagcactcagcttcgaggcggcaaaagaactggaacgtcttgaaggcgaagtctttcgtttagcggggcatcccttcaatctcaactctcgcgaccaattggagaaagtgctctttgatgaattaggtttaacccctgtcacgcgtacagagaagaccggcaaacgttccacttcggcagccgccttggaagcacttcgtggtgtgcacccgatcgtcgagttgattttgcagtatcgcgagctcagcaaactcaaatcaacctatcttgataggttacctcgccttgttcatccacgtacgggtcgtttacacacccgcttcaatcaaacggcaacagccaccgggcgcttgtcgtcgagtgacccgaacctccagaatattccagtgcgcacgccgctgggccaacacattcgtaaagcgtttgttgcggaagaaggttggttattacttgcggccgattactcccagatcgaacttcgtgtattggcgcatctctctggcgacgagaatcttaaacgcgtgtttcgcgaaggcaaggatattcacactgaaaccgcagcctggatgttcggggtggactcggccttagtggaccccaagatgcgtcgtgccgccaagaccgtcaactttggcgtactctatggtatgtcagcagcacgtcttagtcaggaattgggcattgactataaagaagctgaagcgtttatcgagcgctatttccaatcctttccgaaagttcgcgcgtggattgaacgtacgctcgaagaaggtcgcactcgcggctatgtggaaacgttattcgggcgtcgtcgctacgttccagatcttacgtctcgtgtccgctcagtgcgcgaagctgctgagcgtatggcctggaatatgcctgttcagggaacagcggcggacctcatgaagatcgccatggtgaaattgtttccgcgcttgaaacccttaggagcccaccttcttctgcaggtgcatgatgaattggtcttggaagtacccgaggatcgcgcagaagaagccaaagcactcgtgaaagaggttatggaaaacgcgtatccgttagatgttccgttggaggtcgaagtgggtgtaggccgtgattggcttgaagcgaaacaagactaatga

SEQ ID NO: 1256 - protein, 844 aa, synthetic construct
  REGION 1..844: note = DNA Polymerase Variant
MHHHHHHGGSGMLPLFDLEEPPKRVLLVDGHHLAYRTFYALSLTTSRGEPVQMVYGFARSLLKALKEDGQAVVVVFDARAPSFRHEAYEAYKAGRAPTPEDFPRQLALVKRLVDLLGLVRLEAPGYEADDVLGTLAKKAEREGMEVCILTGDRDFFQLLSEKVSVLLPDGTLVTPKDVQEKYGVPPERWVDFRALTGDRSDNIPGVAGIGEKTALRLLAEWGSVENLLKNLDRVKPDSLRRKIEAHLEDLRLSLDLVRIRTDLPLEVDFKALRRRTPDLEGLRAFLEELELGSLLHEFGLLGGEKPREEAPWPPPEGAFVGFLLSRKEPMWAELLALAAAAEGRVHRATSPVEALADLKEARGFLAKDLAVLALREGVALDPTDDPLVVAYLLDSANTNPERVARRYGGEFTEDAAERALLSERLFQTLFPRLSEKLLWLYQEVERPLSRVLAHMEARGVRLDVPLLEALSFEAAKELERLEGEVFRLAGHPFNLNSRDQLEKVLFDELGLTPVTRTEKTGKRSTSAAALEALRGVHPIVELILQYRELSKLKSTYLDRLPRLVHPRTGRLHTRFNQTATATGRLSSSDPNLQNIPVRTPLGQHIRKAFVAEEGWLLLAADYSQIELRVLAHLSGDENLKRVFREGKDIHTETAAWMFGVDSALVDPKMRRAAKTVNFGVLYGMSAARLSQELGIDYKEAEAFIERYFQSFPKVRAWIERTLEEGRTRGYVETLFGRRRYVPDLTSRVRSVREAAERMAWNMPVQGTAADLMKIAMVKLFPRLKPLGAHLLLQVHDELVLEVPEDRAEEAKALVKEVMENAYPLDVPLEVEVGVGRDWLEAKQD

SEQ ID NO: 1257 - DNA, 2538 bp, synthetic construct
  misc_feature 1..2538: note = DNA Polymerase Variant
  source 1..2538: mol_type = other DNA
atgcaccatcatcatcatcatggcggtagcggcatgttaccgctgtttgatttggaagaaccaccaaaacgcgtgctgcttgttgacggccatcatctggcgtatcgtaccttctacgcactgagccttacgacctcacgtggtgagcctgtccagatggtgtatgggtttgctcgctccctgctgaaagccctgaaggaagatggtcaagccgtagtagtggttttcgatgcgaaggcaccgtcgtttcgtcacgaagcgtacgaggcctataaagctggccgcgcaccgaccccggaagactttccgcgtcagttagcgctcgtcaaacgcctcgtggatttgctgggattagttcgcttggaagctcctggctacgaggcggacgacgtgctcggtacactggccaagaaagcagaacgtgaaggcatggaggtctgcattcttaccggtgatcgcgatttcttccagctgctgtctgagaaagtgagcgttttgctgcccgatggcacgttagtaaccccgaaagatgtgcaagagaaatatggagttccgccagaacgttgggtggactttcgcgcactgactggtgatcgttcagacaacatcccgggcgttgccgggattggtgaaaagacggcgctgcgcctgctggcagaatggggctcggtggaaaatctgctcaagaaccttgatcgtgtgaaacctgatagcttacgccgcaagatcgaagcccacctggaagacttgcgtctgagtctggatcttgtacgtattcgcaccgatctgccgttggaagtagactttaaagctctgcgtcgtcgcacacccgatttagaggggttacgcgcgttcctcgaagaactggagctgggctccctgctgcatgaattcggtttgttgggcggagagaaaccgcgtgaagaagcaccatggccgccgcccgagggtgcctttgtcggctttcttctgtcacgcaaagagccaatgtgggcggaactgttagctcttgcagccgccgcggaagggcgtgttcaccgcgcgacctctcctgtcgaggccctcgctgacctcaaagaagcacgtggtttcttggcgaaagatttagccgtgcttgcattacgcgaaggcgttgcgctcgatccgacggacgacccgcttttggtggcttatttgctcgatagcgcgaataccaacccggaacgtgtcgcccgtcgttacggcggcgagtttactgaagatgcggcagaacgcgcgttgcttagcgaacgcctcttccagacgttatttccacgtctttcggagaaattactctggctctatcaggaagtcgaacgtccattgagtcgcgtgcttgcccatatggaggctcgcggtgtgcgcttagatgttccgttgttagaaactctcagcttcgaggcggcaaaagaactggaacgtcttgaaggcgaagtctttcgtttagcggggcatcccttcaatctcaactctcgcgaccaattggagaaagtgctctttgatgaattaggtttaacccctgtcacgcgtacagagaagaccggcaaacgttccacttcggcagccgccttggaagcacttcgtggtgtgcacccgatcgtcgagttgattttgcagtatcgcgagctcagcaaactcaaatcaacctatcttgataggttacctcgtcttgttcatccacgtacgggtcgtttacacacccgcttcaatcaaacggcaacagccaccgggcgcttgtcgtcgagtgacccgaacctccagaatattccagtgcgcacgccgctgggccaacacattcgtaaagcgtttgttgcggaagaaggttggttattacttgcggccgattactcccagatcgaacttcgtgtattggcgcatctctctggcgacgagaatcttaaacgcgtgtttcgcgaaggcaaggatattcacactgaaaccgcagcctggatgttcggggtggactcggccttagtggaccccaagatgcgtcgtgccgccaagaccgtcaactttggcgtactctatggtatgtcagcagcacgtcttagtcaggaattgggcattgactacaaagaagctgaagcgtttatcgagcgctatttccaatcctttccgaaagttcgcgcgtggattgaacgtacgctcgaagaaggtcgcactcgcggctatgtggaaacgttattcgggcgtcgtcgctacgttccagatcttacgtctcgtgtccgctcagtgcgcgaagctgctgagcgtatggcctggaatatgcctgttcagggaacagcggcggacctcatgaagatcgccatggtgaaattgtttccgcgcttgaaacccttaggagcccaccttcttctgcaggtgcatgatgaattggtcttggaagtacccgaggatcgcgcagaagaagccaaagcactcgtgaaagaggttatggaaaacgcgtatccgttagatgttccgttggaggtcgaagtgggtgtaggccgtgattggcttgaagcgaaacaagactaatga

SEQ ID NO: 1258 - protein, 844 aa, synthetic construct
  REGION 1..844: note = DNA Polymerase Variant
MHHHHHHGGSGMLPLFDLEEPPKRVLLVDGHHLAYRTFYALSLTTSRGEPVQMVYGFARSLLKALKEDGQAVVVVFDAKAPSFRHEAYEAYKAGRAPTPEDFPRQLALVKRLVDLLGLVRLEAPGYEADDVLGTLAKKAEREGMEVCILTGDRDFFQLLSEKVSVLLPDGTLVTPKDVQEKYGVPPERWVDFRALTGDRSDNIPGVAGIGEKTALRLLAEWGSVENLLKNLDRVKPDSLRRKIEAHLEDLRLSLDLVRIRTDLPLEVDFKALRRRTPDLEGLRAFLEELELGSLLHEFGLLGGEKPREEAPWPPPEGAFVGFLLSRKEPMWAELLALAAAAEGRVHRATSPVEALADLKEARGFLAKDLAVLALREGVALDPTDDPLLVAYLLDSANTNPERVARRYGGEFTEDAAERALLSERLFQTLFPRLSEKLLWLYQEVERPLSRVLAHMEARGVRLDVPLLETLSFEAAKELERLEGEVFRLAGHPFNLNSRDQLEKVLFDELGLTPVTRTEKTGKRSTSAAALEALRGVHPIVELILQYRELSKLKSTYLDRLPRLVHPRTGRLHTRFNQTATATGRLSSSDPNLQNIPVRTPLGQHIRKAFVAEEGWLLLAADYSQIELRVLAHLSGDENLKRVFREGKDIHTETAAWMFGVDSALVDPKMRRAAKTVNFGVLYGMSAARLSQELGIDYKEAEAFIERYFQSFPKVRAWIERTLEEGRTRGYVETLFGRRRYVPDLTSRVRSVREAAERMAWNMPVQGTAADLMKIAMVKLFPRLKPLGAHLLLQVHDELVLEVPEDRAEEAKALVKEVMENAYPLDVPLEVEVGVGRDWLEAKQD

SEQ ID NO: 1259 - DNA, 2538 bp, synthetic construct
  misc_feature 1..2538: note = DNA Polymerase Variant
  source 1..2538: mol_type = other DNA
atgcaccatcatcatcatcatggcggtagcggcatgttaccgctgtttgatttggaagaaccaccaaaacgcgtgctgcttgttgacggccatcatctggcgtatcgtaccttctacgcactgagccttacgacctcacgtggtgagcctgtccagatggtgtatgggtttgctcgctccctgctgaaagccctgaaggaagatggtcaagccgtagtagtggttttcgatgcgaaggcaccgtcgtttcgtcacgaagcgtacgaggcctataaagctggccgcgcaccgaccccggaagactttccgcgtcagttagcgctcgtcaaacgcctcgtggatttgctgggattagttcgcttggaagctcctggctacgaggcggacgacgtgctcggtacactggccaagaaagcagaacgtgaaggcatggaggtctgcattcttaccggtgatcgcgatttcttccagctgctgtctgagaaagtgagcgttttgctgcccgatggcacgttagtaaccccgaaagatgtgcaagagaaatatggagttccgccagaacgttgggtggactttcgcgcactgactggtgatcgttcagacaacatcccgggcgttgccgggattggtgaaaagacggcgctgcgcctgctggcagaatggggctcggtggaaaatctgctcaagaaccttgatcgtgtgaaacctgatagcttacgccgcaagatcgaagcccacctggaagacttgcgtctgagtctggatcttgtacgtattcgcaccgatctgccgttggaagtagactttaaagctctgcgtcgtcgcacacccgatttagaggggttacgcgcgttcctcgaagaactggagctgggctccctgctgcatgaattcggtttgttgggcggagagaaaccgcgtgaagaagcaccatggccgccgcccgagggtgcctttgtcggctttcttctgtcacgcaaagagccaatgtgggcggaactgttagctcttgcagccgccgcggaagggcgtgttcaccgcgcgacctctcctgtcgaggccctcgctgacctcaaagaagcacgtggtttcttggcgaaagatttagccgtgcttgcattacgcgaaggcgttgcgctcgatccgacggacgacccgcttttggtggcttatttgctcgatagcgcgaataccaacccggaacgtgtcgcccgtcgttacggcggcgagtttactgaagatgcggcagaacgcgcgttgcttagcgaacgcctcttccagacgttatttccacgtctttcggagaaattactctggctctatcaggaagtcgaacgtccattgagtcgcgtgcttgcccatatggaggctcgcggtgtgcgcttagatgttccgttgttagaagcactcagcttcgaggcggcaaaagaactggaacgtcttgaaggcgaagtctttcgtttagcggggcatcccttcaatctcaactctcgcgaccaattggagaaagtgctctttgatgaattaggtttaacccctgtcacgcgtacagagaagaccggcaaacgttccacttcggcagccgccttggaagcacttcgtggtgtgcacccgatcgtcgagttgattttgcagtatcgcgagctcagcaaactcaaatcaacctatcttgataggttacctcgtcttgttcatccacgtacgggtcgtttacacacccgcttcaatcaaacggcaacagccaccgggcgcttgtcgtcgagtgacccgaacctccagaatattccagtgcgcacgccgctgggccaacacattcgtaaagcgtttgttgcggaagaaggttggttattacttgcggccgattactcccagatcgaacttcgtgtattggcgcatctctctggcgacgagaatcttaaacgcgtgtttcgcgaaggcaaggatattcaccaggaaaccgcagcctggatgttcggggtggactcggccttagtggaccccaagatgcgtcgtgccgccaagaccgtcaactttggcgtactctatggtatgtcagcagcacgtcttagtcaggaattgggcattgactacaaagaagctgaagcgtttatcgagcgctatttccaatcctttccgaaagttcgcgcgtggattgaacgtacgctcgaagaaggtcgcactcgcggctatgtggaaacgttattcgggcgtcgtcgctacgttccagatcttacgtctcgtgtccgctcagtgcgcgaagctgctgagcgtatggcctggaatatgcctgttcagggaacagcggcggacctcatgaagatcgccatggtgaaattgtttccgcgcttgaaacccttaggagcccaccttcttctgcaggtgcatgatgaattggtcttggaagtacccgaggatcgcgcagaagaagccaaagcactcgtgaaagaggttatggaaaacgcgtatccgttagatgttccgttggaggtcgaagtgggtgtaggccgtgattggcttgaagcgaaacaagactaatga

SEQ ID NO: 1260 - protein, 844 aa, synthetic construct
  REGION 1..844: note = DNA Polymerase Variant
MHHHHHHGGSGMLPLFDLEEPPKRVLLVDGHHLAYRTFYALSLTTSRGEPVQMVYGFARSLLKALKEDGQAVVVVFDAKAPSFRHEAYEAYKAGRAPTPEDFPRQLALVKRLVDLLGLVRLEAPGYEADDVLGTLAKKAEREGMEVCILTGDRDFFQLLSEKVSVLLPDGTLVTPKDVQEKYGVPPERWVDFRALTGDRSDNIPGVAGIGEKTALRLLAEWGSVENLLKNLDRVKPDSLRRKIEAHLEDLRLSLDLVRIRTDLPLEVDFKALRRRTPDLEGLRAFLEELELGSLLHEFGLLGGEKPREEAPWPPPEGAFVGFLLSRKEPMWAELLALAAAAEGRVHRATSPVEALADLKEARGFLAKDLAVLALREGVALDPTDDPLLVAYLLDSANTNPERVARRYGGEFTEDAAERALLSERLFQTLFPRLSEKLLWLYQEVERPLSRVLAHMEARGVRLDVPLLEALSFEAAKELERLEGEVFRLAGHPFNLNSRDQLEKVLFDELGLTPVTRTEKTGKRSTSAAALEALRGVHPIVELILQYRELSKLKSTYLDRLPRLVHPRTGRLHTRFNQTATATGRLSSSDPNLQNIPVRTPLGQHIRKAFVAEEGWLLLAADYSQIELRVLAHLSGDENLKRVFREGKDIHQETAAWMFGVDSALVDPKMRRAAKTVNFGVLYGMSAARLSQELGIDYKEAEAFIERYFQSFPKVRAWIERTLEEGRTRGYVETLFGRRRYVPDLTSRVRSVREAAERMAWNMPVQGTAADLMKIAMVKLFPRLKPLGAHLLLQVHDELVLEVPEDRAEEAKALVKEVMENAYPLDVPLEVEVGVGRDWLEAKQD

SEQ ID NO: 1261 - DNA, 2538 bp, synthetic construct
  misc_feature 1..2538: note = DNA Polymerase Variant
  source 1..2538: mol_type = other DNA
atgcaccatcatcatcatcatggcggtagcggcatgttaccgctgtttgatttggaagaaccaccaaaacgcgtgctgcttgttgacggccatcatctggcgtatcgtaccttctacgcactgagccttacgacctcacgtggtgagcctgtccagatggtgtatgggtttgctcgctccctgctgaaagccctgaaggaagatggtcaagccgtagtagtggttttcgatgcgaaggcaccgtcgtttcgtcacgaagcgtacgaggcctataaagctggccgcgcaccgaccccggaagactttccgcgtcagttagcgctcgtcaaacgcctcgtggatttgctgggattagttcgcttggaagctcctggctacgaggcggacgacgtgctcggtacactggccaagaaagcagaacgtgaaggcatggaggtctgcattcttaccggtgatcgcgatttcttccagctgctgtctgagaaagtgagcgttttgctgcccgatggcacgttagtaaccccgaaagatgtgcaagagaaatatggagttccgccagaacgttgggtggactttcgcgcactgactggtgatcgttcagacaacatcccgggcgttgccgggattggtgaaaagacggcgctgcgcctgctggcagaatggggctcggtggaaaatctgctcaagaaccttgatcgtgtgaaacctgatagcttacgccgcaagatcgaagcccacctggaagacttgcgtctgagtctggatcttgtacgtattcgcaccgatctgccgttggaagtagactttaaagctctgcgtcgtcgcacacccgatttagaggggttacgcgcgttcctcgaagaactggagctgggctccctgctgcatgaattcggtttgttgggcggagagaaaccgcgtgaagaagcaccatggccgccgcccgagggtgcctttgtcggctttcttctgtcacgcaaagagccaatgtgggcggaactgttagctcttgcagccgccgcggaagggcgtgttcaccgcgcgacctctcctgtcgaggccctcgctgacctcaaagaagcacgtggtttcttggcgaaagatttagccgtgcttgcattacgcgaaggcgttgcgctcgatccgacggacgacccgcttttggtggcttatttgctcgatagcgcgaataccaacccggaacgtgtcgcccgtcgttacggcggcgagtttactgaagatgcggcagaacgcgcgttgcttagcgaacgcctcttccagacgttatttccacgtctttcggagaaattactctggctctatcaggaagtcgaacgtccattgagtcgcgtgcttgcccatatggaggctcgcggtgtgcgcttagatgttccgttgttagaagcactcagcttcgaggcggcaaaagaactggaacgtcttgaaggcgaagtctttcgtttagcggggcatcccttcaatctcaactctcgcgaccaattggagaaagtgctctttgatgaattaggtttaacccctgtcacgcgtacagagaagaccggcaaacgttccacttcggcagccgccttggaagcacttcgtggtgtgcacccgatcgtcgagttgattttgcagtatcgcgagctcagcaaactcaaatcaacctatcttgataggttacctcgtcttgttcatccacgtacgggtcgtttacacacccgcttcaatcaaacggcaacagccaccgggcgcttgtcgtcgagtgacccgaacctccagaatattccagtgcgcacgccgctgggccaacacattcgtaaagcgtttgttgcggaagaaggttggttattacttgcggccgattactcccagatcgaacttcgtgtattggcgcatctctctggcgacgagaatcttaaacgcgtgtttcgcgaaggcaaggatattcacactgaaaccgcagcctggatgttcggggtggactcggccttagtggaccccaagatgcgtcgtgccgccaagaccgtcaactttggcgtactctatggtatgtcagcagcacgtcttagtcaggaattgggcattgactacaaagaagctgaagcgtttatcgagcgctatttccaatcctttccgaaagttcgcgcgtggattgaacgtacgctcgaagaaggtcgcactcgcggctatgtggaaacgttattcgggcgtcgtcgctacgttccagatcttacgtctcgtgtccgctcagtgcgcgaagctgctgagcgtatggcctggaatatgcctgttcagggaacagcggcggacctcatgaagatcgccatggtgaaattgtttccgcgcttgaaacccttaggagcccaccttcttctgcaggtgcatgatgaattggtcttggaagtacccgaggatcgcgcagaagaagccaaagcactcgtgaaagaggttatggaaaacgcgtatccgttagaggttccgttggaggtcgaagtgggtgtaggccgtgattggcttgaagcgaaacaagactaatga

SEQ ID NO: 1262 - protein, 844 aa, synthetic construct
  REGION 1..844: note = DNA Polymerase Variant
MHHHHHHGGSGMLPLFDLEEPPKRVLLVDGHHLAYRTFYALSLTTSRGEPVQMVYGFARSLLKALKEDGQAVVVVFDAKAPSFRHEAYEAYKAGRAPTPEDFPRQLALVKRLVDLLGLVRLEAPGYEADDVLGTLAKKAEREGMEVCILTGDRDFFQLLSEKVSVLLPDGTLVTPKDVQEKYGVPPERWVDFRALTGDRSDNIPGVAGIGEKTALRLLAEWGSVENLLKNLDRVKPDSLRRKIEAHLEDLRLSLDLVRIRTDLPLEVDFKALRRRTPDLEGLRAFLEELELGSLLHEFGLLGGEKPREEAPWPPPEGAFVGFLLSRKEPMWAELLALAAAAEGRVHRATSPVEALADLKEARGFLAKDLAVLALREGVALDPTDDPLLVAYLLDSANTNPERVARRYGGEFTEDAAERALLSERLFQTLFPRLSEKLLWLYQEVERPLSRVLAHMEARGVRLDVPLLEALSFEAAKELERLEGEVFRLAGHPFNLNSRDQLEKVLFDELGLTPVTRTEKTGKRSTSAAALEALRGVHPIVELILQYRELSKLKSTYLDRLPRLVHPRTGRLHTRFNQTATATGRLSSSDPNLQNIPVRTPLGQHIRKAFVAEEGWLLLAADYSQIELRVLAHLSGDENLKRVFREGKDIHTETAAWMFGVDSALVDPKMRRAAKTVNFGVLYGMSAARLSQELGIDYKEAEAFIERYFQSFPKVRAWIERTLEEGRTRGYVETLFGRRRYVPDLTSRVRSVREAAERMAWNMPVQGTAADLMKIAMVKLFPRLKPLGAHLLLQVHDELVLEVPEDRAEEAKALVKEVMENAYPLEVPLEVEVGVGRDWLEAKQD

SEQ ID NO: 1263 - DNA, 2538 bp, synthetic construct
  misc_feature 1..2538: note = DNA Polymerase Variant
  source 1..2538: mol_type = other DNA
atgcaccatcatcatcatcatggcggtagcggcatgttaccgctgtttgatttggaagaaccaccaaaacgcgtgctgcttgttgacggccatcatctggcgtatcgtaccttctacgcactgagccttacgacctcacgtggtgagcctactcagatggtgtatgggtttgctcgctccctgctgaaagccctgaaggaagatggtcaagccgtagtagtggttttcgatgcgaaggcaccgtcgtttcgtcacgaagcgtacgaggcctataaagctggccgcgcaccgaccccggaagactttccgcgtcagttagcgctcgtcaaacgcctcgtggatttgctgggattagttcgcttggaagctcctggctacgaggcggacgacgtgctcggtacactggccaagaaagcagaacgtgaaggcatggaggtctgcattcttaccggtgatcgcgatttcttccagctgctgtctgagaaagtgagcgttttgctgcccgatggcacgttagtaaccccgaaagatgtgcaagagaaatatggagttccgccagaacgttgggtggactttcgcgcactgactggtgatcgttcagacaacatcccgggcgttgccgggattggtgaaaagacggcgctgcgcctgctggcagaatggggctcggtggaaaatctgctcaagaaccttgatcgtgtgaaacctgatagcttacgccgcaagatcgaagcccacctggaagacttgcgtctgagtctggatcttgtacgtattcgcaccgatctgccgttggaagtagactttaaagctctgcgtcgtcgcacacccgatttagaggggttacgcgcgttcctcgaagaactggagctgggctccctgctgcatgaattcggtttgttgggcggagagaaaccgcgtgaagaagcaccatggccgccgcccgagggtgcctttgtcggctttcttctgtcacgcaaagagccaatgtgggcggaactgttagctcttgcagccgccgcggaagggcgtgttcaccgcgcgacctctcctgtcgaggccctcgctgacctcaaagaagcacgtggtttcttggcgaaagatttagccgtgcttgcattacgcgaaggcgttgcgctcgatccgacggacgacccgcttttggtggcttatttgctcgatagcgcgaataccaacccggaacgtgtcgcccgtcgttacggcggcgagtttactgaagatgcggcagaacgcgcgttgcttagcgaacgcctcttccagacgttatttccacgtctttcggagaaattactctggctctatcaggaagtcgaacgtccattgagtcgcgtgcttgcccatatggaggctcgcggtgtgcgcttagatgttccgttgttagaagcactcagcttcgaggcggcaaaagaactggaacgtcttgaaggcgaagtctttcgtttagcggggcatcccttcaatctcaactctcgcgaccaattggagaaagtgctctttgatgaattaggtttaacccctgtcacgcgtacagagaagaccggcaaacgttccacttcggcagccgccttggaagcacttcgtggtgtgcacccgatcgtcgagttgattttgcagtatcgcgagctcagcaaactcaaatcaacctatcttgataggttacctcgtcttgttcatccacgtacgggtcgtttacacacccgcttcaatcaaacggcaacagccaccgggcgcttgtcgtcgagtgacccgaacctccagaatattccagtgcgcacgccgctgggccaacacattcgtaaagcgtttgttgcggaagaaggttggttattacttgcggccgattactcccagatcgaacttcgtgtattggcgcatctctctggcgacgagaatcttaaacgcgtgtttcgcgaaggcaaggatattcacactgaaaccgcagcctggatgttcggggtggactcggccttagtggaccccaagatgcgtcgtgccgccaagaccgtcaactttggcgtactctatggtatgtcagcagcacgtcttagtcaggaattgggcattgactacaaagaagctgaagcgtttatcgagcgctatttccaatcctttccgaaagttcgcgcgtggattgaacgtacgctcgaagaaggtcgcactcgcggctatgtggaaacgttattcgggcgtcgtcgctacgttccagatcttacgtctcgtgtccgctcagtgcgcgaagctgctgagcgtatggcctggaatatgcctgttcagggaacagcggcggacctcatgaagatcgccatggtgaaattgtttccgcgcttgaaacccttaggagcccaccttcttctgcaggtgcatgatgaattggtcttggaagtacccgaggatcgcgcagaagaagccaaagcactcgtgaaagaggttatggaaaacgcgtatccgttagatgttccgttggaggtcgaagtgggtgtaggccgtgattggcttgaagcgaaacaagactaatga

SEQ ID NO: 1264 - protein, 844 aa, synthetic construct
  REGION 1..844: note = DNA Polymerase Variant
MHHHHHHGGSGMLPLFDLEEPPKRVLLVDGHHLAYRTFYALSLTTSRGEPTQMVYGFARSLLKALKEDGQAVVVVFDAKAPSFRHEAYEAYKAGRAPTPEDFPRQLALVKRLVDLLGLVRLEAPGYEADDVLGTLAKKAEREGMEVCILTGDRDFFQLLSEKVSVLLPDGTLVTPKDVQEKYGVPPERWVDFRALTGDRSDNIPGVAGIGEKTALRLLAEWGSVENLLKNLDRVKPDSLRRKIEAHLEDLRLSLDLVRIRTDLPLEVDFKALRRRTPDLEGLRAFLEELELGSLLHEFGLLGGEKPREEAPWPPPEGAFVGFLLSRKEPMWAELLALAAAAEGRVHRATSPVEALADLKEARGFLAKDLAVLALREGVALDPTDDPLLVAYLLDSANTNPERVARRYGGEFTEDAAERALLSERLFQTLFPRLSEKLLWLYQEVERPLSRVLAHMEARGVRLDVPLLEALSFEAAKELERLEGEVFRLAGHPFNLNSRDQLEKVLFDELGLTPVTRTEKTGKRSTSAAALEALRGVHPIVELILQYRELSKLKSTYLDRLPRLVHPRTGRLHTRFNQTATATGRLSSSDPNLQNIPVRTPLGQHIRKAFVAEEGWLLLAADYSQIELRVLAHLSGDENLKRVFREGKDIHTETAAWMFGVDSALVDPKMRRAAKTVNFGVLYGMSAARLSQELGIDYKEAEAFIERYFQSFPKVRAWIERTLEEGRTRGYVETLFGRRRYVPDLTSRVRSVREAAERMAWNMPVQGTAADLMKIAMVKLFPRLKPLGAHLLLQVHDELVLEVPEDRAEEAKALVKEVMENAYPLDVPLEVEVGVGRDWLEAKQD

SEQ ID NO: 1265 - DNA, 2538 bp, synthetic construct
  misc_feature 1..2538: note = DNA Polymerase Variant
  source 1..2538: mol_type = other DNA
atgcaccatcatcatcatcatggcggtagcggcatgttaccgctgtttgatttggaagaaccaccaaaacgcgtgctgcttgttgacggccatcatctggcgtatcgtaccttctacgcactgagccttacgacctcacgtggtgagcctgtccagatggtgtatgggtttgctcgctccctgctgaaagccctgaaggaagatggtcaagccgtagtagtggttttcgatgcgaaggcaccgtcgtttcgtcacgaagcgtacgaggcctataaagctggccgcgcaccgaccccggaagactttccgcgtcagttagcgctcgtcaaacgcctcgtggatttgctgggattagttcgcttggaagctcctggctacgaggcggacgacgtgctcggtacactggccaagaaagcagaacgtgaaggcatggaggtctgcattcttaccggtgatcgcgatttcttccagctgctgtctgagaaagtgagcgttttgctgcccgatggcacgttagtaaccccgaaagatgtgcaagagaaatatggagttccgccagaacgttgggtggactttcgcgcactgactggtgatcgttcagacaacatcccgggcgttgccgggattggtgaaaagacggcgctgcgcctgctggcagaatggggctcggtggaaaatctgctcaagaaccttgatcgtgtgaaacctgatagcttacgccgcaagatcgaagcccacctggaagacttgcgtctgagtctggatcttgtacgtattcgcaccgatctgccgttggaagtagactttaaagctctgcgtcgtcgcacacccgatttagaggggttacgcgcgttcctcgaagaactggagctgggctccctgctgcatgaattcggtttgttgggcggagagaaaccgcgtgaagaagcaccatggccgccgcccgagggtgcctttgtcggctttcttctgtcacgcaaagagccaatgtgggcggaactgttagctcttgcagccgccgcggaagggcgtgttcaccgcgcgacctctcctgtcgaggccctcgctgacctcaaagaagcacgtggtttcttggcgaaagatttagccgtgcttgcattacgcgaaggcgttgcgctcgatccgacggacgacccgcttttggtggcttatttgctcgatagcgcgaataccaacccggaacgtgtcgcccgtcgttacggcggcgagtttactgaagatgcggcagaacgcgcgttgcttagcgaacgcctcttccagacgttatttccacgtctttcggagaaattactctggctctatcaggaagtcgaacgtccattgagtcgcgtgcttgcccatatggaggctcgcggtgtgcgcttagatgttccgttgttagaagcactcagcttcgaggcggcaaaagaactggaacgtcttgaaggcgaagtctttcgtttagcggggcatcccttcaatctcaactctcgcgaccaattggagaaagtgctctttgatgaattaggtttaacccctgtcacgcgtacagagaagaccggcaaacgttccacttcggcagccgccttggaagcacttcgtggtgtgcacccgatcgtcgagttgattttgcagtatcgcgagctcagcaaactcaaatcaacctatcttgataggttacctcgtcttgttcatccacgtacgggtcgtttacacacccgcttcaatcaaacggcaacagccaccgggcgcttgtcgtcgagtgacccgaacctccagaatattccagtgcgcacgccgctgggccaacacattcgtaaagcgtttgttgcggaagaaggttggttattacttgcggccgattactcccagatcgaacttcgtgtattggcgcatctctctggcgacgagaatcttaaacgcgtgtttcgcgaaggcaaggatattcacactgaaaccgcagcctggatgttcggggtggactcggccttagtggaccccaagatgcgtcgtgccgccaagaccgtcaactttggcgtactctatggtatgtcagcagcacgtcttagtcaggaattgggcattgactacaaagaagctgaagcgtttatcgagcgctatttccaatcctttccgaaagttcgcgcgtggattgaacgtacgctcgaagaaggtcgcactcgcggctatgtggaaacgttattcgggcgtcgtcgctacgttccagatcttacgtctcgtgtccgctcagtgcgcgaagctgctgagcgtatggcctggaatatgcctgttcagggaacagcggcggacctcatgaagatcgccatggtgaaattgtttccgcgcttgaaacccttaatggcccaccttcttctgcaggtgcatgatgaattggtcttggaagtacccgaggatcgcgcagaagaagccaaagcactcgtgaaagaggttatggaaaacgcgtatccgttagatgttccgttggaggtcgaagtgggtgtaggccgtgattggcttgaagcgaaacaagactaatga

SEQ ID NO: 1266 - protein, 844 aa, synthetic construct
  REGION 1..844: note = DNA Polymerase Variant
MHHHHHHGGSGMLPLFDLEEPPKRVLLVDGHHLAYRTFYALSLTTSRGEPVQMVYGFARSLLKALKEDGQAVVVVFDAKAPSFRHEAYEAYKAGRAPTPEDFPRQLALVKRLVDLLGLVRLEAPGYEADDVLGTLAKKAEREGMEVCILTGDRDFFQLLSEKVSVLLPDGTLVTPKDVQEKYGVPPERWVDFRALTGDRSDNIPGVAGIGEKTALRLLAEWGSVENLLKNLDRVKPDSLRRKIEAHLEDLRLSLDLVRIRTDLPLEVDFKALRRRTPDLEGLRAFLEELELGSLLHEFGLLGGEKPREEAPWPPPEGAFVGFLLSRKEPMWAELLALAAAAEGRVHRATSPVEALADLKEARGFLAKDLAVLALREGVALDPTDDPLLVAYLLDSANTNPERVARRYGGEFTEDAAERALLSERLFQTLFPRLSEKLLWLYQEVERPLSRVLAHMEARGVRLDVPLLEALSFEAAKELERLEGEVFRLAGHPFNLNSRDQLEKVLFDELGLTPVTRTEKTGKRSTSAAALEALRGVHPIVELILQYRELSKLKSTYLDRLPRLVHPRTGRLHTRFNQTATATGRLSSSDPNLQNIPVRTPLGQHIRKAFVAEEGWLLLAADYSQIELRVLAHLSGDENLKRVFREGKDIHTETAAWMFGVDSALVDPKMRRAAKTVNFGVLYGMSAARLSQELGIDYKEAEAFIERYFQSFPKVRAWIERTLEEGRTRGYVETLFGRRRYVPDLTSRVRSVREAAERMAWNMPVQGTAADLMKIAMVKLFPRLKPLMAHLLLQVHDELVLEVPEDRAEEAKALVKEVMENAYPLDVPLEVEVGVGRDWLEAKQD

SEQ ID NO: 1267 - DNA, 2538 bp, synthetic construct
  misc_feature 1..2538: note = DNA Polymerase Variant
  source 1..2538: mol_type = other DNA
atgcaccatcatcatcatcatggcggtagcggcatgttaccgctgtttgatttggaagaaccaccaaaacgcgtgctgcttgttgacggccatcatctggcgtatcgtaccttctacgcactgagccttacgacctcacgtggtgagcctgtccagatggtgtatgggtttgctcgctccctgctgaaagccctgaaggaagatggtcaagccgtagtagtggttttcgatgcgaaagcaccgtcgtttcgtcacgaagcgtacgaggcctataaagctggccgcgcaccgaccccggaagactttccgcgtcagttagcgctcgtcaaacgcctcgtggatttgctgggattagttcgcttggaagctcctggctacgaggcggacgacgtgctcggtacactggccaagaaagcagaacgtgaaggcatggaggtctgcattcttaccggtgatcgcgatttcttccagctgctgtctgagaaagtgagcgttttgctgcccgatggcacgttagtaaccccgaaagatgtgcaagagaaatatggagttccgccagaacgttgggtggactttcgcgcactgactggtgatcgttcagacaacatcccgggcgttgccgggattggtgaaaagacggcgctgcgcctgctggcagaatggggctcggtggaaaatctgctcaagaaccttgatcgtgtgaaacctgatagcttacgccgcaagatcgaagcccacctggaagacttgcgtctgagtctggatcttgtacgtattcgcaccgatctgccgttggaagtagactttaaagctctgcgtcgtcgcacacccgatttagaggggttacgcgcgttcctcgaagaactggagctgggctccctgctgcatgaattcggtttgttgggcggagagaaaccgcgtgaagaagcaccatggccgccgcccgagggtgcctttgtcggctttcttctgtcacgcaaagagccaatgtgggcggaactgttagctcttgcagccgccgcggaagggcgtgttcaccgcgcgacctctcctgtcgaggccctcgctgacctcaaagaagcacgtggtttcttggcgaaagatttagttgtgcttgcattacgcgaaggcgttgcgctcgatccgacggacgacccgcttttggtggcttatttgctcgatagcgcgaataccaacccggaacgtgtcgcccgtcgttacggcggcgagtttacggaagatgcggcagaacgcgcgttgcttagcgaacgcctcttccagacgttatttccacgtctttcggagaaattactctggctctatcaggaagtcgaacgtccattgagtcgcgtgcttgcccatatggaggctcgcggtgtgcgcttagatgttccgttgttagaagcactcagcttcgaggcggcaaaagaactggaacgtcttgaaggcgaagtctttcgtttagcggggcatcccttcaatctcaactctcgcgaccaattggagaaagtgctctttgatgaattaggtttaacccctgtcacgcgtacagagaagaccggcaaacgttccacttcggcagccgccttggaagcacttcgtggtgtgcacccgatcgtcgagttgattttgcagtatcgcgagctcagcaaactcaaatcaacctatcttgataggttacctcgccttgttcatccacgtacgggtcgtttacacacccgcttcaatcaaacggcaacagccaccgggcgcttgtcgtcgagtgacccgaacctccagaatattccagtgcgcacgccgctgggccaacacattcgtaaagcgtttgttgcggaagaaggttggttattacttgcggccgattactcccagatcgaacttcgtgtattggcgcatctctctggcgacgagaatcttaaacgcgtgtttcgcgaaggcaaggatattcacactgaaaccgcagcctggatgttcggggtggactcggccttagtggaccccaagatgcgtcgtgccgccaagaccgtcaactttggcgtactctatggtatgtcagcagcacgtcttagtcaggaattgggcattgactacaaagaagctgaagcgtttatcgagcgctatttccaatcctttccgaaagttcgcgcgtggattgaacgtacgctcgaagaaggtcgcactcgcggctatgtggaaacgttattcgggcgtcgtcgctacgttccagatcttacgtctcgtgtccgctcagtgcgcgaagctgctgagcgtatggcctggaatatgcctgttcagggaacagcggcggacctcatgaagatcgccatggtgaaattgtttccgcgcttgaaacccttaggagcccaccttcttctgcaggtgcatgatgaattggtcttggaagtacccgaggatcgcgcagaagaagccaaagcactcgtgaaagaggttatggaaaacgcgtatccgttagatgttccgttggaggtcgaagtgggtgtaggccgtgattggcttgaagcgaaacaagactaatga

SEQ ID NO: 1268 - protein, 844 aa, synthetic construct
  REGION 1..844: note = DNA Polymerase Variant
MHHHHHHGGSGMLPLFDLEEPPKRVLLVDGHHLAYRTFYALSLTTSRGEPVQMVYGFARSLLKALKEDGQAVVVVFDAKAPSFRHEAYEAYKAGRAPTPEDFPRQLALVKRLVDLLGLVRLEAPGYEADDVLGTLAKKAEREGMEVCILTGDRDFFQLLSEKVSVLLPDGTLVTPKDVQEKYGVPPERWVDFRALTGDRSDNIPGVAGIGEKTALRLLAEWGSVENLLKNLDRVKPDSLRRKIEAHLEDLRLSLDLVRIRTDLPLEVDFKALRRRTPDLEGLRAFLEELELGSLLHEFGLLGGEKPREEAPWPPPEGAFVGFLLSRKEPMWAELLALAAAAEGRVHRATSPVEALADLKEARGFLAKDLVVLALREGVALDPTDDPLLVAYLLDSANTNPERVARRYGGEFTEDAAERALLSERLFQTLFPRLSEKLLWLYQEVERPLSRVLAHMEARGVRLDVPLLEALSFEAAKELERLEGEVFRLAGHPFNLNSRDQLEKVLFDELGLTPVTRTEKTGKRSTSAAALEALRGVHPIVELILQYRELSKLKSTYLDRLPRLVHPRTGRLHTRFNQTATATGRLSSSDPNLQNIPVRTPLGQHIRKAFVAEEGWLLLAADYSQIELRVLAHLSGDENLKRVFREGKDIHTETAAWMFGVDSALVDPKMRRAAKTVNFGVLYGMSAARLSQELGIDYKEAEAFIERYFQSFPKVRAWIERTLEEGRTRGYVETLFGRRRYVPDLTSRVRSVREAAERMAWNMPVQGTAADLMKIAMVKLFPRLKPLGAHLLLQVHDELVLEVPEDRAEEAKALVKEVMENAYPLDVPLEVEVGVGRDWLEAKQD

SEQ ID NO: 1269 - DNA, 2538 bp, synthetic construct
  misc_feature 1..2538: note = DNA Polymerase Variant
  source 1..2538: mol_type = other DNA
atgcaccatcatcatcatcatggcggtagcggcatgttaccgctgtttgatttggaagaaccaccaaaacgcgtgctgcttgttgacggccatcatctggcgtatcgtaccttctacgcactgagccttacgacctcacgtggtgagcctgtccagatggtgtatgggtttgctcgctccctgctgaaagccctgaaggaagatggtcaagccgtagtagtggttttcgatgcgaaggcaccgtcgtttcgtcacgaagcgtacgaggcctataaagctggccgcgcaccgaccccggaagactttccgcgtcagttagcgctcgtcaaacgcctcgtggatttgctgggattagttcgcttggaagctcctggctacgaggcggacgacgtgctcggtacactggccaagaaagcagaacgtgaaggcatggaggtctgcattcttaccggtgatcgcgatttcttccagctgctgtctgagaaagtgagcgttttgctgcccgatggcacgttagtaaccccgaaagatgtgcaagagaaatatggagttccgccagaacgttgggtggactttcgcgcactgactggtgatcgttcagacaacatcccgggcgttgccgggattggtgaaaagacggcgctgcgcctgctggcagaatggggctcggtggaaaatctgctcaagaaccttgatcgtgtgaaacctgatagcttacgccgcaagatcgaagcccacctggaagacttgcgtctgagtctggatcttgtacgtattcgcaccgatctgccgttggaagtagactttaaagctctgcgtcgtcgcacacccgatttagaggggttacgcgcgttcctcgaagaactggagctgggctccctgctgcatgaattcggtttgttgggcggagagaaaccgcgtgaagaagcaccatggccgccgcccgagggtgcctttgtcggctttcttctgtcacgcaaagagccaatgtgggcggaactgttagctcttgcagccgccgcggaagggcgtgttcaccgcgcgacctctcctgtcgaggccctcgctgacctcaaagaagcacgtggtttcttggcgaaagatttagccgtgcttgcattacgcgaaggcgttgcgctcgatccgacggacgacccgcttttggtggcttatttgctcgatagcgcgaataccaacccggaacgtgtcgcccgtcgttacggcggcgagtttactgaagatgcggcagaacgcgcgttgcttagcgaacgcctcttccagacgttatttccacgtctttcggagaaattactctggctctatcaggaagtcgaacgtccattgagtcgcgtgcttgcccatatggaggctcgcggtgtgcgcttagatgttccgttgttagaagcactcagcttcgaggcggcaaaagaactggaacgtcttgaaggcgaagtctttcgtttagcggggcatcccttcaatctcaactctcgcgaccaattggagaaagtgctctttgatgaattaggtttaacccctgtcacgcgtacagagaagaccggcaaacgttccacttcggcagccgccttggaagcacttcgtggtgtgcacccgatcgtcgagttgattttgcagtatcgcgagctcagcaaactcaaatcaacctatcttgataggttacctcgtcttgttcatccacgtacgggtcgtttacacacccgcttcaatcaaacggcaacagccaccgggcgcttgtcgtcgagtgacccgaacctccagaatattccagtgcgcacgccgctgggccaacacattcgtaaagcgtttgttgcggaagaaggttggttattacttgcggccgattactcccagatcgaacttcgtgtattggcgcatctctctggcgacgagaatcttaaacgcgtgtttcgcgaaggcaaggatattcacactgaaaccgcagcctggatgttcggggtggactcggccttagtggaccccaagatgcgtcgtgccgccaagaccgtcaactttggcgtactctatggtatgtcagcagcacgtcttagtcaggaattgggcattgactacaaagaagctgaagcgtttatcgagcgctatttccaatcctttccgaaagttcgcgcgtggattgaacgtacgctcgaagaaggtcgcactcgcggctatgtggaaacgttattcgggcgtcgtcgctacgttccagatcttgtttctcgtgtccgctcagtgcgcgaagctgctgagcgtatggcctggaatatgcctgttcagggaacagcggcggacctcatgaagatcgccatggtgaaattgtttccgcgcttgaaacccttaggagcccaccttcttctgcaggtgcatgatgaattggtcttggaagtacccgaggatcgcgcagaagaagccaaagcactcgtgaaagaggttatggaaaacgcgtatccgttagatgttccgttggaggtcgaagtgggtgtaggccgtgattggcttgaagcgaaacaagactaatga

SEQ ID NO: 1270 - protein, 844 aa, synthetic construct
  REGION 1..844: note = DNA Polymerase Variant
MHHHHHHGGSGMLPLFDLEEPPKRVLLVDGHHLAYRTFYALSLTTSRGEPVQMVYGFARSLLKALKEDGQAVVVVFDAKAPSFRHEAYEAYKAGRAPTPEDFPRQLALVKRLVDLLGLVRLEAPGYEADDVLGTLAKKAEREGMEVCILTGDRDFFQLLSEKVSVLLPDGTLVTPKDVQEKYGVPPERWVDFRALTGDRSDNIPGVAGIGEKTALRLLAEWGSVENLLKNLDRVKPDSLRRKIEAHLEDLRLSLDLVRIRTDLPLEVDFKALRRRTPDLEGLRAFLEELELGSLLHEFGLLGGEKPREEAPWPPPEGAFVGFLLSRKEPMWAELLALAAAAEGRVHRATSPVEALADLKEARGFLAKDLAVLALREGVALDPTDDPLLVAYLLDSANTNPERVARRYGGEFTEDAAERALLSERLFQTLFPRLSEKLLWLYQEVERPLSRVLAHMEARGVRLDVPLLEALSFEAAKELERLEGEVFRLAGHPFNLNSRDQLEKVLFDELGLTPVTRTEKTGKRSTSAAALEALRGVHPIVELILQYRELSKLKSTYLDRLPRLVHPRTGRLHTRFNQTATATGRLSSSDPNLQNIPVRTPLGQHIRKAFVAEEGWLLLAADYSQIELRVLAHLSGDENLKRVFREGKDIHTETAAWMFGVDSALVDPKMRRAAKTVNFGVLYGMSAARLSQELGIDYKEAEAFIERYFQSFPKVRAWIERTLEEGRTRGYVETLFGRRRYVPDLVSRVRSVREAAERMAWNMPVQGTAADLMKIAMVKLFPRLKPLGAHLLLQVHDELVLEVPEDRAEEAKALVKEVMENAYPLDVPLEVEVGVGRDWLEAKQD

SEQ ID NO: 1271 - DNA, 2538 bp, synthetic construct
  misc_feature 1..2538: note = DNA Polymerase Variant
  source 1..2538: mol_type = other DNA
atgcaccatcatcatcatcatggcggtagcggcatgttaccgctgtttgatttggaagaaccaccaaaacgcgtgctgcttgttgacggccatcatctggcgtatcgtaccttctacgcactgagccttacgacctcacgtggtgagcctgtccagatggtgtatgggtttgctcgctccctgctgaaagccctgaaggaagatggtcaagccgtagtagtggttttcgatgcgaaggcaccgtcgtttcgtcacgaagcgtacgaggcctataaagctggccgcgcaccgaccccggaagactttccgcgtcagttagcgctcgtcaaacgcctcgtggatttgctgggattagttcgcttggaagctcctggctacgaggcggacgacgtgctcggtacactggccaagaaagcagaacgtgaaggcatggaggtctgcattcttaccggtgatcgcgatttcttccagctgctgtctgagaaagtgagcgttttgctgcccgatggcacgttagtaaccccgaaagatgtgcaagagaaatatggagttccgccagaacgttgggtggactttcgcgcactgactggtgatcgttcagacaacatcccgggcgttgccgggattggtgaaaagacggcgctgcgcctgctggcagaatggggctcggtggaaaatctgctcaagaaccttgatcgtgtgaaacctgatagcttacgccgcaagatcgaagcccacctggaagacttgcgtctgagtctggatcttgtacgtattcgcaccgatctgccgttggaagtagactttaaagctctgcgtcgtcgcacacccgatttagaggggttacgcgcgttcctcgaagaactggagctgggctccctgctgcatgaattcggtttgttgggcggagagaaaccgcgtgaagaagcaccatggccgccgcccgagggtgcctttgtcggctttcttctgtcacgcaaagagccaatgtgggcggaactgttagctcttgcagccgccgcggaagggcgtgttcaccgcgcgacctctcctgtcgaggccctcgctgacctcaaagaagcacgtggtttcttggcgaaagatttagccgtgcttgcattacgcgaaggcgttgcgctcgatccgacggacgacccgcttttggtggcttatttgctcgatagcgcgaataccaacccggaacgtgtcgcccgtcgttacggcggcgagtttactgaagatgcggcagaacgcgcgttgcttagcgaacgcctcttccagacgttatttccacgtctttcggagaaattactctggctctatcaggaagtcgaacgtccattgagtcgcgtgcttgcccatatggaggctcgcggtgtgcgcttagatgttccgttgttagaagcactcagcttcgaggcggcaaaagaactggaacgtcttgaaggcgaagtctttcgtttagcggggcatcccttcaatctcaactctcgcgaccaattggagaaagtgctctttgatgaattaggtttaacccctgtcacgcgtacagagaagaccggcaaacgttccacttcggcagccgccttggaagcacttcgtggtgtgcacccgatcgtcgagttgattttgcagtatcgcgagctcagcaaactcaaatcaacctatcttgataggttacctcgtcttgttcatccacgtacgggtcgtttacacacccgcttcaatcaaacggcaacagccaccgggcgcttgtcgtcgagtgacccgaacctccagaatattccagtgcgcacgccgctgggccaacacattcgtaaagcgtttgttgcggaagaaggttggttattacttgcggccgattactcccagatcgaacttcgtgtattggcgcatctctctggcgacgagaatcttaaacgcgtgtttcgcgaaggcaaggatattcacactgaaaccgcagcctggatgttcggggtggactcggccttagtggaccccaagatgcgtcgtgccgccaagaccgtcaactttggcgtactctatggtatgtcagcagcacgtcttagtcaggaattgggcattgactacaaagaagctgaagcgtttatcgagcgctatttccaatcctttccgaaagttcgcgcgtggattgaacgtacgctcgaagaaggtcgcactcgcggctatgtggaaacgttattcgggcgtcgtcgctacgttccagatcttacgtctcgtgtccgctcagtgcgcgaagctgctgagcgtatggcctggaatatgcctgttcagggaacagcggcggacctcatgaagatcgccatggtgaaattgtttccgcgcttgaaacccttaggagcccaccttcttctgcaggtgcatgatgaattggtcttggaagtacccgaggatcgcgcagaagaagccaaagcactcgtgactgaggttatggaaaacgcgtatccgttagatgttccgttggaggtcgaagtgggtgtaggccgtgattggcttgaagcgaaacaagactaatga

SEQ ID NO: 1272 - protein, 844 aa, synthetic construct
  REGION 1..844: note = DNA Polymerase Variant
MHHHHHHGGSGMLPLFDLEEPPKRVLLVDGHHLAYRTFYALSLTTSRGEPVQMVYGFARSLLKALKEDGQAVVVVFDAKAPSFRHEAYEAYKAGRAPTPEDFPRQLALVKRLVDLLGLVRLEAPGYEADDVLGTLAKKAEREGMEVCILTGDRDFFQLLSEKVSVLLPDGTLVTPKDVQEKYGVPPERWVDFRALTGDRSDNIPGVAGIGEKTALRLLAEWGSVENLLKNLDRVKPDSLRRKIEAHLEDLRLSLDLVRIRTDLPLEVDFKALRRRTPDLEGLRAFLEELELGSLLHEFGLLGGEKPREEAPWPPPEGAFVGFLLSRKEPMWAELLALAAAAEGRVHRATSPVEALADLKEARGFLAKDLAVLALREGVALDPTDDPLLVAYLLDSANTNPERVARRYGGEFTEDAAERALLSERLFQTLFPRLSEKLLWLYQEVERPLSRVLAHMEARGVRLDVPLLEALSFEAAKELERLEGEVFRLAGHPFNLNSRDQLEKVLFDELGLTPVTRTEKTGKRSTSAAALEALRGVHPIVELILQYRELSKLKSTYLDRLPRLVHPRTGRLHTRFNQTATATGRLSSSDPNLQNIPVRTPLGQHIRKAFVAEEGWLLLAADYSQIELRVLAHLSGDENLKRVFREGKDIHTETAAWMFGVDSALVDPKMRRAAKTVNFGVLYGMSAARLSQELGIDYKEAEAFIERYFQSFPKVRAWIERTLEEGRTRGYVETLFGRRRYVPDLTSRVRSVREAAERMAWNMPVQGTAADLMKIAMVKLFPRLKPLGAHLLLQVHDELVLEVPEDRAEEAKALVTEVMENAYPLDVPLEVEVGVGRDWLEAKQD

SEQ ID NO: 1273 - DNA, 2538 bp, synthetic construct
  misc_feature 1..2538: note = DNA Polymerase Variant
  source 1..2538: mol_type = other DNA
atgcaccatcatcatcatcatggcggtagcggcatgttaccgctgtttgatttggaagaaccaccaaaacgcgtgctgcttgttgacggccatcatctggcgtatcgtaccttctacgcactgagccttacgacctcacgtggtgagcctgtccagatggtgtatgggtttgctcgctccctgctgaaagccctgaaggaagatggtcaagccgtagtagtggttttcgatgcgaaggcaccgtcgtttcgtcacgaagcgtacgaggcctataaagctggccgcgcaccgaccccggaagactttccgcgtcagttagcgctcgtcaaacgcctcgtggatttgctgggattagttcgcttggaagctcctggctacgaggcggacgacgtgctcggtacactggccaagaaagcagaacgtgaaggcatggaggtctgcattcttaccggtgatcgcgatttcttccagctgctgtctgagaaagtgagcgttttgctgcccgatggcacgttagtaaccccgaaagatgtgcaagagaaatatggagttccgccagaacgttgggtggactttcgcgcactgactggtgatcgttcagacaacatcccgggcgttgccgggattggtgaaaagacggcgctgcgcctgctggcagaatggggctcggtggaaaatctgctcaagaaccttgatcgtgtgaaacctgatagcttacgccgcaagatcgaagcccacctggaagacttgcgtctgagtctggatcttgtacgtattcgcactgatctgccgttggaagtagactttaaagctctgcgtcgtcgcacacccgatttagaggggttacgcgcgttcctcgaagaactggagctgggctccctgctgcatgaattcggtttgttgggcggagagaaaccgcgtgaagaagcaccatggccgccgcccgagggtgcctttgtcggctttcttctgtcacgcaaagagccaatgtgggcggaactgttagctcttgcagccgccgcggaagggcgtgttcaccgcgcgacctctcctgtcgaggccctcgctgacctcaaagaagcacgtggtttcttggcgaaagatttagccgtgcttgcattacgcgaaggcgttgcgctcgatccgacggacgacccgcttttggtggcttatttgctcgatagcgcgaataccaacccggaacgtgtcgcccgtcgttacggcggcgagtttactgaagatgcggcagaacgcgcgttgcttagcgaacgcctcttccagacgttatttccacgtctttcggagaaattactctggctctatcaggaagtcgaacgtccattgagtcgcgtgcttgcccatatggaggctcgcggtgtgcgcttagatgttccgttgttagaagcactcagcttcgaggcggcaaaagaactggaacgtcttgaaggcgaagtctttcgtttagcggggcatcccttcaatctcaactctcgcgaccaattggagaaagtgctctttgatgaattaggtttaacccctgtcacgcgtacagagaagaccggcaaacgttccacttcggcagccgccttggaagcacttcgtggtgtgcacccgatcgtcgagttgattttgcagtatcgcgagctcagcaaactcaaatcaacctatcttgataggttacctcgtcttgttcatccacgtacgggtcgtttacacacccgcttcaatcaaacggcaacagccaccgggcgcttgtcgtcgagtgacccgaacctccagaatattccagtgcgcacgccgctgggccaacacattcgtaaagcgtttgttgcggaagaaggttggttattacttgcggccgattactcccagatcgaacttcgtgtattggcgcatctctctggcgacgagaatcttaaacgcgtgtttcgcgaaggcaaggatattcacactgaaaccgcagcctggatgttcggggtggactcggccttagtggaccccaagatgcgtcgtgccgccaagaccgtcaactttggcgtactctatggtatgtcagcagcacgtcttagtcaggaattgggcattgactacaaagaagctgaagcgtttatcgagcgctatttccaatcctttccgaaagttcgcgcgtggattgaacgtacgctcgaagaaggtcgcactcgcggctatgtggaaacgttattcgggcgtcgtcgctacgttccagatctttcgtctcgtgtccgctcagtgcgcgaagctgctgagcgtatggcctggaatatgcctgttcagggaacagcggcggacctcatgaagatcgccatggtgaaattgtttccgcgcttgaaacccttaggagcccaccttcttctgcaggtgcatgatgaattggtcttggaagtacccgaggatcgcgcagaagaagccaaagcactcgtgaaagaggttatggaaaacgcgtatccgttagatgttccgttggaggtcgaagtgggtgtaggccgtgattggcttgaagcgaaacaagactaatga

SEQ ID NO: 1274 - protein, 844 aa, synthetic construct
  REGION 1..844: note = DNA Polymerase Variant
MHHHHHHGGSGMLPLFDLEEPPKRVLLVDGHHLAYRTFYALSLTTSRGEPVQMVYGFARSLLKALKEDGQAVVVVFDAKAPSFRHEAYEAYKAGRAPTPEDFPRQLALVKRLVDLLGLVRLEAPGYEADDVLGTLAKKAEREGMEVCILTGDRDFFQLLSEKVSVLLPDGTLVTPKDVQEKYGVPPERWVDFRALTGDRSDNIPGVAGIGEKTALRLLAEWGSVENLLKNLDRVKPDSLRRKIEAHLEDLRLSLDLVRIRTDLPLEVDFKALRRRTPDLEGLRAFLEELELGSLLHEFGLLGGEKPREEAPWPPPEGAFVGFLLSRKEPMWAELLALAAAAEGRVHRATSPVEALADLKEARGFLAKDLAVLALREGVALDPTDDPLLVAYLLDSANTNPERVARRYGGEFTEDAAERALLSERLFQTLFPRLSEKLLWLYQEVERPLSRVLAHMEARGVRLDVPLLEALSFEAAKELERLEGEVFRLAGHPFNLNSRDQLEKVLFDELGLTPVTRTEKTGKRSTSAAALEALRGVHPIVELILQYRELSKLKSTYLDRLPRLVHPRTGRLHTRFNQTATATGRLSSSDPNLQNIPVRTPLGQHIRKAFVAEEGWLLLAADYSQIELRVLAHLSGDENLKRVFREGKDIHTETAAWMFGVDSALVDPKMRRAAKTVNFGVLYGMSAARLSQELGIDYKEAEAFIERYFQSFPKVRAWIERTLEEGRTRGYVETLFGRRRYVPDLSSRVRSVREAAERMAWNMPVQGTAADLMKIAMVKLFPRLKPLGAHLLLQVHDELVLEVPEDRAEEAKALVKEVMENAYPLDVPLEVEVGVGRDWLEAKQD

SEQ ID NO: 1275 - DNA, 2538 bp, synthetic construct
  misc_feature 1..2538: note = DNA Polymerase Variant
  source 1..2538: mol_type = other DNA
atgcaccatcatcatcatcatggcggtagcggcatgttaccgctgtttgatttggaagaaccaccaaaacgcgtgctgcttgttgacggccatcatctggcgtatcgtaccttctacgcactgagccttacgacctcacgtggtgagcctgtccagatggtgtatgggtttgctcgctccctgctgaaagccctgaaggaagatggtcaagccgtagtagtggttttcgatgcgaaggcaccgtcgtttcgtcacgaagcgtacgaggcctataaagctggccgcgcaccgaccccggaagactttccgcgtcagttagcgctcgtcaaacgcctcgtggatttgctgggattagttcgcttggaagctcctggctacgaggcggacgacgtgctcggtacactggccaagaaagcagaacgtgaaggcatggaggtctgcattcttaccggtgatcgcgatttcttccagctgctgtctgagaaagtgagcgttttgctgcccgatggcacgttagtaaccccgaaagatgtgcaagagaaatatggagttccgccagaacgttgggtggactttcgcgcactgactggtgatcgttcagacaacatcccgggcgttgccgggattggtgaaaagacggcgctgcgcctgctggcagaatggggctcggtggaaaatctgctcaagaaccttgatcgtgtgaaacctgatagcttacgccgcaagatcgaagcccacctggaagacttgcgtctgagtctggatcttgtacgtattcgcaccgatctgccgttggaagtagactttaaagctctgcgtcgtcgcacacccgatttagaggggttacgcgcgttcctcgaagaactggagctgggctccctgctgcatgaattcggtttgttgggcggagagaaaccgcgtgaagaagcaccatggccgccgcccgagggtgcctttgtcggctttcttctgtcacgcaaagagccaatgtgggcggaactgttagctcttgcagccgccgcggaagggcgtgttcaccgcgcgacctctcctgtcgaggccctcgctgacctcaaagaagcacgtggtttcttggcgaaagatttagccgtgcttgcattacgcgaaggcgttgcgctcgatccgacggacgacccgcttttggtggcttatttgctcgatagcgcgaataccaacccggaacgtgtcgcccgtcgttacggcggcgagtttactgaagatgcggcagaacgcgcgttgcttagcgaacgcctcttccagacgttatttccacgtctttcggagaaattactctggctctatcaggaagtcgaacgtccattgagtcgcgtgcttgcccatatggaggctcgcggtgtgcgcttagatgtttatttgttagaagcactcagcttcgaggcggcaaaagaactggaacgtcttgaaggcgaagtctttcgtttagcggggcatcccttcaatctcaactctcgcgaccaattggagaaagtgctctttgatgaattaggtttaacccctgtcacgcgtacagagaagaccggcaaacgttccacttcggcagccgccttggaagcacttcgtggtgtgcacccgatcgtcgagttgattttgcagtatcgcgagctcagcaaactcaaatcaacctatcttgataggttacctcgtcttgttcatccacgtacgggtcgtttacacacccgcttcaatcaaacggcaacagccaccgggcgcttgtcgtcgagtgacccgaacctccagaatattccagtgcgcacgccgctgggccaacacattcgtaaagcgtttgttgcggaagaaggttggttattacttgcggccgattactcccagatcgaacttcgtgtattggcgcatctctctggcgacgagaatcttaaacgcgtgtttcgcgaaggcaaggatattcacactgaaaccgcagcctggatgttcggggtggactcggccttagtggaccccaagatgcgtcgtgccgccaagaccgtcaactttggcgtactctatggtatgtcagcagcacgtcttagtcaggaattgggcattgactacaaagaagctgaagcgtttatcgagcgctatttccaatcctttccgaaagttcgcgcgtggattgaacgtacgctcgaagaaggtcgcactcgcggctatgtggaaacgttattcgggcgtcgtcgctacgttccagatcttacgtctcgtgtccgctcagtgcgcgaagctgctgagcgtatggcctggaatatgcctgttcagggaacagcggcggacctcatgaagatcgccatggtgaaattgtttccgcgcttgaaacccttaggagcccaccttcttctgcaggtgcatgatgaattggtcttggaagtacccgaggatcgcgcagaagaagccaaagcactcgtgaaagaggttatggaaaacgcgtatccgttagatgttccgttggaggtcgaagtgggtgtaggccgtgattggcttgaagcgaaacaagactaatga

SEQ ID NO: 1276 - protein, 844 aa, synthetic construct
  REGION 1..844: note = DNA Polymerase Variant
MHHHHHHGGSGMLPLFDLEEPPKRVLLVDGHHLAYRTFYALSLTTSRGEPVQMVYGFARSLLKALKEDGQAVVVVFDAKAPSFRHEAYEAYKAGRAPTPEDFPRQLALVKRLVDLLGLVRLEAPGYEADDVLGTLAKKAEREGMEVCILTGDRDFFQLLSEKVSVLLPDGTLVTPKDVQEKYGVPPERWVDFRALTGDRSDNIPGVAGIGEKTALRLLAEWGSVENLLKNLDRVKPDSLRRKIEAHLEDLRLSLDLVRIRTDLPLEVDFKALRRRTPDLEGLRAFLEELELGSLLHEFGLLGGEKPREEAPWPPPEGAFVGFLLSRKEPMWAELLALAAAAEGRVHRATSPVEALADLKEARGFLAKDLAVLALREGVALDPTDDPLLVAYLLDSANTNPERVARRYGGEFTEDAAERALLSERLFQTLFPRLSEKLLWLYQEVERPLSRVLAHMEARGVRLDVYLLEALSFEAAKELERLEGEVFRLAGHPFNLNSRDQLEKVLFDELGLTPVTRTEKTGKRSTSAAALEALRGVHPIVELILQYRELSKLKSTYLDRLPRLVHPRTGRLHTRFNQTATATGRLSSSDPNLQNIPVRTPLGQHIRKAFVAEEGWLLLAADYSQIELRVLAHLSGDENLKRVFREGKDIHTETAAWMFGVDSALVDPKMRRAAKTVNFGVLYGMSAARLSQELGIDYKEAEAFIERYFQSFPKVRAWIERTLEEGRTRGYVETLFGRRRYVPDLTSRVRSVREAAERMAWNMPVQGTAADLMKIAMVKLFPRLKPLGAHLLLQVHDELVLEVPEDRAEEAKALVKEVMENAYPLDVPLEVEVGVGRDWLEAKQD

SEQ ID NO: 1277 - DNA, 2538 bp, synthetic construct
  misc_feature 1..2538: note = DNA Polymerase Variant
  source 1..2538: mol_type = other DNA
atgcaccatcatcatcatcatggcggtagcggcatgttaccgctgtttgatttggaagaaccaccaaaacgcgtgctgcttgttgacggccatcatctggcgtatcgtaccttctacgcactgagccttacgacctcacgtggtgagcctgtccagatggtgtatgggtttgctcgctccctgctgaaagccctgaaggaagatggtcaagccgtagtagtggttttcgatgcgaaggcaccgtcgtttcgtcacgaagcgtacgaggcctataaagctggccgcgcaccgaccccggaagactttccgcgtcagttagcgctcgtcaaacgcctcgtggatttgctgggattagttcgcttggaagctcctggctacgaggcggacgacgtgctcggtacactggccaagaaagcagaacgtgaaggcatggaggtctgcattcttaccggtgatcgcgatttcttccagctgctgtctgagaaagtgagcgttttgctgcccgatggcacgttagtaaccccgaaagatgtgcaagagaaatatggagttccgccagaacgttgggtggactttcgcgcactgactggtgatcgttcagacaacatcccgggcgttgccgggattggtgaaaagacggcgctgcgcctgctggcagaatggggctcggtggaaaatctgctcaagaaccttgatcgtgtgaaacctgatagcttacgccgcaagatcgaagcccacctggaagacttgcgtctgagtctggatcttgtacgtattcgcaccgatctgccgttggaagtagactttaaagctctgcgtcgtcgcacacccgatttagaggggttacgcgcgttcctcgaagaactggagctgggctccctgctgcatgaattcggtttgttgggcggagagaaaccgcgtgaagaagcaccatggccgccgcccgagggtgcctttgtcggctttcttctgtcacgcaaagagccaatgtgggcggaactgttagctcttgcagccgccgcggaagggcgtgttcaccgcgcgacctctcctgtcgaggccctcgctgacctcaaagaagcacgtggtttcttggcgaaagatttagccgtgcttgcattacgcgaaggcgttgcgctcgatccgacggacgacccgcttttggtggcttatttgctcgatagcgcgaataccaacccggaacgtgtcgcccgtcgttacggcggcgagtttactgaagatgcggcagaacgcgcgttgcttagcgaacgcctcttccagacgttatttccacgtctttcggagaaattactctggctctatcaggaagtcgaacgtccattgagtcgcgtgcttgcccatatggaggctcgcggtgtgcgcttagatgttccgttgttagaagcactcagcttcgaggcggcaaaagaactggaacgtcttgaaggcgaagtctttcgtttagcggggcatcccttcaatctcaactctcgcgaccaattggagaaagtgctctttgatgaattaggtttaacccctgtcacgcgtacagagaagaccggcaaacgttccacttcggcagccgccttggaagcacttcgtggtgtgcacccgatcgtcgagttgattttgcagtatcgcgagctcagcaaactcaaatcaacctatcttgataggttacctcgtcttgttcatccacgtacgggtcgtttacacacccgcttcaatcaaacggcaacagccaccgggcgcttgtcgtcgagtgacccgaacctccagaatattccagtgcgcacgccgctgggcatgcacattcgtaaagcgtttgttgcggaagaaggttggttattacttgcggccgattactcccagatcgaacttcgtgtattggcgcatctctctggcgacgagaatcttaaacgcgtgtttcgcgaaggcaaggatattcacactgaaaccgcagcctggatgttcggggtggactcggccttagtggaccccaagatgcgtcgtgccgccaagaccgtcaactttggcgtactctatggtatgtcagcagcacgtcttagtcaggaattgggcattgactacaaagaagctgaagcgtttatcgagcgctatttccaatcctttccgaaagttcgcgcgtggattgaacgtacgctcgaagaaggtcgcactcgcggctatgtggaaacgttattcgggcgtcgtcgctacgttccagatcttacgtctcgtgtccgctcagtgcgcgaagctgctgagcgtatggcctggaatatgcctgttcagggaacagcggcggacctcatgaagatcgccatggtgaaattgtttccgcgcttgaaacccttaggagcccaccttcttctgcaggtgcatgatgaattggtcttggaagtacccgaggatcgcgcagaagaagccaaagcactcgtgaaagaggttatggaaaacgcgtatccgttagatgttccgttggaggtcgaagtgggtgtaggccgtgattggcttgaagcgaaacaagactaatga

SEQ ID NO: 1278 - protein, 844 aa, synthetic construct
  REGION 1..844: note = DNA Polymerase Variant
MHHHHHHGGSGMLPLFDLEEPPKRVLLVDGHHLAYRTFYALSLTTSRGEPVQMVYGFARSLLKALKEDGQAVVVVFDAKAPSFRHEAYEAYKAGRAPTPEDFPRQLALVKRLVDLLGLVRLEAPGYEADDVLGTLAKKAEREGMEVCILTGDRDFFQLLSEKVSVLLPDGTLVTPKDVQEKYGVPPERWVDFRALTGDRSDNIPGVAGIGEKTALRLLAEWGSVENLLKNLDRVKPDSLRRKIEAHLEDLRLSLDLVRIRTDLPLEVDFKALRRRTPDLEGLRAFLEELELGSLLHEFGLLGGEKPREEAPWPPPEGAFVGFLLSRKEPMWAELLALAAAAEGRVHRATSPVEALADLKEARGFLAKDLAVLALREGVALDPTDDPLLVAYLLDSANTNPERVARRYGGEFTEDAAERALLSERLFQTLFPRLSEKLLWLYQEVERPLSRVLAHMEARGVRLDVPLLEALSFEAAKELERLEGEVFRLAGHPFNLNSRDQLEKVLFDELGLTPVTRTEKTGKRSTSAAALEALRGVHPIVELILQYRELSKLKSTYLDRLPRLVHPRTGRLHTRFNQTATATGRLSSSDPNLQNIPVRTPLGMHIRKAFVAEEGWLLLAADYSQIELRVLAHLSGDENLKRVFREGKDIHTETAAWMFGVDSALVDPKMRRAAKTVNFGVLYGMSAARLSQELGIDYKEAEAFIERYFQSFPKVRAWIERTLEEGRTRGYVETLFGRRRYVPDLTSRVRSVREAAERMAWNMPVQGTAADLMKIAMVKLFPRLKPLGAHLLLQVHDELVLEVPEDRAEEAKALVKEVMENAYPLDVPLEVEVGVGRDWLEAKQD

SEQ ID NO: 1279 - DNA, 2538 bp, synthetic construct
  misc_feature 1..2538: note = DNA Polymerase Variant
  source 1..2538: mol_type = other DNA
atgcaccatcatcatcatcatggcggtagcggcatgttaccgctgtttgatttggaagaaccaccaaaacgcgtgctgcttgttgacggccatcatctggcgtatcgtaccttctacgcactgagccttacgacctcacgtggtgagcctgtccagatggtgtatgggtttgctcgctccctgctgaaagccctgaaggaagatggtcaagccgtagtagtggttttcgataataaggcaccgtcgtttcgtcacgaagcgtacgaggcctataaagctggccgcgcaccgaccccggaagactttccgcgtcagttagcgctcgtcaaacgcctcgtggatttgctgggattagttcgcttggaagctcctggctacgaggcggacgacgtgctcggtacactggccaagaaagcagaacgtgaaggcatggaggtctgcattcttaccggtgatcgcgatttcttccagctgctgtctgagaaagtgagcgttttgctgcccgatggcacgttagtaaccccgaaagatgtgcaagagaaatatggagttccgccagaacgttgggtggactttcgcgcactgactggtgatcgttcagacaacatcccgggcgttgccgggattggtgaaaagacggcgctgcgcctgctggcagaatggggctcggtggaaaatctgctcaagaaccttgatcgtgtgaaacctgatagcttacgccgcaagatcgaagcccacctggaagacttgcgtctgagtctggatcttgtacgtattcgcaccgatctgccgttggaagtagactttaaagctctgcgtcgtcgcacacccgatttagaggggttacgcgcgttcctcgaagaactggagctgggctccctgctgcatgaattcggtttgttgggcggagagaaaccgcgtgaagaagcaccatggccgccgcccgagggtgcctttgtcggctttcttctgtcacgcaaagagccaatgtgggcggaactgttagctcttgcagccgccgcggaagggcgtgttcaccgcgcgacctctcctgtcgaggccctcgctgacctcaaagaagcacgtggtttcttggcgaaagatttagccgtgcttgcattacgcgaaggcgttgcgctcgatccgacggacgacccgcttttggtggcttatttgctcgatagcgcgaataccaacccggaacgtgtcgcccgtcgttacggcggcgagtttactgaagatgcggcagaacgcgcgttgcttagcgaacgcctcttccagacgttatttccacgtctttcggagaaattactctggctctatcaggaagtcgaacgtccattgagtcgcgtgcttgcccatatggaggctcgcggtgtgcgcttagatgttccgttgttagaagcactcagcttcgaggcggcaaaagaactggaacgtcttgaaggcgaagtctttcgtttagcggggcatcccttcaatctcaactctcgcgaccaattggagaaagtgctctttgatgaattaggtttaacccctgtcacgcgtacagagaagaccggcaaacgttccacttcggcagccgccttggaagcacttcgtggtgtgcacccgatcgtcgagttgattttgcagtatcgcgagctcagcaaactcaaatcaacctatcttgataggttacctcgtcttgttcatccacgtacgggtcgtttacacacccgcttcaatcaaacggcaacagccaccgggcgcttgtcgtcgagtgacccgaacctccagaatattccagtgcgcacgccgctgggccaacacattcgtaaagcgtttgttgcggaagaaggttggttattacttgcggccgattactcccagatcgaacttcgtgtattggcgcatctctctggcgacgagaatcttaaacgcgtgtttcgcgaaggcaaggatattcacactgaaaccgcagcctggatgttcggggtggactcggccttagtggaccccaagatgcgtcgtgccgccaagaccgtcaactttggcgtactctatggtatgtcagcagcacgtcttagtcaggaattgggcattgactacaaagaagctgaagcgtttatcgagcgctatttccaatcctttccgaaagttcgcgcgtggattgaacgtacgctcgaagaaggtcgcactcgcggctatgtggaaacgttattcgggcgtcgtcgctacgttccagatcttacgtctcgtgtccgctcagtgcgcgaagctgctgagcgtatggcctggaatatgcctgttcagggaacagcggcggacctcatgaagatcgccatggtgaaattgtttccgcgcttgaaacccttaggagcccaccttcttctgcaggtgcatgatgaattggtcttggaagtacccgaggatcgcgcagaagaagccaaagcactcgtgaaagaggttatggaaaacgcgtatccgttagatgttccgttggaggtcgaagtgggtgtaggccgtgattggcttgaagcgaaacaagactaatga

SEQ ID NO: 1280 - protein, 844 aa, synthetic construct
  REGION 1..844: note = DNA Polymerase Variant
MHHHHHHGGSGMLPLFDLEEPPKRVLLVDGHHLAYRTFYALSLTTSRGEPVQMVYGFARSLLKALKEDGQAVVVVFDNKAPSFRHEAYEAYKAGRAPTPEDFPRQLALVKRLVDLLGLVRLEAPGYEADDVLGTLAKKAEREGMEVCILTGDRDFFQLLSEKVSVLLPDGTLVTPKDVQEKYGVPPERWVDFRALTGDRSDNIPGVAGIGEKTALRLLAEWGSVENLLKNLDRVKPDSLRRKIEAHLEDLRLSLDLVRIRTDLPLEVDFKALRRRTPDLEGLRAFLEELELGSLLHEFGLLGGEKPREEAPWPPPEGAFVGFLLSRKEPMWAELLALAAAAEGRVHRATSPVEALADLKEARGFLAKDLAVLALREGVALDPTDDPLLVAYLLDSANTNPERVARRYGGEFTEDAAERALLSERLFQTLFPRLSEKLLWLYQEVERPLSRVLAHMEARGVRLDVPLLEALSFEAAKELERLEGEVFRLAGHPFNLNSRDQLEKVLFDELGLTPVTRTEKTGKRSTSAAALEALRGVHPIVELILQYRELSKLKSTYLDRLPRLVHPRTGRLHTRFNQTATATGRLSSSDPNLQNIPVRTPLGQHIRKAFVAEEGWLLLAADYSQIELRVLAHLSGDENLKRVFREGKDIHTETAAWMFGVDSALVDPKMRRAAKTVNFGVLYGMSAARLSQELGIDYKEAEAFIERYFQSFPKVRAWIERTLEEGRTRGYVETLFGRRRYVPDLTSRVRSVREAAERMAWNMPVQGTAADLMKIAMVKLFPRLKPLGAHLLLQVHDELVLEVPEDRAEEAKALVKEVMENAYPLDVPLEVEVGVGRDWLEAKQD

SEQ ID NO: 1281 - DNA, 2538 bp, synthetic construct
  misc_feature 1..2538: note = DNA Polymerase Variant
  source 1..2538: mol_type = other DNA
atgcaccatcatcatcatcatggcggtagcggcatgttaccgctgtttgatttggaagaaccaccaaaacgcgtgctgcttgttgacggccatcatctggcgtatcgtaccttctacgcactgagccttacgacctcacgtggtgagcctgtccagatggtgtatgggtttgctcgctccctgctgaaagccctgaaggaagatggtcaagccgtagtagtggttttcgatgcgaaggcaccgtcgtttcgtcacgaagcgtacgaggcctataaagctggccgcgcaccgaccccggaagactttccgcgtcagttagcgctcgtcaaacgcctcgtggatttgctgggattagttcgcttggaagctcctggctacgaggcggacgacgtgctcggtacactggccaagaaagcagaacgtgaaggcatggaggtctgcattcttaccggtgatcgcgatttcttccagctgctgtctgagaaagtgagcgttttgctgcccgatggcacgttagtaaccccgaaagatgtgcaagagaaatatggagttccgccagaacgttgggtggactttcgcgcactgactggtgatcgttcagacaacatcccgggcgttgccgggattggtgaaaagacggcgctgcgcctgctggcagaatggggctcggtggaaaatctgctcaagaaccttgatcgtgtgaaacctgatagcttacgccgcaagatcgaagcccacctggaagacttgcgtctgagtctggatcttgtacgtattcgcaccgatctgccgttggaagtagactttaaagctctgcgtcgtcgcacacccgatttagaggggttacgcgcgttcctcgaagaactggagctgggctccctgctgcatgaattcggtttgttgggcggagagaaaccgcgtgaagaagcaccatggccgccgcccgagagggcctttgtcggctttcttctgtcacgcaaagagccaatgtgggcggaactgttagctcttgcagccgccgcggaagggcgtgttcaccgcgcgacctctcctgtcgaggccctcgctgacctcaaagaagcacgtggtttcttggcgaaagatttagccgtgcttgcattacgcgaaggcgttgcgctcgatccgacggacgacccgcttttggtggcttatttgctcgatagcgcgaataccaacccggaacgtgtcgcccgtcgttacggcggcgagtttactgaagatgcggcagaacgcgcgttgcttagcgaacgcctcttccagacgttatttccacgtctttcggagaaattactctggctctatcaggaagtcgaacgtccattgagtcgcgtgcttgcccatatggaggctcgcggtgtgcgcttagatgttccgttgttagaagcactcagcttcgaggcggcaaaagaactggaacgtcttgaaggcgaagtctttcgtttagcggggcatcccttcaatctcaactctcgcgaccaattggagaaagtgctctttgatgaattaggtttaacccctgtcacgcgtacagagaagaccggcaaacgttccacttcggcagccgccttggaagcacttcgtggtgtgcacccgatcgtcgagttgattttgcagtatcgcgagctcagcaaactcaaatcaacctatcttgataggttacctcgtcttgttcatccacgtacgggtcgtttacacacccgcttcaatcaaacggcaacagccaccgggcgcttgtcgtcgagtgacccgaacctccagaatattccagtgcgcacgccgctgggccaacacattcgtaaagcgtttgttgcggaagaaggttggttattacttgcggccgattactcccagatcgaacttcgtgtattggcgcatctctctggcgacgagaatcttaaacgcgtgtttcgcgaaggcaaggatattcacactgaaaccgcagcctggatgttcggggtggactcggccttagtggaccccaagatgcgtcgtgccgccaagaccgtcaactttggcgtactctatggtatgtcagcagcacgtcttagtcaggaattgggcattgactacaaagaagctgaagcgtttatcgagcgctatttccaatcctttccgaaagttcgcgcgtggattgaacgtacgctcgaagaaggtcgcactcgcggctatgtggaaacgttattcgggcgtcgtcgctacgttccagatcttacgtctcgtgtccgctcagtgcgcgaagctgctgagcgtatggcctggaatatgcctgttcagggaacagcggcggacctcatgaagatcgccatggtgaaattgtttccgcgcttgaaacccttaggagcccaccttcttctgcaggtgcatgatgaattggtcttggaagtacccgaggatcgcgcagaagaagccaaagcactcgtgaaagaggttatggaaaacgcgtatccgttagatgttccgttggaggtcgaagtgggtgtaggccgtgattggcttgaagcgaaacaagactaatga

SEQ ID NO: 1282 - protein, 844 aa, synthetic construct
  REGION 1..844: note = DNA Polymerase Variant
MHHHHHHGGSGMLPLFDLEEPPKRVLLVDGHHLAYRTFYALSLTTSRGEPVQMVYGFARSLLKALKEDGQAVVVVFDAKAPSFRHEAYEAYKAGRAPTPEDFPRQLALVKRLVDLLGLVRLEAPGYEADDVLGTLAKKAEREGMEVCILTGDRDFFQLLSEKVSVLLPDGTLVTPKDVQEKYGVPPERWVDFRALTGDRSDNIPGVAGIGEKTALRLLAEWGSVENLLKNLDRVKPDSLRRKIEAHLEDLRLSLDLVRIRTDLPLEVDFKALRRRTPDLEGLRAFLEELELGSLLHEFGLLGGEKPREEAPWPPPERAFVGFLLSRKEPMWAELLALAAAAEGRVHRATSPVEALADLKEARGFLAKDLAVLALREGVALDPTDDPLLVAYLLDSANTNPERVARRYGGEFTEDAAERALLSERLFQTLFPRLSEKLLWLYQEVERPLSRVLAHMEARGVRLDVPLLEALSFEAAKELERLEGEVFRLAGHPFNLNSRDQLEKVLFDELGLTPVTRTEKTGKRSTSAAALEALRGVHPIVELILQYRELSKLKSTYLDRLPRLVHPRTGRLHTRFNQTATATGRLSSSDPNLQNIPVRTPLGQHIRKAFVAEEGWLLLAADYSQIELRVLAHLSGDENLKRVFREGKDIHTETAAWMFGVDSALVDPKMRRAAKTVNFGVLYGMSAARLSQELGIDYKEAEAFIERYFQSFPKVRAWIERTLEEGRTRGYVETLFGRRRYVPDLTSRVRSVREAAERMAWNMPVQGTAADLMKIAMVKLFPRLKPLGAHLLLQVHDELVLEVPEDRAEEAKALVKEVMENAYPLDVPLEVEVGVGRDWLEAKQD

SEQ ID NO: 1283 - DNA, 2538 bp, synthetic construct
  misc_feature 1..2538: note = DNA Polymerase Variant
  source 1..2538: mol_type = other DNA
atgcaccatcatcatcatcatggcggtagcggcatgttaccgctgtttgatttggaagaaccaccaaaacgcgtgctgcttgttgacggccatcatctggcgtatcgtaccttctacgcactgagccttacgacctcacgtggtgagcctgtccagatggtgtatgggtttgctcgctccctgctgaaagccctgaaggaagatggtcaagccgtagtagtggttttcgatgcgaaggcaccgtcgtttcgtcacgaagcgtacgaggcctataaagctggccgcgcaccgaccccggaagactttccgcgtcagttagcgctcgtcaaacgcctcgtggatttgctgggattagttcgcttggaagctcctggctacgaggcggacgacgtgctcggtacactggccaagaaagcagaacgtgaaggcatggaggtctgcattcttaccggtgatcgcgatttcttccagctgctgtctgagaaagtgagcgttttgctgcccgatggcacgttagtaaccccgaaagatgtgcaagagaaatatggagttccgccagaacgttgggtggactttcgcgcactgactggtgatcgttcagacaacatcccgggcgttgccgggattggtgaaaagacggcgctgcgcctgctggcagaatggggctcggtggaaaatctgctcaagaaccttgatcgtgtgaaacctgatagcttacgccgcaagatcgaagcccacctggaagacttggcgctgagtctggatcttgtacgtattcgcaccgatctgccgttggaagtagactttaaagctctgcgtcgtcgcacacccgatttagaggggttacgcgcgttcctcgaagaactggagctgggctccctgctgcatgaattcggtttgttgggcggagagaaaccgcgtgaagaagcaccatggccgccgcccgagggtgcctttgtcggctttcttctgtcacgcaaagagccaatgtgggcggaactgttagctcttgcagccgccgcggaagggcgtgttcaccgcgcgacctctcctgtcgaggccctcgctgacctcaaagaagcacgtggtttcttggcgaaagatttagccgtgcttgcattacgcgaaggcgttgcgctcgatccgacggacgacccgcttttggtggcttatttgctcgatagcgcgaataccaacccggaacgtgtcgcccgtcgttacggcggcgagtttactgaagatgcggcagaacgcgcgttgcttagcgaacgcctcttccagacgttatttccacgtctttcggagaaattactctggctctatcaggaagtcgaacgtccattgagtcgcgtgcttgcccatatggaggctcgcggtgtgcgcttagatgttccgttgttagaagcactcagcttcgaggcggcaaaagaactggaacgtcttgaaggcgaagtctttcgtttagcggggcatcccttcaatctcaactctcgcgaccaattggagaaagtgctctttgatgaattaggtttaacccctgtcacgcgtacagagaagaccggcaaacgttccacttcggcagccgccttggaagcacttcgtggtgtgcacccgatcgtcgagttgattttgcagtatcgcgagctcagcaaactcaaatcaacctatcttgataggttacctcgtcttgttcatccacgtacgggtcgtttacacacccgcttcaatcaaacggcaacagccaccgggcgcttgtcgtcgagtgatccgaacctccagaatattccagtgcgcacgccgctgggccaacacattcgtaaagcgtttgttgcggaagaaggttggttattacttgcggccgattactcccagatcgaacttcgtgtattggcgcatctctctggcgacgagaatcttaaacgcgtgtttcgcgaaggcaaggatattcacactgaaaccgcagcctggatgttcggggtggactcggccttagtggaccccaagatgcgtcgtgccgccaagaccgtcaactttggcgtactctatggtatgtcagcagcacgtcttagtcaggaattgggcattgactacaaagaagctgaagcgtttatcgagcgctatttccaatcctttccgaaagttcgcgcgtggattgaacgtacgctcgaagaaggtcgcactcgcggctatgtggaaacgttattcgggcgtcgtcgctacgttccagatcttacgtctcgtgtccgctcagtgcgcgaagctgctgagcgtatggcctggaatatgcctgttcagggaacagcggcggacctcatgaagatcgccatggtgaaattgtttccgcgcttgaaacccttaggagcccaccttcttctgcaggtgcatgatgaattggtcttggaagtacccgaggatcgcgcagaagaagccaaagcactcgtgaaagaggttatggaaaacgcgtatccgttagatgttccgttggaggtcgaagtgggtgtaggccgtgattggcttgaagcgaaacaagactaatga

SEQ ID NO: 1284 - protein, 844 aa, synthetic construct
  REGION 1..844: note = DNA Polymerase Variant
MHHHHHHGGSGMLPLFDLEEPPKRVLLVDGHHLAYRTFYALSLTTSRGEPVQMVYGFARSLLKALKEDGQAVVVVFDAKAPSFRHEAYEAYKAGRAPTPEDFPRQLALVKRLVDLLGLVRLEAPGYEADDVLGTLAKKAEREGMEVCILTGDRDFFQLLSEKVSVLLPDGTLVTPKDVQEKYGVPPERWVDFRALTGDRSDNIPGVAGIGEKTALRLLAEWGSVENLLKNLDRVKPDSLRRKIEAHLEDLALSLDLVRIRTDLPLEVDFKALRRRTPDLEGLRAFLEELELGSLLHEFGLLGGEKPREEAPWPPPEGAFVGFLLSRKEPMWAELLALAAAAEGRVHRATSPVEALADLKEARGFLAKDLAVLALREGVALDPTDDPLLVAYLLDSANTNPERVARRYGGEFTEDAAERALLSERLFQTLFPRLSEKLLWLYQEVERPLSRVLAHMEARGVRLDVPLLEALSFEAAKELERLEGEVFRLAGHPFNLNSRDQLEKVLFDELGLTPVTRTEKTGKRSTSAAALEALRGVHPIVELILQYRELSKLKSTYLDRLPRLVHPRTGRLHTRFNQTATATGRLSSSDPNLQNIPVRTPLGQHIRKAFVAEEGWLLLAADYSQIELRVLAHLSGDENLKRVFREGKDIHTETAAWMFGVDSALVDPKMRRAAKTVNFGVLYGMSAARLSQELGIDYKEAEAFIERYFQSFPKVRAWIERTLEEGRTRGYVETLFGRRRYVPDLTSRVRSVREAAERMAWNMPVQGTAADLMKIAMVKLFPRLKPLGAHLLLQVHDELVLEVPEDRAEEAKALVKEVMENAYPLDVPLEVEVGVGRDWLEAKQD

SEQ ID NO: 1285 - DNA, 2538 bp, synthetic construct
  misc_feature 1..2538: note = DNA Polymerase Variant
  source 1..2538: mol_type = other DNA
atgcaccatcatcatcatcatggcggtagcggcatgttaccgctgtttgatttggaagaaccaccaaaacgcgtgctgcttgttgacggccatcatctggcgtatcgtaccttctacgcactgagccttacgacctcacgtggtgagcctgtccagatggtgtatgggtttgctcgctccctgctgaaagccctgaaggaagatggtcaagccgtagtagtggttttcgatgcgaaggcaccgtcgtttcgtcacgaagcgtacgaggcctataaagctggccgcgcaccgaccccggaagactttccgcgtcagttagcgctcgtcaaacgcctcgtggatttgctgggattagttcgcttggaagctcctggctacgaggcggacgacgtgctcggtacactggccaagaaagcagaacgtgaaggcatggaggtctgcattcttaccggtgatcgcgatttcttccagctgctgtctgagaaagtgagcgttttgctgcccgatggcacgttagtaaccccgaaagatgtgcaagagaaatatggagttccgccagaacgttgggtggactttcgcgcactgactggtgatcgttcagacaacatcccgggcgttgccgggattggtgaaaagacggcgctgcgcctgctggcagaatggggctcggtggaaaatctgctcaagaaccttgatcgtgtgaaacctgatagcttacgccgcaagatcgaagcccacctggaagacttgcgtctgagtctggatcttgtacgtattcgcaccgatctgccgttggaagtagactttaaagctctgcgtcgtcgcacacccgatttagaggggttacgcgcgttcctcgaagaactggagctgggctccctgctgcatgaattcggtttgttgggcggagagaaaccgcgtgaagaagcaccatggccgccgcccgagggtgcctttgtcggctttcttctgtcacgcaaagagccaatgtgggcggaactgttagctcttgcagccgccgcggaagggcgtgttcaccgcgcgacctctcctgtcgaggccctcgctgacctcaaagaagcacgtggtttcttggcgaaagatttagccgtgcttgcattacgcgaaggcgttgcgctcgatccgacggacgacccgcttttggtggcttatttgctcgatagcgcgaataccaacccggaacgtgtcgcccgtcgttacggcggcgagtttactgaagatgcggcagaacgcgcgttgcttagcgaacgcctcttccagacgttatttccacgtctttcggagaaattactctggctctatcaggaagtcgaacgtccattgagtcgcgtgcttgcccatatggaggctcgcggtgtgcgcttagatgttccgttgttagaagcactcagcttcgaggcggcaaaagaactggaacgtcttgaaggcgaagtctttcgtttagcggggcatcccttcaatctcaactctcgcgaccaattggagaaagtgctctttgatgaattaggtttaacccctgtcacgcgtacagagaagaccggcaaacgttccacttcggcagccgccttggaagcacttcgtggtgtgcacccgatcgtcgagttgattttgcagtatcgcgagctcagcaaactcaaatcaacctatcttgataggttacctcgtcttgttcatccacgtacgggtcgtttacacacccgcttcaatcaaacggcaacagccaccgggcgcttgtcgtcgagtgacccgaacctccagaatattccagtgcgcacgccgctgggccaacacattcgtaaagcgtttgttgcggaagaaggttggttattacttgcggccgattactcccagatcgaacttcgtgtattggcgcatctctctggcgacgagaatcttaaacgcgtgtttcgcgaaggcaaggatattcacactgaaaccgcagcctggatgttcggggtggactcggccttagtggaccccaagatgcgtcgtgccgccaagaccgtcaactttggcgtactctatggtatgtcagcagcacgtcttagtcaggaattgggcattgactacaaagaagctgaagcgtttatcgagcgctatttccaatcctttccgaaagttcgcgcgtggattgaacgtacgctcgaagaaggtcgcactcgcggctatgtggaaacgttattcgggcgtcgtcgctacgttccagatcttacgtctcgtgtccgctcagtgcgcgaagctgctgagcgtatggcctggaatatgcctgttcagggaacagcggcggacctcatgaagatcgccatggtgaaattgtttccgcgcttgaaacccttaggagcccaccttcttctgcaggtgcatgatgaattggtcttggaagtacccgaggatcgcgcagaagaagccaaagcactcgtgcgtgaggttatggaaaacgcgtatccgttagatgttccgttggaggtcgaagtgggtgtaggccgtgattggcttgaagcgaaacaagactaatga

SEQ ID NO: 1286 - protein, 844 aa, synthetic construct
  REGION 1..844: note = DNA Polymerase Variant
MHHHHHHGGSGMLPLFDLEEPPKRVLLVDGHHLAYRTFYALSLTTSRGEPVQMVYGFARSLLKALKEDGQAVVVVFDAKAPSFRHEAYEAYKAGRAPTPEDFPRQLALVKRLVDLLGLVRLEAPGYEADDVLGTLAKKAEREGMEVCILTGDRDFFQLLSEKVSVLLPDGTLVTPKDVQEKYGVPPERWVDFRALTGDRSDNIPGVAGIGEKTALRLLAEWGSVENLLKNLDRVKPDSLRRKIEAHLEDLRLSLDLVRIRTDLPLEVDFKALRRRTPDLEGLRAFLEELELGSLLHEFGLLGGEKPREEAPWPPPEGAFVGFLLSRKEPMWAELLALAAAAEGRVHRATSPVEALADLKEARGFLAKDLAVLALREGVALDPTDDPLLVAYLLDSANTNPERVARRYGGEFTEDAAERALLSERLFQTLFPRLSEKLLWLYQEVERPLSRVLAHMEARGVRLDVPLLEALSFEAAKELERLEGEVFRLAGHPFNLNSRDQLEKVLFDELGLTPVTRTEKTGKRSTSAAALEALRGVHPIVELILQYRELSKLKSTYLDRLPRLVHPRTGRLHTRFNQTATATGRLSSSDPNLQNIPVRTPLGQHIRKAFVAEEGWLLLAADYSQIELRVLAHLSGDENLKRVFREGKDIHTETAAWMFGVDSALVDPKMRRAAKTVNFGVLYGMSAARLSQELGIDYKEAEAFIERYFQSFPKVRAWIERTLEEGRTRGYVETLFGRRRYVPDLTSRVRSVREAAERMAWNMPVQGTAADLMKIAMVKLFPRLKPLGAHLLLQVHDELVLEVPEDRAEEAKALVREVMENAYPLDVPLEVEVGVGRDWLEAKQD

SEQ ID NO: 1287 - DNA, 2538 bp, synthetic construct; identical to SEQ ID NO: 1205
  misc_feature 1..2538: note = DNA Polymerase Variant
  source 1..2538: mol_type = other DNA

SEQ ID NO: 1288 - protein, 844 aa, synthetic construct; identical to SEQ ID NO: 1206
  REGION 1..844: note = DNA Polymerase Variant

SEQ ID NO: 1289 - DNA, 2538 bp, synthetic construct
  misc_feature 1..2538: note = DNA Polymerase Variant
  source 1..2538: mol_type = other DNA
atgcaccatcatcatcatcatggcggtagcggcatgttaccgctgtttgatttggaagaaccaccaaaacgcgtgctgcttgttgacggccatcatctggcgtatcgtaccttctacgcactgagccttacgacctcacgtggtgagcctgtccagatggtgtatgggtttgctcgctccctgctgaaagccctgaaggaagatggtcaagccgtagtagtggttttcgatgcgaaggcaccgtcgtttcgtcacgaagcgtacgaggcctataaagctggccgcgcaccgaccccggaagactttccgcgtcagttagcgctcgtcaaacgcctcgtggatttgctgggattagttcgcttggaagctcctggctacgaggcggacgacgtgctcggtacactggccaagaaagcagaacgtgaaggcatggaggtctgcattcttaccggtgatcgcgatttcttccagctgctgtctgagaaagtgagcgttttgctgcccgatggcacgttagtaaccccgaaagatgtgcaagagaaatatggagttccgccagaacgttgggtggactttcgcgcactgactggtgatcgttcagacaacatcccgggcgttgccgggattggtgaaaagacggcgctgcgcctgctggcagaatggggctcggtggaaaatctgctcaagaaccttgatcgtgtgaaacctgatagcttacgccgcaagatcgaagcccacctggaagacttgcgtctgagtctggatcttgtacgtattcgcaccgatctgccgttggaagtagactttaaagctctgcgtcgtcgcacacccgatttagaggggttacgcgcgttcctcgaagaactggagctgggctccctgctgcatgaattcggtttgttgggcggagagaaaccgcgtgaagaagcaccatggccgccgcccgagggtgcctttgtcggctttcttctgtcacgcaaagagccaatgtgggcggaactgttagctcttgcagccgccgcggaagggcgtgttcaccgcgcgacctctcctgtcgaggccctcgctgacctcaaagaagcacgtggtttcttggcgaaagatttagccgtgcttgcattacgcgaaggcgttgcgctcgatccgacggacgacccgcttttggtggcttatttgctcgatagcgcgaataccaacccggaacgtgtcgcccgtcgttacggcggcgagtttactgaagatgcggcagaacgcgcgttgcttagcgaacgcctcttccagacgttatttccacgtctttcggagaaattactctggctctatcaggaagtcgaacgtccattgagtcgcgtgcttgcccatatggaggctcgcggtgtgcgcttagatgttccgttgttagaagcactcagcttcgaggcggcaaaagaactggaacgtcttgaaggcgaagtctttcgtttagcggggcatcccttcaatctcaactctcgcgaccaattggagaaagtgctctttgatgaattaggtttaacccctgtcacgcgtacagagaagaccggcaaacgttccacttcggcagccgccttggaagcacttcgtggtgtgcacccgatagtcgagttgattttgcagtatcgcgagctcagcaaactcaaatcaacctatcttgataggttacctcgtcttgttcatccacgtacgcagcgtttacacacccgcttcaatcaaacggcaacagccaccgggcgcttgtcgtcgagtgacccgaacctccagaatattccagtgcgcacgccgctgggccaacacattcgtaaagcgtttgttgcggaagaaggttggttattacttgcggccgattactcccagatcgaacttcgtgtattggcgcatctctctggcgacgagaatcttaaacgcgtgtttcgcgaaggcaaggatattcacactgaaaccgcagcctggatgttcggggtggactcggccttagtggaccccaagatgcgtcgtgccgccaagaccgtcaactttggcgtactctatggtatgtcagcagcacgtcttagtcaggaattgggcattgactacaaagaagctgaagcgtttatcgagcgctatttccaatcctttccgaaagttcgcgcgtggattgaacgtacgctcgaagaaggtcgcactcgcggctatgtggaaacgttattcgggcgtcgtcgctacgttccagatcttacgtctcgtgtccgctcagtgcgcgaagctgctgagcgtatggcctggaatatgcctgttcagggaacagcggcggacctcatgaagatcgccatggtgaaattgtttccgcgcttgaaacccttaggagcccaccttcttctgcaggtgcatgatgaattggtcttggaagtacccgaggatcgcgcagaagaagccaaagcactcgtgaaagaggttatggaaaacgcgtatccgttagatgttccgttggaggtcgaagtgggtgtaggccgtgattggcttgaagcgaaacaagactaatga

SEQ ID NO: 1290 - protein, 844 aa, synthetic construct
  REGION 1..844: note = DNA Polymerase Variant
MHHHHHHGGSGMLPLFDLEEPPKRVLLVDGHHLAYRTFYALSLTTSRGEPVQMVYGFARSLLKALKEDGQAVVVVFDAKAPSFRHEAYEAYKAGRAPTPEDFPRQLALVKRLVDLLGLVRLEAPGYEADDVLGTLAKKAEREGMEVCILTGDRDFFQLLSEKVSVLLPDGTLVTPKDVQEKYGVPPERWVDFRALTGDRSDNIPGVAGIGEKTALRLLAEWGSVENLLKNLDRVKPDSLRRKIEAHLEDLRLSLDLVRIRTDLPLEVDFKALRRRTPDLEGLRAFLEELELGSLLHEFGLLGGEKPREEAPWPPPEGAFVGFLLSRKEPMWAELLALAAAAEGRVHRATSPVEALADLKEARGFLAKDLAVLALREGVALDPTDDPLLVAYLLDSANTNPERVARRYGGEFTEDAAERALLSERLFQTLFPRLSEKLLWLYQEVERPLSRVLAHMEARGVRLDVPLLEALSFEAAKELERLEGEVFRLAGHPFNLNSRDQLEKVLFDELGLTPVTRTEKTGKRSTSAAALEALRGVHPIVELILQYRELSKLKSTYLDRLPRLVHPRTQRLHTRFNQTATATGRLSSSDPNLQNIPVRTPLGQHIRKAFVAEEGWLLLAADYSQIELRVLAHLSGDENLKRVFREGKDIHTETAAWMFGVDSALVDPKMRRAAKTVNFGVLYGMSAARLSQELGIDYKEAEAFIERYFQSFPKVRAWIERTLEEGRTRGYVETLFGRRRYVPDLTSRVRSVREAAERMAWNMPVQGTAADLMKIAMVKLFPRLKPLGAHLLLQVHDELVLEVPEDRAEEAKALVKEVMENAYPLDVPLEVEVGVGRDWLEAKQD

SEQ ID NO: 1291 - DNA, 2538 bp, synthetic construct
  misc_feature 1..2538: note = DNA Polymerase Variant
  source 1..2538: mol_type = other DNA
atgcaccatcatcatcatcatggcggtagcggcatgttaccgctgtttgatttggaagaaccaccaaaacgcgtgctgcttgttgacggccatcatctggcgtatcgtaccttctacgcactgagccttacgacctcacgtggtgagcctgtccagatggtgtatgggtttgctcgctccctgctgaaagccctgaaggaagatggtcaagccgtagtagtggttttcgatgcgaaggcaccgtcgtttcgtcacgaagcgtacgaggcctataaagctggccgcgcaccgaccccggaagactttccgcgtcagttagcgctcgtcaaacgcctcgtggatttgctgggattagttcgcttggaagctcctggctacgaggcggacgacgtgctcggtacactggccaagaaagcagaacgtgaaggcatggaggtcgctattcttaccggtgatcgcgatttcttccagctgctgtctgagaaagtgagcgttttgctgcccgatggcacgttagtaaccccgaaagatgtgcaagagaaatatggagttccgccagaacgttgggtggactttcgcgcactgactggtgatcgttcagacaacatcccgggcgttgccgggattggtgaaaagacggcgctgcgcctgctggcagaatggggctcggtggaaaatctgctcaagaaccttgatcgtgtgaaacctgatagcttacgccgcaagatcgaagcccacctggaagacttgcgtctgagtctggatcttgtacgtattcgcaccgatctgccgttggaagtagactttaaagctctgcgtcgtcgcacacccgatttagaggggttacgcgcgttcctcgaagaactggagctgggctccctgctgcatgaattcggtttgttgggcggagagaaaccgcgtgaagaagcaccatggccgccgcccgagggtgcctttgtcggctttcttctgtcacgcaaagagccaatgtgggcggaactgttagctcttgcagccgccgcggaagggcgtgttcaccgcgcgacctctcctgtcgaggccctcgctgacctcaaagaagcacgtggtttcttggcgaaagatttagccgtgcttgcattacgcgaaggcgttgcgctcgatccgacggacgacccgcttttggtggcttatttgctcgatagcgcgaataccaacccggaacgtgtcgcccgtcgttacggcggcgagtttactgaagatgcggcagaacgcgcgttgcttagcgaacgcctcttccagacgttatttccacgtctttcggagaaattactctggctctatcaggaagtcgaacgtccattgagtcgcgtgcttgcccatatggaggctcgcggtgtgcgcttagatgttccgttgttagaagcactcagcttcgaggcggcaaaagaactggaacgtcttgaaggcgaagtctttcgtttagcggggcatcccttcaatctcaactctcgcgaccaattggagaaagtgctctttgatgaattaggtttaacccctgtcacgcgtacagagaagaccggcaaacgttccacttcggcagccgccttggaagcacttcgtggtgtgcacccgatcgtcgagttgattttgcagtatcgcgagctcagcaaactcaaatcaacctatcttgataggttacctcgtcttgttcatccacgtacgggtcgtttacacacccgcttcaatcaaacggcaacagccaccgggcgcttgtcgtcgagtgacccgaacctccagaatattccagtgcgcacgccgctgggccaacacattcgtaaagcgtttgttgcggaagaaggttggttattacttgcggccgattactcccagatcgaacttcgtgtattggcgcatctctctggcgacgagaatcttaaacgcgtgtttcgcgaaggcaaggatattcacactgaaaccgcagcctggatgttcggggtggactcggccttagtggaccccaagatgcgtcgtgccgccaagaccgtcaactttggcgtactctatggtatgtcagcagcacgtcttagtcaggaattgggcattgactacaaagaagctgaagcgtttatcgagcgctatttccaatcctttccgaaagttcgcgcgtggattgaacgtacgctcgaagaaggtcgcactcgcggctatgtggaaacgttattcgggcgtcgtcgctacgttccagatcttacgtctcgtgtccgctcagtgcgcgaagctgctgagcgtatggcctggaatatgcctgttcagggaacagcggcggacctcatgaagatcgccatggtgaaattgtttccgcgcttgaaacccttaggagcccaccttcttctgcaggtgcatgatgaattggtcttggaagtacccgaggatcgcgcagaagaagccaaagcactcgtgaaagaggttatggaaaacgcgtatccgttagatgttccgttggaggtcgaagtgggtgtaggccgtgattggcttgaagcgaaacaagactaatga

SEQ ID NO: 1292 - protein, 844 aa, synthetic construct
  REGION 1..844: note = DNA Polymerase Variant
MHHHHHHGGSGMLPLFDLEEPPKRVLLVDGHHLAYRTFYALSLTTSRGEPVQMVYGFARSLLKALKEDGQAVVVVFDAKAPSFRHEAYEAYKAGRAPTPEDFPRQLALVKRLVDLLGLVRLEAPGYEADDVLGTLAKKAEREGMEVAILTGDRDFFQLLSEKVSVLLPDGTLVTPKDVQEKYGVPPERWVDFRALTGDRSDNIPGVAGIGEKTALRLLAEWGSVENLLKNLDRVKPDSLRRKIEAHLEDLRLSLDLVRIRTDLPLEVDFKALRRRTPDLEGLRAFLEELELGSLLHEFGLLGGEKPREEAPWPPPEGAFVGFLLSRKEPMWAELLALAAAAEGRVHRATSPVEALADLKEARGFLAKDLAVLALREGVALDPTDDPLLVAYLLDSANTNPERVARRYGGEFTEDAAERALLSERLFQTLFPRLSEKLLWLYQEVERPLSRVLAHMEARGVRLDVPLLEALSFEAAKELERLEGEVFRLAGHPFNLNSRDQLEKVLFDELGLTPVTRTEKTGKRSTSAAALEALRGVHPIVELILQYRELSKLKSTYLDRLPRLVHPRTGRLHTRFNQTATATGRLSSSDPNLQNIPVRTPLGQHIRKAFVAEEGWLLLAADYSQIELRVLAHLSGDENLKRVFREGKDIHTETAAWMFGVDSALVDPKMRRAAKTVNFGVLYGMSAARLSQELGIDYKEAEAFIERYFQSFPKVRAWIERTLEEGRTRGYVETLFGRRRYVPDLTSRVRSVREAAERMAWNMPVQGTAADLMKIAMVKLFPRLKPLGAHLLLQVHDELVLEVPEDRAEEAKALVKEVMENAYPLDVPLEVEVGVGRDWLEAKQD

SEQ ID NO: 1293 - DNA, 2538 bp, synthetic construct
  misc_feature 1..2538: note = DNA Polymerase Variant
  source 1..2538: mol_type = other DNA
atgcaccatcatcatcatcatggcggtagcggcatgttaccgctgtttgatttggaagaaccaccaaaacgcgtgctgcttgttgacggccatcatctggcgtatcgtaccttctacgcactgagccttacgacctcacgtggtgagcctgtccagatggtgtatgggtttgctcgctccctgctgaaagccctgaaggaagatggtcaagccgtagtagtggttttcgatgcgaaggcaccgtcgtttcgtcacgaagcgtacgaggcctataaagctggccgcgcaccgaccccggaagactttccgcgtcagttagcgctcgtcaaacgcctcgtggatttgctgggattagttcgcttggaagctcctggctacgaggcggacgacgtgctcggtacactggccaagaaagcagaacgtgaaggcatggaggtctgcattcttaccggtgatcgcgatttcttccagctgctgtctgagaaagtgagcgttttgctgcccgatggcacgttagtaaccccgaaagatgtgcaagagaaatatggagttccgccagaacgttgggtggactttcgcgcactgactggtgatcgttcagacaacatcccgggcgttgccgggattggtgaaaagacggcgctgcgcctgctggcagaatggggctcggtggaaaatctgctcaagaaccttgatcgtgtgaaacctgatagcttacgccgcaagatcgaagcccacctggaagacttgcgtctgagtctggatcttgtacgtattcgcaccgatctgccgttggaagtagactttaaagctctgcgtcgtcgcacacccgatttagaggggttacgcgcgttcctcgaagaactggagctgggctccctgctgcatgaattcggtttgttgggcggagagaaaccgcgtgaagaagcaccatggccgccgcccgagggtgcctttgtcggctttcttctgtcacgcaaagagccaatgtgggcggaactgttagctcttgcagccgccacggaagggcgtgttcaccgcgcgacctctcctgtcgaggccctcgctgacctcaaagaagcacgtggtttcttggcgaaagatttagccgtgcttgcattacgcgaaggcgttgcgctcgatccgacggacgacccgcttttggtggcttatttgctcgatagcgcgaataccaacccggaacgtgtcgcccgtcgttacggcggcgagtttactgaagatgcggcagaacgcgcgttgcttagcgaacgcctcttccagacgttatttccacgtctttcggagaaattactctggctctatcaggaagtcgaacgtccattgagtcgcgtgcttgcccatatggaggctcgcggtgtgcgcttagatgttccgttgttagaagcactcagcttcgaggcggcaaaagaactggaacgtcttgaaggcgaagtctttcgtttagcggggcatcccttcaatctcaactctcgcgaccaattggagaaagtgctctttgatgaattaggtttaacccctgtcacgcgtacagagaagaccggcaaacgttccacttcggcagccgccttggaagcacttcgtggtgtgcacccgatcgtcgagttgattttgcagtatcgcgagctcagcaaactcaaatcaacctatcttgataggttacctcgtcttgttcatccacgtacgggtcgtttacacacccgcttcaatcaaacggcaacagccaccgggcgcttgtcgtcgagtgacccgaacctccagaatattccagtgcgcacgccgctgggccaacacattcgtaaagcgtttgttgcggaagaaggttggttattacttgcggccgattactcccagatcgaacttcgtgtattggcgcatctctctggcgacgagaatcttaaacgcgtgtttcgcgaaggcaaggatattcacactgaaaccgcagcctggatgttcggggtggactcggccttagtggaccccaagatgcgtcgtgccgccaagaccgtcaactttggcgtactctatggtatgtcagcagcacgtcttagtcaggaattgggcattgactacaaagaagctgaagcgtttatcgagcgctatttccaatcctttccgaaagttcgcgcgtggattgaacgtacgctcgaagaaggtcgcactcgcggctatgtggaaacgttattcgggcgtcgtcgctacgttccagatcttacgtctcgtgtccgctcagtgcgcgaagctgctgagcgtatggcctggaatatgcctgttcagggaacagcggcggacctcatgaagatcgccatggtgaaattgtttccgcgcttgaaacccttaggagcccaccttcttctgcaggtgcatgatgaattggtcttggaagtacccgaggatcgcgcagaagaagccaaagcactcgtgaaagaggttatggaaaacgcgtatccgttagatgttccgttggaggtcgaagtgggtgtaggccgtgattggcttgaagcgaaacaagactaatga

SEQ ID NO: 1294 - protein, 844 aa, synthetic construct
  REGION 1..844: note = DNA Polymerase Variant
MHHHHHHGGSGMLPLFDLEEPPKRVLLVDGHHLAYRTFYALSLTTSRGEPVQMVYGFARSLLKALKEDGQAVVVVFDAKAPSFRHEAYEAYKAGRAPTPEDFPRQLALVKRLVDLLGLVRLEAPGYEADDVLGTLAKKAEREGMEVCILTGDRDFFQLLSEKVSVLLPDGTLVTPKDVQEKYGVPPERWVDFRALTGDRSDNIPGVAGIGEKTALRLLAEWGSVENLLKNLDRVKPDSLRRKIEAHLEDLRLSLDLVRIRTDLPLEVDFKALRRRTPDLEGLRAFLEELELGSLLHEFGLLGGEKPREEAPWPPPEGAFVGFLLSRKEPMWAELLALAAATEGRVHRATSPVEALADLKEARGFLAKDLAVLALREGVALDPTDDPLLVAYLLDSANTNPERVARRYGGEFTEDAAERALLSERLFQTLFPRLSEKLLWLYQEVERPLSRVLAHMEARGVRLDVPLLEALSFEAAKELERLEGEVFRLAGHPFNLNSRDQLEKVLFDELGLTPVTRTEKTGKRSTSAAALEALRGVHPIVELILQYRELSKLKSTYLDRLPRLVHPRTGRLHTRFNQTATATGRLSSSDPNLQNIPVRTPLGQHIRKAFVAEEGWLLLAADYSQIELRVLAHLSGDENLKRVFREGKDIHTETAAWMFGVDSALVDPKMRRAAKTVNFGVLYGMSAARLSQELGIDYKEAEAFIERYFQSFPKVRAWIERTLEEGRTRGYVETLFGRRRYVPDLTSRVRSVREAAERMAWNMPVQGTAADLMKIAMVKLFPRLKPLGAHLLLQVHDELVLEVPEDRAEEAKALVKEVMENAYPLDVPLEVEVGVGRDWLEAKQD

SEQ ID NO: 1295 - DNA, 2538 bp, synthetic construct
  misc_feature 1..2538: note = DNA Polymerase Variant
  source 1..2538: mol_type = other DNA
atgcaccatcatcatcatcatggcggtagcggcatgttaccgctgtttgatttggaagaaccaccaaaacgcgtgctgcttgttgacggccatcatctggcgtatcgtaccttctacgcactgagccttacgacctcacgtggtgagcctgtccagatggtgtatgggtttgctcgctccctgctgaaagccctgaaggaagatggtcaagccgtagtagtggttttcgatgcgaaggcaccgtcgtttcgtcacgaagcgtacgaggcctataaagctggccgcgcaccgaccccggaagactttccgcgtcagttagcgctcgtcaaacgcctcgtggatttgctgggattagttcgcttggaagctcctggctacgaggcggacgacgtgctcggtacactggccaagaaagcagaacgtgaaggcatggaggtctgcattcttaccggtgatcgcgatttcttccagctgctgtctgagaaagtgagcgttttgctgcccgatggcacgttagtaaccccgaaagatgtgcaagagaaatatggagttccgccagaacgttgggtggactttcgcgcactgactggtgatcgttcagacaacatcccgggcgttgccgggattggtgaaaagacggcgctgcgcctgctggcagaatggggctcggtggaaaatctgctcaagaaccttgatcgtgtgaaacctgatagcttacgccgcaagatcgaagcccacctggaagacttgcgtctgagtctggatcttgtacgtattcgcaccgatctgccgttggaagtagactttaaagctctgcgtcgtcgcacacccgatttagaggggttacgcgcgttcctcgaagaactggagctgggctccctgctgcatgaattcggtttgttgggcggagagaaaccgcgtgaagaagcaccatggccgccgcccgagggtgcctttgtcggctttcttctgtcacgcaaagagccaatgtgggcggaactgttagctcttgcagccgccgcggaagggcgtgttcaccgcgcgacctctcctgtcgaggccctcgctgacctcaaagaagcacgtggtttcttggcgaaagatttagccgtgcttgcattacgcgaaggcgttgcgctcgatccgacggacgacccgcttttggtggcttatttgctcgatagcgcgaataccaacccggaacgtgtcgcccgtcgttacggcggcgagtttactgaagatgcggcagaacgcgcgttgcttagcgaacgcctcttccagacgttatttccacgtctttcggagaaattactctggctctatcaggaagtcgaacgtccattgagtcgcgtgcttgcccatatggaggctcgcggtgtgcgcttagatgttccgttgttagaagcactcagcttcgaggcggcaaaagaactggaacgtcttgaaggcgaagtctttcgtttagcggggcatcccttcaatctcaactctcgcgaccaattggagaaagtgctctttgatgaattaggtttaacccctgtcacgcgtacagagaagaccggcaaacgttccacttcggcagccgccttggaagcacttcgtggtgtgcacccgatcgtcgagttgattttgcagtatcgcgagctcagcaaactcaaatcaacctatcttgataggttacctcgtcttgttcatccacgtacgggtcgtttacacacccgcttcaatcaaacggcaacagccaccgggcgcttgtcgtcgagtgacccgaacctccagaatattccagtgcgcacgccgctgggccaacacattcgtaaagcgtttgttgcggaagaaggttggttattacttgcggccgattactcccagatcgaacttcgtgtattggcgcatctctctggcgacgagaatcttaaacgcgtgtttcgcgaaggcaaggatattcacactgaaaccgcagcctggatgttcggggtggactcggccttagtggaccccaagatgcgtcgtgccgccaagaccgtcaactttggcgtactctatggtatgtcagcagcacgtcttagtcaggaattgggcattgactacaaagaagctgaagcgtttatcgagcgctatttccaatcctttccgaaagttcgcgcgtggattgaacgtacgctcgaagaaggtcgcactcgcggctatgtggaaacgttattcgggcgtcgtcgctacgttccagatcttacgtctcgtgtccgctcagtgcgcgaagctgctgagcgtatggcctggaatatgcctgttcagggaacagcggcggacctcatgaagatcgccatggtgaaattgtttccgcgcttgaaacccttaggagcccaccttcttctgcaggtgcatgatgaattggtcttggaagtacccgaggatcgcgcagaagaagccaaagcactcgtgaaagaggttatggaaaacgcgtatccgatggatgttccgttggaggtcgaagtgggtgtaggccgtgattggcttgaagcgaaacaagactaatga

SEQ ID NO: 1296 - protein, 844 aa, synthetic construct
  REGION 1..844: note = DNA Polymerase Variant
MHHHHHHGGSGMLPLFDLEEPPKRVLLVDGHHLAYRTFYALSLTTSRGEPVQMVYGFARSLLKALKEDGQAVVVVFDAKAPSFRHEAYEAYKAGRAPTPEDFPRQLALVKRLVDLLGLVRLEAPGYEADDVLGTLAKKAEREGMEVCILTGDRDFFQLLSEKVSVLLPDGTLVTPKDVQEKYGVPPERWVDFRALTGDRSDNIPGVAGIGEKTALRLLAEWGSVENLLKNLDRVKPDSLRRKIEAHLEDLRLSLDLVRIRTDLPLEVDFKALRRRTPDLEGLRAFLEELELGSLLHEFGLLGGEKPREEAPWPPPEGAFVGFLLSRKEPMWAELLALAAAAEGRVHRATSPVEALADLKEARGFLAKDLAVLALREGVALDPTDDPLLVAYLLDSANTNPERVARRYGGEFTEDAAERALLSERLFQTLFPRLSEKLLWLYQEVERPLSRVLAHMEARGVRLDVPLLEALSFEAAKELERLEGEVFRLAGHPFNLNSRDQLEKVLFDELGLTPVTRTEKTGKRSTSAAALEALRGVHPIVELILQYRELSKLKSTYLDRLPRLVHPRTGRLHTRFNQTATATGRLSSSDPNLQNIPVRTPLGQHIRKAFVAEEGWLLLAADYSQIELRVLAHLSGDENLKRVFREGKDIHTETAAWMFGVDSALVDPKMRRAAKTVNFGVLYGMSAARLSQELGIDYKEAEAFIERYFQSFPKVRAWIERTLEEGRTRGYVETLFGRRRYVPDLTSRVRSVREAAERMAWNMPVQGTAADLMKIAMVKLFPRLKPLGAHLLLQVHDELVLEVPEDRAEEAKALVKEVMENAYPMDVPLEVEVGVGRDWLEAKQD

SEQ ID NO: 1297 - DNA, 2538 bp, synthetic construct
  misc_feature 1..2538: note = DNA Polymerase Variant
  source 1..2538: mol_type = other DNA
atgcaccatcatcatcatcatggcggtagcggcatgttaccgctgtttgatttggaagaaccaccaaaacgcgtgctgcttgttgacggccatcatctggcgtatcgtaccttctacgcactgagccttacgacctcacgtggtgagcctgtccagatggtgtatgggtttgctcgctccctgctgaaagccctgaaggaagatggtcaagccgtagtagtggttttcgatgttaaggcaccgtcgtttcgtcacgaagcgtacgaggcctataaagctggccgcgcaccgaccccggaagactttccgcgtcagttagcgctcgtcaaacgcctcgtggatttgctgggattagttcgcttggaagctcctggctacgaggcggacgacgtgctcggtacactggccaagaaagcagaacgtgaaggcatggaggtctgcattcttaccggtgatcgcgatttcttccagctgctgtctgagaaagtgagcgttttgctgcccgatggcacgttagtaaccccgaaagatgtgcaagagaaatatggagttccgccagaacgttgggtggactttcgcgcactgactggtgatcgttcagacaacatcccgggcgttgccgggattggtgaaaagacggcgctgcgcctgctggcagaatggggctcggtggaaaatctgctcaagaaccttgatcgtgtgaaacctgatagcttacgccgcaagatcgaagcccacctggaagacttgcgtctgagtctggatcttgtacgtattcgcaccgatctgccgttggaagtagactttaaagctctgcgtcgtcgcacacccgatttagaggggttacgcgcgttcctcgaagaactggagctgggctccctgctgcatgaattcggtttgttgggcggagagaaaccgcgtgaagaagcaccatggccgccgcccgagggtgcctttgtcggctttcttctgtcacgcaaagagccaatgtgggcggaactgttagctcttgcagccgccgcggaagggcgtgttcaccgcgcgacctctcctgtcgaggccctcgctgacctcaaagaagcacgtggtttcttggcgaaagatttagccgtgcttgcattacgcgaaggcgttgcgctcgatccgacggacgacccgcttttggtggcttatttgctcgatagcgcgaataccaacccggaacgtgtcgcccgtcgttacggcggcgagtttactgaagatgcggcagaacgcgcgttgcttagcgaacgcctcttccagacgttatttccacgtctttcggagaaattactctggctctatcaggaagtcgaacgtccattgagtcgcgtgcttgcccatatggaggctcgcggtgtgcgcttagatgttccgttgttagaagcactcagcttcgaggcggcaaaagaactggaacgtcttgaaggcgaagtctttcgtttagcggggcatcccttcaatctcaactctcgcgaccaattggagaaagtgctctttgatgaattaggtttaacccctgtcacgcgtacagagaagaccggcaaacgttccacttcggcagccgccttggaagcacttcgtggtgtgcacccgatcgtcgagttgattttgcagtatcgcgagctcagcaaactcaaatcaacctatcttgataggttacctcgtcttgttcatccacgtacgggtcgtttacacacccgcttcaatcaaacggcaacagccaccgggcgcttgtcgtcgagtgacccgaacctccagaatattccagtgcgcacgccgctgggccaacacattcgtaaagcgtttgttgcggaagaaggttggttattacttgcggccgattactcccagatcgaacttcgtgtattggcgcatctctctggcgacgagaatcttaaacgcgtgtttcgcgaaggcaaggatattcacactgaaaccgcagcctggatgttcggggtggactcggccttagtggaccccaagatgcgtcgtgccgccaagaccgtcaactttggcgtactctatggtatgtcagcagcacgtcttagtcaggaattgggcattgactacaaagaagctgaagcgtttatcgagcgctatttccaatcctttccgaaagttcgcgcgtggattgaacgtacgctcgaagaaggtcgcactcgcggctatgtggaaacgttattcgggcgtcgtcgctacgttccagatcttacgtctcgtgtccgctcagtgcgcgaagctgctgagcgtatggcctggaatatgcctgttcagggaacagcggcggacctcatgaagatcgccatggtgaaattgtttccgcgcttgaaacccttaggagcccaccttcttctgcaggtgcatgatgaattggtcttggaagtacccgaggatcgcgcagaagaagccaaagcactcgtgaaagaggttatggaaaacgcgtatccgttagatgttccgttggaggtcgaagtgggtgtaggccgtgattggcttgaagcgaaacaagactaatga

SEQ ID NO: 1298 - protein, 844 aa, synthetic construct
  REGION 1..844: note = DNA Polymerase Variant
MHHHHHHGGSGMLPLFDLEEPPKRVLLVDGHHLAYRTFYALSLTTSRGEPVQMVYGFARSLLKALKEDGQAVVVVFDVKAPSFRHEAYEAYKAGRAPTPEDFPRQLALVKRLVDLLGLVRLEAPGYEADDVLGTLAKKAEREGMEVCILTGDRDFFQLLSEKVSVLLPDGTLVTPKDVQEKYGVPPERWVDFRALTGDRSDNIPGVAGIGEKTALRLLAEWGSVENLLKNLDRVKPDSLRRKIEAHLEDLRLSLDLVRIRTDLPLEVDFKALRRRTPDLEGLRAFLEELELGSLLHEFGLLGGEKPREEAPWPPPEGAFVGFLLSRKEPMWAELLALAAAAEGRVHRATSPVEALADLKEARGFLAKDLAVLALREGVALDPTDDPLLVAYLLDSANTNPERVARRYGGEFTEDAAERALLSERLFQTLFPRLSEKLLWLYQEVERPLSRVLAHMEARGVRLDVPLLEALSFEAAKELERLEGEVFRLAGHPFNLNSRDQLEKVLFDELGLTPVTRTEKTGKRSTSAAALEALRGVHPIVELILQYRELSKLKSTYLDRLPRLVHPRTGRLHTRFNQTATATGRLSSSDPNLQNIPVRTPLGQHIRKAFVAEEGWLLLAADYSQIELRVLAHLSGDENLKRVFREGKDIHTETAAWMFGVDSALVDPKMRRAAKTVNFGVLYGMSAARLSQELGIDYKEAEAFIERYFQSFPKVRAWIERTLEEGRTRGYVETLFGRRRYVPDLTSRVRSVREAAERMAWNMPVQGTAADLMKIAMVKLFPRLKPLGAHLLLQVHDELVLEVPEDRAEEAKALVKEVMENAYPLDVPLEVEVGVGRDWLEAKQD

SEQ ID NO: 1299 - DNA, 2538 bp, synthetic construct
  misc_feature 1..2538: note = DNA Polymerase Variant
  source 1..2538: mol_type = other DNA
atgcaccatcatcatcatcatggcggtagcggcatgttaccgctgtttgatttggaagaaccaccaaaacgcgtgctgcttgttgacggccatcatctggcgtatcgtaccttctacgcactgagccttacgacctcacgtggtgagcctgtccagatggtgtatgggtttgctcgctccctgctgaaagccctgaaggaacagggtcaagccgtagtagtggttttcgatgcgaaggcaccgtcgtttcgtcacgaagcgtacgaggcctataaagctggccgcgcaccgaccccggaagactttccgcgtcagttagcgctcgtcaaacgcctcgtggatttgctgggattagttcgcttggaagctcctggctacgaggcggacgacgtgctcggtacactggccaagaaagcagaacgtgaaggcatggaggtctgcattcttaccggtgatcgcgatttcttccagctgctgtctgagaaagtgagcgttttgctgcccgatggcacgttagtaaccccgaaagatgtgcaagagaaatatggagttccgccagaacgttgggtggactttcgcgcactgactggtgatcgttcagacaacatcccgggcgttgccgggattggtgaaaagacggcgctgcgcctgctggcagaatggggctcggtggaaaatctgctcaagaaccttgatcgtgtgaaacctgatagcttacgccgcaagatcgaagcccacctggaagacttgcgtctgagtctggatcttgtacgtattcgcaccgatctgccgttggaagtagactttaaagctctgcgtcgtcgcacacccgatttagaggggttacgcgcgttcctcgaagaactggagctgggctccctgctgcatgaattcggtttgttgggcggagagaaaccgcgtgaagaagcaccatggccgccgcccgagggtgcctttgtcggctttcttctgtcacgcaaagagccaatgtgggcggaactgttagctcttgcagccgccgcggaagggcgtgttcaccgcgcgacctctcctgtcgaggccctcgctgacctcaaagaagcacgtggtttcttggcgaaagatttagccgtgcttgcattacgcgaaggcgttgcgctcgatccgacggacgacccgcttttggtggcttatttgctcgatagcgcgaataccaacccggaacgtgtcgcccgtcgttacggcggcgagtttactgaagatgcggcagaacgcgcgttgcttagcgaacgcctcttccagacgttatttccacgtctttcggagaaattactctggctctatcaggaagtcgaacgtccattgagtcgcgtgcttgcccatatggaggctcgcggtgtgcgcttagatgttccgttgttagaagcactcagcttcgaggcggcaaaagaactggaacgtcttgaaggcgaagtctttcgtttagcggggcatcccttcaatctcaactctcgcgaccaattggagaaagtgctctttgatgaattaggtttaacccctgtcacgcgtacagagaagaccggcaaacgttccacttcggcagccgccttggaagcacttcgtggtgtgcacccgatcgtcgagttgattttgcagtatcgcgagctcagcaaactcaaatcaacctatcttgataggttacctcgtcttgttcatccacgtacgggtcgtttacacacccgcttcaatcaaacggcaacagccaccgggcgcttgtcgtcgagtgacccgaacctccagaatattccagtgcgcacgccgctgggccaacacattcgtaaagcgtttgttgcggaagaaggttggttattacttgcggccgattactcccagatcgaacttcgtgtattggcgcatctctctggcgacgagaatcttaaacgcgtgtttcgcgaaggcaaggatattcacactgaaaccgcagcctggatgttcggggtggactcggccttagtggaccccaagatgcgtcgtgccgccaagaccgtcaactttggcgtactctatggtatgtcagcagcacgtcttagtcaggaattgggcattgactacaaagaagctgaagcgtttatcgagcgctatttccaatcctttccgaaagttcgcgcgtggattgaacgtacgctcgaagaaggtcgcactcgcggctatgtggaaacgttattcgggcgtcgtcgctacgttccagatcttacgtctcgtgtccgctcagtgcgcgaagctgctgagcgtatggcctggaatatgcctgttcagggaacagcggcggacctcatgaagatcgccatggtgaaattgtttccgcgcttgaaacccttaggagcccaccttcttctgcaggtgcatgatgaattggtcttggaagtacccgaggatcgcgcagaagaagccaaagcactcgtgaaagaggttatggaaaacgcgtatccgttagatgttccgttggaggtcgaagtgggtgtaggccgtgattggcttgaagcgaaacaagactaatga

SEQ ID NO: 1300 - protein, 844 aa, synthetic construct
  REGION 1..844: note = DNA Polymerase Variant
MHHHHHHGGSGMLPLFDLEEPPKRVLLVDGHHLAYRTFYALSLTTSRGEPVQMVYGFARSLLKALKEQGQAVVVVFDAKAPSFRHEAYEAYKAGRAPTPEDFPRQLALVKRLVDLLGLVRLEAPGYEADDVLGTLAKKAEREGMEVCILTGDRDFFQLLSEKVSVLLPDGTLVTPKDVQEKYGVPPERWVDFRALTGDRSDNIPGVAGIGEKTALRLLAEWGSVENLLKNLDRVKPDSLRRKIEAHLEDLRLSLDLVRIRTDLPLEVDFKALRRRTPDLEGLRAFLEELELGSLLHEFGLLGGEKPREEAPWPPPEGAFVGFLLSRKEPMWAELLALAAAAEGRVHRATSPVEALADLKEARGFLAKDLAVLALREGVALDPTDDPLLVAYLLDSANTNPERVARRYGGEFTEDAAERALLSERLFQTLFPRLSEKLLWLYQEVERPLSRVLAHMEARGVRLDVPLLEALSFEAAKELERLEGEVFRLAGHPFNLNSRDQLEKVLFDELGLTPVTRTEKTGKRSTSAAALEALRGVHPIVELILQYRELSKLKSTYLDRLPRLVHPRTGRLHTRFNQTATATGRLSSSDPNLQNIPVRTPLGQHIRKAFVAEEGWLLLAADYSQIELRVLAHLSGDENLKRVFREGKDIHTETAAWMFGVDSALVDPKMRRAAKTVNFGVLYGMSAARLSQELGIDYKEAEAFIERYFQSFPKVRAWIERTLEEGRTRGYVETLFGRRRYVPDLTSRVRSVREAAERMAWNMPVQGTAADLMKIAMVKLFPRLKPLGAHLLLQVHDELVLEVPEDRAEEAKALVKEVMENAYPLDVPLEVEVGVGRDWLEAKQD

SEQ ID NO: 1301 - DNA, 2538 bp, synthetic construct
  misc_feature 1..2538: note = DNA Polymerase Variant
  source 1..2538: mol_type = other DNA
atgcaccatcatcatcatcatggcggtagcggcatgttaccgctgtttgatttggaagaaccaccaaaacgcgtgctgcttgttgacggccatcatctggcgtatcgtaccttctacgcactgagccttacgacctcacgtggtgagcctgtccagatggtgtatgggtttgctcgctccctgctgaaagccctgaaggaagatggtcaagccgtagtagtggttttcgatgcgaaggcaccgtcgtttcgtcacgaagcgtacgaggcctataaagctggccgcgcaccgaccccggaagactttccgcgtcagttagcgctcgtcaaacgcctcgtggatttgctgggattagttcgcttggaagctcctggctacgaggcggacgacgtgctcggtacactggccaagaaagcagaacgtgaaggcatggaggtctgcattcttaccggtgatcgcgatttcttccagctgctgtctgagaaagtgagcgttttgctgcccgatggcacgttagtaaccccgaaagatgtgcaagagaaatatggagttccgccagaacgttgggtggactttcgcgcactgactggtgatcgttcagacaacatcccgggcgttgccgggattggtgaaaagacggcgctgcgcctgctggcagaatggggctcggtggaaaatctgctcaagaaccttgatcgtgtgaaacctgatagcttacgccgcaagatcgaagcccacctggaagacttgcttctgagtctggatcttgtacgtattcgcaccgatctgccgttggaagtagactttaaagctctgcgtcgtcgcacacccgatttagaggggttacgcgcgttcctcgaagaactggagctgggctccctgctgcatgaattcggtttgttgggcggagagaaaccgcgtgaagaagcaccatggccgccgcccgagggtgcctttgtcggctttcttctgtcacgcaaagagccaatgtgggcggaactgttagctcttgcagccgccgcggaagggcgtgttcaccgcgcgacctctcctgtcgaggccctcgctgacctcaaagaagcacgtggtttcttggcgaaagatttagccgtgcttgcattacgcgaaggcgttgcgctcgatccgacggacgacccgcttttggtggcttatttgctcgatagcgcgaataccaacccggaacgtgtcgcccgtcgttacggcggcgagtttactgaagatgcggcagaacgcgcgttgcttagcgaacgcctcttccagacgttatttccacgtctttcggagaaattactctggctctatcaggaagtcgaacgtccattgagtcgcgtgcttgcccatatggaggctcgcggtgtgcgcttagatgttccgttgttagaagcactcagcttcgaggcggcaaaagaactggaacgtcttgaaggcgaagtctttcgtttagcggggcatcccttcaatctcaactctcgcgaccaattggagaaagtgctctttgatgaattaggtttaacccctgtcacgcgtacagagaagaccggcaaacgttccacttcggcagccgccttggaagcacttcgtggtgtgcacccgatcgtcgagttgattttgcagtatcgcgagctcagcaaactcaaatcaacctatcttgataggttacctcgtcttgttcatccacgtacgggtcgtttacacacccgcttcaatcaaacggcaacagccaccgggcgcttgtcgtcgagtgacccgaacctccagaatattccagtgcgcacgccgctgggccaacacattcgtaaagcgtttgttgcggaagaaggttggttattacttgcggccgattactcccagatcgaacttcgtgtattggcgcatctctctggcgacgagaatcttaaacgcgtgtttcgcgaaggcaaggatattcacactgaaaccgcagcctggatgttcggggtggactcggccttagtggaccccaagatgcgtcgtgccgccaagaccgtcaactttggcgtactctatggtatgtcagcagcacgtcttagtcaggaattgggcattgactacaaagaagctgaagcgtttatcgagcgctatttccaatcctttccgaaagttcgcgcgtggattgaacgtacgctcgaagaaggtcgcactcgcggctatgtggaaacgttattcgggcgtcgtcgctacgttccagatcttacgtctcgtgtccgctcagtgcgcgaagctgctgagcgtatggcctggaatatgcctgttcagggaacagcggcggacctcatgaagatcgccatggtgaaattgtttccgcgcttgaaacccttaggagcccaccttcttctgcaggtgcatgatgaattggtcttggaagtacccgaggatcgcgcagaagaagccaaagcactcgtgaaagaggttatggaaaacgcgtatccgttagatgttccgttggaggtcgaagtgggtgtaggccgtgattggcttgaagcgaaacaagactaatga

SEQ ID NO: 1302 - protein, 844 aa, synthetic construct
  REGION 1..844: note = DNA Polymerase Variant
MHHHHHHGGSGMLPLFDLEEPPKRVLLVDGHHLAYRTFYALSLTTSRGEPVQMVYGFARSLLKALKEDGQAVVVVFDAKAPSFRHEAYEAYKAGRAPTPEDFPRQLALVKRLVDLLGLVRLEAPGYEADDVLGTLAKKAEREGMEVCILTGDRDFFQLLSEKVSVLLPDGTLVTPKDVQEKYGVPPERWVDFRALTGDRSDNIPGVAGIGEKTALRLLAEWGSVENLLKNLDRVKPDSLRRKIEAHLEDLLLSLDLVRIRTDLPLEVDFKALRRRTPDLEGLRAFLEELELGSLLHEFGLLGGEKPREEAPWPPPEGAFVGFLLSRKEPMWAELLALAAAAEGRVHRATSPVEALADLKEARGFLAKDLAVLALREGVALDPTDDPLLVAYLLDSANTNPERVARRYGGEFTEDAAERALLSERLFQTLFPRLSEKLLWLYQEVERPLSRVLAHMEARGVRLDVPLLEALSFEAAKELERLEGEVFRLAGHPFNLNSRDQLEKVLFDELGLTPVTRTEKTGKRSTSAAALEALRGVHPIVELILQYRELSKLKSTYLDRLPRLVHPRTGRLHTRFNQTATATGRLSSSDPNLQNIPVRTPLGQHIRKAFVAEEGWLLLAADYSQIELRVLAHLSGDENLKRVFREGKDIHTETAAWMFGVDSALVDPKMRRAAKTVNFGVLYGMSAARLSQELGIDYKEAEAFIERYFQSFPKVRAWIERTLEEGRTRGYVETLFGRRRYVPDLTSRVRSVREAAERMAWNMPVQGTAADLMKIAMVKLFPRLKPLGAHLLLQVHDELVLEVPEDRAEEAKALVKEVMENAYPLDVPLEVEVGVGRDWLEAKQD

SEQ ID NO: 1303 - DNA, 2538 bp, synthetic construct
  misc_feature 1..2538: note = DNA Polymerase Variant
  source 1..2538: mol_type = other DNA
atgcaccatcatcatcatcatggcggtagcggcatgttaccgctgtttgatttggaagaaccaccaaaacgcgtgctgcttgttgacggccatcatctggcgtatcgtaccttctacgcactgagccttacgacctcacgtggtgagcctgtccagatggtgtatgggtttgctcgctccctgctgaaagccctgaaggaagatggtcaagccgtagtagtggttttcgatgcgaaggcaccgtcgtttcgtcacgaagcgtacgaggcctataaagctggccgcgcaccgaccccggaagactttccgcgtcagttagcgctcgtcaaacgcctcgtggatttgctgggattagttcgcttggaagctcctggctacgaggcggacgacgtgctcggtacactggccaagaaagcagaacgtgaaggcatggaggtctgcattcttaccggtgatcgcgatttcttccagctgctgtctgagaaagtgagcgttttgctgcccgatggcacgttagtaaccccgaaagatgtgcaagagaggtatggagttccgccagaacgttgggtggactttcgcgcactgactggtgatcgttcagacaacatcccgggcgttgccgggattggtgaaaagacggcgctgcgcctgctggcagaatggggctcggtggaaaatctgctcaagaaccttgatcgtgtgaaacctgatagcttacgccgcaagatcgaagcccacctggaagacttgcgtctgagtctggatcttgtacgtattcgcaccgatctgccgttggaagtagactttaaagctctgcgtcgtcgcacacccgatttagaggggttacgcgcgttcctcgaagaactggagctgggctccctgctgcatgaattcggtttgttgggcggagagaaaccgcgtgaagaagcaccatggccgccgcccgagggtgcctttgtcggctttcttctgtcacgcaaagagccaatgtgggcggaactgttagctcttgcagccgccgcggaagggcgtgttcaccgcgcgacctctcctgtcgaggccctcgctgacctcaaagaagcacgtggtttcttggcgaaagatttagccgtgcttgcattacgcgaaggcgttgcgctcgatccgacggacgacccgcttttggtggcttatttgctcgatagcgcgaataccaacccggaacgtgtcgcccgtcgttacggcggcgagtttactgaagatgcggcagaacgcgcgttgcttagcgaacgcctcttccagacgttatttccacgtctttcggagaaattactctggctctatcaggaagtcgaacgtccattgagtcgcgtgcttgcccatatggaggctcgcggtgtgcgcttagatgttccgttgttagaagcactcagcttcgaggcggcaaaagaactggaacgtcttgaaggcgaagtctttcgtttagcggggcatcccttcaatctcaactctcgcgaccaattggagaaagtgctctttgatgaattaggtttaacccctgtcacgcgtacagagaagaccggcaaacgttccacttcggcagccgccttggaagcacttcgtggtgtgcacccgatcgtcgagttgattttgcagtatcgcgagctcagcaaactcaaatcaacctatcttgataggttacctcgtcttgttcatccacgtacgggtcgtttacacacccgcttcaatcaaacggcaacagccaccgggcgcttgtcgtcgagtgacccgaacctccagaatattccagtgcgcacgccgctgggccaacacattcgtaaagcgtttgttgcggaagaaggttggttattacttgcggccgattactcccagatcgaacttcgtgtattggcgcatctctctggcgacgagaatcttaaacgcgtgtttcgcgaaggcaaggatattcacactgaaaccgcagcctggatgttcggggtggactcggccttagtggaccccaagatgcgtcgtgccgccaagaccgtcaactttggcgtactctatggtatgtcagcagcacgtcttagtcaggaattgggcattgactacaaagaagctgaagcgtttatcgagcgctatttccaatcctttccgaaagttcgcgcgtggattgaacgtacgctcgaagaaggtcgcactcgcggctatgtggaaacgttattcgggcgtcgtcgctacgttccagatcttacgtctcgtgtccgctcagtgcgcgaagctgctgagcgtatggcctggaatatgcctgttcagggaacagcggcggacctcatgaagatcgccatggtgaaattgtttccgcgcttgaaacccttaggagcccaccttcttctgcaggtgcatgatgaattggtcttggaagtacccgaggatcgcgcagaagaagccaaagcactcgtgaaagaggttatggaaaacgcgtatccgttagatgttccgttggaggtcgaagtgggtgtaggccgtgattggcttgaagcgaaacaagactaatga

SEQ ID NO: 1304 - protein, 844 aa, synthetic construct
  REGION 1..844: note = DNA Polymerase Variant
MHHHHHHGGSGMLPLFDLEEPPKRVLLVDGHHLAYRTFYALSLTTSRGEPVQMVYGFARSLLKALKEDGQAVVVVFDAKAPSFRHEAYEAYKAGRAPTPEDFPRQLALVKRLVDLLGLVRLEAPGYEADDVLGTLAKKAEREGMEVCILTGDRDFFQLLSEKVSVLLPDGTLVTPKDVQERYGVPPERWVDFRALTGDRSDNIPGVAGIGEKTALRLLAEWGSVENLLKNLDRVKPDSLRRKIEAHLEDLRLSLDLVRIRTDLPLEVDFKALRRRTPDLEGLRAFLEELELGSLLHEFGLLGGEKPREEAPWPPPEGAFVGFLLSRKEPMWAELLALAAAAEGRVHRATSPVEALADLKEARGFLAKDLAVLALREGVALDPTDDPLLVAYLLDSANTNPERVARRYGGEFTEDAAERALLSERLFQTLFPRLSEKLLWLYQEVERPLSRVLAHMEARGVRLDVPLLEALSFEAAKELERLEGEVFRLAGHPFNLNSRDQLEKVLFDELGLTPVTRTEKTGKRSTSAAALEALRGVHPIVELILQYRELSKLKSTYLDRLPRLVHPRTGRLHTRFNQTATATGRLSSSDPNLQNIPVRTPLGQHIRKAFVAEEGWLLLAADYSQIELRVLAHLSGDENLKRVFREGKDIHTETAAWMFGVDSALVDPKMRRAAKTVNFGVLYGMSAARLSQELGIDYKEAEAFIERYFQSFPKVRAWIERTLEEGRTRGYVETLFGRRRYVPDLTSRVRSVREAAERMAWNMPVQGTAADLMKIAMVKLFPRLKPLGAHLLLQVHDELVLEVPEDRAEEAKALVKEVMENAYPLDVPLEVEVGVGRDWLEAKQD

SEQ ID NO: 1305 - DNA, 2538 bp, synthetic construct
  misc_feature 1..2538: note = DNA Polymerase Variant
  source 1..2538: mol_type = other DNA
atgcaccatcatcatcatcatggcggtagcggcatgttaccgctgtttgatttggaagaaccaccaaaacgcgtgctgcttgttgacggccatcatctggcgtatcgtaccttctacgcactgagccttacgacctcacgtggtgagcctgtccagatggtgtatgggtttgctcgctccctgctgaaagccctgaaggaagatggtcaagccgtagtagtggttttcgatgcgaaggcaccgtcgtttcgtcacgaagcgtacgaggcctataaagctggccgcgcaccgaccccggaagactttccgcgtcagttagcgctcgtcaaacgcctcgtggatttgctgggattagttcgcttggaagctcctggctacgaggcggacgacgtgctcggtacactggccaagaaagcagaacgtgaaggcatggaggtctgcattcttaccggtgatcgcgatttcttccagctgctgtctgagaaagtgagcgttttgctgcccgatggcacgttagtaaccccgaaagatgtgcaagagaaatatggagttccgccagaacgttgggtggactttcgcgcactgactggtgatcgttcagacaacatcccgggcgttgccgggattggtgaaaagacggcgctgcgcctgctggcagaatggggctcggtggaaaatctgctcaagaaccttgatcgtgtgaaacctgatagcttacgccgcaagatcgaagcccacctggaagacttgcgtctgagtctggatcttgtacgtattcgcaccgatctgccgttggaagtagactttaaagctctgcgtcgtcgcacacccgatttagaggggttacgcgcgttcctcgaagaactggagctgggctccctgctgcatgaattcggtttgttgggcggagagaaaccgcgtgaagaagcaccatggccgccgcccgagggtgcctttgtcggctttcttctgtcacgcaaagagccaatgtgggcggaactgttagctcttgcagccgccgcggaagggcgtgttcaccgcgcgacctctcctgtcgaggccctcgctgacctcaaagaagcacgtggtttcttggcgaaagatttagccgtgcttgcattacgcgaaggcgttgcgctcgatccgacggacgacccgcttttggtggcttatttgctcgatagcgcgaataccaacccggaacgtgtcgcccgtcgttacggcggcgagtttactgaagatgcggcagaacgcgcgttgcttagcgaacgcctcttccagacgttatttccacgtctttcggagaaattactctggctctatcaggaagtcgaacgtccattgagtcgcgtgcttgcccatatggaggctcgcggtgtgcgcttagatgttccgttgttagaagcactcagcttcgaggcggcaaaagaactggaacgtcttgaaggcgaagtctttcgtttagcggggcatcccttcaatctcaactctcgcgaccaattggagaaagtgctctttgatgaattaggtttaacccctgtcacgcgtacagagaagaccggcaaacgttccacttcggcagccgccttggaagcacttcgtggtgtgcacccgatcgtcgagttgattttgcagtatcgcgagctcagcaaactcaaatcaacctatcttgataggttacctcgtcttgttcatccacgtacgggtcgtttacacacccgcttcaatcaaacggcaacagccaccgggcgcttgtcgtcgagtgacccgaacctccagaatattccagtgcgcacgccgctgggccaacacattcgtaaagcgtttgttgcggaagaaggttggttattacttgcggccgattactcccagatcgaacttcgtgtattggcgcatctctctggcgacgagaatcttaaacgcgtgtttcgcgaaggcaaggatattcacactgaaaccgcagcctggatgttcggggtggactcggccttagtggaccccaagatgcgtcgtgccgccaagaccgtcaactttggcgtactctatggtatgtcagcagcacgtcttagtcaggaattgggcattgactacaaagaagctgaagcgtttatcgagcgctatttccaatcctttccgaaagttcgcgcgtggattgaacgtacgctcgaagaaggtcgcactcgcggctatgtggaaacgttattcgggcgtcgtcgctacgttccagatcttacgtctcgtgtccgctcagtgcgcgaagctgctgagcgtatggcctggaatatgcctgttcagggaacagcggcggacctcatgaagatcgccatggtgaaattgtttccgcgcttgaaacccttaggagcccaccttcttctgcaggtgcatgatgaattggtcttggaagtacccgaggatcgcgcagaagaagccaaagcactcgtgaaagaggttatggaagaggcgtatccgttagatgttccgttggaggtcgaagtgggtgtaggccgtgattggcttgaagcgaaacaagactaatga

SEQ ID NO: 1306 - protein, 844 aa, synthetic construct
  REGION 1..844: note = DNA Polymerase Variant
MHHHHHHGGSGMLPLFDLEEPPKRVLLVDGHHLAYRTFYALSLTTSRGEPVQMVYGFARSLLKALKEDGQAVVVVFDAKAPSFRHEAYEAYKAGRAPTPEDFPRQLALVKRLVDLLGLVRLEAPGYEADDVLGTLAKKAEREGMEVCILTGDRDFFQLLSEKVSVLLPDGTLVTPKDVQEKYGVPPERWVDFRALTGDRSDNIPGVAGIGEKTALRLLAEWGSVENLLKNLDRVKPDSLRRKIEAHLEDLRLSLDLVRIRTDLPLEVDFKALRRRTPDLEGLRAFLEELELGSLLHEFGLLGGEKPREEAPWPPPEGAFVGFLLSRKEPMWAELLALAAAAEGRVHRATSPVEALADLKEARGFLAKDLAVLALREGVALDPTDDPLLVAYLLDSANTNPERVARRYGGEFTEDAAERALLSERLFQTLFPRLSEKLLWLYQEVERPLSRVLAHMEARGVRLDVPLLEALSFEAAKELERLEGEVFRLAGHPFNLNSRDQLEKVLFDELGLTPVTRTEKTGKRSTSAAALEALRGVHPIVELILQYRELSKLKSTYLDRLPRLVHPRTGRLHTRFNQTATATGRLSSSDPNLQNIPVRTPLGQHIRKAFVAEEGWLLLAADYSQIELRVLAHLSGDENLKRVFREGKDIHTETAAWMFGVDSALVDPKMRRAAKTVNFGVLYGMSAARLSQELGIDYKEAEAFIERYFQSFPKVRAWIERTLEEGRTRGYVETLFGRRRYVPDLTSRVRSVREAAERMAWNMPVQGTAADLMKIAMVKLFPRLKPLGAHLLLQVHDELVLEVPEDRAEEAKALVKEVMEEAYPLDVPLEVEVGVGRDWLEAKQD

(The sequence listing continues in the following parts.)

What is claimed is:

1. An engineered DNA polymerase, or a functional fragment thereof, comprising an amino acid sequence having at least 80%, 85%, 86%, 87%, 88%, 89%, 90%, 91%, 92%, 93%, 94%, 95%, 96%, 97%, 98%, 99%, or more sequence identity to a reference sequence corresponding to residues 12 to 844 of SEQ ID NO: 2, 220, 226, 272, 328, 546, 710, or 1208, or to a reference sequence corresponding to SEQ ID NO: 2, 220, 226, 272, 328, 546, 710, or 1208, wherein the amino acid sequence comprises one or more mutations relative to the reference sequence corresponding to residues 12 to 844 of SEQ ID NO: 2, 220, 226, 272, 328, 546, 710, or 1208, or relative to the reference sequence corresponding to SEQ ID NO: 2, 220, 226, 272, 328, 546, 710, or 1208.

2. The engineered DNA polymerase of claim 1, comprising an amino acid sequence having at least 80%, 85%, 86%, 87%, 88%, 89%, 90%, 91%, 92%, 93%, 94%, 95%, 96%, 97%, 98%, 99%, or more sequence identity to the reference sequence corresponding to residues 12 to 844 of SEQ ID NO: 2, or to the reference sequence corresponding to SEQ ID NO: 2, wherein the amino acid sequence comprises one or more mutations relative to the reference sequence corresponding to residues 12 to 844 of SEQ ID NO: 2, or relative to the reference sequence corresponding to SEQ ID NO: 2.

3. The engineered DNA polymerase of claim 1, comprising an amino acid sequence having at least 80%, 85%, 86%, 87%, 88%, 89%, 90%, 91%, 92%, 93%, 94%, 95%, 96%, 97%, 98%, 99%, or more sequence identity to the reference sequence corresponding to residues 12 to 844 of SEQ ID NO: 220, 226, 272, 328, 546, 710, or 1208, or to the reference sequence corresponding to SEQ ID NO: 220, 226, 272, 328, 546, 710, or 1208, wherein the amino acid sequence comprises one or more mutations relative to the reference sequence corresponding to residues 12 to 844 of SEQ ID NO: 2, or relative to the reference sequence corresponding to SEQ ID NO: 2.

4. The engineered DNA polymerase of claim 1, comprising an amino acid sequence having at least 80%, 85%, 86%, 87%, 88%, 89%, 90%, 91%, 92%, 93%, 94%, 95%, 96%, 97%, 98%, 99% or more sequence identity to a reference sequence corresponding to residues 12 to 844 of an even numbered SEQ ID NO. of SEQ ID NOs: 4-1378, or to the reference sequence corresponding to an even numbered SEQ ID NO. of SEQ ID NOs: 4-1378, wherein the amino acid sequence comprises one or more mutations relative to the reference sequence corresponding to residues 12 to 844 of SEQ ID NO: 2, or relative to the reference sequence corresponding to SEQ ID NO: 2.

5. The engineered DNA polymerase of any one of claims 1-4, wherein the amino acid sequence of the engineered DNA polymerase comprises at least a mutation at amino acid position 2, 3, 21, 39, 51, 59, 66, 68, 72, 73, 78, 79, 87, 124, 147, 178, 181, 185, 199, 216, 224, 233, 239, 241, 251, 257, 262, 271, 275, 288, 291, 303, 316, 317, 327, 328, 336, 338, 341, 342, 351, 356, 359, 362, 365, 368, 370, 371, 372, 373, 374, 376, 377, 378, 379, 380, 381, 382, 388, 390, 392, 393, 395, 396, 398, 399, 402, 403, 404, 409, 410, 412, 413, 416, 417, 418, 420, 425, 426, 427, 429, 430, 431, 432, 434, 435, 437, 438, 442, 443, 447, 448, 449, 450, 451, 453, 453, 454, 457, 461, 465, 466, 469, 473, 474, 475, 477, 478, 479, 482, 483, 488, 490, 503, 508, 514, 515, 516, 526, 527, 528, 529, 536, 541, 542, 544, 545, 550, 554, 557, 558, 559, 562, 569, 575, 577, 578, 579, 589, 594, 601, 603, 604, 612, 613, 641, 644, 651, 656, 660, 662, 663, 664, 667, 671, 677, 685, 687, 691, 691, 694, 697, 698, 699, 701, 702, 704, 706, 707, 708, 713, 714, 715, 716, 718, 721, 723, 724, 725, 728, 731, 732, 735, 740, 742, 743, 745, 747, 748, 749, 753, 758, 760, 762, 768, 769, 770, 787, 792, 798, 804, 807, 808, 809, 812, 815, 820, 824, 825, or 831, or combinations thereof, wherein the positions are relative to the reference sequence corresponding to SEQ ID NO: 2.

6. The engineered DNA polymerase of any one of claims 1-5, wherein the amino acid sequence of the engineered DNA polymerase comprises at least a mutation 2-, 3N, 21A/G/N, 39F, 51T, 59K, 66R, 68E/G/I/K/Q/R/T, 72A, 731, 78N/S/T/V, 79A/M/R/T, 87V, 124A, 147A/H/M/Q, 178L, 181Q/R, 185T, 199P, 216K, 224L, 233H/K/L, 239V, 241E, 251A/I/L, 257V, 262N, 271G, 275A/T, 288R, 291L, 303T, 316G, 317R, 327E/L, 328L/V, 336E, 338V, 341H/T/Y, 342G, 351H, 356I/S, 359G/V, 362M/P/S, 365T, 368H, 370G/SN, 371L, 372V/Y, 373G/T, 374SN/Y, 376F/S, 377C, 378C/F/L/S, 379G, 380I, 381E/K, 382C/S, 388C/M/P/V, 390S/T, 392A/C/S/T/V, 393G/R/S/W, 395G/H/S, 396F/L/P/R/S, 398G/Q, 399G/T, 402R/Y, 403I, 404T, 409S, 410V/W, 412M/Q/R/V, 413T, 416S, 417R/W, 418K, 420V, 425T, 426T, 427D/F/H/I/L/R/T/Y, 429F, 430G, 431G/L/R/V, 432T, 434N, 435K/P, 437N/P/S, 438F/S, 442G, 443A, 447R/S/W, 448C/I/T/V, 449A/G/L/V, 450V, 451L, 453L/S, 454D/F/G/L/W, 457N/R/W/Y, 461L/Q/S, 465Y, 466Y, 469T/V, 473N, 474A/C/G, 475A/S/V/Y, 477V, 478I/L, 479L, 482S, 483D, 488W, 490W, 503R, 508K, 514I, 515H/T, 516K, 526S, 527A, 528A/S, 529SN, 536V, 541D/G/N/S, 542R, 544M, 545L, 550C/T, 554G/N, 557I, 558G/L/T, 559R, 562K, 569M/Q, 575W, 577S, 578A, 579L/Q, 589G, 594A, 601T, 603M/R, 604H, 612D, 613H/R, 641A, 644Q, 651Q, 656Q/S, 660V, 662S, 663E, 664A, 667S/T/W, 671W, 677L, 685R, 687A, 691S/W, 694D, 697A/I/L/V, 698E, 699V, 701M, 702SN, 704L/V, 706I/S/V, 707W, 708L, 713G, 714I, 715H/L, 716E/L, 718F/Q, 721A/M/N, 723Y, 724F/L, 725V, 728S, 731I/T, 732L/Q, 735L, 740SN, 742K, 743H/V, 745S/T/V, 747S, 748G, 749M, 753A, 758G, 760T/W/Y, 762A, 768S, 769Q, 770E, 787M/N, 792F/Y, 798I, 804R, 807M, 808W/Y, 809K, 812R/S, 815L/R/S/T, 820E/S/T, 824M, 825E, or 831G, or combinations thereof, wherein the positions are relative to the reference sequence corresponding to SEQ ID NO: 2.

7. The engineered DNA polymerase of any one of claims 1-5, wherein the amino acid sequence of the engineered DNA polymerase comprises at least a mutation at amino acid position 478, 515, 526, 527, or 528, or combinations thereof, wherein the positions are relative to the reference sequence corresponding to SEQ ID NO: 2.

8. The engineered DNA polymerase of any one of claims 1-5 and 7, wherein the amino acid sequence of the engineered DNA polymerase comprises at least a mutation 478L, 515T, 526S, 527A, or 528A, or combinations thereof, wherein the positions are relative to the reference sequence corresponding to SEQ ID NO: 2.

9. The engineered DNA polymerase of any one of claims 1-5, wherein the amino acid sequence of the engineered DNA polymerase comprises at least a mutation at amino acid position 147, 257, 291, 395, 402, 474, 475, 478, 514, 515, 526, 527, 528, 536, 559, 604, 660, 662, 687, 745, or 760, or combinations thereof, wherein the positions are relative to the reference sequence corresponding to SEQ ID NO: 2.

10. The engineered DNA polymerase of any one of claims 1-5 and 9, wherein the amino acid sequence of the engineered DNA polymerase comprises at least a mutation 147H, 257V, 291L, 395H/S, 402R, 474A, 475A, 478L, 514I, 515T, 526S, 527A, 528A, 536V, 559R, 604H, 660V, 662S, 687A, 745T, or 760W, or combinations thereof, wherein the positions are relative to the reference sequence corresponding to SEQ ID NO: 2.

11. The engineered DNA polymerase of any one of claims 2-5, wherein the amino acid sequence of the engineered DNA polymerase comprises at least a mutation or mutation set at amino acid position 541/554/557, 516/541/550/554/557, 478/514/526/527, 478/516/526/527/529/541, 288/478/514/516/541/557, 288/478/516/541/550/554/557, 550/554/557, 478, 399, 514/516, 399/516/526/528/529/554/557, 478/516/541, 478/541, 288/399/514/554/557, 478/514/554/557, 288/478/526/550/554, 478/541/550/557, 541, 288/514/526/541, 554/557, 399/478, 288/514/554/557, 478/514/516/526/527/529/557, 399/541/550/554, 516/529/541/554/557, 478/541/554/557, 288/478/526/528/529/554/557, 288/514/516/529/541, 478/514/516/541, 478/514/557, 399/541/557, 399/541, 288/399/516/527/541/557, 288/478/514/541, 288/514/516, 664/698, 399/478/516/541, 399/528/550, 399/478/514/541/557, 288/478/514/516, 224/664, 478/526/527/528, 288/478/514/516/541/550/554, 478/514/541/554, 478/516, 478/514/516/541/554/557, 288/399/478/516/541, 288/478/514/554/557, 288/478/516, 288/399/516/554/557, 550/554, 288/550/554, 288/399/478/516/550/554, 399/514/541/550/554, 288/478/514/554, 199, 288/399/529/541, 399/478/554, 516/528/541/554/557, 39/199/698, 399/478/526/528/529, 288/399/514/541/550/554, 288/541, 288/478/514/550/554/557, 288/399/478/516, 526/529/554/557, 288/478/557, 288/478/514/550/554, 478/541/550/554, 516/526/528, 288/526/528/550/554/557, 199/664/698, 514/526/528/529/550/557, 288, 399/554/557, 288/554/557, 399/514/541, 288/478/514/527/554/557, 399/478/516/541/554, 87/541/554, 288/550/554/557, 527/529/541, 528/529/554, 478/554/557, 478/514/516/541/550/554/557, 199/216/644/664, 396/478/514/554/557/694, 241/644/663/664, 399/478/554/557, 288/399/550, 288/516/526/527/528/557, 399/526/527/528/529, 288/478/526, 399/478/514/516/526/527/528/529/541, 288/399/478/514/554/557, 288/399/514/516/528, 478/554, 399/514/516, 514, 399/550/554, 288/478/514/528/541/554, 478/514/516/554, 478/514/541, 288/541/554/557, 698, or 478/514/526/527/528, wherein the positions are relative to the reference sequence corresponding to SEQ ID NO: 2.

12. The engineered DNA polymerase of claim 1, comprising an amino acid sequence having at least 80%, 85%, 86%, 87%, 88%, 89%, 90%, 91%, 92%, 93%, 94%, 95%, 96%, 97%, 98%, 99%, or more sequence identity to the reference sequence corresponding to residues 12 to 844 of SEQ ID NO: 220, 226, 272, 328, 546, 710, or 1208, or to the reference sequence corresponding to SEQ ID NO: 220, 226, 272, 328, 546, 710, or 1208, wherein the amino acid sequence comprises one or more mutations relative to the reference sequence corresponding to residues 12 to 844 of SEQ ID NO: 220, 226, 272, 328, 546, 710, or 1208, or relative to the reference sequence corresponding to SEQ ID NO: 220, 226, 272, 328, 546, 710, or 1208.

13. The engineered DNA polymerase of claim 1, comprising an amino acid sequence having at least 80%, 85%, 86%, 87%, 88%, 89%, 90%, 91%, 92%, 93%, 94%, 95%, 96%, 97%, 98%, 99%, or more sequence identity to a reference sequence corresponding to residues 12 to 844 of an even numbered SEQ ID NO. of SEQ ID NOs: 4-1378, or to a reference sequence corresponding to an even numbered SEQ ID NO. of SEQ ID NOs: 2-1378, wherein the amino acid sequence comprises one or more mutations relative to the reference sequence corresponding to residues 12 to 844 of SEQ ID NO: 220, 226, 272, 328, 546, 710, or 1208, or relative to the reference sequence corresponding to SEQ ID NO: 220, 226, 272, 328, 546, 710, or 1208.

14. The engineered DNA polymerase of claim 12 or 13, wherein the amino acid sequence of the engineered DNA polymerase comprises at least a mutation at amino acid position 2, 3, 21, 39, 51, 59, 66, 68, 72, 73, 78, 79, 87, 124, 147, 178, 181, 185, 199, 216, 224, 233, 239, 241, 251, 257, 262, 271, 275, 288, 291, 303, 316, 317, 327, 328, 336, 338, 341, 342, 351, 356, 359, 362, 365, 368, 370, 371, 372, 373, 374, 376, 377, 378, 379, 380, 381, 382, 388, 390, 392, 393, 395, 396, 398, 399, 402, 403, 404, 409, 410, 412, 413, 416, 417, 418, 420, 425, 426, 427, 429, 430, 431, 432, 434, 435, 437, 438, 442, 443, 447, 448, 449, 450, 451, 453, 454, 457, 461, 465, 466, 469, 473, 474, 475, 477, 478, 479, 482, 483, 488, 490, 503, 508, 514, 515, 516, 526, 527, 528, 529, 536, 541, 542, 544, 545, 550, 554, 557, 558, 559, 562, 569, 575, 577, 578, 579, 589, 594, 601, 603, 604, 612, 613, 641, 644, 651, 656, 660, 662, 663, 664, 667, 671, 677, 685, 687, 691, 694, 697, 698, 699, 701, 702, 704, 706, 707, 708, 713, 714, 715, 716, 718, 721, 723, 724, 725, 728, 731, 732, 735, 740, 742, 743, 745, 747, 748, 749, 753, 758, 760, 762, 768, 769, 770, 787, 792, 798, 804, 807, 808, 809, 812, 815, 820, 824, 825, or 831, or combinations thereof, wherein the positions are relative to the reference sequence corresponding to SEQ ID NO: 220, 226, 272, 328, 546, 710, or 1208.

15. The engineered DNA polymerase of any one of claims 12-14, wherein the amino acid sequence of the engineered DNA polymerase comprises at least a mutation or an amino acid residue 2-, 3N, 21A/G/N, 39F, 51T, 59K, 66R, 68E/G/I/K/Q/R/T, 72A, 73I, 78N/S/T/V, 79A/M/R/T, 87V, 124A, 147A/H/M/Q, 178L, 181Q/R, 185T, 199P, 216K, 224L, 233H/K/L, 239V, 241E, 251A/I/L, 257V, 262N, 271G, 275A/T, 288R, 291L, 303T, 316G, 317R, 327E/L, 328L/V, 336E, 338V, 341H/T/Y, 342G, 351H, 356I/S, 359G/V, 362M/P/S, 365T, 368H, 370G/SN, 371L, 372V/Y, 373G/T, 374SN/Y, 376F/S, 377C, 378C/F/L/S, 379G, 380I, 381E/K, 382C/S, 388C/M/P/V, 390S/T, 392A/C/S/T/V, 393G/R/S/W, 395G/H/S, 396F/L/P/R/S, 398G/Q, 399G/T, 402R/Y, 403I, 404T, 409S, 410V/W, 412M/Q/R/V, 413T, 416S, 417R/W, 418K, 420V, 425T, 426T, 427D/F/H/I/L/R/T/Y, 429F, 430G, 431G/L/R/V, 432T, 434N, 435K/P, 437N/P/S, 438F/S, 442G, 443A, 447R/S/W, 448C/I/T/V, 449A/G/L/V, 450V, 451L, 453L/S, 454D/F/G/L/W, 457N/R/W/Y, 461L/Q/S, 465Y, 466Y, 469T/V, 473N, 474A/C/G, 475A/S/V/Y, 477V, 478I/L/M, 479L, 482S, 483D, 488W, 490W, 503R, 508K, 514I/V, 515H/T, 516K, 526S, 527A, 528A/G/S, 529SN, 536V, 541D/G/N/S, 542R, 544M, 545L, 550C/T, 554G/N, 557I, 558G/L/T, 559P/R, 562K, 569M/Q, 575W, 577S, 578A, 579L/Q, 589G, 594A, 601T, 603M/R, 604H, 612D, 613H/R, 641A, 644Q, 651Q, 656Q/S, 660V, 662S, 663E, 664A, 667S/T/W, 671W, 677L, 685R, 687A, 691S/W, 694D, 697A/I/L/V, 698E, 699V, 701M, 702SN, 704L/V, 706I/S/V, 707W, 708L, 713G, 714I, 715H/L, 716E/L, 718F/Q, 721A/M/N, 723Y, 724F/L, 725V, 728S, 731I/T, 732L/Q, 735L, 740SN, 742K, 743H/V, 745S/T/V, 747S, 748G, 749M, 753A, 758G, 760T/W/Y, 762A, 768S, 769Q, 770E, 787M/N, 792F/Y, 798I, 804R, 807M, 808W/Y, 809K, 812R/S, 815L/R/S/T, 820E/S/T, 824M, 825E, or 831G, or combinations thereof, wherein the positions are relative to the reference sequence corresponding to SEQ ID NO: 220, 226, 272, 328, 546, 710, or 1208.

16. The engineered DNA polymerase of claim 12, comprising an amino acid sequence having at least 80%, 85%, 86%, 87%, 88%, 89%, 90%, 91%, 92%, 93%, 94%, 95%, 96%, 97%, 98%, 99%, or more sequence identity to the reference sequence corresponding to residues 12 to 844 of SEQ ID NO: 220, or to the reference sequence corresponding to SEQ ID NO: 220, wherein the amino acid sequence comprises one or more mutations relative to the reference sequence corresponding to residues 12 to 844 of SEQ ID NO: 220, or relative to the reference sequence corresponding to SEQ ID NO: 220.

17. The engineered DNA polymerase of claim 13, comprising an amino acid sequence having at least 80%, 85%, 86%, 87%, 88%, 89%, 90%, 91%, 92%, 93%, 94%, 95%, 96%, 97%, 98%, 99%, or more sequence identity to the reference sequence corresponding to residues 12 to 844 of an even-numbered SEQ ID NO of SEQ ID NOs: 222-268, or to the reference sequence corresponding to an even-numbered SEQ ID NO of SEQ ID NOs: 222-268, wherein the amino acid sequence comprises one or more mutations relative to the reference sequence corresponding to residues 12 to 844 of SEQ ID NO: 220, or relative to the reference sequence corresponding to SEQ ID NO: 220.

18. The engineered DNA polymerase of claim 16 or 17, wherein the amino acid sequence of the engineered DNA polymerase comprises at least a mutation or mutation set at amino acid position(s) 515, 594, 559, 760, 541, 753, 402, 398, 758, 399, 575, 257/758, 558, 601, 762, 589, or 544, wherein the positions are relative to the reference sequence corresponding to SEQ ID NO: 220.

19. The engineered DNA polymerase of claim 12, comprising an amino acid sequence having at least 80%, 85%, 86%, 87%, 88%, 89%, 90%, 91%, 92%, 93%, 94%, 95%, 96%, 97%, 98%, 99%, or more sequence identity to the reference sequence corresponding to residues 12 to 844 of SEQ ID NO: 226, or to the reference sequence corresponding to SEQ ID NO: 226, wherein the amino acid sequence comprises one or more mutations relative to the reference sequence corresponding to residues 12 to 844 of SEQ ID NO: 226, or relative to the reference sequence corresponding to SEQ ID NO: 226.

20. The engineered DNA polymerase of claim 13, comprising an amino acid sequence having at least 80%, 85%, 86%, 87%, 88%, 89%, 90%, 91%, 92%, 93%, 94%, 95%, 96%, 97%, 98%, 99%, or more sequence identity to the reference sequence corresponding to residues 12 to 844 of an even-numbered SEQ ID NO of SEQ ID NOs: 270-320, or to the reference sequence corresponding to SEQ ID NO: 270-320, wherein the amino acid sequence comprises one or more mutations relative to the reference sequence corresponding to residues 12 to 844 of SEQ ID NO: 226, or relative to the reference sequence corresponding to SEQ ID NO: 226.

21. The engineered DNA polymerase of claim 19 or 20, wherein the amino acid sequence of the engineered DNA polymerase comprises a mutation or mutation set at amino acid position(s) 515/760, 514/515/760, 478/515/760, 660, 178, 402/515, 377/515, 515, 514/515, 402, 503, 239, 73, 528/541, 59, 515/575, 3/515/559, 377/515/528/541/554/557, 402/514/515/541/559, 514/515/541/559, 514/515/559, 515/559, 515/541/559, 377/515/559, 402/515/559, or 515/541/557, wherein the positions are relative to the reference sequence corresponding to SEQ ID NO: 226.

22. The engineered DNA polymerase of claim 12, comprising an amino acid sequence having at least 80%, 85%, 86%, 87%, 88%, 89%, 90%, 91%, 92%, 93%, 94%, 95%, 96%, 97%, 98%, 99%, or more sequence identity to the reference sequence corresponding to residues 12 to 844 of SEQ ID NO: 272, or to the reference sequence corresponding to SEQ ID NO: 272, wherein the amino acid sequence comprises one or more mutations relative to the reference sequence corresponding to residues 12 to 844 of SEQ ID NO: 272, or to the reference sequence corresponding to SEQ ID NO: 272.

23. The engineered DNA polymerase of claim 13, comprising an amino acid sequence having at least 80%, 85%, 86%, 87%, 88%, 89%, 90%, 91%, 92%, 93%, 94%, 95%, 96%, 97%, 98%, 99%, or more sequence identity to the reference sequence corresponding to residues 12 to 844 of an even-numbered SEQ ID NO. of SEQ ID NOs: 322-534, or to the reference sequence corresponding to an even-numbered SEQ ID NO. of SEQ ID NOs: 322-534, wherein the amino acid sequence comprises one or more mutations relative to the reference sequence corresponding to residues 12 to 844 of SEQ ID NO: 272, or relative to the reference sequence corresponding to SEQ ID NO: 272.

24. The engineered DNA polymerase of claim 22 or 23, wherein the amino acid sequence of the engineered DNA polymerase comprises at least a mutation or mutation set at amino acid position(s) 402/528/541/660, 257/604/660, 178/257/402/404/528/557/660, 402/604/660, 257/402/541/660, 377/402/541/660, 257/377/402/660, 483/660, 257/402, 257, 257/377, 178/660, 257/377/402, 660, 178/257/377/402/403/483/604/660, 377, 178/402/403/528/541/660, 377/601/660, 178/377, 377/490/660, 402/403/483/554/557, 178/257/377/558/660, 257/402/403/483/660, 178/554/557/558/660, 554/557/660, 178/483/541/545/554/557/604/660, 792, 402/403/483/604/660, 178, 474, 257/377/541/604, 743, 396, 479, 377/403/541/604, 475, 178/257/403/528, 448, 577, 395, 769, 691, 677, 704, 377/541/575/604/660, 178/257/601/604, 685, 377/604/660, 749, 482, 291, 579, 178/541/550/604, 477, 178/257, 257/402/490/528/541/660, 328, 740, 368, 721/745, 578, 687, 541/601/604, 257/528, 257/528/554, 768, 770, 257/377/483/541, 542, 257/402/403, 257/403/541, 604, 402/604, 257/316/541/575/604, 327, 403/541/604/660, 257/377/403/483/541/601/604, or 402/528/541/601, wherein the positions are relative to the reference sequence corresponding to SEQ ID NO: 272.

25. The engineered DNA polymerase of claim 12, comprising an amino acid sequence having at least 80%, 85%, 86%, 87%, 88%, 89%, 90%, 91%, 92%, 93%, 94%, 95%, 96%, 97%, 98%, 99%, or more sequence identity to the reference sequence corresponding to residues 12 to 844 of SEQ ID NO: 328, or to the reference sequence corresponding to SEQ ID NO: 328, wherein the amino acid sequence comprises one or more mutations relative to the reference sequence corresponding to residues 12 to 844 of SEQ ID NO: 328, or to the reference sequence corresponding to SEQ ID NO: 328.

26. The engineered DNA polymerase of claim 13, comprising an amino acid sequence having at least 80%, 85%, 86%, 87%, 88%, 89%, 90%, 91%, 92%, 93%, 94%, 95%, 96%, 97%, 98%, 99%, or more sequence identity to the reference sequence corresponding to residues 12 to 844 of an even-numbered SEQ ID NO. of SEQ ID NOs: 536-674, or to the reference sequence corresponding to an even-numbered SEQ ID NO of SEQ ID NOs: 536-674, wherein the amino acid sequence comprises one or more mutations relative to the reference sequence corresponding to residues 12 to 844 of SEQ ID NO: 328, or relative to the reference sequence corresponding to SEQ ID NO: 328.

27. The engineered DNA polymerase of claim 25 or 26, wherein the amino acid sequence of the engineered DNA polymerase comprises at least a mutation or mutation set at amino acid position(s) 79, 257/474, 677, 562, 178/395/745, 291/395/687/745, 257/395/677, 303/338, 474/475, 359, 474/475/677/704, 395/687, 671, 233, 699, 379, 257/792, 257/395, 21, 257/448/474/475, 713, 641, 442, 656, 475/704, 742, 667, 257/448, 257/316/395/482/687/745, 804, 704, 178/257/395/482/579/687/745, 257/579, 257/291/395/475/541/687, 257/768, 812, 475, 662, 536, 748, 808, 291/316/395/687, 613, 257/291/316, 257/291/579, 257/316/541/745, 351, 257/316/395/745, 185, 257/316/687, 291/316/475/687/745, 257/291/395/740/745, 450, 473, 124, 430, 413, 66, or 365, wherein the positions are relative to the reference sequence corresponding to SEQ ID NO: 328.

28. The engineered DNA polymerase of claim 12, comprising an amino acid sequence having at least 80%, 85%, 86%, 87%, 88%, 89%, 90%, 91%, 92%, 93%, 94%, 95%, 96%, 97%, 98%, 99%, or more sequence identity to the reference sequence corresponding to residues 12 to 844 of SEQ ID NO: 546, or to the reference sequence corresponding to SEQ ID NO: 546, wherein the amino acid sequence comprises one or more mutations relative to the reference sequence corresponding to residues 12 to 844 of SEQ ID NO: 546, or to the reference sequence corresponding to SEQ ID NO: 546.

29. The engineered DNA polymerase of claim 13, comprising an amino acid sequence having at least 80%, 85%, 86%, 87%, 88%, 89%, 90%, 91%, 92%, 93%, 94%, 95%, 96%, 97%, 98%, 99%, or more sequence identity to the reference sequence corresponding to residues 12 to 844 of an even-numbered SEQ ID NO. of SEQ ID NOs: 676-1190, or to the reference sequence corresponding to an even-numbered SEQ ID NO. of SEQ ID NOs: 676-1190, wherein the amino acid sequence comprises one or more mutations relative to the reference sequence corresponding to residues 12 to 844 of SEQ ID NO: 546, or relative to the reference sequence corresponding to SEQ ID NO: 546.

30. The engineered DNA polymerase of claim 28 or 29, wherein the amino acid sequence of the engineered DNA polymerase comprises at least a mutation or mutation set at amino acid position(s) 438, 697, 457, 716, 79/474/536/699, 536, 392, 708, 431, 395/474/536/699, 453, 427, 79/395/699, 378, 370, 706, 257/395/474/475/536/662, 474/536/562, 257/395/474/536, 79/257/395/474/475/536/562, 79/395/536/699, 372, 257/395/792, 390, 79/474/536/699/792, 409, 443, 448, 381, 707, 416, 474/475/662, 79/395/474/475/536/792, 474/475/536/662, 382, 257/474/536/562/662, 257/395/474/475/792, 79/474/662/699, 725, 447, 79/257/699, 701, 257/474/475/536/562/662, 702, 342/716, 233/562/713, 704, 474/475/536/562/662, 454, 327/427, 257/316/474/536/792, 417, 425, 536/562, 714, 233, 303/613, 21/79/303/562/613, 79/562, 435, 257/536/699/792, 79/536, 453/667, 79/303/338/613/804/812, 79/257/395/536/662/792, 79/338/562, 79/233/303/662, 79/662/699, 79/395/475/662, 79/536/562/699, 536/662, 21/79/338/641/699, 662, 21/79/442/699, 79/303/662, 79/178/257/662/699, 79/257/536/562/662, 562/699, 359/613/742/808/812, 21/79/338/379/562/662/804/812, 731, 21/79/359/442/662, 79/338/359/562, 21/613/662/742, 21/79/303/662/699/742/808, 21/79/338/442/613/699, 79/303/338/562/613/662, 303/338/562/699/808/812, 79/257, 257/662/792, 79/536/699, 79/359/713/742/808, 21/359/442/808/812, 79/257/475/536/662, 21/79/338, 79/713, 79/562/641, 373, 79/178/257/316/536/662, 21/233/338/562/662, 257/316/536, 21/79/303/442/662, 21/79/233/303/338/379/562/713, 338/442/699, 426, 21/338/359/808/812, 79/178/233/442/562/812, 79/474/536/662/699, 21/79/338/379/662, 721, 21/79/233/338/613/641, 374, 338/359/379, 461, 451, 715, 79/303/338/641/713, 393, 79/257/474/536/699, 79, 437, 257/536/562/662, 21/79/379/442/562/662, 362, 410, 338/812, 21/662/808/812, 21/303/338, 418, 338/442, 449, 379/641, 316/536/562, 257/536/792, 21/79/442/613, 257/536/662/792, 257/474/529/536/662, 412, 79/257/536/662/699, 257/316/475/536/792, 388, 380/454, 21/79/233/303/613/699/809, 724, 21/79/338/613, 79/178/536/792, 449/747, 21/79/379/613/713, 79/316/536/662/699, 376, 21/562/662, 79/257/262/536/562/699, 718, 395/475/536/562/662/699, 79/233/338/359/379/442/562/613/812, 371, 316/475/562/662/792, 79/257/316/792, 728, 79/233/338, 432, 79/178/257/316/395/536/662/699, 79/303/713, 233/379/442/562/613/662/713, 21/742, 732, 79/257/395/562/662/699, 21/233/338/379/442/562/613/662/812, 429, 562/699, 2/374, 723, 434, 420, or 699, wherein the positions are relative to the reference sequence corresponding to SEQ ID NO: 546.

31. The engineered DNA polymerase of claim 12, comprising an amino acid sequence having at least 80%, 85%, 86%, 87%, 88%, 89%, 90%, 91%, 92%, 93%, 94%, 95%, 96%, 97%, 98%, 99%, or more sequence identity to the reference sequence corresponding to residues 12 to 844 of SEQ ID NO: 710, or to the reference sequence corresponding to SEQ ID NO: 710, wherein the amino acid sequence comprises one or more mutations relative to the reference sequence corresponding to residues 12 to 844 of SEQ ID NO: 710, or to the reference sequence corresponding to SEQ ID NO: 710.

32. The engineered DNA polymerase of claim 13, comprising an amino acid sequence having at least 80%, 85%, 86%, 87%, 88%, 89%, 90%, 91%, 92%, 93%, 94%, 95%, 96%, 97%, 98%, 99%, or more sequence identity to the reference sequence corresponding to residues 12 to 844 of an even-numbered SEQ ID NO. of SEQ ID NOs: 1192-1326, or to the reference sequence corresponding to an even-numbered SEQ ID NO. of SEQ ID NOs: 1192-1326, wherein the amino acid sequence comprises one or more mutations relative to the reference sequence corresponding to residues 12 to 844 of SEQ ID NO: 710, or relative to the reference sequence corresponding to SEQ ID NO: 710.

33. The engineered DNA polymerase of claim 31 or 32, wherein the amino acid sequence of the engineered DNA polymerase comprises at least a mutation or mutation set at amino acid position(s) 68, 78, 466, 807, 612, 147, 356, 488, 603, 271, 508, 787, 412/417/427, 251, 697, 562, 79/434/562, 820, 275, 378/381/697, 469, 412/417/697, 798, 79/388, 651, 825, 51, 370, 745, 815, 465, 317, 569, 341, 824, 18, 181, 735, or 336, wherein the positions are relative to the reference sequence corresponding to SEQ ID NO: 710.

34. The engineered DNA polymerase of claim 12, comprising an amino acid sequence having at least 80%, 85%, 86%, 87%, 88%, 89%, 90%, 91%, 92%, 93%, 94%, 95%, 96%, 97%, 98%, 99%, or more sequence identity to the reference sequence corresponding to residues 12 to 844 of SEQ ID NO: 1208, or to the reference sequence corresponding to SEQ ID NO: 1208, wherein the amino acid sequence comprises one or more mutations relative to the reference sequence corresponding to residues 12 to 844 of SEQ ID NO: 1208, or to the reference sequence corresponding to SEQ ID NO: 1208.

35. The engineered DNA polymerase of claim 13, comprising an amino acid sequence having at least 80%, 85%, 86%, 87%, 88%, 89%, 90%, 91%, 92%, 93%, 94%, 95%, 96%, 97%, 98%, 99%, or more sequence identity to the reference sequence corresponding to residues 12 to 844 of an even-numbered SEQ ID NO. of SEQ ID NOs: 1328-1378, or to the reference sequence corresponding to an even-numbered SEQ ID NO. of SEQ ID NOs: 1328-1378, wherein the amino acid sequence comprises one or more mutations relative to the reference sequence corresponding to residues 12 to 844 of SEQ ID NO: 1208, or relative to the reference sequence corresponding to SEQ ID NO: 1208.

36. The engineered DNA polymerase of claim 34 or 35, wherein the amino acid sequence of the engineered DNA polymerase comprises at least a mutation or mutation set at amino acid position(s) 603/612/798, 68/603, 68/78/370, 370, 251/798, 68/370/603/612, 51/370/412/603/612, 412/603/798, 251/370/412/612, 370/798, 78/251, 251, 68/370/508/798, 251/370/508, 78/508, 78/370/697/798, 51/251, 68/370/508/603/697, 78/251/370/697/798, 78/603/798/831, 370/412/508/612, 72/508/798, 51/251/412/798, 51/251/370/508/603/798, 68/78/251/370/603/612/697, or 51/68/251/370/603, wherein the positions are relative to the reference sequence corresponding to SEQ ID NO: 1208.

37. The engineered DNA polymerase of claim 1, wherein the amino acid sequence comprises at least one mutation or mutation set provided in Table 4.1, 5.1, 5.2, 6.1, 6.2, 7.1, 7.2, 8.1, 8.2, 9.1, 9.2, 9.3, 10.1, 10.2, 11.1, and 11.2, wherein the mutation or mutation set is relative to the reference sequence corresponding to residues 12 to 844 of SEQ ID NO: 2, 220, 226, 272, 328, 546, 710, or 1208, or to the reference sequence corresponding to SEQ ID NO: 2, 220, 226, 272, 328, 546, 710, or 1208.

38. The engineered DNA polymerase of claim 1, comprising an amino acid sequence having at least 80%, 85%, 86%, 87%, 88%, 89%, 90%, 91%, 92%, 93%, 94%, 95%, 96%, 97%, 98%, 99% or more sequence identity to the sequence corresponding to residues 12 to 844 of an even numbered SEQ ID NO. of SEQ ID NOs: 4-1378, or to the sequence corresponding to an even numbered SEQ ID NO. of SEQ ID NOs: 2-1378.

39. The engineered DNA polymerase of claim 1, wherein the DNA polymerase comprises an amino acid sequence comprising residues 12 to 844 of an even numbered SEQ ID NO. of SEQ ID NOs: 4-1378, or the amino acid sequence comprising an even numbered SEQ ID NO. of SEQ ID NOs: 2-1378, wherein the amino acid sequence optionally has 1, 2, 3, 4, 5, 6, 7, 8, 9, or up to 10 substitutions in the amino acid sequence.

40. The engineered DNA polymerase of claim 39, wherein the amino acid sequence has 1, 2, 3, 4, up to 5 substitutions.

41. The engineered DNA polymerase of claim 39 or 40, wherein the substitutions comprise conservative substitutions.

42. The engineered DNA polymerase of claim 1, wherein the engineered DNA polymerase comprises an amino acid sequence comprising residues 12 to 844 of SEQ ID NO: 220, 226, 272, 328, 546, 710, or 1208, or comprises SEQ ID NO: 2, 220, 226, 272, 328, 546, 710, or 1208.

43. The engineered DNA polymerase of any one of claims 1-42, wherein the engineered DNA polymerase further comprises a fusion polypeptide.

44. The engineered DNA polymerase of any one of claims 1-43, wherein the engineered DNA polymerase has DNA polymerase activity and at least one improved property as compared to a reference DNA polymerase having a sequence corresponding to residues 12 to 844 of SEQ ID NO: 2, 220, 226, 272, 328, 546, 710, or 1208, or to a sequence corresponding to SEQ ID NO: 2, 220, 226, 272, 328, 546, 710, or 1208.

45. The engineered DNA polymerase of claim 44, wherein the improved property is selected from i) increased activity, ii) increased stability, iii) increased thermostability, iv) increased processivity, v) increased fidelity vi) increased input DNA template sensitivity, vii) increased product yield, and viii) increased resistance or tolerance to inhibitor(s), or any combination of i), ii), iii), vi), v), vi), vii), and viii), compared to the reference DNA polymerase having a sequence corresponding to residues 12 to 844 of SEQ ID NO: 2, or a sequence corresponding to SEQ ID NO: 2, 220, 226, 272, 328, 546, 710, or 1208.

46. The engineered DNA polymerase of claim 44 or 45, wherein the reference DNA polymerase has the sequence corresponding to residues 12 to 844 of SEQ ID NO: 2 or the sequence corresponding to SEQ ID NO: 2.

47. The engineered DNA polymerase of any one of claims 1-46, wherein the engineered DNA polymerase is purified.

48. A recombinant polynucleotide comprising a polynucleotide sequence encoding an engineered DNA polymerase of any one of claims 1-46.

49. The recombinant polynucleotide of claim 48, comprising a polynucleotide sequence having at least 75%, 80%, 85%, 90%, 91%, 92%, 93%, 94%, 95%, 96%, 97%, 98%, 99%, or more sequence identity to a reference polynucleotide sequence corresponding to nucleotide residues 34 to 2532 of an odd numbered SEQ ID NO. of SEQ ID NOS: 1-1377, or to a reference polynucleotide sequence corresponding an odd numbered SEQ ID NO. of SEQ ID NOs: 1-1377, wherein the recombinant polynucleotide encodes a DNA polymerase.

50. The recombinant polynucleotide of claim 48 or 49, comprising a polynucleotide sequence having at least 75%, 80%, 85%, 90%, 91%, 92%, 93%, 94%, 95%, 96%, 97%, 98%, 99%, or more sequence identity to a reference polynucleotide sequence corresponding to nucleotide residues 34 to 2532 of SEQ ID NO: 1, 219, 225, 271, 327, 545, 709, or 1207, or to a reference polynucleotide sequence corresponding to SEQ ID NO: 1, 219, 225, 271, 327, 545, 709, or 1207, wherein the recombinant polynucleotide encodes a DNA polymerase.

51. The recombinant polynucleotide sequence of any one of claims 48-50, wherein the polynucleotide sequence is codon-optimized.

52. The recombinant polynucleotide of claim 48, wherein the polynucleotide sequence comprises nucleotide residues 34 to 2532 of SEQ ID NO: 1, 219, 225, 271, 327, 545, 709, or 1207, or comprises SEQ ID NO: 1, 219, 225, 271, 327, 545, 709, or 1207.

53. The recombinant polynucleotide of claim 48, wherein the polynucleotide sequence comprises residues 34 to 2532 of an odd numbered SEQ ID NO. of SEQ ID NOs: 1-1377, or comprises an odd numbered SEQ ID NO. of SEQ ID NOs: 1-1377.

54. An expression vector comprising at least one recombinant polynucleotide of any one of claims 48-53.

55. The expression vector of claim 54, wherein the recombinant polynucleotide is operably linked to a control sequence.

56. The expression vector of claim 55, wherein the control sequence comprises a promoter.

57. A host cell comprising an expression vector of any one of claims 54-56.

58. The host cell of claim 57, comprising a bacterial cell, fungal cell, or mammalian cell.

59. A method of producing an engineered DNA polymerase polypeptide in a host cell comprising culturing a host cell of claim 57 or 58, under suitable culture conditions, such that at least one engineered DNA polymerase is produced.

60. The method of claim 59, further comprising recovering at least one engineered DNA polymerase from the culture and/or host cells.

61. The method of claim 59 or 60, further comprising a step of purifying the at least one engineered DNA polymerase.

62. A composition comprising a DNA polymerase having a sequence comprising residues 12 to 844 of SEQ ID NO: 2, or a sequence comprising SEQ ID NO: 2, or at least one engineered DNA polymerase of any one of claims 1-47.

63. The composition of claim 62, comprising at least a buffer.

64. The composition of claim 62 or 63, further comprising one or more nucleotide substrates.

65. The composition of any one of claims 62-64, further comprising one or more oligonucleotide primer substrates.

66. The composition of any one of claims 62-65, further comprising a heterologous template DNA substrate.

67. A method of preparing a complementary DNA of a target DNA, comprising contacting a target DNA with a DNA polymerase comprising an amino acid sequence comprising residues 12 to 844 of SEQ ID NO: 2, or an amino acid sequence comprising SEQ ID NO: 2, or an engineered DNA polymerase of any one of claims 1-47 in presence of substrates under conditions suitable for production of a complementary DNA to all or a portion of the target DNA.

68. A method for detecting presence of a target DNA, comprising contacting a sample suspected of containing a target DNA with a DNA polymerase comprising an amino acid sequence comprising residues 12 to 844 of SEQ ID NO: 2, or an amino acid sequence comprising SEQ ID NO: 2, or an engineered DNA polymerase of any one of claims 1-47 in presence of substrates under conditions suitable for DNA polymerase mediated production of a DNA complementary to all or a portion of the target DNA, and detecting presence of the complementary DNA.

69. The method of claim 68, wherein the complementary DNA is detected by amplifying the complementary DNA.

70. The method of claim 69, wherein the amplifying is by polymerase chain reaction (PCR) or isothermal amplification.

71. The method of claim 70, wherein the isothermal amplification is by loop-mediated isothermal amplification (LAMP).

72. A method of amplifying a target DNA, comprising contacting a target DNA with a DNA polymerase comprising an amino acid sequence comprising residues 12 to 844 of SEQ ID NO: 2, or an amino acid sequence comprising SEQ ID NO: 2, or an engineered DNA polymerase of any one of claims 1-47 in presence of substrates under conditions suitable for amplifying the target DNA.

73. The method of claim 72, wherein the conditions is for polymerase chain reaction.

74. The method of claim 72, wherein the conditions is for LAMP.

75. A method of sequencing a target DNA, comprising contacting a target DNA with a DNA polymerase comprising an amino acid sequence comprising residues 12 to 844 of SEQ ID NO: 2, or an amino acid sequence comprising SEQ ID NO: 2, or an engineered DNA polymerase of any one of claims 1-47 in presence of substrates appropriate for sequencing under conditions suitable for DNA polymerase mediated extension of a complementary DNA of the target DNA, and determining the sequence of the target DNA.

76. A kit comprising at least a DNA polymerase comprising an amino acid sequence comprising residues 12 to 844 of SEQ ID NO: 2, or an amino acid sequence comprising SEQ ID NO: 2, or at least one engineered DNA polymerase of any one of claims 1-47.

77. The kit of claim 76, further comprising one or more of a buffer, nucleotide substrate, and an oligonucleotide primer substrate.

78. The kit of claim 76 or 77, further comprising a template DNA.

79. The kit of claim 78, wherein the template DNA is a control template DNA.
